(19) United States
(12) Patent Application Publication
(10) Pub. No.: US 2011/0004955 A1
(43) Pub. Date: Jan. 6, 2011

(54) Transgenic plants with enhanced agronomic traits

(75) Inventors: Mark Abad, Webster Groves, MO (US); Erin Bell, St. Louis, MO (US); R. Eric Cerny, Chesterfield, MO (US); Jaishree M. Chittoor-Vijayanath, Wildwood, MO (US); Molian Deng, Grover, MO (US); Michael D. Edgerton, St. Louis, MO (US); Karen K. Gabbert, St. Louis, MO (US); Barry S. Goldman, St. Louis, MO (US); Brian Hauge, Wildwood, MO (US); Steve He, St. Louis, MO (US); Jacqueline E. Heard, Webster Groves, MO (US); Ping Li, St. Peters, MO (US); Linda Lutfiyya, St. Louis, MO (US); Bradley McDill, Smithton, IL (US); Robert J. Meister, St. Peters, MO (US); Peter Morrell, Chesterfiled, MO (US); Anil Neelam, Wildwood, MO (US); Marie Petracek, Glendale, MO (US); John Pitkin, Wildwood, MO (US); M. S. Rajani, St. louis, MO (US); Maria F. Rodriguez, Kirkwood, MO (US); Thomas Ruff, Wildwood, MO (US); T. V. Venkatesh, St. Louis, MO (US); Xiaoyun Wu, Chesterfield, MO (US); Jianmin Zhao, St. Louis, MO (US); Albert Iandolino, Davis, CA (US); Monica Ravanello, Fairfield, CA (US); Kraig Brustad, Stonington, CT (US); Paul Chomet, Mystic, CT (US); Julie Davis, North Stonington, CT (US); Virginia Ursin, Pawcatuck, CT (US); T. Ambika, Bangalore (IN); Shobha Char, Bangalore (IN); Savitha Madappa, Bangalore (IN); Dhanalakshmi Ramachandra, Banglore (IN); S. Sangeetha, Bangalore (IN); K. R. Vidya, Bangalore (IN); K. Vijayalakshmi, Bangalore (IN); Todd Dezwaan, Apex, NC (US)

Correspondence Address: Schwegman Lundberg & Woessner/ Monsanto, P.O. Box 2938, Minneapolis, MN, 55402, US

(73) Assignee: Monsanto Technology LLC, St. Louis, MO (US)

(21) Appl. No.: 12/322,120

(22) Filed: Jan. 29, 2009

Related U.S. Application Data
(60) Provisional application No. 61/024,667, filed on Jan. 30, 2008.
(60) Provisional application No. 61/035,103, filed on Mar. 10, 2008.
(60) Provisional application No. 61/047,017, filed on Apr. 22, 2008.
(60) Provisional application No. 61/048,708, filed on Apr. 29, 2008.
(60) Provisional application No. 61/078,027, filed on Jul. 3, 2008.

(51) Int. Cl. A01H 5/00; A01H 1/02; C12N 15/82; C12N 5/10; C12Q 1/68

(52) U.S. Cl. 800/275; 800/298; 800/320.1; 800/312; 800/314; 800/306; 800/320; 800/320.3; 800/320.2; 435/320.1; 435/419; 435/6

(57) ABSTRACT

This invention provides transgenic plant cells with recombinant DNA for expression of proteins that are useful for imparting enhanced agronomic trait(s) to transgenic crop plants. This invention also provides transgenic plants and progeny seed comprising the transgenic plant cells where the plants are selected for having an enhanced trait selected from the group of traits consisting of enhanced water use efficiency, enhanced cold tolerance, increased yield, enhanced nitrogen use efficiency, enhanced seed protein and enhanced seed oil. Also disclosed are methods for manufacturing transgenic seed and plants with enhanced traits.

### CROSS REFERENCE TO RELATED APPLICATIONS

[0001] This application claims benefit under 35 USC §119(e) of U.S. provisional application Ser. Nos. 61/024,667, filed Jan. 30, 2008, 61/035,103, filed Mar. 10, 2008, 61/047,017, filed Apr. 22, 2008, 61/048,708, filed Apr. 29, 2008, and 61/078,027, filed Jul. 3, 2008, each of which is incorporated herein by reference in its entirety.

### INCORPORATION OF SEQUENCE LISTING

[0002] Two copies of the sequence listing (Copy 1 and Copy 2) and a computer readable form (CRF) of the sequence listing, all on CD-Rs, each containing the text file named “55591_B_seq_listing.txt”, which is 74,407,936 bytes (measured in MS-WINDOWS), were created on Jan. 27, 2009 and are incorporated herein by reference.

### INCORPORATION OF LARGE TABLE

[0003] Two copies of a large table (Copy 1 and Copy 2) containing a folder “pfamdir” on CD-Rs are incorporated herein by reference in their entirety. Folder “pfamdir” contains 103 Pfam Hidden Markov Models. The CD-Rs were created on Jan. 27, 2009, having a total size of 7,665,424 bytes (measured in MS-WINDOWS).

LENGTHY TABLES
The patent application contains a lengthy table section. A copy of the table is available in electronic form from the USPTO web site (http://seqdata.uspto.gov/?pageRequest=docDetail&DocID=US20110004955A1). An electronic copy of the table will also be available from the USPTO upon request and payment of the fee set forth in 37 CFR 1.19(b)(3).

### FIELD OF THE INVENTION

[0004] Disclosed herein are recombinant DNA useful for providing enhanced traits to transgenic plants, seeds, pollen, plant cells and plant nuclei of such transgenic plants, methods of making and using such recombinant DNA, plants, seeds, pollen, plant cells and plant nuclei. Also disclosed are methods of producing hybrid corn seed comprising such recombinant DNA. All genetic resources disclosed herein were directly obtained from sources that are currently common to the United States; the ancestral sources of each specific genetic material is unknown.

### SUMMARY OF THE INVENTION

[0005] An aspect of this invention provides recombinant DNA constructs comprising polynucleotides characterized by an encoded protein having amino acids representing a protein family domain module as described in Table 10. Another aspect of this invention provides recombinant DNA constructs comprising polynucleotides characterized by an encoded protein with an amino acid sequence that is at least 90% identical to a corresponding consensus sequence defined in table 8. Yet another aspect of this invention provides recombinant DNA constructs comprising polynucleotides characterized by reference to SEQ ID NO:1-121 and the cognate proteins with amino acid sequences having reference to SEQ ID NO:122-242. The recombinant DNA constructs are useful for providing enhanced traits when stably integrated into the chromosomes and expressed in the nuclei of transgenic plants cells. In some aspects of the invention the recombinant DNA constructs, when expressed in a plant cell, provide for expression of cognate proteins. In those aspects of the invention, the recombinant DNA constructs for expressing cognate proteins are characterized by cognate amino acid sequences having a sequence selected from SEQ ID NOs: 123-140, 145-151, 153-173, 175-187, 189, 191-202, 204-207, 209-238, and 242; having at least 95% identity over at least 95% of the length of a sequence selected from the group consisting of SEQ ID NOs: 123-140, 145-151, 153-173, 175-187, 189, 191-202, 204-207, 209-238, and 242 or that are homologous to a sequence selected from the group consisting of SEQ ID NOs: 123-140, 145-151, 153-173, 175-187, 189, 191-202, 204-207, 209-238, and 242.

[0006] In other aspects of the invention the recombinant DNA constructs provide for suppression of a native protein. In those other aspects of the invention the recombinant DNA constructs are characterized as being constructed with sense-oriented and anti-sense-oriented polynucleotides, e.g. polynucleotides derived from genes having SEQ ID NOs: 1, 20-23, 31, 53, 67, 69, 82, 87, and 118-120 or homologous genes. When the recombinant DNA construct is expressed in corn plants, the endogenous protein is a corn protein with an amino acid sequence of SEQ ID NO:141-144, 152, 174, 190, 203, 208, or 239-240 or the corn homolog of SEQ ID NOs:122, 188, or 241; when the recombinant DNA construct is expressed in soybean plants, the endogenous protein is a soybean protein with an amino acid sequence of SEQ ID NO: 122, 188, or 241 or is a soybean homolog of SEQ ID NOs: 141-144, 152, 174, 190, 203, 208, or 239-240; and when the recombinant DNA construct is expressed in a plant other than a corn or a soybean plant, the endogenous protein is the other plant's endogenous protein that has an amino acid sequence homologous to SEQ ID NO: 122, 141-144, 152, 174, 188, 190, 203, 208, or 239-241.

[0007] In practical aspects of this invention the recombinant DNA constructs of the invention are stably integrated into the chromosome of a plant cell nucleus.

[0008] This invention also provides transgenic plant cells comprising the stably integrated recombinant DNA constructs of the invention, transgenic plants and seeds comprising a plurality of such transgenic plant cells and transgenic pollen of such plants. Such transgenic plants are selected from a population of transgenic plants regenerated from plant cells transformed with recombinant DNA constructs by screening transgenic plants for an enhanced trait as compared to control plants. The enhanced trait is one or more of enhanced water use efficiency, enhanced cold tolerance, increased yield, enhanced nitrogen use efficiency, enhanced seed protein and enhanced seed oil.

[0009] In another aspect of the invention the plant cells, plants, seeds, and pollen further comprise DNA expressing a protein that provides tolerance from exposure to an herbicide applied at levels that are lethal to a wild type plant cell.

[0010] This invention also provides methods for manufacturing non-natural, transgenic seed that. can be used to produce a crop of transgenic plants with an enhanced trait resulting from expression of a stably-integrated recombinant DNA construct. More specifically, the method comprises (a) screening a population of plants for an enhanced trait and a recombinant DNA construct, where individual plants in the population can exhibit the trait at a level less than, essentially the same as or greater than the level that the trait is exhibited in control plants, (b) selecting from the population one or more plants that exhibit the trait at a level greater than the level that said trait is exhibited in control plants, (c) collecting seed from a selected plant, (d) verifying that the recombinant DNA is stably integrated in said selected plants, (e) analyzing tissue of a selected plant to determine the production or suppression of a protein having the function of a protein encoded by nucleotides in a sequence of one of SEQ ID NOs:1-121. In one aspect of the invention, the plants in the population further comprise DNA expressing a protein that provides tolerance to exposure to a herbicide applied at levels that are lethal to wild type plant cells and the selecting is affected by treating the population with the herbicide, e.g. a glyphosate, dicamba, or glufosinate compound. In another aspect of the invention the plants are selected by identifying plants with the enhanced trait. The methods are especially useful for manufacturing corn, soybean, cotton, canola, alfalfa, wheat, rice, sugarcane or sugar beet seed.

[0011] Another aspect of the invention provides a method of producing hybrid corn seed comprising acquiring hybrid corn seed from a herbicide tolerant corn plant which also has stably-integrated, recombinant DNA construct comprising a promoter that is (a) functional in plant cells and (b) is operably linked to DNA that encodes or suppresses a protein having the function of a protein encoded by nucleotides in a sequence of one of SEQ ID NOs:1-121. The methods further comprise producing corn plants from said hybrid corn seed, wherein a fraction of the plants produced from said hybrid corn seed is homozygous for said recombinant DNA, a fraction of the plants produced from said hybrid corn seed is hemizygous for said recombinant DNA, and a fraction of the plants produced from said hybrid corn seed has none of said recombinant DNA; selecting corn plants which are homozygous and hemizygous for said recombinant DNA by treating with an herbicide; collecting seed from herbicide-treated-surviving corn plants and planting said seed to produce further progeny corn plants; repeating the selecting and collecting steps at least once to produce an inbred corn line; and crossing the inbred corn line with a second corn line to produce hybrid seed.

[0012] Another aspect of the invention provides a method of selecting a plant comprising plant cells of the invention by using an immunoreactive antibody to detect the presence or absence of protein expressed or suppressed by recombinant DNA in seed or plant tissue. Yet another aspect of the invention provides anti-counterfeit milled seed having, as an indication of origin, plant cells of this invention.

[0013] Still other aspects of this invention relate to transgenic plants with enhanced water use efficiency or enhanced nitrogen use efficiency. For instance, this invention provides methods of growing a corn, cotton, soybean, or canola crop without irrigation water comprising planting seed having plant cells of the invention which are selected for enhanced water use efficiency. Alternatively methods comprise applying reduced irrigation water, e.g. providing up to 300 millimeters of ground water during the production of a corn crop. This invention also provides methods of growing a corn, cotton, soybean or canola crop without added nitrogen fertilizer comprising planting seed having plant cells of the invention which are selected for enhanced nitrogen use efficiency.

[0014] Another aspect of the invention provides a mixture comprising plants cells and an antibody to a protein produced in the cells where the protein has an amino acid sequence that has at least 95% identity over at least 95% of the length of a reference sequence selected from the group consisting of SEQ ID NO: 122-242 when the sequence is aligned to the reference sequence.

### BRIEF DESCRIPTION OF THE DRAWINGS

[0015] FIGS. 1-4 are plasmid maps.

### DETAILED DESCRIPTION OF THE INVENTION

[0016] In the attached sequence listing:

[0017] SEQ ID NO:1-121 are nucleotide sequences of the coding strand of DNA for “genes” used in the recombinant DNA imparting an enhanced trait in plant cells, i.e. each represents a coding sequence for a protein;

[0018] SEQ ID NO: 122-242 are amino acid sequences of the cognate protein of the “genes” with nucleotide coding sequences 1-121;

[0019] SEQ ID NO: 243-17376 are amino acid sequences of homologous proteins;

[0020] SEQ ID NO: 17377 is a nucleotide sequence of a base plasmid vector useful for corn transformation;

[0021] SEQ ID NO: 17378 is a nucleotide sequence of a base plasmid vector useful for soybean and canola transformation;

[0022] SEQ ID NO: 17379 is a nucleotide sequence of a base plasmid vector useful for cotton transformation;

[0023] SEQ ID NO: 17380 is a nucleotide sequence of a base plasmid vector useful for co-transformation to produce gene stacks in corn;

[0024] SEQ ID NO: 17381-17402 are consensus sequences.

[0025] Table 8 lists the protein SEQ ID NOs and their corresponding consensus SEQ ID NOs.

[0026] As used herein a “plant cell” means a plant cell that is transformed with stably-integrated, non-natural, recombinant DNA, e.g. by Agrobacterium-mediated transformation or by bombardment using microparticles coated with recombinant DNA or other means. A plant cell of this invention can be an originally-transformed plant cell that exists as a microorganism or as a progeny plant cell that is regenerated into differentiated tissue, e.g. into a transgenic plant with stably-integrated, non-natural recombinant DNA, or seed or pollen derived from a progeny transgenic plant.

[0027] As used herein a “transgenic plant” means a plant whose genome has been altered by the stable integration of recombinant DNA. A transgenic plant includes a plant regenerated from an originally-transformed plant cell and progeny transgenic plants from later generations or crosses of a transformed plant.

[0028] As used herein “recombinant DNA” means DNA which has been a genetically engineered and constructed outside of a cell including DNA containing naturally occurring DNA or cDNA or synthetic DNA.

[0029] As used herein “consensus sequence” means an artificial sequence of amino acids in a conserved region of an alignment of amino acid sequences of homologous proteins, e.g. as determined by a CLUSTALW alignment of amino acid sequence of homolog proteins.

[0030] As used herein a “homolog” means a protein in a group of proteins that perform the same biological function, e.g. proteins that belong to the same Pfam protein family and that provide a common enhanced trait in transgenic plants of this invention. Homologs are expressed by homologous genes. With reference to homologous genes, homologs include orthologs, i.e. genes expressed in different species that evolved from a common ancestral genes by speciation and encode proteins retain the same function, but do not include paralogs, i.e. genes that are related by duplication but have evolved to encode proteins with different functions. Homologous genes include naturally occurring alleles and artificially-created variants. Degeneracy of the genetic code provides the possibility to substitute at least one base of the protein encoding sequence of a gene with a different base without causing the amino acid sequence of the polypeptide produced from the gene to be changed. When optimally aligned, homolog proteins have at least 60% identity, more preferably about 65% or higher, more preferably about 70% or higher, more preferably at least 75%, more preferably at least 80%, more preferably at least 85%, more preferably at least 90% identity, more preferably at least 95, 96, 97, 98, or 99% identity over the full length of a protein identified as being associated with imparting an enhanced trait when expressed in plant cells. In one aspect of the invention homolog proteins have an amino acid sequence that has at least 90% identity to a consensus amino acid sequence of proteins and homologs disclosed herein.

[0031] Homologs are identified by comparison of amino acid sequence, e.g. manually or by use of a computer-based tool using known homology-based search algorithms such as the suite of BLAST programs available from NCBI. A local sequence alignment program, e.g. BLAST, can be used to search a database of sequences to find similar sequences, and the summary Expectation value (E-value) used to measure the sequence base similarity. Because a protein hit with the best E-value for a particular organism may not necessarily be an ortholog, i.e. have the same function, or be the only ortholog, a reciprocal query is used to filter hit sequences with significant E-values for ortholog identification. The reciprocal query entails search of the significant hits against a database of amino acid sequences from the base organism that are similar to the sequence of the query protein. A hit can be identified as an ortholog, when the reciprocal query's best hit is the query protein itself or a protein encoded by a duplicated gene after speciation. A further aspect of the homologs encoded by DNA useful in the transgenic plants of the invention are those proteins that differ from a disclosed protein as the result of deletion or insertion of one or more amino acids in a native sequence.

[0032] Percent identity describes the extent to which the sequences of DNA or protein segments are invariant in an alignment of sequences, for example nucleotide sequences or amino acid sequences. An alignment of sequences is created by manually aligning two sequences, e.g. a stated sequence, as provided herein, as a reference, and another sequence, to produce the highest number of matching elements, e.g. individual nucleotides or amino acids, while allowing for the introduction of gaps into either sequence. An “identity fraction” for a sequence aligned with a reference sequence is the number of matching elements, divided by the full length of the reference sequence, not including gaps introduced by the alignment process into the reference sequence. “Percent identity” (“% identity”) as used herein is the identity fraction times 100.

[0033] “Pfam” is a large collection of multiple sequence alignments and hidden Markov models covering many common protein families, e.g. Pfam version 19.0 (December 2005) contains alignments and models for 8183 protein families and is based on the Swissprot 47.0 and SP-TrEMBL 30.0 protein sequence databases. See S. R. Eddy, “Profile Hidden Markov Models”, Bioinformatics 14:755-763, 1998. The Pfam database is currently maintained and updated by the Pfam Consortium. The alignments represent some evolutionary conserved structure that has implications for the protein's function. Profile hidden Markov models (profile HMMs) built from the protein family alignments are useful for automatically recognizing that a new protein belongs to an existing protein family even if the homology by alignment appears to be low.

[0034] Protein domains are identified by querying the amino acid sequence of a protein against Hidden Markov Models which characterize protein family domains (“Pfam domains”) using HMMER software, which is available from the Pfam Consortium. The HMMER software is also disclosed in patent application publication US 2008/0148432 A1 incorporated herein by reference. A protein domain meeting the gathering cutoff for the alignment of a particular Pfam domain is considered to contain the Pfam domain.

[0035] A “Pfam domain module” is a representation of Pfam domains in a protein, in order from N terminus to C terminus. In a Pfam domain module individual Pfam domains are separated by double colons “::”. The order and copy number of the Pfam domains from N to C terminus are attributes of a Pfam domain module. Although the copy number of repetitive domains is important, varying copy number often enables a similar function. Thus, a Pfam domain module with multiple copies of a domain should define an equivalent Pfam domain module with variance in the number of multiple copies. A Pfam domain module is not specific for distance between adjacent domains, but contemplates natural distances and variations in distance that provide equivalent function. The Pfam database contains both narrowly- and broadly-defined domains, leading to identification of overlapping domains on some proteins. A Pfam domain module is characterized by non-overlapping domains. Where there is overlap, the domain having a function that is more closely associated with the function of the protein (based on the E value of the Pfam match) is selected.

[0036] Once one DNA is identified as encoding a protein which imparts an enhanced trait when expressed in transgenic plants, other DNA encoding proteins with the same Pfam domain module are identified by querying the amino acid sequence of protein encoded by candidate DNA against the Hidden Markov Models which characterizes the Pfam domains using HMMER software. Candidate proteins meeting the same Pfam domain module are in the protein family and have cognate DNA that is useful in constructing recombinant DNA for the use in the plant cells of this invention. Hidden Markov Model databases for use with HMMER software in identifying DNA expressing protein with a common Pfam domain module for recombinant DNA in the plant cells of this invention are included in the large table incorporated into this application.

[0037] The HMMER software and Pfam databases (version 19.0) were used to identify known domains in the proteins corresponding to amino acid sequence of SEQ ID NOs: 123-132, 134-135, 137, 139-140, 142, 145-152, 154, 156-172, 175-181, 183-196, 198-202, 204-205, 207, 209-211, 213, 216, 218-228, 230-233, 235, 238-239, 241-242. All DNA encoding proteins that have scores higher than the gathering cutoff disclosed in Table 11 by Pfam analysis disclosed herein can be used in recombinant DNA of the plant cells of this invention, e.g. for selecting transgenic plants having enhanced agronomic traits. The relevant Pfams modules for use in this invention, as more specifically disclosed below, are 14-3-3, 2OG-FeII_Oxy, AhpC-TSA::1cysPrx_C, AP2, B3::Auxin_resp::AUX_IAA, Brix, CBFB_NFYA, CBFD_NFYB_HMF, Cellulose_synt, Copine, DnaJ, DUF231, DUF260, DUF296, DUF761, DUF778, E2F_TDP, efhand, FAR1::FAR1, F-box, Fer2::Fer2_{—}2::FAD_binding_{—}5::CO_deh_flav_C::Ald_Xan_dh_C::Ald_Xan_dh_C2, GATase_{—}2::Glu_syn_central::Glu_synthase::GXGXG, Gln-synt_N::Gln-synt_C, Globin, Glu_synthase, Glyco_hydro_{—}18, Glyco_transf 20::Trehalose_PPase, Glycos_transf 1, GMC_oxred_N, GSHPx, HEAT::HEAT::FAT::Rapamycin_bind::PI3-PI4_kinase::FATC, HLH, HSP20, HSP70, LRRNT_{—}2::LRR_{—}1::LRR_{—}1::LRR_{—}1::Pkinase_Tyr, Mannitol_dh::Mannitol_dh_C, Na_H_Exchanger, NAPRTase, Nucleoside_tran, PALP, PAS_{—}2::GAF::Phytochrome::PAS, PAS_{—}2::GAF::Phytochrome::PAS::PAS::H isKA::HATPase_c, PAS_{—}3::PAS::Pkinase, PDZ::Peptidase_S41, Peptidase_S10, Peptidase_S51, PPR::PPR::PPR::PPR::PPR::PPR::PPR::PPR::PPR::PPR::PPR, PTR2, RAMP4, Response_reg, RimK::Mur_ligase_M::Mur_ligase_C, RNase_PH_C, SAM_{—}1::DRMBL, SAP::PHD::zf-MIZ, SAP::zf-MIZ, SNF2-N::Helicase_C, Spermine_synth, SRF-TF, SSF, Synaptobrevin, TP6A_N, TrkH, UDPGP, XRN_N::zf-CCHC, zf-A20::zf-AN1, and zf-B_box, for which databases are included in the appended computer listing.

[0038] As used herein “promoter” means regulatory DNA for initializing transcription. A “plant promoter” is a promoter capable of initiating transcription in plant cells whether or not its origin is a plant cell, e.g. is it well known that Agrobacterium promoters are functional in plant cells. Thus, plant promoters include promoter DNA obtained from plants, plant viruses and bacteria such as Agrobacterium and Bradyrhizobium bacteria. Examples of promoters under developmental control include promoters that preferentially initiate transcription in certain tissues, such as leaves, roots, or seeds. Such promoters are referred to as “tissue preferred”. Promoters that initiate transcription only in certain tissues are referred to as “tissue specific”. A “cell type” specific promoter primarily drives expression in certain cell types in one or more organs, for example, vascular cells in roots or leaves. An “inducible” or “repressible” promoter is a promoter which is under environmental control. Examples of environmental conditions that may effect transcription by inducible promoters include anaerobic conditions, or certain chemicals, or the presence of light. Tissue specific, tissue preferred, cell type specific, and inducible promoters constitute the class of “non-constitutive” promoters. A “constitutive” promoter is a promoter which is active under most conditions.

[0039] As used herein “operably linked” means the association of two or more DNA fragments in a recombinant DNA construct so that the function of one, e.g. protein-encoding DNA, is controlled by the other, e.g. a promoter.

[0040] As used herein “expressed” means produced, e.g. a protein is expressed in a plant cell when its cognate DNA is transcribed to mRNA that is translated to the protein.

[0041] As used herein “suppressed” means decreased, e.g. a protein is suppressed in a plant cell when there is a decrease in the amount and/or activity of the protein in the plant cell. The presence or activity of the protein can be decreased by any amount up to and including a total loss of protein expression and/or activity.

[0042] As used herein a “control plant” means a plant that does not contain the recombinant DNA that imparts an enhanced trait. A control plant is used to identify and select a transgenic plant that has an enhanced trait. A suitable control plant can be a non-transgenic plant of the parental line used to generate a transgenic plant, i.e. devoid of recombinant DNA. A suitable control plant may in some cases be a progeny of a hemizygous transgenic plant line that does not contain the recombinant DNA, known as a negative segregant.

[0043] As used herein an “enhanced trait” means a characteristic of a transgenic plant that includes, but is not limited to, an enhance agronomic trait characterized by enhanced plant morphology, physiology, growth and development, yield, nutritional enhancement, disease or pest resistance, or environmental or chemical tolerance. In more specific aspects of this invention enhanced trait is selected from group of enhanced traits consisting of enhanced water use efficiency, enhanced cold tolerance, increased yield, enhanced nitrogen use efficiency, enhanced seed protein and enhanced seed oil. In an important aspect of the invention the enhanced trait is enhanced yield including increased yield under non-stress conditions and increased yield under environmental stress conditions. Stress conditions may include, for example, drought, shade, fungal disease, viral disease, bacterial disease, insect infestation, nematode infestation, cold temperature exposure, heat exposure, osmotic stress, reduced nitrogen nutrient availability, reduced phosphorus nutrient availability and high plant density. “Yield” can be affected by many properties including without limitation, plant height, pod number, pod position on the plant, number of internodes, incidence of pod shatter, grain size, efficiency of nodulation and nitrogen fixation, efficiency of nutrient assimilation, resistance to biotic and abiotic stress, carbon assimilation, plant architecture, resistance to lodging, percent seed germination, seedling vigor, and juvenile traits. Yield can also be affected by efficiency of germination (including germination in stressed conditions), growth rate (including growth rate in stressed conditions), ear number, seed number per ear, seed size, composition of seed (starch, oil, protein) and characteristics of seed fill.

[0044] Increased yield of a transgenic plant of the present invention can be measured in a number of ways, including test weight, seed number per plant, seed weight, seed number per unit area (i.e. seeds, or weight of seeds, per acre), bushels per acre, tons per acre, or kilo per hectare. For example, corn yield may be measured as production of shelled corn kernels per unit of production area, for example in bushels per acre or metric tons per hectare, often reported on a moisture adjusted basis, for example at 15.5 percent moisture. Increased yield may result from improved utilization of key biochemical compounds, such as nitrogen, phosphorous and carbohydrate, or from improved responses to environmental stresses, such as cold, heat, drought, salt, and attack by pests or pathogens. Recombinant DNA used in this invention can also be used to provide plants having improved growth and development, and ultimately increased yield, as the result of modified expression of plant growth regulators or modification of cell cycle or photosynthesis pathways. Also of interest is the generation of transgenic plants that demonstrate enhanced yield with respect to a seed component that may or may not correspond to an increase in overall plant yield. Such properties include enhancements in seed oil, seed molecules such as protein and starch, oil components as may be manifest by an alterations in the ratios of seed components.

[0045] Recombinant DNA constructs are assembled using methods well known to persons of ordinary skill in the art and typically comprise a promoter operably linked to DNA, the expression of which provides the enhanced agronomic trait. Other construct components may include additional regulatory elements, such as 5′ leaders and introns for enhancing transcription, 3′ untranslated regions (such as polyadenylation signals and sites), DNA for transit or signal peptides.

[0046] Numerous promoters that are active in plant cells have been described in the literature.

[0047] These include promoters present in plant genomes as well as promoters from other sources, including nopaline synthase (NOS) promoter and octopine synthase (OCS) promoters carried on tumor-inducing plasmids of Agrobacterium tumefaciens and the CaMV35S promoters from the cauliflower mosaic virus as disclosed in U.S. Pat. Nos. 5,164,316 and 5,322,938. Useful promoters derived from plant genes are found in U.S. Pat. No. 5,641,876 which discloses a rice actin promoter, U.S. Pat. No. 7,151,204 which discloses a maize chloroplast aldolase promoter and a maize aldolase (FDA) promoter, and US Patent Application Publication 2003/0131377 A1 which discloses a maize nicotianamine synthase promoter. These and numerous other promoters that function in plant cells are known to those skilled in the art and available for use in recombinant polynucleotides of the present invention to provide for expression of desired genes in transgenic plant cells.

[0048] Furthermore, the promoters may be altered to contain multiple “enhancer sequences” to assist in elevating gene expression. Such enhancers are known in the art. By including an enhancer sequence with such constructs, the expression of the selected protein may be enhanced. These enhancers often are found 5′ to the start of transcription in a promoter that functions in eukaryotic cells, but can often be inserted upstream (5′) or downstream (3′) to the coding sequence. In some instances, these 5′ enhancing elements are introns. Particularly useful as enhancers are the 5′ introns of the rice actin 1 (see U.S. Pat. No. 5,641,876) and rice actin 2 genes, the maize alcohol dehydrogenase gene intron, the maize heat shock protein 70 gene intron (U.S. Pat. No. 5,593,874) and the maize shrunken 1 gene. See also US Patent Application Publication 2002/0192813A1 which discloses 5′, 3′ and intron elements useful in the design of effective plant expression vectors.

[0049] In other aspects of the invention, sufficient expression in plant seed tissues is desired to affect improvements in seed composition. Exemplary promoters for use for seed composition modification include promoters from seed genes such as napin as disclosed in U.S. Pat. No. 5,420,034, maize L3 oleosin as disclosed in U.S. Pat. No. 6,433,252), zein Z27 as disclosed by Russell et al. (1997) Transgenic Res. 6(2):157-166), globulin 1 as disclosed by Belanger et al (1991) Genetics 129:863-872), glutelin 1 as disclosed by Russell (1997) supra), and peroxiredoxin antioxidant (Per1) as disclosed by Stacy et al. (1996) Plant Mol. Biol. 31(6):1205-1216.

[0050] Recombinant DNA constructs useful in this invention will also generally include a 3′ element that typically contains a polyadenylation signal and site. Well-known 3′ elements include those from Agrobacterium tumefaciens genes such as nos 3′, tml 3′, tmr 3′, tms 3′, ocs 3′, tr7 3′, for example disclosed in U.S. Pat. No. 6,090,627; 3′ elements from plant genes such as wheat (Triticum aesevitum) heat shock protein 17 (Hsp17 3′), a wheat ubiquitin gene, a wheat fructose-1,6-biphosphatase gene, a rice glutelin gene, a rice lactate dehydrogenase gene and a rice beta-tubulin gene, all of which are disclosed in US Patent Application Publication 2002/0192813 A1; and the pea (Pisum sativum) ribulose biphosphate carboxylase gene (rbs 3′), and 3′ elements from the genes within the host plant.

[0051] Constructs and vectors may also include a transit peptide for targeting of a gene to a plant organelle, particularly to a chloroplast, leucoplast or other plastid organelle. For descriptions of the use of chloroplast transit peptides see U.S. Pat. No. 5,188,642 and U.S. Pat. No. 5,728,925. For description of the transit peptide region of an Arabidopsis EPSPS gene useful in the present invention, see Klee, H. J. et al (MGG (1987) 210:437-442).

[0052] Recombinant DNA constructs for gene suppression can be designed for any of a number the well-known methods for suppressing transcription of a gene, the accumulation of the mRNA corresponding to that gene or preventing translation of the transcript into protein. Posttranscriptional gene suppression can be practically effected by transcription of RNA that forms double-stranded RNA (dsRNA) having homology to mRNA produced from a gene targeted for suppression.

[0053] Gene suppression can also be achieved by insertion mutations created by transposable elements may also prevent gene function. For example, in many dicot plants, transformation with the T-DNA of Agrobacterium may be readily achieved and large numbers of transformants can be rapidly obtained. Also, some species have lines with active transposable elements that can efficiently be used for the generation of large numbers of insertion mutations, while some other species lack such options. Mutant plants produced by Agrobacterium or transposon mutagenesis and having altered expression of a polypeptide of interest can be identified using the polynucleotides of the present invention. For example, a large population of mutated plants may be screened with polynucleotides encoding the polypeptide of interest to detect mutated plants having an insertion in the gene encoding the polypeptide of interest.

[0054] Transgenic plants may comprise a stack of one or more polynucleotides disclosed herein resulting in the production or suppression of multiple polypeptide sequences. Transgenic plants comprising stacks of polynucleotide sequences can be obtained by either or both of traditional breeding methods or through genetic engineering methods. These methods include, but are not limited to, breeding individual lines each comprising a polynucleotide of interest, transforming a transgenic plant comprising a gene disclosed herein with a subsequent gene, and co-transformation of genes into a single plant cell. Co-transformation of genes can be carried out using single transformation vectors comprising multiple genes or genes carried separately on multiple vectors.

[0055] Transgenic plants comprising or derived from plant cells of this invention transformed with recombinant DNA can be further enhanced with stacked traits, e.g. a crop plant having an enhanced trait resulting from expression of DNA disclosed herein in combination with herbicide and/or pest resistance traits. For example, genes of the current invention can be stacked with other traits of agronomic interest, such as a trait providing herbicide resistance, or insect resistance, such as using a gene from Bacillus thuringensis to provide resistance against lepidopteran, coliopteran, homopteran, hemiopteran, and other insects. Herbicides for which transgenic plant tolerance has been demonstrated and the method of the present invention can be applied include, but are not limited to, glyphosate, dicamba, glufosinate, sulfonylurea, bromoxynil and norflurazon herbicides. Polynucleotide molecules encoding proteins involved in herbicide tolerance are well-known in the art and include, but are not limited to, a polynucleotide molecule encoding 5-enolpyruvylshikimate-3-phosphate synthase (EPSPS) disclosed in U.S. Pat. Nos. 5,094,945; 5,627,061; 5,633,435 and 6,040,497 for imparting glyphosate tolerance; polynucleotide molecules encoding a glyphosate oxidoreductase (GOX) disclosed in U.S. Pat. No. 5,463,175 and a glyphosate-N-acetyl transferase (GAT) disclosed in US Patent Application Publication 2003/0083480 A1 also for imparting glyphosate tolerance; dicamba monooxygenase disclosed in US Patent Application Publication 2003/0135879 A1 for imparting dicamba tolerance; a polynucleotide molecule encoding bromoxynil nitrilase (Bxn) disclosed in U.S. Pat. No. 4,810,648 for imparting bromoxynil tolerance; a polynucleotide molecule encoding phytoene desaturase (crtI) described in Misawa et al, (1993) Plant J. 4:833-840 and in Misawa et al, (1994) Plant J. 6:481-489 for norflurazon tolerance; a polynucleotide molecule encoding acetohydroxyacid synthase (AHAS, aka ALS) described in Sathasiivan et al. (1990) Nucl. Acids Res. 18:2188-2193 for imparting tolerance to sulfonylurea herbicides; polynucleotide molecules known as bar genes disclosed in DeBlock, et al. (1987) EMBO J. 6:2513-2519 for imparting glufosinate and bialaphos tolerance; polynucleotide molecules disclosed in US Patent Application Publication 2003/010609 A1 for imparting N-amino methyl phosphonic acid tolerance; polynucleotide molecules disclosed in U.S. Pat. No. 6,107,549 for imparting pyridine herbicide resistance; molecules and methods for imparting tolerance to multiple herbicides such as glyphosate, atrazine, ALS inhibitors, isoxoflutole and glufosinate herbicides are disclosed in U.S. Pat. No. 6,376,754 and US Patent Application Publication 2002/0112260. Molecules and methods for imparting insect/nematode/virus resistance are disclosed in U.S. Pat. Nos. 5,250,515; 5,880,275; 6,506,599; 5,986,175 and US Patent Application Publication 2003/0150017 A1.

### Plant Cell Transformation Methods

[0056] Numerous methods for transforming chromosomes in a plant cell nucleus with recombinant DNA are known in the art and are used in methods of preparing a transgenic plant cell nucleus cell, and plant. Two effective methods for such transformation are Agrobacterium-mediated transformation and microprojectile bombardment. Microprojectile bombardment methods are illustrated in U.S. Pat. No. 5,015,580 (soybean); U.S. Pat. No. 5,550,318 (corn); U.S. Pat. No. 5,538,880 (corn); U.S. Pat. No. 5,914,451 (soybean); U.S. Pat. No. 6,160,208 (corn); U.S. Pat. No. 6,399,861 (corn); U.S. Pat. No. 6,153,812 (wheat) and U.S. Pat. No. 6,365,807 (rice) and Agrobacterium-mediated transformation is described in U.S. Pat. No. 5,159,135 (cotton); U.S. Pat. No. 5,824,877 (soybean); U.S. Pat. No. 5,463,174 (canola); U.S. Pat. No. 5,591,616 (corn); U.S. Pat. No. 5,846,797 (cotton); U.S. Pat. No. 6,384,301 (soybean), U.S. Pat. No. 7,026,528 (wheat) and U.S. Pat. No. 6,329,571 (rice), US Patent Application Publication 2004/0087030 A1 (cotton), and US Patent Application Publication 2001/0042257 A1 (sugar beet), all of which are incorporated herein by reference for enabling the production of transgenic plants. Transformation of plant material is practiced in tissue culture on a nutrient media, i.e. a mixture of nutrients that will allow cells to grow in vitro. Recipient cell targets include, but are not limited to, meristem cells, hypocotyls, calli, immature embryos and gametic cells such as microspores, pollen, sperm and egg cells. Callus may be initiated from tissue sources including, but not limited to, immature embryos, hypocotyls, seedling apical meristems, microspores and the like. Cells containing a transgenic nucleus are grown into transgenic plants.

[0057] In addition to direct transformation of a plant material with a recombinant DNA, a transgenic plant cell nucleus can be prepared by crossing a first plant having cells with a transgenic nucleus with recombinant DNA with a second plant lacking the transgenic nucleus. For example, recombinant DNA can be introduced into a nucleus from a first plant line that is amenable to transformation to transgenic nucleus in cells that are grown into a transgenic plant which can be crossed with a second plant line to introgress the recombinant DNA into the second plant line. A transgenic plant with recombinant DNA providing an enhanced trait, e.g. enhanced yield, can be crossed with transgenic plant line having other recombinant DNA that confers another trait, for example herbicide resistance or pest resistance, to produce progeny plants having recombinant DNA that confers both traits. Typically, in such breeding for combining traits the transgenic plant donating the additional trait is a male line and the transgenic plant carrying the base traits is the female line. The progeny of this cross will segregate such that some of the plants will carry the DNA for both parental traits and some will carry DNA for one parental trait; such plants can be identified by markers associated with parental recombinant DNA, e.g. marker identification by analysis for recombinant DNA or, in the case where a selectable marker is linked to the recombinant, by application of the selecting agent such as a herbicide for use with a herbicide tolerance marker, or by selection for the enhanced trait. Progeny plants carrying DNA for both parental traits can be crossed back into the female parent line multiple times, for example usually 6 to 8 generations, to produce a progeny plant with substantially the same genotype as one original transgenic parental line but for the recombinant DNA of the other transgenic parental line

[0058] In the practice of transformation DNA is typically introduced into only a small percentage of target plant cells in any one transformation experiment. Marker genes are used to provide an efficient system for identification of those cells that are stably transformed by receiving and integrating a recombinant DNA molecule into their genomes. Preferred marker genes provide selective markers which confer resistance to a selective agent, such as an antibiotic or a herbicide. Any of the herbicides to which plants of this invention may be resistant are useful agents for selective markers. Potentially transformed cells are exposed to the selective agent. In the population of surviving cells will be those cells where, generally, the resistance-conferring gene is integrated and expressed at sufficient levels to permit cell survival. Cells may be tested further to confirm stable integration of the exogenous DNA. Commonly used selective marker genes include those conferring resistance to antibiotics such as kanamycin and paromomycin (nptII), hygromycin B (aph IV), spectinomycin (aadA) and gentamycin (aac3 and aacC4) or resistance to herbicides such as glufosinate (bar or pat), dicamba (DMO) and glyphosate (aroA or EPSPS). Examples of such selectable markers are illustrated in U.S. Pat. Nos. 5,550,318; 5,633,435; 5,780,708 and 6,118,047. Markers which provide an ability to visually screen transformants can also be employed, for example, a gene expressing a colored or fluorescent protein such as a luciferase or green fluorescent protein (GFP) or a gene expressing a beta-glucuronidase or uidA gene (GUS) for which various chromogenic substrates are known.

[0059] Plant cells that survive exposure to the selective agent, or plant cells that have been scored positive in a screening assay, may be cultured in regeneration media and allowed to mature into plants. Developing plantlets regenerated from transformed plant cells can be transferred to plant growth mix, and hardened off, for example, in an environmentally controlled chamber at about 85% relative humidity, 600 ppm CO₂, and 25-250 microeinsteins m⁻² s⁻¹ of light, prior to transfer to a greenhouse or growth chamber for maturation. Plants are regenerated from about 6 weeks to 10 months after a transformant is identified, depending on the initial tissue, and plant species. Plants may be pollinated using conventional plant breeding methods known to those of skill in the art and seed produced, for example self-pollination is commonly used with transgenic corn. The regenerated transformed plant or its progeny seed or plants can be tested for expression of the recombinant DNA and selected for the presence of enhanced agronomic trait.

### Transgenic Plants and Seeds

[0060] Transgenic plants derived from transgenic plant cells having a transgenic nucleus of this invention are grown to generate transgenic plants having an enhanced trait as compared to a control plant and produce transgenic seed and haploid pollen of this invention. Such plants with enhanced traits are identified by selection of transformed plants or progeny seed for the enhanced trait. For efficiency a selection method is designed to evaluate multiple transgenic plants (events) comprising the recombinant DNA, for example multiple plants from 2 to 20 or more transgenic events. Transgenic plants grown from transgenic seed provided herein demonstrate improved agronomic traits that contribute to increased yield or other trait that provides increased plant value, including, for example, improved seed quality. Of particular interest are plants having enhanced water use efficiency, enhanced cold tolerance, increased yield, enhanced nitrogen use efficiency, enhanced seed protein and enhanced seed oil.

Table 1 provides a list of protein encoding DNA (“genes”) that are useful as recombinant DNA for production of transgenic plants with enhanced agronomic trait, the elements of Table 1 are described by reference to:
“PEP SEQ ID NO” identifies an amino acid sequence from SEQ ID NO: 122 to 242.
“NUC SEQ ID NO” identifies a DNA sequence from SEQ ID NO:1 to 121.
“Gene ID” refers to an arbitrary identifier.
“Gene Name” denotes a common name for the protein encoded by the recombinant DNA preceded by the abbreviated genus and species as fully defined in the sequence listing. The + or − preceding the gene name indicates whether the protein is expressed (+) or suppressed (−) in plants to provide an enhanced trait.
“Annotation” refers to a description of the top hit protein obtained from an amino acid sequence query of each PEP SEQ ID NO to GENBANK database of the National Center for Biotechnology Information (ncbi).

TABLE 1

| NUC | PEP | | | |
|---|---|---|---|---|
| SEQ ID | SEQ ID | | | |
| NO | NO | Gene ID | Gene Name | Annotation |
| 1 | 122 | Mnom000132-Mnom000134 | −Gm.GW2 | emb\|CAN66658.1\|hypothetical protein [Vitis |
| | | | | vinifera] |
| 2 | 123 | Mnom000202 | +At.CGPG5239 | gb\|ABM06011.1\|At1g67800 [Arabidopsis |
| | | | | thaliana] |
| 3 | 124 | Mnom000215-Mnom000216 | +Ta.NF-YA1 | ref\|NP_001048285.1\|Os02g0776400 [Oryza |
| | | | | sativa (japonica cultivar-group)] |
| 4 | 125 | Mnom000219-Mnom000220 | +Zm.NF- | ref\|NP_001060230.1\|Os07g0606600 [Oryza |
| | | | YB3/7/8 | sativa (japonica cultivar-group)] |
| 5 | 126 | Mnom000256-Mnom000257 | +Bs.GOGATII | ref\|NP_388541.1\|hypothetical protein BSU06590 |
| | | | | [Bacillus subtilis subsp. subtilis str. 168] |
| 6 | 127 | Mnom000260-Mnom000261 | +Zm.TOR | gb\|AAW78347.1\|target of rapamycin [Zea mays] |
| 7 | 128 | Mnom000262 | +Zm.APO1 | dbj\|BAD45387.1\|putative stamina pistilloidia |
| | | | | [Oryza sativa (japonica |
| | | | | cultivar-group)] |
| 8 | 129 | Mnom000324 | +Gm.PTI4-3 | AF245119_1 AP2-related transcription factor |
| | | | MRT3847_21399C | [Mesembryanthemum crystallinum] |
| 9 | 130 | Mnom000372 | +Sc.SIZ1 | gb\|AAB64849.1\|Ydr409wp; CAI: 0.12 |
| | | | | [Saccharomyces cerevisiae] |
| 10 | 131 | Mnom000412-Mnom000413 | +Os.GF14h | gb\|ABA94733.1\|14-3-3, putative, expressed |
| | | | | [Oryza sativa (japonica |
| | | | | cultivar-group)] |
| 11 | 132 | Mnom000444 | +Lb. | dbj\|BAA12858.1\|ferredoxin-dependent glutamate |
| | | | Ferredoxin- | synthase [Leptolyngbya boryana] |
| | | | dependent | |
| | | | glutamate | |
| | | | synthase | |
| 12 | 133 | Mnom000451 | +Gm.G3083-like 2 | gb\|EAY72627.1\|hypothetical protein |
| | | | | OsI_000474 [Oryza sativa (indica cultivar- |
| | | | | group)] |
| 13 | 134 | Mnom000471 | +Sc.TPS-TPP | ref\|NP_010359.1\|Phosphatase subunit of the |
| | | | | trehalose-6-phosphate synthase/phosphatase |
| | | | | complex, which synthesizes the |
| | | | | storage carbohydrate trehalose; expression is |
| | | | | induced by stress conditions and repressed by the |
| | | | | Ras-cAMP pathway [Saccharomyces cerevisiae] |
| 14 | 135 | Mnom000480 | +Zm.A1ZM027162_at_OSJ | >gb\|EAY93657.1\|hypothetical protein |
| | | | NBa0020I02.17 | OsI_014890 [Oryza sativa (indica cultivar- |
| | | | protein | group)] |
| 15 | 136 | Mnom000481 | +Zm.A1ZM003077_s_at_Os | gb\|EAY78482.1\|hypothetical protein |
| | | | 10g0415800 | OsI_032441 [Oryza sativa (indica |
| | | | protein | cultivar-group)] |
| 16 | 137 | Mnom000485 | +Zm.A1ZM058479_at_FAR1 | gb\|ABF95032.1\|FAR1 family protein, expressed |
| | | | family | [Oryza sativa (japonica cultivar-group)] |
| | | | protein, | |
| | | | expressed | |
| 17 | 138 | Mnom000486 | +Zm.A1ZM016696_x_at_Hypothetical | gb\|EAY85998.1\|hypothetical protein |
| | | | protein | OsI_007231 [Oryza sativa (indica cultivar- |
| | | | OSJNBa0052M16.13 | group)] |
| 18 | 139 | Mnom000490 | +Zm.A1ZM057199_s_at_Peptide | >gb\|EAY89170.1\|hypothetical protein |
| | | | transporter | OsI_010403 [Oryza sativa (indica cultivar- |
| | | | PTR2, | group)] |
| | | | putative, | |
| | | | expressed | |
| 19 | 140 | Mnom000491 | +Zm.A1ZM060496_at_Expressed | >gb\|ABF94602.1\|expressed protein [Oryza sativa |
| | | | protein | (japonica cultivar-group)] |
| 20 | 141 | Mnom000494 | −Zm.A1ZM012001_at_Putative | ref\|NP_001054859.1\|Os05g0194900 [Oryza |
| | | | 6-phospho- | sativa (japonica cultivar-group)] |
| | | | 1- | |
| | | | fructokinase | |
| 21 | 142 | Mnom000496 | −Zm.A1ZM061308_at_Putative | ref\|NP_001058018.1\|Os06g0604500 [Oryza |
| | | | small calcium | sativa (japonica cultivar-group)] |
| | | | binding | |
| | | | mitochondrial | |
| | | | carrier 2 | |
| 22 | 143 | Mnom000497 | −Zm.A1ZM073603_at_Putative | gb\|EAZ10866.1\|hypothetical protein OsJ_000691 |
| | | | 6-phospho- | [Oryza sativa (japonica cultivar-group)] |
| | | | 1- | |
| | | | fructokinase | |
| 23 | 144 | Mnom000499 | −Zm.A1ZM060016_at_Os02g0642600 | gb\|EAZ23967.1\|hypothetical protein OsJ_007450 |
| | | | protein | [Oryza sativa (japonica cultivar-group)] |
| 24 | 145 | Mnom000517 | +Gh.MRT363517117P.2 | gb\|AAY67798.1\|14-3-3 protein [Manihot |
| | | | | esculenta] |
| 25 | 146 | Mnom000554 | +Mt.CGPG2117 | unnamed protein product [Vitis vinifera] |
| 26 | 147 | Mnom000570 | +At.SIZ1 | ATSIZ1/SIZ1; DNA binding [Arabidopsis |
| | | | | thaliana] |
| 27 | 148 | Mnom000580 | +Gh.SP26 | alpha-crystalline heat shock protein [Gossypium |
| | | | | arboreum] gb\|ABI97959.1\|alpha-crystalline heat |
| | | | | shock protein [Gossypium arboreum] |
| 28 | 149 | Mnom000616-Mnom000617 | +At.XDH1 | ATXDH1 (XANTHINE DEHYDROGENASE |
| | | | | 1); xanthine dehydrogenase [Arabidopsis |
| | | | | thaliana] gb\|AAO11781.1\|xanthine |
| | | | | dehydrogenase 1 [Arabidopsis thaliana] |
| 29 | 150 | Mnom000618-Mnom000619 | +At.XDH2 | xanthine dehydrogenase 2 [Arabidopsis thaliana] |
| 30 | 151 | Mnom000626-Mnom000627 | +Zm.GA2ox | Os01g0209700 [Oryza sativa (japonica cultivar- |
| | | | | group)] dbj\|BAA96178.1\|putative GA 2-oxidase |
| | | | | 5 [Oryza 8sativa (japonica cultivar-group)] |
| | | | | dbj\|BAF04278.1\|Os01g0209700 [Oryza sativa |
| | | | | (japonica cultivar-group)] |
| 31 | 152 | Mnom000628 | −Zm.GA2ox | Os01g0209700 [Oryza sativa (japonica cultivar- |
| | | | | group)] dbj\|BAA96178.1\|putative GA 2-oxidase |
| | | | | 5 [Oryza sativa (japonica cultivar-group)] |
| | | | | dbj\|BAF04278.1\|Os01g0209700 [Oryza sativa |
| | | | | (japonica cultivar-group)] |
| 32 | 153 | Mnom000636 | +Zm.PHD finger | hypothetical protein OsJ_019708 [Oryza sativa |
| | | | protein-like | (japonica cultivar-group)] |
| 33 | 154 | Mnom000637 | +Zm.04g0442000 | Os04g0442000 [Oryza sativa (japonica cultivar- |
| | | | | group)] sp\|Q0JCZ4\|ARFI_ORYSJ Auxin |
| | | | | response factor 9 dbj\|BAF14793.1\| |
| | | | | Os04g0442000 [Oryza sativa (japonica cultivar- |
| | | | | group)] |
| 34 | 155 | Mnom000640 | +Zm.P0415C01.9 | unknown protein [Oryza sativa (japonica cultivar- |
| | | | | group)] |
| 35 | 156 | Mnom000641 | +Zm.5′-3′ | Os03g0794800 [Oryza sativa (japonica cultivar- |
| | | | exoribonuclease, | group)] gb\|AAT76426.1\|putative 5′-3′ |
| | | | putative, | exonuclease [Oryza sativa (japonica cultivar- |
| | | | expressed | group)] gb\|ABF99326.1\|5′-3′ exoribonuclease, |
| | | | | putative, expressed [Oryza sativa (japonica |
| | | | | cultivar-group)] dbj\|BAF13456.1\|Os03g0794800 |
| | | | | [Oryza sativa (japonica cultivar-group)] |
| 36 | 157 | Mnom000643 | +Zm.Putative | Os06g0149900 [Oryza sativa (japonica cultivar- |
| | | | cysteine synthase | group)] dbj\|BAD69043.1\|putative cysteine |
| | | | | synthase [Oryza sativa (japonica cultivar-group)] |
| | | | | dbj\|BAF18734.1\|Os06g0149900 [Oryza sativa |
| | | | | (japonica cultivar-group)] |
| 37 | 158 | Mnom000645 | +Zm.Putative | Os10g0475000 [Oryza sativa (japonica cultivar- |
| | | | oxidase | group)] gb\|AAL31049.1\|AC078893_12 putative |
| | | | | oxidase [Oryza sativa] gb\|ABB47786.2\|GMC |
| | | | | oxidoreductase family protein, expressed [Oryza |
| | | | | sativa (japonica cultivar-group)] dbj\|BAF26755.1\| |
| | | | | Os10g0475000 [Oryza sativa (japonica cultivar- |
| | | | | group)] |
| 38 | 159 | Mnom000647 | +Zm.Serine | Serine carboxypeptidase family protein, |
| | | | carboxypeptidase | expressed [Oryza sativa (japonica cultivar-group)] |
| | | | family protein, | |
| | | | expressed | |
| 39 | 160 | Mnom000682 | +At.SQD2 | SQD2 |
| | | | | (SULFOQUINOVOSYLDIACYLGLYCEROL |
| | | | | 2); UDP-sulfoquinovose: DAG |
| | | | | sulfoquinovosyltransferase/transferase, |
| | | | | transferring glycosyl groups [Arabidopsis |
| | | | | thaliana] gb\|AAM18913.1\|AF454354_1 sulfolipid |
| | | | | synthase [Arabidopsis thaliana] gb\|AAO64198.1\| |
| | | | | unknown protein [Arabidopsis thaliana] |
| 40 | 161 | Mnom000690 | +As.2-cys | 2Cys-peroxiredoxin precursor [Brassica rapa] |
| | | | peroxiredoxin | |
| | | | CTP fused to soy | |
| | | | 2-cys | |
| | | | peroxiredoxin | |
| | | | enzyme domain | |
| 41 | 162 | Mnom000107 | +Zm.phyA2 | phytochrome A2 [Zea mays] |
| 42 | 163 | Mnom000108 | +Zm.phyA2 | phytochrome A2 [Zea mays] |
| 43 | 164 | Mnom000109 | +Zm.phyA2 | phytochrome A2 [Zea mays] |
| 44 | 165 | Mnom000110 | +Zm.phyB1 | phytochrome B1 apoprotein; PhyB1 [Zea mays] |
| 45 | 166 | Mnom000111 | +Zm.PhyB1 | phytochrome B1 apoprotein; PhyB1 [Zea mays] |
| 46 | 167 | Mnom000112 | +Zm.PhyB1 | phytochrome B1 apoprotein; PhyB1 [Zea mays] |
| 47 | 168 | Mnom000113, | +Zm.PhyA2 | phytochrome A2 [Zea mays] |
| | | Mnom000116 | | |
| 48 | 169 | Mnom000114, | +Zm.PhyB1 | phytochrome B1 apoprotein; PhyB1 [Zea mays] |
| | | Mnom000117 | | |
| 49 | 170 | Mnom000115, | +Zm.PhyB1 | phytochrome B1 apoprotein; PhyB1 [Zea mays] |
| | | Mnom000118 | | |
| 50 | 171 | Mnom000119 | +Zm.phyA2 | phytochrome A2 [Zea mays] |
| 51 | 172 | Mnom000738 | +Zm.RTCL | RTCS-like protein [Zea mays] |
| 52 | 173 | Mnom000766-Mnom000767 | +Cr.MoT1 | molybdate transporter [Chlamydomonas |
| | | | | reinhardtii] |
| 53 | 174 | Mnom000822-Mnom000823 | −Zm.GW2 | RING-type E3 ubiquitin ligase [Oryza sativa |
| | | | | (indica cultivar-group)] |
| 54 | 175 | Mnom000857, | +Zm.wilt1256 | Os03g0291800 [Oryza sativa (japonica cultivar- |
| | | Mnom000858, | | group)] |
| | | Mnom000860 | | |
| 55 | 176 | Mnom000873 | +Th.CHIT33 | chitinase [Hypocrea lixii] |
| 56 | 177 | Mnom000886 | +Zm.SEC22 | putative vesicle trafficking protein [Oryza sativa |
| | | | | (japonica cultivar-group)] |
| 57 | 178 | Mnom000923-Mnom000924 | +Zm.phyB1 | phytochrome B1 apoprotein; PhyB1 [Zea mays] |
| 58 | 179 | Mnom000937 | +Zm.NPH1 | blue-light receptor phototropin 1 [Zea mays] |
| | | | | gb\|AAB88817.1\|nonphototropic hypocotyl 1 |
| | | | | [Zea mays] |
| 59 | 180 | Mnom000942, | +Os.TOP6A1 | putative topoisomerase 6 [Oryza sativa (japonica |
| | | Mnom000955-Mnom000956 | | cultivar-group)] |
| 60 | 181 | Mnom000985 | +Zm.A1ZM027162_at_OSJNBa0020I02.17 | hypothetical protein OsI_014890 [Oryza sativa |
| | | | protein | (indica cultivar-group)] |
| 61 | 182 | Mnom000986 | +Zm.A1ZM003077_s_at_Os10g0415800 | hypothetical protein OsI_032441 [Oryza sativa |
| | | | protein | (indica cultivar-group)] |
| 62 | 183 | Mnom001055 | +Zm.Serine | Serine carboxypeptidase family protein, |
| | | | carboxypeptidase | expressed [Oryza sativa (japonica cultivar-group)] |
| | | | family protein, | |
| | | | expressed | |
| 63 | 184 | Mnom001090-Mnom001092 | +At.Glutamine | GS2 (GLUTAMINE SYNTHETASE 2); |
| | | | synthetase | glutamate-ammonia ligase [Arabidopsis thaliana] |
| 64 | 185 | Mnom001138 | +Mt.UDPGPP | UDP-glucose pyrophosphorylase [Amorpha |
| | | | | fruticosa] |
| 65 | 186 | Mnom001140 | +Mt.DNAJ | unnamed protein product [Vitis vinifera] |
| | | | HEAT SHOCK | |
| | | | N-TERMINAL | |
| | | | DOMAIN- | |
| | | | CONTAINING | |
| | | | PROTEIN | |
| 66 | 187 | Mnom001141 | +Gh.DNAJ | DnaJ-like protein [Glycine max] |
| | | | HEAT SHOCK | |
| | | | N-TERMINAL | |
| | | | DOMAIN- | |
| | | | CONTAINING | |
| | | | PROTEIN | |
| 67 | 188 | Mnom001142 | −Gm.CGPG1284 | nicotinate phosphoribosyltransferase-like protein |
| | | | homologue | [Medicago truncatula] |
| 68 | 189 | Mnom001146 | +Zm.G1073-like 1 | Os02g0713700 [Oryza sativa (japonica cultivar- |
| | | | | group)] |
| 69 | 190 | Mnom001147 | −Zm.G1073-like 1 | Os02g0713700 [Oryza sativa (japonica cultivar- |
| | | | | group)] |
| 70 | 191 | Mnom001160 | +Zm.Znf1 | zinc finger protein [Zea mays] |
| 71 | 192 | Mnom001162 | +Zm.CSLD1 | putative cellulose synthase [Oryza sativa |
| | | | | (japonica cultivar-group)] |
| 72 | 193 | PHE0000597 | +Ec.mannitol-1- | mannitol-1-phosphate 5-dehydrogenase |
| | | | phosphate 5- | [Escherichia coli CFT073] |
| | | | dehydrogenase | gb\|AAN82853.1\|AE016768_271 Mannitol-1- |
| | | | | phosphate 5-dehydrogenase [Escherichia coli |
| | | | | CFT073] |
| 73 | 194 | PHE0001556 | +Np.cphA | COG0769: UDP-N-acetylmuramyl tripeptide |
| | | | | synthase [Nostoc punctiforme PCC 73102] |
| 74 | 195 | PHE0001557 | +Ss.cphA- | hypothetical protein slr2002 [Synechocystis sp. |
| | | | 1652956 | PCC 6803] |
| | | | | sp\|P73833\|CPHA_SYNY3 Cyanophycin |
| | | | | synthetase |
| | | | | dbj\|BAA17890.1\|slr2002 [Synechocystis sp. |
| | | | | PCC 6803] |
| 75 | 196 | PHE0001559 | +Ss.cphB- | hypothetical protein slr2001 [Synechocystis sp. |
| | | | 1652956 | PCC 6803] |
| | | | | sp\|P73832\|CPHB_SYNY3 Cyanophycinase |
| | | | | dbj\|BAA17889.1\|slr2001 [Synechocystis sp. |
| | | | | PCC 6803] |
| 76 | 197 | PHE0002862 | +Os.Senescence | Os05g0148700 [Oryza sativa (japonica cultivar- |
| | | | Associated | group)] gb\|AAS46022.1\|PSAG protein; PSAG1 |
| | | | Protein | [Oryza sativa (japonica cultivar-group)] |
| | | | | gb\|AAS46023.1\|PSAG protein; OsPSAG [Oryza |
| | | | | sativa (japonica cultivar-group)] gb\|AAU44024.1\| |
| | | | | unknown protein [Oryza sativa (japonica cultivar- |
| | | | | group)] dbj\|BAF16565.1\|Os05g0148700 [Oryza |
| | | | | sativa (japonica cultivar-group)] |
| 77 | 198 | PHE0003348 | +At.PIF4 | PIF4 (PHYTOCHROME INTERACTING |
| | | | | FACTOR 4); DNA binding/transcription factor |
| | | | | [Arabidopsis thaliana] sp\|Q8W2F3\|PIF4_ARATH |
| | | | | Phytochrome-interacting factor 4 (Basic helix- |
| | | | | loop-helix protein 9) (bHLH 9) (AtbHLH009) |
| | | | | (Short under red-light 2) |
| | | | | gb\|AAL55716.1\|AF251694_1 putative |
| | | | | transcription factor BHLH9 [Arabidopsis |
| | | | | thaliana] emb\|CAD29449.1\|phytochrome |
| | | | | interacting factor 4 [Arabidopsis thaliana] |
| 78 | 199 | PHE0003706 | +Sc.DUR3 | Dur3 |
| 79 | 200 | PHE0003708 | +Sp.DUR3 | hypothetical protein SPBC23G7.13c |
| | | | | [Schizosaccharomyces pombe 972h-] |
| | | | | emb\|CAA22629.1\|urea transporter (predicted) |
| | | | | [Schizosaccharomyces pombe] |
| 80 | 201 | PHE0004230 | +Zm.E2F3 like | Os02g0537500 [Oryza sativa (japonica cultivar- |
| | | | | group)] dbj\|BAD73815.1\|putative E2F homolog |
| | | | | [Oryza sativa (japonica cultivar-group)] |
| | | | | dbj\|BAF08963.1\|Os02g0537500 [Oryza sativa |
| | | | | (japonica cultivar-group)] |
| 81 | 202 | PHE0004820 | +Zm. | hypothetical protein OsJ_008481 [Oryza sativa |
| | | | MRT4577_2166 | (japonica cultivar-group)] |
| | | | 5C-like ZmPIF3- | |
| | | | like family gene | |
| | | | in branch 1 | |
| 82 | 203 | PHE0004853 | −Zm.Wee1 | Wee1-like protein [Zea mays] |
| | | | fragment | |
| 83 | 204 | PHE0006017 | +Gh.Na/H | Na/H antiporter [Gossypium hirsutum] |
| | | | antiporter | |
| 84 | 205 | PHE0006102 | +Sc.CGPG8909 | Constituent of 66S pre-ribosomal particles, |
| | | | SSF1_YEAST | required for ribosomal |
| | | | Ribosome | large subunit maturation; functionally redundant |
| | | | biogenesis | with |
| | | | protein | Ssf2p; member of the Brix family |
| | | | | [Saccharomyces |
| | | | | cerevisiae] |
| 85 | 206 | PHE0006378 | +Sc.Rrp40p | YOL142W [Saccharomyces cerevisiae] |
| 86 | 207 | PHE0006380 | +Sc.Rrp46p | Protein involved in rRNA processing; component |
| | | | | of the exosome 3->5 exonuclease complex; |
| | | | | Rrp46p [Saccharomyces cerevisiae] |
| | | | | sp\|P53256\|RRP46_YEAST Exosome complex |
| | | | | exonuclease RRP46 (Ribosomal RNA-processing |
| | | | | protein 46) gb\|EDN61685.1\|3′-5′-exoribonuclease |
| | | | | [Saccharomyces cerevisiae YJM789] |
| 87 | 208 | PHE0006496 | −Zm.KNAT6 | N/A |
| | | | New RNAi | |
| 88 | 209 | PHE0006610 | +Gm.Glutathione | Phospholipid hydroperoxide glutathione |
| | | | Peroxidase | peroxidase, chloroplast precursor (PHGPx) |
| | | | | emb\|CAA04142.1\|phospholipid glutathione |
| | | | | peroxidase [Pisum sativum] |
| 89 | 210 | PHE0006613 | +Gm. | Os03g0358100 [Oryza sativa (japonica cultivar- |
| | | | Glutathione | group)] emb\|CAC17628.1\|putative phospholipid |
| | | | Peroxidase | hydroperoxide glutathione peroxidase [Oryza |
| | | | | sativa (japonica cultivar-group)] gb\|ABF96054.1\| |
| | | | | glutathione peroxidase, putative, expressed |
| | | | | [Oryza sativa (japonica cultivar-group)] |
| | | | | dbj\|BAF12059.1\|Os03g0358100 [Oryza sativa |
| | | | | (japonica cultivar-group)] gb\|EAY90064.1\| |
| | | | | hypothetical protein OsI_011297 [Oryza sativa |
| | | | | (indica cultivar-group)] gb\|EAZ26982.1\| |
| | | | | hypothetical protein OsJ_010465 [Oryza sativa |
| | | | | (japonica cultivar-group)] |
| 90 | 211 | PHE0006916 | +Zm.A1ZM059972_at_Ribosome | N/A |
| | | | associated | |
| | | | membrane | |
| | | | protein RAMP4 | |
| 91 | 212 | PHE0006917 | +Zm.A1ZM057844_at_26S | Os06g0633100 [Oryza sativa (japonica cultivar- |
| | | | protease | group)] |
| | | | regulatory | dbj\|BAD37803.1\|unknown protein [Oryza sativa |
| | | | subunit 7 (26S | (japonica cultivar-group)] |
| | | | proteasome | dbj\|BAF20043.1\|Os06g0633100 [Oryza sativa |
| | | | subunit 7) | (japonica cultivar-group)] |
| 92 | 213 | PHE0007643 | +At.CGPG7785_At4g22730 | leucine-rich repeat transmembrane protein kinase, |
| | | | emb\|CAB79228.1\| | putative [Arabidopsis thaliana] emb\|CAA16558.1\| |
| | | | leucine rich | leucine rich repeat receptor kinase-like protein |
| | | | repeat | [Arabidopsis thaliana] emb\|CAB79228.1\|leucine |
| | | | | rich repeat receptor kinase-like protein |
| | | | | [Arabidopsis thaliana] gb\|AAR23717-1\| |
| | | | | At4g22730 [Arabidopsis thaliana] |
| | | | | dbj\|BAD44629.1\|leucine rich repeat receptor |
| | | | | kinase-like protein [Arabidopsis thaliana] |
| 93 | 214 | PHE0008287 | +Zm.CGPG7793 | Os05g0154900 [Oryza sativa (japonica cultivar- |
| | | | | group)] gb\|AAV32216.1\|unknown protein [Oryza |
| | | | | sativa (japonica cultivar-group)] dbj\|BAF16600.1\| |
| | | | | Os05g0154900 [Oryza sativa (japonica cultivar- |
| | | | | group)] |
| 94 | 215 | PHE0008407 | +Ps.CGPG6515_succinate- | succinate-semialdehyde dehydrogenase |
| | | | semialdehyde | [Pseudomonas syringae pv. tomato str. DC3000] |
| | | | dehydrogenase | gb\|AAO53845.1\|succinate-semialdehyde |
| | | | | dehydrogenase [Pseudomonas syringae pv. |
| | | | | tomato str. DC3000] |
| 95 | 216 | PHE0008411 | +Zm.CGPG9112_hypothetical | hypothetical protein OsJ_012412 [Oryza sativa |
| | | | protein | (japonica cultivar-group)] |
| 96 | 217 | PHE0008541 | +Zm.Ctp-Hb1 | 3-phosphoshikimate 1-carboxyvinyltransferase/ |
| | | | | 5-enolpyruvylshikimate-3-phosphate/EPSP |
| | | | | synthase [Arabidopsis thaliana] gb\|AAB82633.1\| |
| | | | | 5-enolpyruvylshikimate-3-phosphate (EPSP) |
| | | | | synthase [Arabidopsis thaliana] gb\|AAY25438.1\| |
| | | | | At2g45300 [Arabidopsis thaliana] |
| | | | | dbj\|BAE99170.1\|5-enolpyruvylshikimate-3- |
| | | | | phosphate (EPSP) synthase [Arabidopsis thaliana] |
| 97 | 218 | PHE0008602 | +Xn.CGPG7423_glutamine | glutamine synthetase [Photorhabdus luminescens |
| | | | synthetase | subsp. laumondii TTO1] emb\|CAE12532.1\| |
| | | | (glutamate-- | glutamine synthetase (glutamate--ammonia |
| | | | ammonia ligase) | ligase) [Photorhabdus luminescens subsp. |
| | | | | laumondii TTO1] |
| 98 | 219 | PHE0009339 | +At.Luminal | BIP (LUMINAL BINDING PROTEIN); ATP |
| | | | binding protein 2 | binding [Arabidopsis thaliana] |
| | | | precursor | sp\|Q39043\|BIP2_ARATH Luminal-binding |
| | | | | protein 2 precursor (BiP2) (AtBP2) |
| | | | | dbj\|BAB08435.1\|luminal binding protein |
| | | | | [Arabidopsis thaliana] |
| | | | | gb\|AAO00752.1\|luminal binding protein |
| | | | | [Arabidopsis thaliana] |
| | | | | gb\|AAP37765.1\|At5g42020 [Arabidopsis |
| | | | | thaliana] |
| 99 | 220 | PHE0009341 | +Os.Putative | Os01g0307500 [Oryza sativa (japonica cultivar- |
| | | | high affinity | group)] sp\|Q3YAF4\|HKT8_ORYSA Cation |
| | | | potassium | transporter HKT8 (OsHKT8) |
| | | | transporter 2 | dbj\|BAB93392.1\|putative high affinity |
| | | | | potassium transporter 2 [Oryza sativa |
| | | | | (japonica cultivar-group)] |
| | | | | dbj\|BAD88380.1\|putative high affinity |
| | | | | potassium transporter 2 [Oryza sativa |
| | | | | (japonica cultivar-group)] |
| | | | | dbj\|BAF04762.1\|Os01g0307500 [Oryza sativa |
| | | | | (japonica cultivar-group)] |
| 100 | 221 | PHE0010195 | +At.Arabidopsis | oligopeptide transport (POT) family protein |
| | | | Peptide | [Arabidopsis thaliana] |
| | | | transporter | emb\|CAB87717.1\|putative oligopeptide |
| | | | | transporter protein [Arabidopsis thaliana] |
| 101 | 222 | PHE0010352 | +Gh.GhG481 | transcription factor NF-Y CCAAT-binding-like |
| | | | | protein-like [Solanum tuberosum] |
| | | | | gb\|ABB55391.1\|transcription factor NF-Y |
| | | | | CCAAT-binding-like protein-like [Solanum |
| | | | | tuberosum] gb\|ABB72810.1\|transcription factor |
| | | | | NF-Y, CCAAT-binding-like protein [Solanum |
| | | | | tuberosum] |
| 102 | 223 | PHE0010354 | +Gh.NFB2-1:1:1 | transcription factor NF-Y CCAAT-binding-like |
| | | | | protein-like [Solanum tuberosum] |
| | | | | gb\|ABB55391.1\|transcription factor NF-Y |
| | | | | CCAAT-binding-like protein-like [Solanum |
| | | | | tuberosum] gb\|ABB72810.1\|transcription factor |
| | | | | NF-Y, CCAAT-binding-like protein [Solanum |
| | | | | tuberosum] |
| 103 | 224 | PHE0010646 | +U.GOI- | spermidine synthase [Cucumis sativus] |
| | | | CUCfi.FSPD1:1:1 | |
| 104 | 225 | PHE0010648 | +Gh.G2041_Truncated | HR38 (chromatin remodeling 38); ATP binding/ |
| | | | | DNA binding/helicase [Arabidopsis |
| | | | | thaliana] emb\|CAB86450.1\|putative protein |
| | | | | [Arabidopsis thaliana |
| 105 | 226 | PHE0010649 | +Gm.G2041_Truncated | SNF2 domain-containing protein |
| | | | | [Olimarabidopsis pumila] |
| 106 | 227 | PHE0010852 | +Zm.Helix helix | hypothetical protein OsI_028787 [Oryza sativa |
| | | | loop | (indica cultivar-group)] |
| | | | protein_NC0035132: | |
| | | | YLD | |
| 107 | 228 | PHE0010956 | +At.ENT1 | ENT1, AT (EQUILIBRATIVE NUCLEOTIDE |
| | | | | TRANSPORTER 1); nucleoside |
| | | | | transporter [Arabidopsis thaliana] |
| | | | | gb\|AAL67041.1\|unknown protein [Arabidopsis |
| | | | | thaliana] |
| | | | | gb\|AAO22816.1\|unknown protein [Arabidopsis |
| | | | | thaliana] |
| 108 | 229 | PHE0011028 | +U.GOI- | N/A |
| | | | Nue1:1:1 | |
| 109 | 230 | PHE0011063 | +U.GOI-Nue1- | Non-symbiotic hemoglobin (Hbt) (ZEAmp |
| | | | Zm.Hb1RNA:1:1 | GLB1) gb\|AAF44664.1\|AF236080_1 hemoglobin |
| | | | | [Zea mays] gb\|AAG01183.1\|hemoglobin [Zea |
| | | | | mays subsp. parviglumis] |
| 110 | 231 | PHE0011543 | +Le.Tomato | zinc finger (B-box type) family protein |
| | | | Homolog of | [Arabidopsis thaliana] |
| | | | G1988 | |
| 111 | 232 | PHE0013202 | +At.basic helix- | PIL2 (PHYTOCHROME INTERACTING |
| | | | loop-helix | FACTOR 3-LIKE 2); transcription |
| | | | (bHLH) protein | factor [Arabidopsis thaliana] |
| | | | similar to PIF3- | |
| | | | like bHLH | |
| | | | protein 2 (PIL2) | |
| 112 | 233 | PHE0013203 | +At.sterile alpha | sterile alpha motif (SAM) domain-containing |
| | | | motif (SAM) | protein [Arabidopsis thaliana] |
| | | | domain- | |
| | | | containing | |
| | | | protein | |
| 113 | 234 | PHE0013205 | +At.DUF | unknown protein [Arabidopsis thaliana] |
| 114 | 235 | PHE0013292 | +At.ctpA | C-terminal processing protease, putative |
| | | | | [Arabidopsis thaliana] |
| 115 | 236 | PHE0013712 | +Zm.PROPEP2 | Os04g0638700 [Oryza sativa (japonica cultivar- |
| | | | | group)] |
| 116 | 237 | PHE0013713 | +Zm.PROPEP3 | Os04g0638700 [Oryza sativa (japonica cultivar- |
| | | | | group)] |
| 117 | 238 | PHE0013734 | +At.AGL94 | DNA binding/transcription factor [Arabidopsis |
| | | | | thaliana] |
| 118 | 239 | TRG0000049 | −Zm.NFB5 | hypothetical protein OsI_019577 [Oryza sativa |
| | | | | (indica cultivar-group)] |
| 119 | 240 | TRG0000291 | −Zm.coumaryl | AMP-binding enzyme family protein, expressed |
| | | | ligase | [Oryza sativa (japonica cultivar-group)] |
| 120 | 241 | TRG0000332 | −Gm.NFA9.3.1- | unnamed protein product [Vitis vinifera] |
| | | | Soy homolog of | |
| | | | AtG926 | |
| 121 | 242 | 1071693 | +Zm.PhyB | phytochrome B2 apoprotein; PhyB2 [Zea mays] |

Selection Methods for Transgenic Plants with Enhanced Agronomic Trait

[0061] Within a population of transgenic plants each regenerated from a plant cell having a nucleus with recombinant DNA many plants that survive to fertile transgenic plants that produce seeds and progeny plants will not exhibit an enhanced agronomic trait. Selection from the population is necessary to identify one or more transgenic plant cells having a transgenic nucleus that can provide plants with the enhanced trait. Transgenic plants having enhanced traits are selected from populations of plants regenerated or derived from plant cells transformed as described herein by evaluating the plants in a variety of assays to detect an enhanced trait, e.g. enhanced water use efficiency, enhanced cold tolerance, increased yield, enhanced nitrogen use efficiency, enhanced seed protein and enhanced seed oil. These assays also may take many forms including, but not limited to, direct screening for the trait in a greenhouse or field trial or by screening for a surrogate trait. Such analyses can be directed to detecting changes in the chemical composition, biomass, physiological properties, morphology of the plant. Changes in chemical compositions such as nutritional composition of grain can be detected by analysis of the seed composition and content of protein, free amino acids, oil, free fatty acids, starch or tocopherols. Changes in biomass characteristics can be made on greenhouse or field grown plants and can include plant height, stem diameter, root and shoot dry weights; and, for corn plants, ear length and diameter. Changes in physiological properties can be identified by evaluating responses to stress conditions, for example assays using imposed stress conditions such as water deficit, nitrogen deficiency, cold growing conditions, pathogen or insect attack or light deficiency, or increased plant density. Changes in morphology can be measured by visual observation of tendency of a transformed plant with an enhanced agronomic trait to also appear to be a normal plant as compared to changes toward bushy, taller, thicker, narrower leaves, striped leaves, knotted trait, chlorosis, albino, anthocyanin production, or altered tassels, ears or roots. Other selection properties include days to pollen shed, days to silking, leaf extension rate, chlorophyll content, leaf temperature, stand, seedling vigor, internode length, plant height, leaf number, leaf area, tillering, brace roots, stay green, stalk lodging, root lodging, plant health, barreness/prolificacy, green snap, and pest resistance. In addition, phenotypic characteristics of harvested grain may be evaluated, including number of kernels per row on the ear, number of rows of kernels on the ear, kernel abortion, kernel weight, kernel size, kernel density and physical grain quality.

[0062] Assays for screening for a desired trait are readily designed by those practicing in the art. The following illustrates useful screening assays for corn traits using hybrid corn plants. The assays can be readily adapted for screening other plants such as canola, cotton and soybean either as hybrids or inbreds.

[0063] Transgenic corn plants having nitrogen use efficiency are identified by screening in fields with three levels of nitrogen (N) fertilizer being applied, e.g. low level (0 N), medium level (80 lb/ac) and high level (180 lb/ac). Plants with enhanced nitrogen use efficiency provide higher yield as compared to control plants.

[0064] Transgenic corn plants having enhanced yield are identified by screening using progeny of the transgenic plants over multiple locations with plants grown under optimal production management practices and maximum weed and pest control. A useful target for improved yield is a 5% to 10% increase in yield as compared to yield produced by plants grown from seed for a control plant. Selection methods may be applied in multiple and diverse geographic locations, for example up to 16 or more locations, over one or more planting seasons, for example at least two planting seasons, to statistically distinguish yield improvement from natural environmental effects.

[0065] Transgenic corn plants having enhanced water use efficiency are identified by screening plants in an assay where water is withheld for a period to induce stress followed by watering to revive the plants. For example, a useful selection process imposes 3 drought/re-water cycles on plants over a total period of 15 days after an initial stress free growth period of 11 days. Each cycle consists of 5 days, with no water being applied for the first four days and a water quenching on the 5th day of the cycle. The primary phenotypes analyzed by the selection method are the changes in plant growth rate as determined by height and biomass during a vegetative drought treatment.

[0066] Transgenic corn plants having enhanced cold tolerance are identified by screening plants in a cold germination assay and/or a cold tolerance field trial. In a cold germination assay trays of transgenic and control seeds are placed in a growth chamber at 9.7° C. for 24 days (no light). Seeds having higher germination rates as compared to the control are identified as having enhanced cold tolerance. In a cold tolerance field trial plants with enhanced cold tolerance are identified from field planting at an earlier date than conventional Spring planting for the field location. For example, seeds are planted into the ground around two weeks before local farmers begin to plant corn so that a significant cold stress is exerted onto the crop, named as cold treatment. Seeds also are planted under local optimal planting conditions such that the crop has little or no exposure to cold condition, named as normal treatment. At each location, seeds are planted under both cold and normal conditions preferably with multiple repetitions per treatment.

[0067] Transgenic corn plants having seeds with increased protein and/or oil levels are identified by analyzing progeny seed for protein and/or oil. Near-infrared transmittance spectrometry is a non-destructive, high-throughput method that is useful to determine the composition of a bulk seed sample for properties listed in table 2.

TABLE 2

| | |
|---|---|
| Typical sample(s): | Whole grain corn and soybean seeds |
| Typical analytical range: | Corn - moisture 5-15%, oil 5-20%, |
| | protein 5-30%, starch 50-75%, and density |
| | 1.0-1.3%. |
| | Soybean - moisture 5-15%, oil 15-25%, |
| | and protein 35-50%. |

[0068] Although the plant cells and methods of this invention can be applied to any plant cell, plant, seed or pollen, e.g. any fruit, vegetable, grass, tree or ornamental plant, the various aspects of the invention are preferably applied to corn, soybean, cotton, canola, alfalfa, wheat, rice, sugarcane, and sugar beet plants. In many cases the invention is applied to corn plants that are inherently resistant to disease from the Mal de Rio Cuarto virus or the Puccina sorghi fungus or both.

[0069] The following examples are included to demonstrate aspects of the invention, those of skill in the art should, in light of the present disclosure, appreciate that many changes can be made in the specific aspects which are disclosed and still obtain a like or similar results without departing from the spirit and scope of the invention.

### EXAMPLE 1

### Plant Expression Constructs

[0070] This example illustrates the construction of plasmids for transferring recombinant DNA into a plant cell nucleus that can be regenerated into transgenic plants.

### A. Plant Expression Constructs for Corn Transformation

[0071] A base corn transformation vector pMON93039, as set forth in SEQ ID NO:17377, illustrated in Table 3 and FIG. 1, is fabricated for use in preparing recombinant DNA for Agrobacterium-mediated transformation into corn tissue.

TABLE 3

| | | | Coordinates of |
|---|---|---|---|
| Function | Name | Annotation | SEQ ID NO: 17377 |
| Agrobacterium | B-AGRtu.right border | Agro right border sequence, | 11364-11720 |
| T-DNA transfer | | essential for transfer of T-DNA. | |
| Gene of interest | E-Os.Act1 | Upstream promoter region of the | 19-775 |
| expression | | rice actin 1 gene | |
| cassette | E-CaMV.35S.2xA1- | Duplicated35S A1-B3 domain | 788-1120 |
| | B3 | without TATA box | |
| | P-Os.Act1 | Promoter region of the rice actin 1 | 1125-1204 |
| | | gene | |
| | L-Ta.Lhcb1 | 5′ untranslated leader of wheat | 1210-1270 |
| | | major chlorophyll a/b binding | |
| | | protein | |
| | I-Os.Act1 | First intron and flanking UTR exon | 1287-1766 |
| | | sequences from the rice actin 1 | |
| | | gene | |
| | T-St.Pis4 | 3′ non-translated region of the | 1838-2780 |
| | | potato proteinase inhibitor II gene | |
| | | which functions to direct | |
| | | polyadenylation of the mRNA | |
| Plant selectable | P-Os.Act1 | Promoter from the rice actin 1 gene | 2830-3670 |
| marker | L-Os.Act1 | First exon of the rice actin 1 gene | 3671-3750 |
| expression | I-Os.Act1 | First intron and flanking UTR exon | 3751-4228 |
| cassette | | sequences from the rice actin 1 | |
| | | gene | |
| | TS-At.ShkG-CTP2 | Transit peptide region of | 4238-4465 |
| | | Arabidopsis EPSPS | |
| | CR-AGRtu.aroA- | Coding region for bacterial strain | 4466-5833 |
| | CP4.nat | CP4 native aroA gene. | |
| | T-AGRtu.nos | A 3′ non-translated region of the | 5849-6101 |
| | | nopaline synthase gene of | |
| | | Agrobacterium tumefaciens Ti | |
| | | plasmid which functions to direct | |
| | | polyadenylation of the mRNA. | |
| Agrobacterium | B-AGRtu.left border | Agro left border sequence, essential | 6168-6609 |
| T-DNA transfer | | for transfer of T-DNA. | |
| Maintenance in | OR-Ec.oriV-RK2 | The vegetative origin of replication | 6696-7092 |
| E. coli | | from plasmid RK2. | |
| | CR-Ec.rop | Coding region for repressor of | 8601-8792 |
| | | primer from the ColE1 plasmid. | |
| | | Expression of this gene product | |
| | | interferes with primer binding at the | |
| | | origin of replication, keeping | |
| | | plasmid copy number low. | |
| | OR-Ec.ori-ColE1 | The minimal origin of replication | 9220-9808 |
| | | from the E. coli plasmid ColE1. | |
| | P-Ec.aadA-SPC/STR | Promoter for Tn7 | 10339-10380 |
| | | adenylyltransferase (AAD(3″)) | |
| | CR-Ec.aadA- | Coding region for Tn7 | 10381-11169 |
| | SPC/STR | adenylyltransferase (AAD(3″)) | |
| | | conferring spectinomycin and | |
| | | streptomycin resistance. | |
| | T-Ec.aadA-SPC/STR | 3′ UTR from the Tn7 | 11170-11227 |
| | | adenylyltransferase (AAD(3″)) | |
| | | gene of E. coli. | |

[0072] To construct transformation vectors for expressing a protein identified in Table 1, primers for PCR amplification of the protein coding nucleotides are designed at or near the start and stop codons of the coding sequence, in order to eliminate most of the 5′ and 3′ untranslated regions. The protein coding nucleotides are inserted into the base vector in the gene of interest expression cassette at an insertion site, i.e. between the intron element (coordinates 1287-1766) and the polyadenylation element (coordinates 1838-2780).

[0073] To construct transformation vectors for suppressing a protein identified in Table 1, the amplified protein coding nucleotides are assembled in a sense and antisense arrangement and inserted into the base vector at the insertion site in the gene of interest expression cassette to provide transcribed RNA that will form a double-stranded RNA for RNA interference suppression of the protein. More specifically, the sense and anti-sense DNA is derived from an endogenous corn gene that expresses a corn protein with an amino acid sequence of SEQ ID NO: 141-144, 152, 174, 190, 203, 208, or 239-240 or the corn homolog of SEQ ID NOs:122, 188, or 241.

### B. Plant Expression Constructs for Soy and Canola Transformation

[0074] Vectors for use in transformation of soybean and canola tissue are prepared having the elements of expression vector pMON82053 (SEQ ID NO: 17378) as shown in Table 4 below and FIG. 2.

TABLE 4

| | | | Coordinates of |
|---|---|---|---|
| Function | Name | Annotation | SEQ ID NO: 17378 |
| Agrobacterium T- | B-AGRtu.left border | Agro left border sequence, essential for | 6144-6585 |
| DNA transfer | | transfer of T-DNA. | |
| Plant selectable | P-At.Act7 | Promoter from the Arabidopsis actin 7 gene | 6624-7861 |
| marker expression | L-At.Act7 | 5′UTR of Arabidopsis Act7 gene | |
| cassette | I-At.Act7 | Intron from the Arabidopsis actin7 gene | |
| | TS-At.ShkG-CTP2 | Transit peptide region of Arabidopsis | 7864-8091 |
| | | EPSPS | |
| | CR-AGRtu.aroA- | Synthetic CP4 coding region with dicot | 8092-9459 |
| | CP4.nno_At | preferred codon usage. | |
| | T-AGRtu.nos | A 3′ non-translated region of the nopaline | 9466-9718 |
| | | synthase gene of Agrobacterium | |
| | | tumefaciens Ti plasmid which functions to | |
| | | direct polyadenylation of the mRNA. | |
| Gene of interest | P-CaMV.35S-enh | Promoter for 35S RNA from CaMV | 1-613 |
| expression cassette | | containing a duplication of the −90 to −350 | |
| | | region. | |
| | T-Gb.E6-3b | 3′ untranslated region from the fiber protein | 688-1002 |
| | | E6 gene of sea-island cotton. | |
| Agrobacterium T- | B-AGRtu.right | Agro right border sequence, essential for | 1033-1389 |
| DNA transfer | border | transfer of T-DNA. | |
| Maintenance in E. coli | OR-Ec.oriV-RK2 | The vegetative origin of replication from | 5661-6057 |
| | | plasmid RK2. | |
| | CR-Ec.rop | Coding region for repressor of primer from | 3961-4152 |
| | | the ColE1 plasmid. Expression of this gene | |
| | | product interferes with primer binding at the | |
| | | origin of replication, keeping plasmid copy | |
| | | number low. | |
| | OR-Ec.ori-ColE1 | The minimal origin of replication from the | 2945-3533 |
| | | E. coli plasmid ColE1. | |
| | P-Ec.aadA-SPC/STR | Promoter for Tn7 adenylyltransferase | 2373-2414 |
| | | (AAD(3″)) | |
| | CR-Ec.aadA- | Coding region for Tn7 adenylyltransferase | 1584-2372 |
| | SPC/STR | (AAD(3″)) conferring spectinomycin and | |
| | | streptomycin resistance. | |
| | T-Ec.aadA-SPC/STR | 3′ UTR from the Tn7 adenylyltransferase | 1526-1583 |
| | | (AAD(3″)) gene of E. coli. | |

[0075] To construct transformation vectors for expressing a protein identified in Table 1, primers for PCR amplification of the protein coding nucleotides are designed at or near the start and stop codons of the coding sequence, in order to eliminate most of the 5′ and 3′ untranslated regions. The protein coding nucleotides are inserted into the base vector in the gene of interest expression cassette at an insertion site, i.e. between the promoter element (coordinates 1-613) and the polyadenylation element (coordinates 688-1002).

[0076] To construct transformation vectors for suppressing a protein identified in Table 1, the amplified protein coding nucleotides are assembled in a sense and antisense arrangement and inserted into the base vector at the insertion site in the gene of interest expression cassette to provide transcribed RNA that will form a double-stranded RNA for RNA interference suppression of the protein. More specifically, for soybean the sense and anti-sense DNA is derived from an endogenous soybean gene that expresses a soybean protein with an amino acid sequence of SEQ ID NOs: 122, 188, or 241 or the soybean homolog of SEQ ID NOs: 141-144, 152, 174, 190, 203, 208, or 239-240, and for canola the sense and anti-sense DNA is derived from an endogenous canola gene that encodes the canola homolog of SEQ ID NOs: 122, 141-144, 152, 174, 188, 190, 203, 208, or 239-241.

### C. Cotton Transformation Vector

[0077] Plasmids for use in transformation of cotton tissue are prepared with elements of expression vector pMON99053 (SEQ ID NO: 17379) as shown in Table 5 below and FIG. 3.

TABLE 5

| | | | Coordinates of |
|---|---|---|---|
| | | | SEQ ID NO: |
| Function | Name | Annotation | 17379 |
| Agrobacterium T- | B-AGRtu.right border | Agro right border sequence, essential for | 1-357 |
| DNA transfer | | transfer of T-DNA. | |
| Gene of interest | Exp-CaMV.35S- | Enhanced version of the 35S RNA promoter | 388-1091 |
| expression cassette | enh + Ph.DnaK | from CaMV plus the petunia hsp70 5′ | |
| | | untranslated region | |
| | T-Ps.RbcS2-E9 | The 3′ non-translated region of the pea RbcS2 | 1165-1797 |
| | | gene which functions to direct | |
| | | polyadenylation of the mRNA. | |
| Plant selectable | Exp-CaMV.35S | Promoter and 5′ untranslated region from the | 1828-2151 |
| marker expression | | 35S RNA of CaMV | |
| cassette | CR-Ec.nptII-Tn5 | Coding region for neomycin | 2185-2979 |
| | | phosphotransferase gene from transposon Tn5 | |
| | | which confers resistance to neomycin and | |
| | | kanamycin. | |
| | T-AGRtu.nos | A 3′ non-translated region of the nopaline | 3011-3263 |
| | | synthase gene of Agrobacterium tumefaciens | |
| | | Ti plasmid which functions to direct | |
| | | polyadenylation of the mRNA. | |
| Agrobacterium T- | B-AGRtu.left border | Agro left border sequence, essential for | 3309-3750 |
| DNA transfer | | transfer of T-DNA. | |
| Maintenance in E. coli | OR-Ec.oriV-RK2 | The vegetative origin of replication from | 3837-4233 |
| | | plasmid RK2. | |
| | CR-Ec.rop | Coding region for repressor of primer from | 5742-5933 |
| | | the ColE1 plasmid. Expression of this gene | |
| | | product interferes with primer binding at the | |
| | | origin of replication, keeping plasmid copy | |
| | | number low. | |
| | OR-Ec.ori-ColE1 | The minimal origin of replication from the E. coli | 6361-6949 |
| | | plasmid ColE1. | |
| | P-Ec.aadA-SPC/STR | Promoter for Tn7 adenylyltransferase | 7480-7521 |
| | | (AAD(3″)) | |
| | CR-Ec.aadA-SPC/STR | Coding region for Tn7 adenylyltransferase | 7522-8310 |
| | | (AAD(3″)) conferring spectinomycin and | |
| | | streptomycin resistance. | |
| | T-Ec.aadA-SPC/STR | 3′ UTR from the Tn7 adenylyltransferase | 8311-8368 |
| | | (AAD(3″)) gene of E. coli. | |

[0078] To construct transformation vectors for expressing a protein identified in Table 1, primers for PCR amplification of the protein coding nucleotides are designed at or near the start and stop codons of the coding sequence, in order to eliminate most of the 5′ and 3′ untranslated regions. The protein coding nucleotides are inserted into the base vector in the gene of interest expression cassette at an insertion site, i.e. between the promoter element (coordinates 388-1091) and the polyadenylation element (coordinates 1165-1797).

[0079] To construct transformation vectors for suppressing a protein identified in Table 1, the amplified protein coding nucleotides are assembled in a sense and antisense arrangement and inserted into the base vector at the insertion site in the gene of interest expression cassette to provide transcribed RNA that will form a double-stranded RNA for RNA interference suppression of the protein. More specifically, the sense and anti-sense DNA is derived from an endogenous cotton gene that encodes the cotton homolog of SEQ ID NO: 122, 141-144, 152, 174, 188, 190, 203, 208, or 239-241.

### D. Plant Expression Constructs for Gene Stacking in Corn.

[0080] A base corn transformation vector pMON96782, as set forth in SEQ ID NO: 17380, illustrated in Table 6 and FIG. 4, is fabricated for use in preparing recombinant DNA for Agrobacterium-mediated transformation into corn tissue.

TABLE 6

| | | | Coordinates of |
|---|---|---|---|
| Function | Name | Annotation | SEQ ID NO: 17380 |
| Agrobacterium | B-AGRtu.right border | Agro right border sequence, | 1-357 |
| T-DNA transfer | | essential for transfer of T-DNA. | |
| Gene of interest | P-Os.Act1 | Promoter region of the rice actin 1 | 403-1243 |
| expression | | gene | |
| cassette 1 | L-Os.Act1 | 5′ untranslated leader of rice actin 1 | 1244-1323 |
| | | gene | |
| | I-Os.Act1 | First intron and flanking UTR exon | 1324-1801 |
| | | sequences from the rice actin 1 | |
| | | gene | |
| | T-Ta.Hsp17 | 3′ un-translated region of wheat low | 1834-2043 |
| | | molecular weight heat shock | |
| | | protein gene | |
| Gene of interest | E-Os.Act1 | Upstream Promoter region of rice | 2136-2892 |
| expression | | actin 1 | |
| cassette 2 | E-CaMV.35S.2xA1- | 35S A1-B3 Domain | 2905-2937 |
| | B3 | | |
| | P-Os.Act1 | Promoter from rice actin gene | 3242-3321 |
| | L-Ta.Lhcb1 | 5′ untranslated leader from wheat | 3327-3387 |
| | | chlorophyll protein | |
| | I-Os.Act1 | Intron and 5′ untranslated region | 3404-3883 |
| | | from rice actin 1 gene | |
| | T-AGRtu.tr7 | 3′ untranslated region from | 3918-4425 |
| | | “transcript 7” of Agrobacterium | |
| Plant selectable | P.Os.TubA | Promoter of alpha-tubulin gene of | 4452-5650 |
| marker | | rice | |
| expression | L.Os.TubA | 5′ untranslated region of an alpha | 5651-5736 |
| cassette | | tubulin from rice | |
| | I.Os.TubA | Intron 1 of an alpha tubulin from | 5737-6632 |
| | | rice. | |
| | Ts.Ta.waxy.nno_Zm | Chloroplast transit peptide from | 6637-6846 |
| | | wheat starch synthase | |
| | Cr.AGRtu.aroA- | CP4 EPSPS gene | 6847-8214 |
| | CP4.nno_Zm | | |
| | T.Os.TubA | 3′ untranslated region of alpha | 8219-8800 |
| | | tubulin from rice | |
| Agrobacterium | B-AGRtu.left border | Left border sequence for T-DNA | 8828-9269 |
| T-DNA transfer | | transfer | |
| Maintenance in | OR-Ec.oriV-RK2 | Origin of replication from the E. coli | 9356-9752 |
| E. coli | | plasmid RK2. | |
| | Cr-Ec.rop | Coding region for repressor of | 11261-11452 |
| | | primer from ColE1 plasmid | |
| | OR-Ec.ori-ColE1 | Minimum origin of replication from | 11880-12468 |
| | | E. coli colE1 plasmid. | |
| | P-Ec.aadA-SPC/STR | Promoter for Tn7 | 12999-13040 |
| | | adenylyltransferase gene | |
| | CR-Ec.aadA- | Coding region for Tn7 | 13041-13829 |
| | SPC/STR | adenylyltransferase gene | |
| | T-Ec.aadA-SPC/STR | 3′ untranslated region from Tn7 | 13830-13887 |
| | | adenylyltransferase gene | |

[0081] Primers for PCR amplification of protein coding nucleotides of the genes of interest are designed at or near the start and stop codons of the coding sequence, in order to eliminate most of the 5′ and 3′ untranslated regions. Protein coding regions of genes encoding a first and second protein of interest are amplified. The amplified region from the first gene of interest is cloned between nucleotides 1801 and 1834 of the base vector and the amplified region from the second gene of interest is cloned between nucleotides 3883 and 3918 of the base vector.

### EXAMPLE 2

### Corn Transformation

[0082] This example illustrates transformation methods useful in producing a transgenic nucleus in a corn plant cell, and the plants, seeds and pollen produced from a transgenic cell with such a nucleus having an enhanced trait, i.e. enhanced water use efficiency, enhanced cold tolerance, increased yield, enhanced nitrogen use efficiency, enhanced seed protein and enhanced seed oil. A plasmid vector is prepared by cloning the DNA of SEQ ID NO:1 into the gene of interest expression cassette in the base vector for use in corn transformation of corn tissue provided in Example 1, Table 3.

[0083] For Agrobacterium-mediated transformation of corn embryo cells corn plants of a readily transformable line are grown in the greenhouse and ears are harvested when the embryos are 1.5 to 2.0 mm in length. Ears are surface sterilized by spraying or soaking the ears in 80% ethanol, followed by air drying. Immature embryos are isolated from individual kernels on surface sterilized ears. Prior to inoculation of maize cells, Agrobacterium cells are grown overnight at room temperature. Immature maize embryo cells are inoculated with Agrobacterium shortly after excision, and incubated at room temperature with Agrobacterium for 5-20 minutes. Immature embryo plant cells are then co-cultured with Agrobacterium for 1 to 3 days at 23° C. in the dark. Co-cultured embryos are transferred to selection media and cultured for approximately two weeks to allow embryogenic callus to develop. Embryogenic callus is transferred to culture medium containing 100 mg/L paromomycin and subcultured at about two week intervals. Transformed plant cells are recovered 6 to 8 weeks after initiation of selection.

[0084] For Agrobacterium-mediated transformation of maize callus immature embryos are cultured for approximately 8-21 days after excision to allow callus to develop. Callus is then incubated for about 30 minutes at room temperature with the Agrobacterium suspension, followed by removal of the liquid by aspiration. The callus and Agrobacterium are co-cultured without selection for 3-6 days followed by selection on paromomycin for approximately 6 weeks, with biweekly transfers to fresh media. Paromomycin resistant calli are identified about 6-8 weeks after initiation of selection.

[0085] To regenerate transgenic corn plants a callus of transgenic plant cells resulting from transformation and selection is placed on media to initiate shoot development into plantlets which are transferred to potting soil for initial growth in a growth chamber at 26° C. followed by a Mist bench before transplanting to 5 inch pots where plants are grown to maturity. The regenerated plants are self-fertilized and seed is harvested for use in one or more methods to select seeds, seedlings or progeny second generation transgenic plants (R2 plants) or hybrids, e.g. by selecting transgenic plants exhibiting an enhanced trait as compared to a control plant.

[0086] The above process is repeated to produce multiple events of transgenic corn plant cells that are transformed with recombinant DNA from each of the genes identified in Table 1. Events are designed to produce in the transgenic cells one of the proteins identified in Table 1, except the proteins of SEQ ID NOs: 141-144, 152, 174, 190, 203, 208, and 239-240, and the corn homolog of SEQ ID NOs: 122, 188, and 241 which are suppressed. Progeny transgenic plants and seed of the transformed plant cells are screened for enhanced water use efficiency, enhanced cold tolerance, increased yield, enhanced nitrogen use efficiency, enhanced seed protein and enhanced seed oil. From each group of multiple events of transgenic plants with a specific recombinant DNA from Table 1 the event that produces the greatest enhancement in yield, water use efficiency, nitrogen use efficiency, enhanced cold tolerance, enhanced seed protein and enhanced seed oil is identified and progeny seed is selected for commercial development.

### EXAMPLE 3

### Soybean Transformation

[0087] This example illustrates plant transformation useful in producing a transgenic nucleus in a soybean plant cell, and the plants, seeds and pollen produced from a transgenic cell with such a nucleus having an enhanced trait, i.e. enhanced water use efficiency, enhanced cold tolerance, increased yield, enhanced nitrogen use efficiency, enhanced seed protein and enhanced seed oil.

[0088] For Agrobacterium mediated transformation, soybean seeds are imbided overnight and the meristem explants excised. The explants are placed in a wounding vessel. Soybean explants and induced Agrobacterium cells from a strain containing plasmid DNA with the gene of interest cassette and a plant selectable marker cassette are mixed no later than 14 hours from the time of initiation of seed imbibition, and wounded using sonication. Following wounding, explants are placed in co-culture for 2-5 days at which point they are transferred to selection media for 6-8 weeks to allow selection and growth of transgenic shoots. Resistant shoots are harvested approximately 6-8 weeks and placed into selective rooting media for 2-3 weeks. Shoots producing roots are transferred to the greenhouse and potted in soil. Shoots that remain healthy on selection, but do not produce roots are transferred to non-selective rooting media for an additional two weeks. Roots from any shoots that produce roots off selection are tested for expression of the plant selectable marker before they are transferred to the greenhouse and potted in soil.

[0089] The above process is repeated to produce multiple events of transgenic soybean plant cells that are transformed with recombinant DNA from each of the genes identified in Table 1. Events are designed to produce in the transgenic cells one of the proteins identified in Table 1, except the proteins of SEQ ID NOs: 122, 188, and 241 and the soybean homologs of SEQ ID NOs: 141-144, 152, 174, 190, 203, 208, and 239-240, which are suppressed. Progeny transgenic plants and seed of the transformed plant cells are screened for enhanced water use efficiency, enhanced cold tolerance, increased yield, enhanced seed protein and enhanced seed oil. From each group of multiple events of transgenic plants with a specific recombinant DNA from Table 1 the event that produces the greatest enhancement in yield, water use efficiency, nitrogen use efficiency, enhanced cold tolerance, enhanced seed protein and enhanced seed oil is identified and progeny seed is selected for commercial development.

### EXAMPLE 4

### Cotton Transgenic Plants with Enhanced Agronomic Traits

[0090] This example illustrates plant transformation useful in producing a transgenic nucleus in a cotton plant cell, and the plants, seeds and pollen produced from a transgenic cell with such a nucleus having an enhanced trait, i.e. enhanced water use efficiency, increased yield, enhanced nitrogen use efficiency and enhanced seed oil.

[0091] Transgenic cotton plants containing each recombinant DNA having a sequence of SEQ ID NO: 1 through SEQ ID NO: 121 are obtained by transforming with recombinant DNA from each of the genes identified in Table 1 using Agrobacterium-mediated transformation. The above process is repeated to produce multiple events of transgenic cotton plant cells that are transformed with recombinant DNA from each of the genes identified in Table 1. Events are designed to produce in the transgenic cells one of the proteins identified in Table 1, except the cotton homologs of the proteins of SEQ ID NOs: 122, 141-144, 152, 174, 188, 190, 203, 208, and 239-241 which are suppressed.

[0092] From each group of multiple events of transgenic plants with a specific recombinant DNA from Table 1 the event that produces the greatest enhancement in yield, water use efficiency, nitrogen use efficiency, enhanced cold tolerance, enhanced seed protein and enhanced seed oil is identified and progeny seed is selected for commercial development.

[0093] Progeny transgenic plants are selected from a population of transgenic cotton events under specified growing conditions and are compared with control cotton plants. Control cotton plants are substantially the same cotton genotype but without the recombinant DNA, for example, either a parental cotton plant of the same genotype that was not transformed with the identical recombinant DNA or a negative isoline of the transformed plant. Additionally, a commercial cotton cultivar adapted to the geographical region and cultivation conditions, i.e. cotton variety ST474, cotton variety FM 958, and cotton variety Siokra L-23, are used to compare the relative performance of the transgenic cotton plants containing the recombinant DNA.

[0094] Transgenic cotton plants with enhanced yield and water use efficiency are identified by growing under variable water conditions. Specific conditions for cotton include growing a first set of transgenic and control plants under “wet” conditions, i.e. irrigated in the range of 85 to 100 percent of evapotranspiration to provide leaf water potential of −14 to −18 bars, and growing a second set of transgenic and control plants under “dry” conditions, i.e. irrigated in the range of 40 to 60 percent of evapotranspiration to provide a leaf water potential of −21 to −25 bars. Pest control, such as weed and insect control is applied equally to both wet and dry treatments as needed. Data gathered during the trial includes weather records throughout the growing season including detailed records of rainfall; soil characterization information; any herbicide or insecticide applications; any gross agronomic differences observed such as leaf morphology, branching habit, leaf color, time to flowering, and fruiting pattern; plant height at various points during the trial; stand density; node and fruit number including node above white flower and node above crack boll measurements; and visual wilt scoring. Cotton boll samples are taken and analyzed for lint fraction and fiber quality. The cotton is harvested at the normal harvest timeframe for the trial area. Enhanced water use efficiency is indicated by increased yield, improved relative water content, enhanced leaf water potential, increased biomass, enhanced leaf extension rates, and improved fiber parameters.

### EXAMPLE 5

### Canola Transformation

[0095] This example illustrates plant transformation useful in producing the transgenic canola plants of this invention and the production and identification of transgenic seed for transgenic canola having enhanced water use efficiency, enhanced cold tolerance, increased yield, enhanced nitrogen use efficiency, enhanced seed protein and enhanced seed oil.

[0096] Tissues from in vitro grown canola seedlings are prepared and inoculated with overnight-grown Agrobacterium cells containing plasmid DNA with the gene of interest cassette and a plant selectable marker cassette. Following co-cultivation with Agrobacterium, the infected tissues are allowed to grow on selection to promote growth of transgenic shoots, followed by growth of roots from the transgenic shoots. The selected plantlets are then transferred to the greenhouse and potted in soil. Molecular characterizations are performed to confirm the presence of the gene of interest, and its expression in transgenic plants and progenies. Progeny transgenic plants are selected from a population of transgenic canola events under specified growing conditions and are compared with control canola plants. Control canola plants are substantially the same canola genotype but without the recombinant DNA, for example, either a parental canola plant of the same genotype that is not transformed with the identical recombinant DNA or a negative isoline of the transformed plant.

[0097] Transgenic canola plant cells are transformed with each of the recombinant DNA identified in Table 1. The above process is repeated to produce multiple events of transgenic canola plant cells that are transformed with recombinant DNA from each of the genes identified in Table 1. Events are designed to produce in the transgenic cells one of the proteins identified in Table 1, except the canola homologs of the proteins of SEQ ID NOs: 122, 141-144, 152, 174, 188, 190, 203, 208, and 239-241 which are suppressed. Progeny transgenic plants and seed of the transformed plant cells are screened for enhanced water use efficiency, enhanced cold tolerance, increased yield, enhanced seed protein and enhanced seed oil. From each group of multiple events of transgenic plants with a specific recombinant DNA from Table 1 the event that produces the greatest enhancement in yield, water use efficiency, nitrogen use efficiency, enhanced cold tolerance, enhanced seed protein and enhanced seed oil is identified and progeny seed is selected for commercial development.

### EXAMPLE 6

### Homolog Identification

[0098] This example illustrates the identification of homologs of proteins encoded by the DNA identified in Table 1 which is used to provide transgenic seed and plants having enhanced agronomic traits. From the sequence of the homologs, homologous DNA sequence can be identified for preparing additional transgenic seeds and plants of this invention with enhanced agronomic traits.

[0099] An “All Protein Database” was constructed of known protein sequences using a proprietary sequence database and the National Center for Biotechnology Information (NCBI) non-redundant amino acid database (nr.aa). For each organism from which a polynucleotide sequence provided herein was obtained, an “Organism Protein Database” was constructed of known protein sequences of the organism; it is a subset of the All Protein Database based on the NCBI taxonomy ID for the organism.

[0100] The All Protein Database was queried using amino acid sequences provided herein as SEQ ID NO: 122 through SEQ ID NO: 242 using NCBI “blastp” program with E-value cutoff of 1e-8. Up to 1000 top hits were kept, and separated by organism names. For each organism other than that of the query sequence, a list was kept for hits from the query organism itself with a more significant E-value than the best hit of the organism. The list contains likely duplicated genes of the polynucleotides provided herein, and is referred to as the Core List. Another list was kept for all the hits from each organism, sorted by E-value, and referred to as the Hit List.

[0101] The Organism Protein Database was queried using polypeptide sequences provided herein as SEQ ID NO: 122 through SEQ ID NO: 242 using NCBI “blastp” program with E-value cutoff of 1e-4. Up to 1000 top hits were kept. A BLAST searchable database was constructed based on these hits, and is referred to as “SubDB”. SubDB is queried with each sequence in the Hit List using NCBI “blastp” program with E-value cutoff of 1e-8. The hit with the best E-value was compared with the Core List from the corresponding organism. The hit is deemed a likely ortholog if it belongs to the Core List, otherwise it is deemed not a likely ortholog and there is no further search of sequences in the Hit List for the same organism. Homologs from a large number of distinct organisms were identified and are reported below in table 7 with the SEQ ID NO of the original query sequence and the identified homologs as [SEQ ID NO]: [Homolog SEQ ID NOs].

TABLE 7
Protein Sequences and their Homologs

| | |
|---|---|
| 122: | 244 270 291 322 334 352 364 391 406 427 431 433 456 459 468 470 482 541 570 577 593 599 640 651 654 |
| | 672 676 714 748 761 781 782 789 796 798 799 831 833 857 864 885 891 898 902 904 911 933 955 960 970 985 |
| | 990 1005 1026 1033 1034 1044 1056 1065 1069 1075 1127 1133 1136 |
| 123: | 272 315 328 345 360 414 430 447 460 464 476 561 565 566 591 633 636 650 662 699 703 708 710 725 755 |
| | 765 819 826 828 836 852 866 883 909 923 932 996 1040 1111 1126 1128 1129 1130 1140 1144 1171 |
| 124: | 269 320 321 324 336 358 370 377 384 387 408 420 429 440 445 465 477 488 502 528 586 598 600 606 628 |
| | 663 667 697 698 702 706 745 791 805 806 859 913 931 934 952 953 1046 1070 1097 1099 1102 1113 1118 1120 |
| | 1122 1147 1151 1157 1161 1162 1168 |
| 125: | 249 258 263 271 286 335 337 338 344 350 351 375 390 402 405 411 426 438 439 449 454 458 493 499 517 |
| | 562 563 571 572 573 589 594 603 624 627 631 718 720 739 768 772 776 784 788 793 837 886 889 896 907 925 |
| | 939 943 944 950 957 963 964 969 976 1002 1008 1010 1014 1035 1039 1074 1083 1098 1104 1137 1146 1170 |
| | 1177 1180 |
| 126: | 243 245 246 247 248 250 252 253 254 255 256 257 259 260 261 262 264 265 266 267 268 273 274 276 277 |
| | 278 279 280 282 284 285 287 288 290 292 293 295 296 297 298 300 301 302 303 304 305 306 307 308 309 310 |
| | 311 314 316 317 318 319 323 325 326 327 330 331 332 333 339 340 341 342 343 346 348 349 354 355 356 357 |
| | 359 362 363 365 368 369 371 372 373 374 376 378 379 380 381 382 383 388 389 392 393 394 395 396 398 399 |
| | 400 403 404 407 409 410 413 415 417 418 419 421 422 423 425 432 435 436 441 442 443 446 448 451 452 453 |
| | 455 461 462 463 466 467 469 471 472 473 474 475 479 481 483 484 485 486 487 491 492 495 496 497 498 500 |
| | 501 504 505 506 507 508 509 510 511 512 513 514 515 516 518 522 523 524 525 526 527 529 531 532 533 534 |
| | 536 537 538 539 540 542 543 544 545 546 547 548 549 550 551 553 554 555 556 557 558 559 564 567 568 569 |
| | 575 576 579 580 581 582 583 584 585 587 588 592 595 596 597 602 604 607 608 610 611 613 614 615 616 619 |
| | 620 622 623 625 629 632 634 635 637 639 643 644 647 648 649 652 653 655 656 658 659 660 661 664 666 668 |
| | 669 670 671 673 674 675 677 678 679 680 681 682 683 684 685 686 687 688 689 690 692 693 694 695 696 700 |
| | 701 705 707 709 711 713 715 717 719 722 723 726 728 729 730 731 732 733 734 735 737 738 740 741 742 743 |
| | 746 747 749 750 751 752 753 754 757 758 759 762 763 764 767 769 770 771 773 774 775 777 778 779 780 785 |
| | 786 787 790 792 794 800 801 802 803 804 807 808 810 811 812 813 814 815 816 818 820 821 822 823 824 825 |
| | 827 829 830 832 834 835 838 839 840 841 842 843 844 845 846 847 848 849 850 853 854 855 856 858 860 861 |
| | 862 863 865 867 868 870 871 872 873 874 875 877 878 879 881 882 887 888 890 892 893 894 895 897 899 900 |
| | 901 903 905 906 910 912 914 915 917 918 919 920 921 924 926 927 930 937 938 941 942 946 947 948 949 951 |
| | 954 956 958 959 965 966 967 968 971 972 974 975 977 979 981 983 986 987 988 989 991 992 993 994 995 997 |
| | 998 999 1000 1001 1003 1004 1006 1007 1011 1013 1015 1016 1017 1018 1019 1020 1022 1024 1025 1027 1028 |
| | 1029 1030 1031 1032 1036 1037 1041 1042 1043 1045 1047 1048 1049 1052 1053 1054 1055 1057 1058 1059 |
| | 1060 1061 1062 1064 1067 1068 1073 1077 1078 1079 1080 1081 1082 1084 1085 1086 1087 1088 1089 1090 |
| | 1091 1093 1094 1095 1096 1100 1101 1103 1105 1106 1108 1109 1110 1112 1114 1115 1116 1117 1119 1121 |
| | 1123 1124 1125 1131 1135 1138 1139 1141 1142 1143 1145 1148 1149 1150 1152 1153 1154 1155 1156 1158 |
| | 1159 1160 1163 1164 1165 1166 1167 1172 1173 1174 1175 1176 1178 1179 |
| 127: | 251 275 281 289 294 312 313 329 347 353 361 366 367 386 397 401 424 428 434 437 450 457 478 480 489 |
| | 490 494 503 519 520 521 530 535 574 578 601 605 618 641 657 665 704 712 721 727 744 760 766 783 795 797 |
| | 809 817 851 876 880 884 916 922 928 961 962 973 1009 1021 1023 1038 1050 1051 1063 1066 1072 1076 1092 |
| | 1107 1169 |
| 128: | 283 299 385 412 416 444 552 560 590 609 612 617 621 626 630 638 642 645 646 691 716 724 736 756 869 |
| | 908 929 935 936 940 945 978 980 982 984 1012 1071 1132 1134 |
| 129: | 1188 1200 1204 1214 1232 1237 1273 1287 1291 1296 1313 1327 1334 1337 1338 1344 1369 1383 1418 |
| | 1436 1444 1446 1451 1462 1473 1510 1536 1618 1633 1642 1708 1736 1750 1753 1767 1793 1798 1804 1864 |
| | 1897 1902 1905 1931 1957 1958 1963 1966 1973 1986 2001 2022 2032 2041 2043 2095 2125 2146 2150 2163 |
| | 2204 2211 2214 2252 2261 2305 2314 2315 2319 2328 2347 2348 2350 2352 2353 2354 2363 2408 2440 2445 |
| | 2473 2480 2487 2511 2528 2566 2589 2610 2650 2654 2661 2685 2718 2737 2766 2775 2782 2802 2817 2844 |
| | 2851 2863 2880 2895 2897 2907 2930 2941 2946 |
| 130: | 1215 1219 1222 1270 1349 1358 1360 1406 1474 1530 1560 1562 1570 1597 1612 1650 1669 1691 1723 |
| | 1727 1742 1745 1797 1813 1856 1873 1876 1919 1968 1999 2046 2165 2215 2281 2296 2325 2330 2331 2344 |
| | 2438 2476 2517 2522 2537 2578 2658 2674 2683 2754 2780 2811 2830 2892 2913 2928 |
| 131: | 1182 1206 1208 1243 1253 1278 1285 1286 1292 1299 1301 1345 1412 1489 1492 1503 1582 1588 1620 |
| | 1634 1636 1639 1641 1653 1678 1712 1754 1807 1818 1848 1926 1933 1961 2000 2068 2076 2096 2155 2220 |
| | 2247 2248 2253 2256 2258 2259 2356 2358 2364 2367 2398 2413 2421 2456 2457 2560 2563 2573 2577 2691 |
| | 2762 2816 2825 2842 2847 2854 2874 2920 2923 2950 |
| 132: | 1183 1184 1185 1186 1187 1189 1191 1192 1193 1194 1196 1197 1198 1199 1207 1210 1211 1212 1221 |
| | 1223 1225 1231 1233 1235 1236 1239 1242 1246 1247 1249 1256 1257 1259 1262 1264 1265 1267 1269 1275 |
| | 1277 1284 1289 1295 1297 1298 1300 1304 1305 1306 1308 1310 1311 1312 1314 1315 1319 1321 1322 1323 |
| | 1324 1328 1329 1331 1332 1335 1336 1346 1348 1351 1352 1353 1357 1361 1363 1367 1370 1372 1379 1380 |
| | 1381 1382 1386 1389 1392 1393 1396 1397 1398 1399 1400 1409 1413 1414 1417 1419 1422 1423 1426 1428 |
| | 1430 1431 1432 1437 1440 1442 1445 1456 1457 1459 1460 1463 1465 1466 1468 1469 1472 1475 1476 1477 |
| | 1478 1482 1486 1487 1491 1493 1496 1497 1498 1499 1506 1507 1512 1513 1519 1521 1523 1524 1525 1531 |
| | 1548 1549 1550 1552 1553 1554 1555 1571 1573 1577 1583 1589 1591 1595 1598 1600 1602 1603 1606 1608 |
| | 1613 1623 1626 1627 1629 1630 1631 1640 1649 1651 1652 1663 1665 1666 1668 1671 1673 1679 1680 1682 |
| | 1684 1685 1692 1694 1696 1698 1700 1701 1709 1711 1713 1714 1716 1718 1719 1720 1726 1728 1733 1735 |
| | 1737 1739 1740 1741 1744 1747 1752 1755 1756 1757 1758 1759 1761 1764 1765 1766 1770 1779 1780 1784 |
| | 1786 1794 1795 1799 1801 1802 1803 1806 1808 1811 1814 1822 1823 1825 1827 1828 1829 1832 1837 1839 |
| | 1840 1841 1842 1845 1846 1849 1850 1857 1858 1861 1865 1866 1867 1868 1870 1872 1875 1877 1878 1880 |
| | 1881 1883 1886 1888 1890 1891 1892 1893 1895 1896 1898 1903 1906 1907 1909 1912 1913 1914 1916 1917 |
| | 1918 1923 1925 1927 1928 1930 1935 1937 1940 1941 1942 1944 1945 1947 1948 1949 1950 1951 1956 1959 |
| | 1960 1962 1964 1965 1967 1969 1971 1974 1976 1977 1980 1983 1984 1988 1990 1992 1993 1994 1995 1997 |
| | 2006 2008 2009 2010 2013 2014 2015 2017 2020 2021 2023 2024 2026 2028 2033 2036 2038 2039 2045 2048 |
| | 2050 2053 2055 2060 2061 2063 2064 2065 2069 2077 2081 2082 2084 2085 2087 2088 2090 2091 2092 2094 |
| | 2098 2100 2101 2102 2104 2109 2116 2120 2121 2124 2126 2128 2130 2131 2132 2134 2135 2136 2138 2144 |
| | 2152 2158 2159 2160 2161 2164 2167 2168 2173 2174 2175 2176 2177 2178 2181 2184 2185 2186 2187 2188 |
| | 2189 2190 2198 2201 2205 2216 2218 2219 2221 2222 2228 2232 2233 2234 2235 2236 2238 2240 2241 2243 |
| | 2250 2251 2255 2263 2268 2269 2270 2272 2274 2276 2277 2280 2283 2284 2285 2286 2288 2289 2290 2297 |
| | 2299 2301 2304 2306 2307 2308 2311 2316 2318 2324 2326 2327 2329 2332 2333 2335 2337 2338 2340 2341 |
| | 2342 2345 2355 2359 2360 2362 2368 2376 2378 2379 2382 2384 2385 2387 2388 2391 2392 2393 2394 2395 |
| | 2396 2397 2400 2402 2404 2405 2406 2412 2416 2417 2420 2426 2430 2431 2434 2435 2437 2443 2444 2447 |
| | 2455 2458 2460 2467 2468 2472 2474 2475 2479 2482 2484 2485 2486 2489 2493 2495 2497 2498 2499 2503 |
| | 2504 2506 2507 2508 2510 2514 2518 2520 2521 2525 2527 2530 2534 2536 2541 2542 2545 2546 2549 2554 |
| | 2555 2557 2568 2576 2581 2582 2583 2585 2587 2588 2590 2591 2593 2594 2595 2596 2598 2599 2601 2602 |
| | 2606 2608 2611 2614 2617 2620 2624 2630 2633 2636 2638 2639 2641 2642 2643 2646 2651 2657 2659 2660 |
| | 2664 2671 2676 2680 2681 2682 2684 2687 2689 2692 2694 2695 2696 2697 2698 2700 2701 2703 2714 2715 |
| | 2730 2744 2745 2751 2756 2758 2760 2769 2771 2774 2778 2779 2783 2786 2789 2790 2792 2793 2794 2796 |
| | 2798 2799 2804 2807 2809 2812 2813 2814 2822 2824 2828 2831 2836 2837 2838 2839 2841 2843 2855 2856 |
| | 2857 2858 2860 2861 2868 2872 2873 2877 2878 2881 2882 2884 2888 2891 2894 2899 2900 2901 2905 2906 |
| | 2909 2910 2912 2914 2916 2917 2919 2922 2925 2926 2927 2931 2932 2933 2934 2935 2936 2939 2940 2942 |
| | 2947 2949 |
| 133: | 1317 1330 1343 1390 1441 1494 1579 1777 1830 1855 1871 1934 1938 2089 2271 2312 2538 2693 2723 |
| | 2827 2875 2908 |
| 134: | 1181 1190 1195 1201 1202 1203 1205 1209 1216 1217 1218 1220 1224 1227 1228 1230 1234 1238 1248 |
| | 1255 1258 1260 1261 1268 1272 1274 1276 1279 1280 1282 1283 1288 1302 1303 1307 1316 1318 1320 1325 |
| | 1326 1339 1340 1341 1342 1347 1350 1354 1355 1365 1371 1375 1377 1378 1387 1391 1394 1395 1401 1404 |
| | 1407 1410 1411 1416 1420 1421 1425 1427 1435 1438 1439 1448 1449 1452 1453 1455 1458 1461 1470 1471 |
| | 1479 1500 1502 1505 1508 1509 1511 1515 1518 1520 1522 1526 1527 1528 1529 1535 1539 1540 1542 1545 |
| | 1546 1547 1551 1559 1561 1565 1567 1568 1569 1572 1578 1580 1581 1586 1593 1596 1599 1601 1607 1609 |
| | 1614 1615 1617 1622 1628 1635 1638 1646 1647 1661 1664 1667 1672 1686 1687 1688 1689 1690 1693 1702 |
| | 1703 1704 1705 1717 1721 1722 1725 1729 1730 1731 1732 1738 1746 1749 1760 1762 1763 1768 1769 1771 |
| | 1772 1774 1776 1778 1781 1783 1787 1789 1790 1800 1809 1815 1816 1817 1819 1820 1821 1824 1826 1833 |
| | 1834 1835 1836 1843 1844 1847 1854 1859 1860 1869 1874 1879 1884 1885 1889 1894 1900 1901 1904 1910 |
| | 1911 1921 1922 1929 1936 1943 1946 1954 1955 1970 1975 1979 1981 1982 1989 1998 2004 2005 2016 2018 |
| | 2025 2027 2029 2030 2034 2035 2042 2047 2049 2051 2052 2056 2057 2059 2062 2066 2067 2070 2071 2073 |
| | 2079 2080 2097 2099 2106 2108 2110 2111 2112 2114 2115 2118 2119 2122 2123 2127 2129 2133 2137 2139 |
| | 2140 2141 2142 2143 2145 2147 2148 2151 2153 2156 2157 2166 2169 2170 2171 2180 2182 2191 2192 2193 |
| | 2194 2195 2197 2199 2200 2202 2203 2206 2208 2210 2212 2217 2224 2237 2239 2242 2249 2257 2262 2264 |
| | 2265 2267 2273 2275 2278 2282 2287 2292 2293 2294 2295 2303 2309 2310 2313 2317 2321 2323 2334 2336 |
| | 2339 2343 2351 2357 2361 2365 2371 2372 2373 2374 2375 2380 2381 2386 2399 2409 2410 2414 2415 2419 |
| | 2422 2423 2427 2428 2429 2441 2442 2449 2453 2461 2462 2465 2469 2470 2481 2488 2491 2492 2496 2500 |
| | 2501 2502 2505 2509 2512 2515 2523 2529 2531 2535 2539 2540 2543 2548 2550 2551 2559 2561 2562 2564 |
| | 2567 2569 2571 2572 2574 2575 2579 2580 2586 2597 2605 2609 2612 2615 2616 2622 2623 2627 2628 2629 |
| | 2632 2634 2640 2644 2647 2648 2652 2656 2662 2663 2666 2668 2669 2670 2672 2678 2686 2688 2702 2704 |
| | 2710 2713 2717 2719 2721 2732 2733 2735 2736 2738 2739 2740 2741 2742 2743 2747 2752 2753 2755 2757 |
| | 2761 2763 2770 2772 2776 2784 2788 2791 2795 2797 2800 2801 2806 2815 2818 2819 2820 2821 2823 2832 |
| | 2833 2834 2840 2845 2846 2849 2852 2862 2865 2867 2869 2870 2871 2883 2885 2886 2887 2890 2902 2903 |
| | 2911 2918 2921 2937 2938 2943 2948 |
| 135: | 1250 1366 1484 1514 1674 1676 1681 2074 2075 2425 2432 2436 2653 2655 2896 2898 2944 |
| 136: | 1251 1385 1447 1454 1594 1662 1734 1915 2105 2207 2213 2266 2302 2369 2519 2544 2731 2826 |
| 137: | 1429 1501 1838 2011 2113 2320 2494 2603 2631 2720 2773 2835 |
| 138: | 1240 1402 1415 1654 1683 1706 1707 2007 2040 2196 2300 2322 2366 2618 |
| 139: | 1226 1244 1263 1281 1374 1481 1495 1516 1532 1534 1537 1538 1541 1557 1558 1564 1566 1575 1576 |
| | 1587 1590 1592 1604 1605 1616 1619 1621 1624 1625 1643 1644 1645 1648 1656 1658 1659 1660 1670 1748 |
| | 1791 1792 1924 1953 2078 2086 2107 2117 2223 2246 2349 2390 2403 2433 2450 2463 2471 2553 2556 2558 |
| | 2607 2673 2706 2708 2785 2787 2879 2893 |
| 140: | 1271 1356 1359 1362 1373 1467 1480 1490 1611 1637 1796 1920 1932 1987 2037 2592 2649 2767 2768 |
| | 2781 |
| 141: | 1252 1254 1266 1464 1574 1584 1697 1775 1788 1978 1985 2058 2279 2346 2383 2454 2478 2524 2626 |
| | 2805 2829 2853 |
| 142: | 1293 1434 1563 1610 1632 1657 1699 1724 1853 1882 1887 2003 2031 2162 2377 2439 2446 2451 2483 |
| | 2565 2621 2645 2677 2679 2859 2876 2904 2924 |
| 143: | 1252 1254 1266 1464 1483 1675 1775 1788 1978 1985 2058 2149 2254 2279 2346 2383 2454 2478 2524 |
| | 2552 2626 2734 2805 2829 2853 2945 |
| 145: | 1206 1213 1229 1241 1245 1253 1278 1285 1286 1290 1292 1294 1299 1301 1309 1333 1345 1364 1368 |
| | 1376 1384 1388 1403 1405 1408 1424 1433 1443 1450 1485 1488 1503 1504 1517 1533 1543 1544 1556 1585 |
| | 1620 1634 1636 1639 1641 1655 1677 1678 1695 1710 1712 1715 1743 1751 1754 1773 1782 1785 1805 1807 |
| | 1810 1812 1818 1831 1851 1852 1862 1863 1899 1908 1926 1939 1952 1961 1972 1991 1996 2000 2002 2012 |
| | 2019 2044 2054 2068 2072 2076 2083 2093 2096 2103 2154 2172 2179 2183 2209 2220 2225 2226 2227 2229 |
| | 2230 2231 2244 2245 2247 2248 2258 2259 2260 2291 2298 2356 2358 2370 2389 2398 2401 2407 2411 2413 |
| | 2418 2424 2448 2452 2456 2457 2459 2464 2466 2477 2490 2513 2516 2526 2532 2533 2547 2570 2573 2577 |
| | 2584 2600 2604 2613 2619 2625 2635 2637 2665 2667 2675 2690 2699 2705 2707 2709 2711 2712 2716 2722 |
| | 2724 2725 2726 2727 2728 2729 2746 2748 2749 2750 2759 2762 2764 2765 2777 2803 2808 2810 2816 2825 |
| | 2847 2848 2850 2854 2864 2866 2889 2915 2920 2923 2929 2950 |
| 146: | 3010 3133 3287 3327 3549 3567 3628 3733 3789 3892 3929 4063 4144 4216 4330 4384 4491 4534 4650 |
| | 4713 4736 4773 4954 5075 5162 5209 5404 5606 5885 6115 6134 6136 6207 6223 6384 6399 6441 6443 6636 |
| | 6694 |
| 147: | 3076 3208 3338 3346 3398 3515 3721 3748 3749 3795 3976 4103 4110 4261 4280 4316 4367 4386 4393 |
| | 4416 4417 4460 4518 4595 4664 4670 4755 4791 4949 4982 5027 5032 5088 5125 5163 5193 5239 5255 5295 |
| | 5320 5347 5353 5392 5545 5670 5920 5960 6074 6108 6120 6244 6261 6342 6356 6375 6388 6408 6504 6555 |
| | 6661 6696 6827 6859 6869 6877 |
| 148: | 2975 2981 2983 3034 3103 3135 3138 3141 3145 3147 3198 3220 3256 3283 3311 3391 3400 3442 3485 |
| | 3498 3508 3511 3514 3516 3520 3523 3545 3558 3649 3678 3679 3690 3704 3715 3746 3786 3806 3837 3840 |
| | 3946 3964 3966 3981 3987 4000 4040 4068 4095 4114 4119 4125 4192 4199 4225 4230 4242 4252 4256 4258 |
| | 4268 4325 4354 4356 4407 4477 4498 4535 4548 4551 4553 4555 4577 4693 4718 4749 4752 4783 4811 4835 |
| | 4860 4879 4893 4900 4914 5046 5048 5068 5077 5081 5084 5095 5105 5139 5141 5150 5158 5174 5178 5216 |
| | 5217 5246 5259 5262 5297 5298 5362 5411 5429 5465 5475 5499 5537 5565 5567 5570 5621 5663 5665 5688 |
| | 5689 5700 5724 5733 5738 5761 5801 5828 5855 5912 5925 5957 5959 5987 5990 5997 5998 6001 6005 6015 |
| | 6016 6017 6021 6024 6027 6031 6035 6049 6060 6130 6189 6193 6198 6200 6246 6277 6285 6348 6351 6366 |
| | 6367 6371 6401 6431 6436 6439 6450 6476 6492 6576 6580 6610 6616 6627 6637 6662 6697 6698 6735 6758 |
| | 6785 6794 6806 6807 6812 6821 6822 6830 6889 |
| 149: | 2957 2958 2962 2965 2968 2976 2977 2979 2984 2987 2988 2989 2998 2999 3014 3015 3016 3021 3023 |
| | 3024 3026 3033 3035 3037 3045 3051 3060 3070 3075 3080 3081 3082 3092 3094 3096 3106 3107 3113 3115 |
| | 3121 3123 3125 3127 3132 3134 3140 3150 3151 3156 3157 3159 3161 3173 3176 3179 3190 3193 3196 3204 |
| | 3205 3221 3229 3231 3232 3234 3238 3239 3242 3243 3250 3262 3263 3264 3266 3269 3270 3272 3273 3274 |
| | 3275 3277 3286 3294 3300 3303 3304 3305 3319 3320 3321 3322 3323 3324 3331 3335 3337 3342 3355 3362 |
| | 3363 3371 3372 3374 3375 3378 3380 3382 3383 3384 3386 3396 3409 3410 3411 3417 3418 3420 3437 3456 |
| | 3470 3472 3473 3482 3489 3496 3499 3500 3503 3504 3505 3506 3528 3530 3532 3535 3536 3540 3546 3548 |
| | 3550 3554 3555 3560 3561 3566 3569 3570 3571 3573 3574 3575 3590 3591 3592 3595 3597 3598 3599 3625 |
| | 3627 3630 3632 3634 3651 3652 3661 3668 3688 3700 3710 3712 3719 3724 3726 3739 3740 3741 3754 3755 |
| | 3756 3760 3762 3768 3771 3774 3787 3790 3805 3807 3814 3818 3820 3829 3830 3836 3838 3839 3843 3844 |
| | 3845 3860 3863 3872 3876 3878 3881 3886 3893 3897 3912 3915 3921 3923 3931 3940 3942 3943 3944 3947 |
| | 3950 3968 3982 3984 3989 3990 3994 4002 4003 4004 4009 4012 4021 4025 4030 4031 4041 4042 4045 4046 |
| | 4047 4050 4052 4054 4061 4062 4064 4065 4073 4074 4076 4077 4079 4080 4087 4088 4089 4091 4098 4101 |
| | 4104 4106 4124 4131 4133 4145 4146 4154 4168 4169 4176 4187 4194 4196 4198 4206 4211 4212 4222 4231 |
| | 4234 4236 4238 4241 4244 4279 4288 4291 4293 4298 4301 4305 4306 4307 4315 4320 4324 4334 4335 4338 |
| | 4340 4344 4346 4353 4357 4358 4359 4360 4368 4373 4379 4381 4390 4400 4405 4410 4420 4425 4436 4438 |
| | 4440 4447 4450 4454 4458 4461 4464 4468 4490 4492 4503 4504 4505 4506 4508 4511 4512 4514 4515 4516 |
| | 4523 4526 4533 4538 4541 4564 4585 4599 4600 4601 4605 4611 4614 4623 4625 4628 4636 4637 4649 4652 |
| | 4654 4665 4672 4675 4683 4692 4694 4695 4703 4705 4707 4716 4719 4768 4775 4777 4789 4792 4793 4800 |
| | 4805 4806 4815 4816 4817 4819 4823 4825 4834 4864 4866 4875 4889 4891 4903 4908 4917 4923 4925 4933 |
| | 4936 4937 4953 4962 4963 4965 4966 4986 4987 4988 4989 4990 4999 5000 5010 5011 5014 5015 5019 5022 |
| | 5024 5028 5059 5061 5062 5063 5066 5082 5085 5092 5093 5099 5101 5110 5111 5112 5126 5148 5167 5179 |
| | 5181 5184 5185 5188 5189 5194 5219 5224 5237 5247 5252 5256 5257 5283 5285 5293 5296 5299 5301 5303 |
| | 5304 5317 5330 5338 5341 5342 5343 5345 5349 5351 5354 5355 5369 5378 5384 5385 5394 5399 5413 5414 |
| | 5420 5422 5430 5431 5432 5436 5438 5445 5446 5447 5448 5449 5453 5454 5455 5456 5459 5460 5477 5501 |
| | 5503 5511 5516 5517 5518 5520 5540 5541 5549 5550 5566 5568 5569 5573 5579 5582 5584 5585 5591 5592 |
| | 5594 5596 5597 5607 5608 5614 5617 5619 5620 5624 5627 5631 5632 5636 5637 5638 5640 5650 5658 5659 |
| | 5661 5662 5666 5682 5683 5690 5693 5694 5714 5719 5721 5742 5744 5745 5746 5748 5750 5753 5760 5768 |
| | 5769 5772 5775 5776 5777 5778 5781 5782 5783 5785 5786 5794 5802 5805 5810 5812 5814 5817 5839 5849 |
| | 5850 5857 5861 5862 5879 5888 5890 5893 5898 5902 5903 5908 5910 5928 5930 5932 5948 5969 5970 5971 |
| | 5973 5982 5986 5993 5996 6012 6014 6029 6033 6034 6042 6043 6044 6047 6056 6061 6064 6076 6082 6083 |
| | 6087 6095 6096 6103 6105 6107 6109 6110 6111 6114 6116 6123 6125 6139 6141 6143 6144 6147 6148 6150 |
| | 6153 6156 6173 6174 6208 6213 6231 6232 6235 6241 6242 6245 6249 6251 6252 6253 6254 6256 6269 6270 |
| | 6291 6293 6299 6302 6321 6322 6330 6332 6334 6337 6338 6341 6347 6359 6363 6368 6370 6373 6383 6395 |
| | 6398 6400 6409 6424 6425 6426 6429 6438 6446 6484 6485 6503 6507 6510 6515 6517 6547 6550 6554 6572 |
| | 6573 6575 6583 6586 6587 6591 6595 6598 6612 6617 6626 6631 6633 6650 6664 6665 6666 6668 6686 6689 |
| | 6699 6705 6706 6710 6714 6715 6716 6717 6721 6725 6730 6756 6760 6761 6764 6767 6772 6774 6775 6780 |
| | 6781 6809 6810 6824 6826 6832 6834 6835 6848 6849 6851 6862 6864 6866 6868 6879 6883 6892 6896 6900 |
| | 6901 6902 |
| 150: | 2957 2958 2962 2965 2968 2976 2977 2979 2984 2987 2988 2989 2998 2999 3014 3015 3016 3021 3023 |
| | 3024 3026 3033 3035 3037 3045 3051 3056 3060 3070 3075 3080 3081 3082 3092 3094 3096 3106 3107 3115 |
| | 3121 3123 3125 3127 3132 3134 3140 3150 3151 3156 3157 3159 3161 3173 3176 3179 3190 3193 3196 3204 |
| | 3205 3221 3229 3231 3232 3238 3239 3242 3243 3246 3250 3262 3263 3264 3269 3270 3272 3273 3274 3275 |
| | 3277 3286 3300 3303 3304 3310 3321 3322 3323 3324 3331 3335 3337 3342 3355 3362 3363 3371 3372 3374 |
| | 3375 3378 3382 3383 3384 3386 3396 3409 3410 3411 3417 3420 3437 3456 3470 3472 3473 3482 3489 3496 |
| | 3499 3500 3503 3504 3505 3506 3528 3530 3532 3535 3536 3540 3546 3548 3550 3554 3555 3560 3561 3566 |
| | 3568 3569 3570 3571 3573 3574 3591 3592 3595 3597 3598 3599 3625 3627 3630 3632 3634 3651 3652 3661 |
| | 3668 3688 3700 3710 3712 3719 3724 3726 3739 3740 3741 3754 3755 3756 3760 3762 3768 3771 3774 3787 |
| | 3790 3796 3805 3807 3814 3818 3820 3829 3830 3836 3838 3839 3843 3844 3845 3860 3863 3872 3874 3876 |
| | 3878 3881 3886 3893 3894 3897 3912 3915 3921 3931 3940 3943 3944 3947 3968 3982 3984 3989 3990 3994 |
| | 4002 4003 4004 4009 4012 4021 4025 4030 4041 4042 4045 4046 4047 4050 4052 4054 4061 4062 4064 4073 |
| | 4074 4076 4077 4079 4080 4087 4088 4089 4091 4098 4101 4106 4124 4131 4133 4145 4146 4154 4168 4169 |
| | 4176 4187 4194 4196 4198 4206 4211 4212 4222 4231 4234 4236 4238 4241 4244 4279 4287 4288 4291 4293 |
| | 4298 4301 4305 4306 4307 4315 4324 4334 4335 4338 4340 4344 4346 4350 4353 4357 4358 4359 4360 4368 |
| | 4373 4379 4381 4390 4391 4405 4410 4420 4425 4436 4438 4440 4447 4449 4450 4454 4458 4461 4464 4468 |
| | 4482 4485 4490 4492 4503 4504 4505 4506 4508 4511 4512 4514 4515 4516 4517 4523 4526 4533 4538 4541 |
| | 4564 4585 4592 4599 4600 4601 4605 4611 4614 4623 4625 4628 4636 4637 4640 4649 4652 4654 4665 4672 |
| | 4675 4683 4692 4694 4695 4702 4703 4704 4705 4707 4716 4777 4789 4792 4793 4800 4805 4806 4815 4817 |
| | 4819 4823 4825 4834 4852 4864 4866 4875 4889 4903 4908 4917 4923 4930 4933 4936 4937 4953 4962 4963 |
| | 4965 4966 4986 4987 4988 4989 4990 4999 5000 5010 5011 5014 5015 5019 5020 5022 5024 5028 5061 5062 |
| | 5063 5082 5085 5092 5093 5099 5101 5110 5111 5112 5115 5126 5165 5167 5179 5181 5184 5185 5188 5189 |
| | 5194 5219 5221 5224 5237 5247 5252 5256 5257 5283 5285 5293 5296 5299 5301 5303 5304 5317 5324 5330 |
| | 5338 5341 5342 5343 5344 5345 5349 5351 5354 5355 5368 5369 5378 5384 5385 5394 5399 5402 5413 5414 |
| | 5420 5422 5430 5431 5432 5436 5438 5445 5446 5447 5448 5449 5453 5454 5455 5456 5459 5460 5477 5501 |
| | 5503 5507 5511 5516 5517 5518 5520 5541 5546 5549 5555 5566 5568 5569 5573 5579 5582 5584 5585 5591 |
| | 5592 5594 5596 5597 5607 5608 5612 5614 5615 5617 5619 5620 5624 5627 5631 5632 5636 5637 5638 5640 |
| | 5650 5658 5659 5661 5666 5682 5683 5690 5693 5694 5714 5719 5721 5742 5744 5745 5746 5748 5750 5753 |
| | 5760 5768 5769 5772 5775 5776 5777 5778 5781 5782 5783 5785 5786 5794 5802 5805 5810 5811 5812 5814 |
| | 5817 5839 5849 5850 5857 5862 5865 5888 5890 5893 5898 5902 5908 5910 5928 5932 5948 5969 5970 5971 |
| | 5973 5982 5986 5993 5996 6012 6014 6019 6029 6033 6034 6042 6043 6044 6047 6055 6056 6061 6064 6076 |
| | 6082 6083 6085 6087 6095 6096 6103 6105 6107 6109 6110 6111 6114 6116 6121 6123 6125 6139 6141 6142 |
| | 6143 6144 6147 6148 6150 6153 6156 6173 6174 6186 6208 6213 6231 6232 6235 6241 6242 6245 6249 6251 |
| | 6252 6253 6254 6256 6269 6270 6291 6293 6299 6302 6321 6322 6330 6332 6334 6337 6338 6347 6359 6363 |
| | 6368 6370 6373 6383 6395 6398 6400 6409 6424 6425 6426 6438 6446 6484 6485 6503 6510 6515 6517 6547 |
| | 6550 6554 6572 6573 6575 6583 6586 6587 6591 6595 6598 6612 6626 6643 6650 6664 6665 6666 6668 6686 |
| | 6689 6699 6705 6706 6710 6714 6715 6716 6717 6721 6725 6730 6756 6760 6761 6764 6767 6772 6774 6775 |
| | 6780 6781 6809 6810 6824 6826 6832 6834 6835 6846 6848 6849 6851 6862 6864 6866 6868 6879 6883 6892 |
| | 6896 6900 6901 6902 |
| 151: | 2956 2969 3029 3047 3055 3068 3088 3122 3340 3405 3466 3493 3501 3502 3522 3589 3641 3670 3671 |
| | 3681 3810 3812 3852 3884 3909 3928 3937 3952 3978 4020 4129 4220 4343 4345 4349 4418 4466 4480 4489 |
| | 4545 4582 4584 4591 4606 4643 4644 4645 4803 4837 4846 4850 4876 4896 4926 4929 5029 5100 5140 5159 |
| | 5182 5186 5190 5195 5199 5227 5229 5232 5234 5236 5240 5264 5266 5269 5271 5272 5300 5302 5305 5306 |
| | 5309 5327 5334 5336 5337 5339 5374 5379 5386 5389 5390 5613 5628 5652 5695 5712 5756 5872 5896 5909 |
| | 5931 5949 5974 6098 6353 6377 6381 6410 6522 6527 6552 6556 6733 6769 6777 6823 6878 6882 6887 6894 |
| | 6907 6909 |
| 152: | 2956 2969 3029 3047 3055 3088 3122 3340 3405 3466 3493 3501 3502 3522 3589 3641 3670 3671 3681 |
| | 3810 3812 3852 3884 3909 3928 3937 3952 3978 4020 4129 4220 4343 4345 4349 4418 4466 4480 4489 4545 |
| | 4582 4584 4591 4606 4643 4644 4645 4803 4837 4846 4850 4876 4896 4926 4929 5029 5100 5140 5159 5182 |
| | 5186 5190 5195 5199 5227 5229 5232 5234 5236 5240 5264 5266 5269 5271 5272 5300 5302 5305 5306 5309 |
| | 5334 5336 5337 5339 5374 5379 5386 5389 5390 5613 5628 5652 5695 5712 5756 5872 5896 5931 5949 5974 |
| | 6098 6353 6377 6381 6410 6522 6527 6552 6556 6733 6769 6777 6823 6878 6882 6887 6894 6907 6909 |
| 153: | 3031 3299 3413 3527 3541 3633 3674 4424 4853 5574 5847 5929 6324 6404 6423 6495 |
| 154: | 2971 3072 3377 3433 3488 3934 4028 4035 4136 4160 4265 4558 4560 4580 4669 4972 5016 5103 5196 |
| | 5418 5509 5583 5589 5681 5725 5919 5994 6088 6314 6345 6352 6415 6489 6601 6632 6683 6811 6910 |
| 155: | 3095 |
| 156: | 2952 2953 2986 3201 3447 3457 3684 3689 3761 3935 4014 4018 4075 4121 4170 4259 4321 4642 4742 |
| | 4788 4856 4942 4984 5003 5203 5260 5281 5352 5381 5528 5564 5644 5684 5829 5914 6075 6106 6170 6203 |
| | 6331 6448 6493 6499 6599 6624 6659 6673 6731 6734 6750 6802 6820 6841 6880 6891 6903 6916 |
| 157: | 2951 2960 2964 2970 2974 2978 2980 2985 2990 2991 3002 3005 3008 3013 3017 3038 3041 3043 3048 |
| | 3067 3079 3085 3091 3093 3098 3101 3102 3104 3105 3108 3110 3118 3120 3126 3136 3144 3146 3153 3155 |
| | 3162 3164 3167 3170 3172 3175 3178 3183 3184 3185 3191 3195 3200 3206 3213 3217 3237 3249 3253 3257 |
| | 3268 3271 3278 3280 3281 3282 3288 3289 3290 3293 3313 3317 3328 3343 3347 3348 3352 3359 3370 3381 |
| | 3388 3394 3399 3434 3436 3440 3441 3444 3451 3476 3479 3481 3484 3509 3512 3525 3529 3533 3534 3543 |
| | 3544 3557 3563 3579 3583 3584 3594 3604 3605 3611 3615 3616 3617 3618 3621 3622 3624 3635 3637 3638 |
| | 3639 3640 3642 3643 3644 3648 3654 3658 3659 3680 3683 3693 3695 3697 3699 3703 3705 3706 3714 3720 |
| | 3723 3732 3743 3744 3745 3751 3764 3765 3770 3777 3781 3788 3793 3804 3813 3825 3826 3835 3842 3847 |
| | 3855 3856 3857 3865 3866 3867 3869 3871 3882 3890 3896 3899 3907 3914 3927 3932 3939 3954 3960 3971 |
| | 3975 3980 3991 4008 4013 4017 4029 4033 4034 4053 4055 4056 4058 4060 4078 4083 4085 4086 4092 4100 |
| | 4109 4112 4117 4120 4127 4128 4130 4134 4156 4159 4161 4172 4180 4197 4200 4201 4202 4204 4205 4229 |
| | 4237 4240 4262 4263 4267 4269 4270 4271 4272 4274 4277 4283 4290 4292 4295 4297 4314 4328 4329 4337 |
| | 4366 4372 4377 4378 4388 4389 4398 4399 4403 4409 4412 4413 4415 4423 4428 4431 4435 4442 4448 4457 |
| | 4472 4481 4484 4487 4497 4507 4510 4521 4532 4540 4543 4562 4563 4567 4569 4570 4574 4576 4578 4579 |
| | 4593 4610 4624 4626 4627 4630 4631 4632 4634 4635 4648 4656 4658 4662 4667 4668 4671 4674 4678 4681 |
| | 4691 4700 4701 4708 4712 4715 4721 4722 4733 4734 4741 4748 4753 4758 4764 4765 4771 4772 4782 4785 |
| | 4794 4798 4802 4808 4810 4820 4827 4828 4830 4831 4836 4838 4843 4855 4865 4867 4868 4873 4877 4878 |
| | 4880 4883 4885 4895 4911 4913 4915 4918 4920 4921 4924 4943 4947 4951 4957 4959 4973 4974 4977 4985 |
| | 4992 4997 5001 5002 5004 5012 5033 5036 5038 5054 5078 5091 5106 5108 5113 5117 5118 5127 5128 5130 |
| | 5134 5142 5143 5144 5151 5152 5156 5160 5166 5169 5175 5200 5212 5214 5218 5220 5225 5230 5233 5241 |
| | 5243 5244 5248 5253 5268 5275 5276 5277 5282 5312 5313 5318 5319 5331 5333 5340 5357 5361 5364 5365 |
| | 5367 5382 5400 5403 5405 5409 5417 5425 5426 5439 5467 5470 5473 5474 5480 5482 5484 5485 5486 5487 |
| | 5488 5490 5494 5495 5502 5504 5508 5510 5512 5514 5521 5526 5529 5530 5533 5539 5542 5551 5553 5557 |
| | 5560 5561 5563 5577 5587 5593 5598 5600 5601 5618 5629 5634 5639 5645 5646 5647 5648 5656 5664 5669 |
| | 5673 5674 5675 5676 5678 5685 5696 5697 5701 5704 5705 5710 5713 5716 5727 5729 5730 5731 5762 5763 |
| | 5773 5780 5784 5787 5809 5813 5818 5826 5831 5832 5835 5836 5837 5838 5841 5842 5845 5851 5853 5860 |
| | 5867 5874 5883 5891 5894 5899 5900 5904 5915 5922 5933 5935 5936 5939 5941 5943 5944 5947 5950 5951 |
| | 5953 5963 5968 5975 5979 5984 5991 5995 5999 6002 6011 6025 6032 6037 6038 6039 6045 6046 6050 6052 |
| | 6065 6068 6069 6078 6080 6094 6102 6117 6124 6128 6131 6135 6137 6138 6154 6160 6164 6168 6172 6183 |
| | 6191 6201 6202 6204 6214 6216 6219 6222 6224 6229 6234 6243 6257 6262 6266 6273 6276 6278 6283 6294 |
| | 6298 6307 6310 6315 6335 6336 6349 6357 6360 6378 6379 6382 6385 6389 6390 6393 6405 6406 6416 6419 |
| | 6427 6430 6432 6433 6434 6435 6451 6455 6456 6458 6469 6470 6471 6473 6474 6479 6481 6482 6483 6486 |
| | 6490 6496 6497 6506 6508 6514 6516 6519 6520 6526 6528 6533 6534 6535 6538 6543 6548 6562 6568 6578 |
| | 6579 6581 6582 6584 6593 6600 6603 6604 6605 6614 6615 6629 6634 6657 6669 6670 6677 6680 6681 6684 |
| | 6688 6690 6691 6711 6727 6728 6747 6752 6765 6766 6770 6773 6776 6778 6782 6795 6805 6808 6813 6838 |
| | 6839 6842 6843 6844 6852 6857 6861 6874 6875 6876 6890 6893 6897 6914 |
| 158: | 3003 3012 3032 3078 3171 3233 3276 3285 3291 3341 3369 3379 3408 3424 3614 3696 3817 3849 3862 |
| | 3880 4016 4032 4084 4140 4148 4174 4286 4310 4319 4336 4483 4557 4573 4687 4709 4790 4872 4894 4899 |
| | 4935 4971 4983 4991 4994 5031 5034 5045 5052 5223 5267 5292 5360 5408 5496 5580 5611 5737 5743 5752 |
| | 5791 5793 5804 5823 5846 5911 5952 6000 6007 6058 6084 6113 6126 6146 6163 6196 6206 6211 6346 6380 |
| | 6420 6428 6500 6524 6525 6546 6559 6635 6685 6700 6712 6720 6788 6801 6831 6840 6885 |
| 159: | 2997 3011 3036 3040 3111 3112 3117 3174 3267 3471 3483 3521 3576 3586 3607 3610 3682 3718 3824 |
| | 3974 4038 4069 4097 4208 4233 4235 4239 4243 4248 4376 4411 4520 4666 4980 5009 5087 5102 5328 5359 |
| | 5372 5544 5588 5635 5871 5907 6028 6054 6112 6177 6205 6295 6319 6326 6413 6444 6445 6609 6663 6732 |
| | 6757 6915 |
| 160: | 2954 2955 2963 2967 2973 2994 3006 3007 3009 3022 3039 3042 3046 3049 3054 3057 3058 3059 3061 |
| | 3064 3069 3083 3086 3087 3090 3097 3099 3100 3114 3129 3130 3131 3137 3149 3152 3154 3160 3163 3166 |
| | 3169 3177 3188 3189 3192 3199 3207 3212 3216 3218 3226 3227 3236 3241 3244 3245 3251 3252 3254 3255 |
| | 3259 3261 3265 3284 3301 3302 3308 3309 3312 3325 3329 3330 3333 3334 3357 3358 3365 3387 3390 3392 |
| | 3393 3395 3404 3412 3415 3422 3423 3425 3428 3429 3439 3459 3460 3461 3463 3465 3467 3468 3475 3477 |
| | 3480 3486 3495 3497 3510 3517 3518 3519 3524 3531 3538 3539 3542 3547 3551 3553 3556 3564 3565 3572 |
| | 3581 3582 3588 3593 3601 3619 3626 3663 3664 3665 3667 3669 3675 3676 3687 3691 3692 3702 3709 3711 |
| | 3717 3722 3725 3727 3729 3736 3738 3742 3750 3753 3766 3767 3773 3775 3780 3783 3785 3791 3792 3798 |
| | 3799 3802 3803 3809 3811 3831 3846 3848 3854 3861 3864 3868 3883 3887 3888 3904 3908 3911 3913 3919 |
| | 3922 3924 3926 3930 3953 3956 3957 3958 3959 3961 3962 3963 3965 3977 3985 3992 3993 3996 3998 3999 |
| | 4001 4005 4006 4010 4011 4022 4023 4024 4037 4039 4043 4044 4051 4057 4059 4067 4072 4081 4090 4093 |
| | 4094 4099 4102 4105 4108 4113 4116 4137 4143 4149 4151 4158 4166 4167 4171 4173 4175 4177 4178 4183 |
| | 4184 4195 4209 4215 4219 4226 4228 4232 4246 4247 4250 4254 4255 4257 4260 4264 4266 4275 4278 4281 |
| | 4282 4294 4296 4300 4302 4303 4304 4318 4322 4331 4339 4342 4348 4361 4364 4365 4375 4382 4383 4385 |
| | 4394 4395 4396 4397 4402 4406 4408 4419 4422 4437 4439 4441 4443 4445 4455 4456 4459 4463 4467 4473 |
| | 4476 4494 4496 4499 4501 4509 4519 4522 4528 4531 4539 4544 4546 4547 4552 4559 4565 4568 4571 4587 |
| | 4588 4589 4590 4594 4603 4604 4608 4609 4612 4613 4618 4620 4639 4641 4647 4653 4655 4661 4673 4677 |
| | 4679 4680 4682 4684 4685 4686 4688 4689 4697 4698 4699 4711 4720 4724 4727 4728 4735 4744 4746 4750 |
| | 4754 4756 4757 4761 4762 4763 4779 4780 4784 4787 4796 4797 4799 4804 4813 4814 4824 4826 4829 4839 |
| | 4840 4841 4842 4845 4848 4849 4854 4857 4859 4862 4863 4870 4871 4882 4886 4888 4890 4898 4902 4906 |
| | 4907 4910 4912 4916 4928 4932 4939 4940 4944 4950 4952 4958 4960 4961 4964 4970 4976 4978 4993 4996 |
| | 5005 5006 5007 5017 5023 5030 5035 5039 5041 5047 5056 5067 5070 5074 5076 5079 5083 5086 5090 5096 |
| | 5109 5114 5136 5137 5146 5154 5164 5171 5177 5191 5192 5202 5205 5206 5207 5213 5215 5226 5228 5250 |
| | 5254 5258 5261 5263 5265 5270 5273 5278 5280 5284 5290 5291 5308 5322 5323 5325 5332 5335 5348 5366 |
| | 5370 5375 5380 5398 5401 5407 5412 5421 5423 5424 5434 5435 5440 5442 5444 5451 5452 5457 5458 5463 |
| | 5466 5468 5469 5472 5479 5492 5505 5513 5519 5522 5524 5525 5535 5548 5552 5556 5572 5586 5590 5603 |
| | 5605 5609 5622 5623 5626 5641 5642 5651 5654 5657 5660 5672 5677 5679 5687 5692 5703 5707 5708 5709 |
| | 5711 5717 5722 5723 5726 5735 5736 5740 5747 5751 5755 5757 5764 5765 5766 5770 5774 5790 5792 5796 |
| | 5798 5803 5806 5808 5816 5820 5824 5830 5843 5844 5848 5854 5864 5869 5873 5876 5889 5892 5897 5906 |
| | 5916 5918 5927 5945 5954 5958 5961 5962 5964 5966 5967 5972 5976 5980 5981 5983 5985 6003 6004 6006 |
| | 6009 6010 6023 6030 6036 6051 6062 6067 6070 6073 6090 6093 6101 6104 6119 6122 6127 6132 6149 6152 |
| | 6159 6176 6181 6182 6194 6197 6218 6221 6227 6228 6230 6233 6239 6240 6248 6250 6255 6260 6263 6267 |
| | 6268 6274 6280 6282 6290 6306 6309 6317 6318 6323 6325 6327 6329 6339 6340 6344 6350 6362 6364 6365 |
| | 6369 6374 6376 6392 6396 6397 6407 6412 6414 6417 6418 6422 6442 6447 6453 6454 6457 6459 6463 6466 |
| | 6467 6475 6477 6480 6487 6501 6502 6511 6513 6529 6531 6532 6540 6553 6560 6561 6569 6570 6571 6577 |
| | 6585 6588 6589 6590 6592 6597 6618 6620 6622 6630 6639 6642 6645 6646 6647 6649 6654 6656 6660 6672 |
| | 6675 6676 6678 6682 6687 6693 6695 6707 6708 6709 6724 6726 6736 6737 6738 6739 6740 6743 6749 6759 |
| | 6763 6783 6787 6790 6791 6797 6798 6799 6800 6814 6815 6817 6828 6837 6845 6853 6855 6858 6863 6865 |
| | 6870 6872 6886 6888 6898 6905 6906 6908 6911 |
| 161: | 2959 2961 2966 2972 2982 2992 2993 2995 2996 3000 3001 3004 3018 3019 3020 3025 3027 3028 3030 |
| | 3044 3050 3052 3053 3062 3063 3065 3066 3071 3073 3074 3077 3084 3089 3109 3116 3119 3124 3128 3139 |
| | 3142 3143 3148 3158 3165 3168 3180 3181 3182 3186 3187 3194 3197 3202 3203 3209 3210 3211 3214 3215 |
| | 3219 3222 3223 3224 3225 3228 3230 3235 3240 3247 3248 3258 3260 3279 3292 3295 3296 3297 3298 3306 |
| | 3307 3314 3315 3316 3318 3326 3332 3336 3339 3344 3345 3349 3350 3351 3353 3354 3356 3360 3361 3364 |
| | 3366 3367 3368 3373 3376 3385 3389 3397 3401 3402 3403 3406 3407 3414 3416 3419 3421 3426 3427 3430 |
| | 3431 3432 3435 3438 3443 3445 3446 3448 3449 3450 3452 3453 3454 3455 3458 3462 3464 3469 3474 3478 |
| | 3487 3490 3491 3492 3494 3507 3513 3526 3537 3552 3559 3562 3577 3578 3580 3585 3587 3596 3600 3602 |
| | 3603 3606 3608 3609 3612 3613 3620 3623 3629 3631 3636 3645 3646 3647 3650 3653 3655 3656 3657 3660 |
| | 3662 3666 3672 3673 3677 3685 3686 3694 3698 3701 3707 3708 3713 3716 3728 3730 3731 3734 3735 3737 |
| | 3747 3752 3757 3758 3759 3763 3769 3772 3776 3778 3779 3782 3784 3794 3797 3800 3801 3808 3815 3816 |
| | 3819 3821 3822 3823 3827 3828 3832 3833 3834 3841 3850 3851 3853 3858 3859 3870 3873 3875 3877 3879 |
| | 3885 3889 3891 3895 3898 3900 3901 3902 3903 3905 3906 3910 3916 3917 3918 3920 3925 3933 3936 3938 |
| | 3941 3945 3948 3949 3951 3955 3967 3969 3970 3972 3973 3979 3983 3986 3988 3995 3997 4007 4015 4019 |
| | 4026 4027 4036 4048 4049 4066 4070 4071 4082 4096 4107 4111 4115 4118 4122 4123 4126 4132 4135 4138 |
| | 4139 4141 4142 4147 4150 4152 4153 4155 4157 4162 4163 4164 4165 4179 4181 4182 4185 4186 4188 4189 |
| | 4190 4191 4193 4203 4207 4210 4213 4214 4217 4218 4221 4223 4224 4227 4245 4249 4251 4253 4273 4276 |
| | 4284 4285 4289 4299 4308 4309 4311 4312 4313 4317 4323 4326 4327 4332 4333 4341 4347 4351 4352 4355 |
| | 4362 4363 4369 4370 4371 4374 4380 4387 4392 4401 4404 4414 4421 4426 4427 4429 4430 4432 4433 4434 |
| | 4444 4446 4451 4452 4453 4462 4465 4469 4470 4471 4474 4475 4478 4479 4486 4488 4493 4495 4500 4502 |
| | 4513 4524 4525 4527 4529 4530 4536 4537 4542 4549 4550 4554 4556 4561 4566 4572 4575 4581 4583 4586 |
| | 4596 4597 4598 4602 4607 4615 4616 4617 4619 4621 4622 4629 4633 4638 4646 4651 4657 4659 4660 4663 |
| | 4676 4690 4696 4706 4710 4714 4717 4723 4725 4726 4729 4730 4731 4732 4737 4738 4739 4740 4743 4745 |
| | 4747 4751 4759 4760 4766 4767 4769 4770 4774 4776 4778 4780 4781 4786 4795 4801 4807 4809 4812 4818 |
| | 4821 4822 4832 4833 4844 4847 4851 4858 4861 4869 4874 4881 4884 4887 4892 4897 4901 4904 4905 4909 |
| | 4919 4922 4927 4931 4934 4938 4941 4945 4946 4948 4955 4956 4967 4968 4969 4975 4979 4981 4995 4998 |
| | 5008 5013 5018 5021 5025 5026 5037 5040 5042 5043 5044 5049 5050 5051 5053 5055 5057 5058 5060 5064 |
| | 5065 5069 5071 5072 5073 5080 5089 5094 5097 5098 5104 5107 5116 5119 5120 5121 5122 5123 5124 5129 |
| | 5131 5132 5133 5135 5138 5145 5147 5149 5153 5155 5157 5161 5168 5170 5172 5173 5176 5180 5183 5187 |
| | 5197 5198 5201 5204 5208 5210 5211 5222 5231 5235 5238 5242 5245 5249 5251 5274 5279 5286 5287 5288 |
| | 5289 5294 5307 5310 5311 5314 5315 5316 5321 5326 5329 5346 5350 5356 5358 5363 5371 5373 5376 5377 |
| | 5383 5387 5388 5391 5393 5395 5396 5397 5406 5410 5415 5416 5419 5427 5428 5433 5437 5441 5443 5450 |
| | 5461 5462 5464 5471 5476 5478 5481 5483 5489 5491 5493 5497 5498 5500 5506 5515 5523 5527 5531 5532 |
| | 5534 5536 5538 5543 5547 5554 5558 5559 5562 5571 5575 5576 5578 5581 5595 5599 5602 5604 5610 5616 |
| | 5625 5630 5633 5643 5649 5653 5655 5667 5668 5671 5680 5686 5691 5698 5699 5702 5706 5715 5718 5720 |
| | 5728 5732 5734 5739 5741 5749 5754 5758 5759 5767 5771 5779 5788 5789 5795 5797 5799 5800 5807 5815 |
| | 5819 5821 5822 5825 5827 5833 5834 5840 5852 5856 5858 5859 5863 5866 5868 5870 5875 5877 5878 5880 |
| | 5881 5882 5884 5886 5887 5895 5901 5905 5913 5917 5921 5923 5924 5926 5934 5937 5938 5940 5942 5946 |
| | 5955 5956 5965 5977 5978 5988 5989 5992 6008 6013 6018 6020 6022 6026 6040 6041 6048 6053 6057 6059 |
| | 6063 6066 6071 6072 6077 6079 6081 6086 6089 6091 6092 6097 6099 6100 6118 6129 6133 6140 6145 6151 |
| | 6155 6157 6158 6161 6162 6165 6166 6167 6169 6171 6175 6178 6179 6180 6184 6185 6187 6188 6190 6192 |
| | 6195 6199 6209 6210 6212 6215 6217 6220 6225 6226 6236 6237 6238 6247 6258 6259 6264 6265 6271 6272 |
| | 6275 6279 6281 6284 6286 6287 6288 6289 6292 6296 6297 6300 6301 6303 6304 6305 6308 6311 6312 6313 |
| | 6316 6320 6328 6333 6343 6354 6355 6358 6361 6372 6386 6387 6391 6394 6402 6403 6411 6421 6437 6440 |
| | 6449 6452 6460 6461 6462 6464 6465 6468 6472 6478 6488 6491 6494 6498 6505 6509 6512 6518 6521 6523 |
| | 6530 6536 6537 6539 6541 6542 6544 6545 6549 6551 6557 6558 6563 6564 6565 6566 6567 6574 6594 6596 |
| | 6602 6606 6607 6608 6611 6613 6619 6621 6623 6625 6628 6638 6640 6641 6644 6648 6651 6652 6653 6655 |
| | 6658 6667 6671 6674 6679 6692 6701 6702 6703 6704 6713 6718 6719 6722 6723 6729 6741 6742 6744 6745 |
| | 6746 6748 6751 6753 6754 6755 6762 6768 6771 6779 6784 6786 6789 6792 6793 6796 6803 6804 6816 6818 |
| | 6819 6825 6829 6833 6836 6847 6850 6854 6856 6860 6867 6871 6873 6881 6884 6895 6899 6904 6912 6913 |
| 162: | 6919 6922 6926 6930 6932 6933 6946 6948 6950 6953 6955 6972 6994 7027 7028 7030 7033 7035 7044 |
| | 7047 7049 7050 7051 7054 7063 7067 7072 7073 7077 7080 7083 7085 7088 7100 7101 7106 7112 7116 7117 |
| | 7118 7124 7128 7129 7130 7132 7134 7136 7137 7138 7150 7153 7154 7156 7157 7175 7338 7368 7394 7396 |
| | 7398 7401 7403 7412 7430 7431 7433 7438 7443 7445 7448 7454 7455 7467 7469 7472 7473 7478 7479 7484 |
| | 7493 7495 7499 7500 7501 7502 7514 7518 7519 7523 7524 7526 7527 7535 7539 7544 7546 7547 7549 7550 |
| | 7552 7553 7560 7562 7578 7585 7671 7680 7682 7692 7698 7700 7702 7717 7720 7722 7740 7743 7758 7785 |
| | 7795 7815 7819 7820 7830 7831 7833 7836 7838 7841 7848 7866 7868 7869 7871 7873 7874 7875 7876 7883 |
| | 7898 7899 7903 7904 7905 7906 7908 7910 7921 7925 7934 7937 7938 7941 7942 7946 7967 7974 7977 7980 |
| | 7984 7985 8011 8012 8016 8019 8024 8041 8044 8047 8049 8051 8056 8060 8061 8062 8070 8072 8077 8079 |
| | 8081 8083 8085 8104 8132 8166 8169 8172 8174 8175 8178 8185 8310 8365 8374 8375 8377 8381 8382 8400 |
| | 8402 8404 8407 8419 8423 8425 8426 8431 8436 8454 8455 8457 8458 8459 8463 8484 8486 8487 8489 8490 |
| | 8491 8492 8509 8513 8514 8516 8517 8542 8545 8546 8547 8549 8564 8565 8568 8570 8574 8576 8578 8580 |
| | 8583 8584 8588 8589 8591 8601 8603 8604 8606 8608 8609 8613 8616 8618 8622 8627 8634 8637 8640 8641 |
| | 8642 8644 8645 8647 8649 8653 8656 8657 8658 8659 8662 8663 8664 8667 8669 8672 8673 8678 8688 8691 |
| | 8693 8694 8700 8701 8705 8706 8709 8710 8713 8715 8718 8737 8739 8741 8742 8743 8746 8747 8748 8753 |
| | 8759 8764 8768 8776 8777 8779 8781 8782 8785 8786 8791 8796 8813 8815 8818 8819 8822 8837 8839 8841 |
| | 8842 8844 8847 8853 8855 8856 8857 8861 8865 8866 8869 8870 8871 8880 8881 8883 8884 8928 8931 8933 |
| | 8939 8949 8957 8960 8968 8970 8977 9003 9004 9005 9007 9020 9040 9041 9044 9045 9046 9047 9048 9049 |
| | 9051 9052 9072 9075 9076 9077 9079 9080 9082 9083 9086 9088 9090 9093 9108 9113 9114 9116 9117 9118 |
| | 9120 9121 9122 9124 9125 9127 9128 9130 9133 9154 9156 9160 9162 9164 9167 9168 9169 9172 9173 9174 |
| | 9176 9180 9184 9199 9200 9201 9202 9204 9206 9264 9272 9280 9297 9298 9301 9304 9319 9321 9325 9326 |
| | 9327 9329 9330 9335 9345 9349 9356 9357 9359 9360 9361 9362 9363 9364 9366 9371 9380 9382 9384 9385 |
| | 9387 9392 9393 9395 9399 9402 9404 9408 9410 9412 9413 9415 9417 9419 9422 9424 9425 9435 9437 9443 |
| | 9445 9451 9452 9454 9455 9456 9457 9460 9461 9465 9478 9479 9480 9481 9483 9484 9486 9487 9488 9492 |
| | 9493 9497 9499 9500 9503 9516 9522 9525 9526 9527 9529 9530 9531 9533 9534 9537 9538 9543 9547 9550 |
| | 9552 9553 9555 9557 9561 9563 9571 9574 9575 9576 9577 9578 9579 9580 9582 9583 9598 9599 9601 9602 |
| | 9603 9606 9607 9608 9611 9612 9614 9623 9624 9626 9627 9631 9633 9656 9660 9662 9668 9684 9707 9709 |
| | 9730 9732 9765 9768 9771 9772 9776 9788 9789 9790 9793 9796 9807 9808 9816 9818 9819 9821 9824 9845 |
| | 9846 9847 9849 9851 9853 9854 9862 9865 9868 9870 9872 9885 9888 9891 9892 9896 9898 9899 9900 9901 |
| | 9903 9904 9905 9906 9929 9930 9931 9932 9934 9935 9936 9939 9940 9941 9964 9966 9969 9970 9973 9975 |
| | 9977 9980 9982 9983 10002 10013 10015 10018 10021 10026 10038 10041 10044 10046 10048 10074 10077 |
| | 10104 10106 10108 10112 10122 10126 10130 10133 10136 10138 10139 10140 10143 10145 10148 10149 10152 |
| | 10154 10155 10158 10159 10161 10164 10166 10167 10168 10170 10172 10173 10175 10179 10181 10186 10188 |
| | 10192 10193 10194 10195 10196 10197 10199 10200 10205 10207 10209 10213 10214 10215 10216 10218 10220 |
| | 10221 10222 10224 10225 10226 10227 10228 10230 10232 10234 10236 10239 10240 10243 10244 10246 10248 |
| | 10249 10252 10253 10255 10256 10258 10260 10262 10263 10267 10272 10273 10274 10275 10280 10283 10287 |
| | 10289 10291 10295 10297 10301 10303 10308 10309 10310 10315 10316 10317 10318 10321 10323 10329 10331 |
| | 10332 10336 10339 10346 10347 10349 10363 10366 10369 10371 10372 10374 10375 10378 10384 10403 10406 |
| | 10407 10409 10410 10412 10413 10416 10417 10419 10420 10424 10427 10430 10433 10442 10444 10447 10449 |
| | 10452 10462 |
| 163: | 6919 6922 6926 6930 6932 6933 6946 6948 6950 6953 6955 6972 6994 7027 7028 7030 7033 7035 7044 |
| | 7047 7049 7050 7051 7054 7063 7067 7072 7073 7077 7080 7083 7085 7088 7100 7101 7106 7112 7116 7117 |
| | 7118 7124 7128 7129 7130 7132 7134 7136 7137 7138 7150 7153 7154 7156 7157 7175 7338 7368 7394 7396 |
| | 7398 7401 7403 7407 7412 7430 7431 7433 7438 7443 7445 7448 7454 7455 7467 7469 7472 7473 7478 7479 |
| | 7484 7493 7495 7499 7500 7501 7502 7514 7518 7519 7523 7524 7526 7527 7535 7539 7544 7546 7547 7549 |
| | 7550 7552 7553 7560 7562 7578 7585 7671 7680 7682 7692 7698 7700 7702 7717 7720 7722 7740 7743 7758 |
| | 7785 7795 7815 7819 7820 7830 7831 7833 7836 7838 7841 7848 7866 7868 7869 7871 7873 7874 7875 7876 |
| | 7883 7898 7899 7903 7904 7905 7906 7908 7910 7921 7925 7934 7937 7938 7941 7942 7946 7967 7974 7977 |
| | 7980 7984 7985 8011 8012 8016 8019 8024 8041 8044 8047 8049 8051 8056 8060 8061 8062 8070 8072 8077 |
| | 8079 8081 8083 8085 8104 8132 8166 8169 8172 8174 8175 8178 8185 8310 8365 8374 8375 8377 8381 8382 |
| | 8400 8402 8404 8407 8408 8419 8423 8425 8426 8431 8436 8454 8455 8457 8458 8459 8463 8484 8486 8487 |
| | 8489 8490 8491 8492 8509 8513 8514 8516 8517 8542 8545 8546 8547 8549 8564 8565 8568 8570 8574 8576 |
| | 8578 8580 8583 8584 8588 8589 8591 8601 8603 8604 8606 8608 8609 8613 8616 8618 8622 8627 8634 8637 |
| | 8640 8641 8642 8644 8645 8647 8649 8653 8656 8657 8658 8659 8662 8663 8664 8667 8669 8672 8673 8678 |
| | 8688 8691 8693 8694 8700 8701 8705 8706 8709 8710 8713 8715 8718 8737 8739 8741 8742 8743 8746 8747 |
| | 8748 8753 8759 8764 8768 8776 8777 8779 8781 8782 8785 8786 8791 8796 8813 8815 8818 8819 8822 8837 |
| | 8839 8841 8842 8844 8847 8853 8855 8856 8857 8861 8865 8866 8869 8870 8871 8880 8881 8883 8884 8928 |
| | 8931 8933 8939 8949 8957 8960 8968 8970 8977 9003 9004 9005 9007 9020 9040 9041 9044 9045 9046 9047 |
| | 9048 9049 9051 9052 9072 9075 9076 9077 9079 9080 9082 9083 9086 9088 9090 9093 9108 9113 9114 9116 |
| | 9117 9118 9120 9121 9122 9124 9125 9127 9128 9130 9133 9154 9156 9160 9162 9164 9167 9168 9169 9172 |
| | 9173 9174 9176 9180 9184 9199 9200 9201 9202 9204 9206 9264 9272 9280 9297 9298 9301 9304 9319 9321 |
| | 9325 9326 9327 9329 9330 9335 9345 9349 9356 9357 9359 9360 9361 9362 9363 9364 9366 9371 9380 9382 |
| | 9384 9385 9387 9392 9393 9395 9399 9402 9404 9408 9410 9412 9413 9415 9417 9419 9422 9424 9425 9435 |
| | 9437 9443 9445 9451 9452 9454 9455 9456 9457 9460 9461 9465 9478 9479 9480 9481 9483 9484 9486 9487 |
| | 9488 9492 9493 9497 9499 9500 9503 9516 9522 9525 9526 9527 9529 9530 9531 9533 9534 9537 9538 9543 |
| | 9547 9550 9552 9553 9555 9557 9561 9563 9571 9574 9575 9576 9577 9578 9579 9580 9582 9583 9598 9599 |
| | 9601 9602 9603 9606 9607 9608 9611 9612 9614 9623 9624 9626 9627 9631 9633 9656 9660 9662 9668 9684 |
| | 9707 9709 9730 9732 9765 9768 9771 9772 9776 9788 9789 9790 9793 9796 9807 9808 9816 9818 9819 9821 |
| | 9824 9845 9846 9847 9849 9851 9853 9854 9862 9865 9868 9870 9872 9885 9888 9891 9892 9896 9898 9899 |
| | 9900 9901 9903 9904 9905 9906 9929 9930 9931 9932 9934 9935 9936 9939 9940 9941 9964 9966 9969 9970 |
| | 9973 9975 9977 9980 9982 9983 10002 10013 10015 10018 10021 10026 10038 10041 10044 10046 10048 10074 |
| | 10077 10104 10106 10108 10112 10122 10126 10130 10133 10136 10138 10139 10140 10143 10145 10148 10149 |
| | 10152 10154 10155 10158 10159 10161 10164 10166 10167 10168 10170 10172 10173 10175 10179 10181 10186 |
| | 10188 10192 10193 10194 10195 10196 10197 10199 10200 10205 10207 10209 10213 10214 10215 10216 10218 |
| | 10220 10221 10222 10224 10225 10226 10227 10228 10230 10232 10234 10236 10239 10240 10243 10244 10246 |
| | 10248 10249 10252 10253 10255 10256 10258 10260 10262 10263 10267 10272 10273 10274 10275 10283 10287 |
| | 10289 10291 10295 10297 10301 10303 10308 10309 10310 10315 10316 10317 10318 10321 10323 10329 10331 |
| | 10332 10336 10339 10346 10347 10349 10363 10366 10369 10371 10372 10374 10375 10378 10384 10403 10406 |
| | 10407 10409 10410 10412 10413 10416 10417 10419 10420 10424 10427 10430 10433 10442 10444 10447 10449 |
| | 10452 10462 |
| 164: | 6919 6922 6926 6930 6932 6933 6946 6948 6950 6953 6955 6972 6994 7027 7028 7030 7033 7035 7044 |
| | 7047 7049 7050 7051 7054 7063 7067 7072 7073 7077 7080 7083 7085 7088 7100 7101 7106 7112 7116 7117 |
| | 7118 7124 7128 7129 7130 7132 7134 7136 7137 7138 7150 7153 7154 7156 7157 7175 7338 7368 7394 7396 |
| | 7398 7401 7403 7412 7430 7431 7433 7438 7443 7445 7448 7454 7455 7467 7469 7472 7473 7478 7479 7484 |
| | 7493 7495 7499 7500 7501 7502 7514 7518 7519 7523 7524 7526 7527 7535 7539 7544 7546 7547 7549 7550 |
| | 7552 7553 7560 7562 7578 7585 7671 7680 7682 7692 7698 7700 7702 7717 7720 7722 7740 7743 7758 7785 |
| | 7795 7815 7819 7820 7830 7831 7833 7836 7838 7841 7848 7866 7868 7869 7871 7873 7874 7875 7876 7883 |
| | 7898 7899 7903 7904 7905 7906 7908 7910 7921 7925 7934 7937 7938 7941 7942 7946 7967 7974 7977 7980 |
| | 7984 7985 8011 8012 8016 8019 8024 8041 8044 8047 8049 8051 8056 8060 8061 8062 8070 8072 8077 8079 |
| | 8081 8083 8085 8104 8132 8166 8169 8172 8174 8175 8178 8185 8310 8365 8374 8375 8377 8381 8382 8400 |
| | 8402 8404 8407 8408 8419 8423 8425 8426 8431 8436 8454 8455 8457 8458 8459 8463 8484 8486 8487 8489 |
| | 8490 8491 8492 8509 8513 8514 8516 8517 8542 8545 8546 8547 8549 8564 8565 8568 8570 8574 8576 8578 |
| | 8580 8583 8584 8588 8589 8591 8601 8603 8604 8606 8608 8609 8613 8616 8618 8622 8627 8634 8637 8640 |
| | 8641 8642 8644 8645 8647 8649 8653 8656 8657 8658 8659 8662 8663 8664 8667 8669 8672 8673 8678 8688 |
| | 8691 8693 8694 8700 8701 8705 8706 8709 8710 8713 8715 8718 8737 8739 8741 8742 8743 8746 8747 8748 |
| | 8753 8759 8764 8768 8776 8777 8779 8781 8782 8785 8786 8791 8796 8813 8815 8818 8819 8822 8837 8839 |
| | 8841 8842 8844 8847 8853 8855 8856 8857 8861 8865 8866 8869 8870 8871 8880 8881 8883 8884 8928 8931 |
| | 8933 8939 8949 8957 8960 8968 8970 8977 9003 9004 9005 9007 9020 9040 9041 9044 9045 9046 9047 9048 |
| | 9049 9051 9052 9072 9075 9076 9077 9079 9080 9082 9083 9086 9088 9090 9093 9108 9113 9114 9116 9117 |
| | 9118 9120 9121 9122 9124 9125 9127 9128 9130 9133 9154 9156 9160 9162 9164 9167 9168 9169 9172 9173 |
| | 9174 9176 9180 9184 9199 9200 9201 9202 9204 9206 9264 9272 9280 9297 9298 9301 9304 9319 9321 9325 |
| | 9326 9327 9329 9330 9335 9345 9349 9356 9357 9359 9360 9361 9362 9363 9364 9366 9371 9380 9382 9384 |
| | 9385 9387 9392 9393 9395 9399 9400 9402 9404 9408 9410 9412 9413 9415 9417 9419 9422 9424 9425 9435 |
| | 9437 9443 9445 9451 9452 9454 9455 9456 9457 9460 9461 9465 9478 9479 9480 9481 9483 9484 9486 9487 |
| | 9488 9492 9493 9497 9499 9500 9503 9516 9522 9525 9526 9527 9529 9530 9531 9533 9534 9537 9538 9543 |
| | 9547 9550 9552 9553 9555 9557 9561 9563 9571 9574 9575 9576 9577 9578 9579 9580 9582 9583 9598 9599 |
| | 9601 9602 9603 9606 9607 9608 9611 9612 9614 9623 9624 9626 9627 9631 9633 9656 9660 9662 9668 9684 |
| | 9707 9709 9730 9732 9765 9768 9771 9772 9776 9788 9789 9790 9793 9796 9807 9808 9816 9818 9819 9821 |
| | 9824 9845 9846 9847 9849 9851 9853 9854 9862 9865 9868 9870 9872 9885 9888 9891 9892 9896 9898 9899 |
| | 9900 9901 9903 9904 9905 9906 9929 9930 9931 9932 9934 9935 9936 9939 9940 9941 9964 9966 9969 9970 |
| | 9973 9975 9977 9980 9982 9983 10002 10013 10015 10018 10021 10026 10038 10041 10044 10046 10048 10074 |
| | 10077 10104 10106 10108 10112 10122 10126 10130 10133 10136 10138 10139 10140 10143 10145 10148 10149 |
| | 10152 10154 10155 10158 10159 10161 10164 10166 10167 10168 10170 10172 10173 10175 10179 10181 10186 |
| | 10188 10192 10193 10194 10195 10196 10197 10199 10200 10205 10207 10209 10213 10214 10215 10216 10218 |
| | 10220 10221 10222 10224 10225 10226 10227 10228 10230 10232 10234 10236 10239 10240 10243 10244 10246 |
| | 10248 10249 10252 10253 10255 10256 10258 10260 10262 10263 10267 10272 10273 10274 10275 10283 10287 |
| | 10289 10291 10295 10297 10301 10303 10308 10309 10310 10315 10316 10317 10318 10321 10323 10329 10331 |
| | 10332 10336 10339 10346 10347 10349 10363 10366 10369 10371 10372 10374 10375 10378 10384 10403 10406 |
| | 10407 10409 10410 10412 10413 10416 10417 10419 10420 10424 10427 10430 10433 10442 10444 10447 10449 |
| | 10452 10462 |
| 165: | 6919 6922 6926 6930 6932 6933 6946 6948 6950 6953 6955 6957 6971 6972 6986 6991 6994 6998 7011 |
| | 7027 7028 7030 7033 7035 7044 7047 7049 7050 7051 7054 7056 7063 7067 7072 7077 7080 7083 7085 7088 |
| | 7093 7100 7101 7106 7112 7116 7117 7118 7124 7128 7129 7130 7132 7134 7136 7137 7138 7150 7153 7154 |
| | 7156 7157 7162 7164 7175 7216 7269 7327 7386 7394 7396 7398 7401 7403 7407 7412 7417 7430 7431 7433 |
| | 7438 7443 7445 7448 7455 7467 7469 7470 7472 7473 7478 7479 7485 7490 7493 7494 7495 7499 7500 7501 |
| | 7502 7511 7514 7518 7519 7523 7524 7526 7527 7539 7541 7544 7546 7547 7549 7550 7552 7560 7562 7566 |
| | 7578 7585 7756 7761 7762 7781 7786 7792 7804 7817 7830 7831 7833 7834 7836 7838 7840 7841 7849 7866 |
| | 7868 7869 7871 7873 7875 7879 7881 7884 7898 7899 7903 7904 7905 7906 7908 7910 7914 7921 7925 7934 |
| | 7937 7938 7941 7942 7943 7944 7946 7951 7965 7967 7974 7977 7980 7984 7985 8005 8011 8012 8016 8019 |
| | 8024 8041 8044 8047 8049 8051 8064 8066 8072 8077 8079 8081 8083 8085 8147 8169 8170 8172 8174 8175 |
| | 8178 8224 8233 8310 8328 8365 8374 8375 8377 8381 8382 8385 8386 8400 8401 8402 8404 8407 8408 8423 |
| | 8425 8426 8431 8436 8454 8455 8458 8459 8463 8472 8476 8487 8489 8490 8491 8492 8509 8513 8514 8516 |
| | 8517 8531 8542 8545 8546 8547 8549 8551 8552 8555 8564 8565 8568 8570 8574 8575 8576 8578 8579 8580 |
| | 8588 8591 8601 8603 8604 8606 8609 8613 8616 8617 8618 8622 8627 8640 8641 8642 8644 8645 8647 8649 |
| | 8653 8654 8656 8657 8659 8662 8663 8664 8667 8669 8672 8673 8678 8688 8689 8691 8693 8700 8705 8706 |
| | 8709 8710 8713 8715 8718 8729 8739 8741 8743 8746 8747 8748 8753 8759 8764 8776 8777 8779 8781 8782 |
| | 8785 8786 8791 8796 8813 8815 8818 8819 8822 8832 8833 8839 8841 8842 8844 8847 8848 8853 8855 8856 |
| | 8857 8859 8866 8869 8871 8877 8880 8881 8883 8884 8892 8898 8924 8933 8939 8953 8954 8955 8957 8958 |
| | 8960 8968 8970 8977 9003 9004 9005 9006 9007 9040 9041 9044 9045 9046 9047 9048 9049 9051 9052 9072 |
| | 9075 9076 9077 9079 9080 9082 9083 9086 9088 9090 9093 9108 9113 9114 9116 9117 9118 9120 9121 9122 |
| | 9124 9125 9127 9128 9130 9133 9154 9156 9160 9162 9164 9167 9168 9169 9172 9173 9174 9176 9180 9184 |
| | 9199 9200 9201 9202 9204 9206 9249 9264 9270 9298 9299 9301 9304 9315 9319 9320 9321 9325 9326 9327 |
| | 9329 9330 9331 9335 9338 9343 9344 9345 9349 9355 9356 9357 9358 9359 9360 9362 9363 9364 9366 9371 |
| | 9377 9380 9382 9384 9385 9387 9392 9393 9395 9396 9399 9400 9404 9410 9415 9417 9419 9422 9424 9425 |
| | 9430 9437 9443 9445 9451 9452 9454 9455 9456 9457 9458 9460 9461 9470 9471 9478 9480 9481 9483 9484 |
| | 9486 9487 9488 9492 9493 9495 9497 9499 9500 9503 9516 9522 9525 9526 9527 9529 9530 9531 9533 9534 |
| | 9537 9543 9547 9550 9552 9553 9555 9557 9561 9562 9563 9571 9574 9575 9576 9577 9578 9579 9580 9583 |
| | 9589 9590 9593 9597 9598 9599 9600 9601 9602 9603 9607 9608 9611 9612 9614 9620 9623 9624 9626 9627 |
| | 9631 9633 9638 9667 9669 9670 9686 9688 9712 9722 9724 9730 9732 9744 9748 9755 9758 9763 9765 9768 |
| | 9771 9772 9776 9781 9782 9784 9785 9788 9789 9790 9793 9796 9799 9805 9806 9808 9809 9812 9813 9814 |
| | 9816 9818 9819 9821 9824 9829 9837 9841 9845 9846 9847 9849 9851 9853 9854 9862 9865 9868 9870 9872 |
| | 9885 9888 9891 9892 9896 9898 9899 9900 9901 9903 9904 9905 9906 9926 9929 9930 9931 9932 9934 9935 |
| | 9936 9939 9940 9941 9963 9964 9966 9969 9970 9973 9975 9977 9980 9982 9983 10002 10003 10006 10013 |
| | 10014 10015 10018 10021 10026 10038 10041 10044 10046 10048 10058 10074 10108 10111 10122 10133 10136 |
| | 10138 10139 10140 10143 10145 10149 10150 10152 10154 10158 10159 10168 10170 10172 10173 10175 10179 |
| | 10181 10186 10188 10192 10193 10194 10195 10196 10197 10200 10205 10207 10209 10213 10214 10215 10216 |
| | 10218 10219 10220 10221 10222 10224 10226 10227 10228 10230 10234 10236 10239 10240 10243 10244 10246 |
| | 10248 10249 10251 10252 10253 10255 10256 10258 10260 10262 10263 10267 10271 10273 10274 10275 10279 |
| | 10283 10287 10289 10291 10295 10297 10300 10301 10303 10308 10309 10310 10315 10316 10317 10318 10321 |
| | 10329 10331 10332 10336 10339 10345 10346 10347 10349 10355 10357 10362 10363 10366 10369 10371 10372 |
| | 10374 10375 10378 10384 10391 10393 10403 10406 10407 10409 10410 10412 10413 10416 10417 10419 10424 |
| | 10427 10430 10433 10442 10444 10447 10449 10452 10462 |
| 166: | 6919 6922 6926 6930 6932 6933 6946 6948 6950 6953 6955 6957 6971 6972 6986 6991 6994 6998 7011 |
| | 7027 7028 7030 7033 7035 7044 7047 7049 7050 7051 7054 7056 7063 7067 7072 7077 7080 7083 7085 7088 |
| | 7093 7100 7101 7106 7112 7116 7117 7118 7124 7128 7129 7130 7132 7134 7136 7137 7138 7150 7153 7154 |
| | 7156 7157 7162 7164 7175 7216 7269 7327 7386 7394 7396 7398 7401 7403 7407 7412 7417 7430 7431 7433 |
| | 7438 7443 7445 7448 7455 7467 7469 7470 7472 7473 7478 7479 7485 7490 7493 7494 7495 7497 7499 7500 |
| | 7501 7502 7514 7518 7519 7523 7524 7526 7527 7539 7541 7544 7546 7547 7549 7550 7552 7560 7562 7566 |
| | 7578 7585 7756 7761 7762 7781 7786 7792 7804 7817 7830 7831 7833 7834 7836 7838 7840 7841 7849 7866 |
| | 7868 7869 7871 7873 7875 7879 7881 7884 7898 7899 7903 7904 7905 7906 7908 7910 7914 7921 7925 7934 |
| | 7937 7938 7941 7942 7943 7944 7946 7951 7965 7967 7974 7977 7980 7984 7985 8005 8011 8012 8016 8019 |
| | 8024 8041 8044 8047 8049 8051 8064 8066 8072 8077 8079 8081 8083 8085 8147 8169 8170 8172 8174 8175 |
| | 8178 8224 8233 8310 8328 8365 8374 8375 8377 8381 8382 8385 8386 8400 8401 8402 8404 8407 8408 8423 |
| | 8425 8426 8431 8436 8454 8455 8458 8459 8463 8472 8476 8487 8489 8490 8491 8492 8509 8513 8514 8516 |
| | 8517 8531 8542 8545 8546 8547 8549 8551 8552 8555 8564 8565 8568 8570 8574 8575 8576 8578 8579 8580 |
| | 8588 8591 8601 8603 8604 8606 8609 8613 8616 8617 8618 8622 8627 8640 8641 8642 8644 8645 8647 8649 |
| | 8653 8654 8656 8657 8659 8662 8663 8664 8667 8669 8672 8673 8678 8688 8689 8691 8693 8700 8705 8706 |
| | 8709 8710 8713 8715 8718 8729 8739 8741 8743 8746 8747 8748 8753 8759 8764 8776 8777 8779 8781 8782 |
| | 8785 8786 8791 8796 8813 8815 8818 8819 8822 8832 8833 8839 8841 8842 8844 8847 8848 8853 8855 8856 |
| | 8857 8859 8866 8869 8871 8877 8880 8881 8883 8884 8892 8898 8924 8933 8939 8953 8954 8955 8957 8958 |
| | 8960 8968 8970 8977 9003 9004 9005 9006 9007 9040 9041 9044 9045 9046 9047 9048 9049 9051 9052 9072 |
| | 9075 9076 9077 9079 9080 9082 9083 9086 9088 9090 9093 9108 9113 9114 9116 9117 9118 9120 9121 9122 |
| | 9124 9125 9127 9128 9130 9133 9154 9156 9160 9162 9164 9167 9168 9169 9172 9173 9174 9176 9180 9184 |
| | 9199 9200 9201 9202 9204 9206 9249 9264 9270 9298 9299 9301 9304 9315 9319 9320 9321 9325 9326 9327 |
| | 9329 9330 9331 9335 9338 9343 9344 9345 9349 9355 9356 9357 9358 9359 9360 9362 9363 9364 9366 9371 |
| | 9377 9380 9382 9384 9385 9387 9392 9393 9395 9396 9399 9400 9404 9410 9415 9417 9419 9422 9424 9425 |
| | 9430 9437 9443 9445 9451 9452 9454 9455 9456 9457 9458 9460 9461 9470 9471 9478 9480 9481 9483 9484 |
| | 9486 9487 9488 9492 9493 9495 9497 9499 9500 9503 9516 9522 9525 9526 9527 9529 9530 9531 9533 9534 |
| | 9537 9543 9547 9550 9552 9553 9555 9557 9561 9562 9563 9571 9574 9575 9576 9577 9578 9579 9580 9583 |
| | 9589 9590 9593 9597 9598 9599 9600 9601 9602 9603 9607 9608 9611 9612 9614 9620 9623 9624 9626 9627 |
| | 9631 9633 9638 9667 9669 9670 9686 9688 9712 9722 9724 9730 9732 9744 9748 9755 9758 9763 9765 9768 |
| | 9771 9772 9776 9781 9782 9784 9785 9788 9789 9790 9793 9796 9799 9805 9806 9808 9809 9812 9813 9814 |
| | 9816 9818 9819 9821 9824 9829 9837 9841 9845 9846 9847 9849 9851 9853 9854 9862 9865 9868 9870 9872 |
| | 9885 9888 9891 9892 9896 9898 9899 9900 9901 9903 9904 9905 9906 9926 9929 9930 9931 9932 9934 9935 |
| | 9936 9939 9940 9941 9963 9964 9966 9969 9970 9973 9975 9977 9980 9982 9983 10002 10003 10006 10013 |
| | 10014 10015 10018 10021 10026 10038 10041 10044 10046 10048 10058 10074 10108 10111 10122 10133 10136 |
| | 10138 10139 10140 10143 10145 10149 10150 10152 10154 10158 10159 10168 10170 10172 10173 10175 10179 |
| | 10181 10186 10188 10192 10193 10194 10195 10196 10197 10200 10205 10207 10209 10213 10214 10215 10216 |
| | 10218 10219 10220 10221 10222 10224 10226 10227 10228 10230 10234 10236 10239 10240 10243 10244 10246 |
| | 10248 10249 10251 10252 10253 10255 10256 10258 10260 10262 10263 10267 10271 10273 10274 10275 10279 |
| | 10283 10287 10289 10291 10295 10297 10300 10301 10303 10308 10309 10310 10315 10316 10317 10318 10321 |
| | 10329 10331 10332 10336 10339 10345 10346 10347 10349 10355 10357 10362 10363 10366 10369 10371 10372 |
| | 10374 10375 10378 10384 10391 10393 10403 10406 10407 10409 10410 10412 10413 10416 10417 10419 10424 |
| | 10427 10430 10433 10442 10444 10447 10449 10452 10462 |
| 167: | 6919 6922 6926 6930 6932 6933 6946 6948 6950 6953 6955 6957 6971 6972 6986 6991 6994 6998 7011 |
| | 7027 7028 7030 7033 7035 7044 7047 7049 7050 7051 7054 7056 7063 7067 7072 7077 7080 7083 7085 7088 |
| | 7093 7100 7101 7106 7112 7116 7117 7118 7124 7128 7129 7130 7132 7134 7136 7137 7138 7150 7153 7154 |
| | 7156 7157 7162 7164 7175 7216 7269 7327 7386 7394 7396 7398 7401 7403 7407 7412 7417 7430 7431 7433 |
| | 7438 7443 7445 7448 7455 7467 7469 7470 7472 7473 7478 7479 7485 7490 7493 7494 7495 7497 7499 7500 |
| | 7501 7502 7514 7518 7519 7523 7524 7526 7527 7539 7541 7544 7546 7547 7549 7550 7552 7560 7562 7566 |
| | 7578 7585 7756 7761 7762 7781 7786 7792 7804 7817 7830 7831 7833 7834 7836 7838 7840 7841 7849 7866 |
| | 7868 7869 7871 7873 7875 7879 7881 7884 7898 7899 7903 7904 7905 7906 7908 7910 7914 7921 7925 7934 |
| | 7937 7938 7941 7942 7943 7944 7946 7951 7965 7967 7974 7977 7980 7984 7985 8005 8011 8012 8016 8019 |
| | 8024 8041 8044 8047 8049 8051 8064 8066 8072 8077 8079 8081 8083 8085 8147 8169 8170 8172 8174 8175 |
| | 8178 8224 8233 8310 8328 8365 8374 8375 8377 8381 8382 8385 8386 8400 8401 8402 8404 8407 8408 8423 |
| | 8425 8426 8431 8436 8454 8455 8458 8459 8463 8472 8476 8487 8489 8490 8491 8492 8509 8513 8514 8516 |
| | 8517 8531 8542 8545 8546 8547 8549 8551 8552 8555 8564 8565 8568 8570 8574 8575 8576 8578 8579 8580 |
| | 8588 8591 8601 8603 8604 8606 8609 8613 8616 8617 8618 8622 8627 8640 8641 8642 8644 8645 8647 8649 |
| | 8653 8654 8656 8657 8659 8662 8663 8664 8667 8669 8672 8673 8678 8688 8689 8691 8693 8700 8705 8706 |
| | 8709 8710 8713 8715 8718 8729 8739 8741 8743 8746 8747 8748 8753 8759 8764 8776 8777 8779 8781 8782 |
| | 8785 8786 8791 8796 8813 8815 8818 8819 8822 8832 8833 8839 8841 8842 8844 8847 8848 8853 8855 8856 |
| | 8857 8859 8866 8869 8871 8877 8880 8881 8883 8884 8892 8898 8924 8933 8939 8953 8954 8955 8957 8958 |
| | 8960 8968 8970 8977 9003 9004 9005 9006 9007 9040 9041 9044 9045 9046 9047 9048 9049 9051 9052 9072 |
| | 9075 9076 9077 9079 9080 9082 9083 9086 9088 9090 9093 9108 9113 9114 9116 9117 9118 9120 9121 9122 |
| | 9124 9125 9127 9128 9130 9133 9154 9156 9160 9162 9164 9167 9168 9169 9172 9173 9174 9176 9180 9184 |
| | 9199 9200 9201 9202 9204 9206 9249 9264 9270 9298 9299 9301 9304 9315 9319 9320 9321 9325 9326 9327 |
| | 9329 9330 9331 9335 9338 9343 9344 9345 9349 9355 9356 9357 9358 9359 9360 9362 9363 9364 9366 9371 |
| | 9377 9380 9382 9384 9385 9387 9392 9393 9395 9396 9399 9400 9404 9410 9415 9417 9419 9422 9424 9425 |
| | 9430 9437 9443 9445 9451 9452 9454 9455 9456 9457 9458 9460 9461 9470 9471 9478 9480 9481 9483 9484 |
| | 9486 9487 9488 9492 9493 9495 9497 9499 9500 9503 9516 9522 9525 9526 9527 9529 9530 9531 9533 9534 |
| | 9537 9543 9547 9550 9552 9553 9555 9557 9561 9562 9563 9571 9574 9575 9576 9577 9578 9579 9580 9583 |
| | 9589 9590 9593 9597 9598 9599 9600 9601 9602 9603 9607 9608 9611 9612 9614 9620 9623 9624 9626 9627 |
| | 9631 9633 9638 9667 9669 9670 9686 9688 9712 9722 9724 9730 9732 9744 9748 9755 9758 9763 9765 9768 |
| | 9771 9772 9776 9781 9782 9784 9785 9788 9789 9790 9793 9796 9799 9805 9806 9808 9809 9812 9813 9814 |
| | 9816 9818 9819 9821 9824 9829 9837 9841 9845 9846 9847 9849 9851 9853 9854 9862 9865 9868 9870 9872 |
| | 9885 9888 9891 9892 9896 9898 9899 9900 9901 9903 9904 9905 9906 9926 9929 9930 9931 9932 9934 9935 |
| | 9936 9939 9940 9941 9963 9964 9966 9969 9970 9973 9975 9977 9980 9982 9983 10002 10003 10006 10013 |
| | 10014 10015 10018 10021 10026 10038 10041 10044 10046 10048 10058 10074 10108 10111 10122 10133 10136 |
| | 10138 10139 10140 10143 10145 10149 10150 10152 10154 10158 10159 10168 10170 10172 10173 10175 10179 |
| | 10181 10186 10188 10192 10193 10194 10195 10196 10197 10200 10205 10207 10209 10213 10214 10215 10216 |
| | 10218 10219 10220 10221 10222 10224 10226 10227 10228 10230 10234 10236 10239 10240 10243 10244 10246 |
| | 10248 10249 10251 10252 10253 10255 10256 10258 10260 10262 10263 10267 10271 10273 10274 10275 10279 |
| | 10283 10287 10289 10291 10295 10297 10300 10301 10303 10308 10309 10310 10315 10316 10317 10318 10321 |
| | 10329 10331 10332 10336 10339 10345 10346 10347 10349 10355 10357 10362 10363 10366 10369 10371 10372 |
| | 10374 10375 10378 10384 10391 10393 10403 10406 10407 10409 10410 10412 10413 10416 10417 10419 10424 |
| | 10427 10430 10433 10442 10444 10447 10449 10452 10462 |
| 168: | 6919 6922 6926 6930 6932 6933 6946 6948 6950 6953 6955 6972 6994 7027 7028 7030 7033 7035 7044 |
| | 7047 7049 7050 7051 7054 7063 7067 7072 7073 7077 7080 7083 7085 7088 7100 7101 7106 7112 7116 7117 |
| | 7118 7124 7128 7129 7130 7132 7134 7136 7137 7138 7150 7153 7154 7156 7157 7175 7338 7368 7394 7396 |
| | 7398 7401 7403 7412 7430 7431 7433 7438 7443 7445 7448 7454 7455 7467 7469 7472 7473 7478 7479 7484 |
| | 7493 7495 7499 7500 7501 7502 7514 7518 7519 7523 7524 7526 7527 7535 7539 7544 7546 7547 7549 7550 |
| | 7552 7553 7560 7562 7578 7585 7671 7680 7682 7692 7698 7700 7702 7717 7720 7722 7740 7743 7758 7785 |
| | 7795 7815 7819 7820 7830 7831 7833 7836 7838 7841 7848 7866 7868 7869 7871 7873 7874 7875 7876 7883 |
| | 7898 7899 7903 7904 7905 7906 7908 7910 7921 7925 7934 7937 7938 7941 7942 7946 7967 7974 7977 7980 |
| | 7984 7985 8011 8012 8016 8019 8024 8041 8044 8047 8049 8051 8056 8060 8061 8062 8070 8072 8077 8079 |
| | 8081 8083 8085 8104 8132 8166 8169 8172 8174 8175 8178 8185 8310 8365 8374 8375 8377 8381 8382 8400 |
| | 8402 8404 8407 8419 8423 8425 8426 8431 8436 8454 8455 8457 8458 8459 8463 8484 8486 8487 8489 8490 |
| | 8491 8492 8509 8513 8514 8516 8517 8542 8545 8546 8547 8549 8564 8565 8568 8570 8574 8576 8578 8580 |
| | 8583 8584 8588 8589 8591 8601 8603 8604 8606 8608 8609 8613 8616 8618 8622 8627 8634 8637 8640 8641 |
| | 8642 8644 8645 8647 8649 8653 8656 8657 8658 8659 8662 8663 8664 8667 8669 8672 8673 8678 8688 8691 |
| | 8693 8694 8700 8701 8705 8706 8709 8710 8713 8715 8718 8737 8739 8741 8742 8743 8746 8747 8748 8753 |
| | 8759 8764 8768 8776 8777 8779 8781 8782 8785 8786 8791 8796 8813 8815 8818 8819 8822 8837 8839 8841 |
| | 8842 8844 8847 8853 8855 8856 8857 8861 8865 8866 8869 8870 8871 8880 8881 8883 8884 8928 8931 8933 |
| | 8939 8949 8957 8960 8968 8970 8977 9003 9004 9005 9007 9020 9040 9041 9044 9045 9046 9047 9048 9049 |
| | 9051 9052 9072 9075 9076 9077 9079 9080 9082 9083 9086 9088 9090 9093 9108 9113 9114 9116 9117 9118 |
| | 9120 9121 9122 9124 9125 9127 9128 9130 9133 9154 9156 9160 9162 9164 9167 9168 9169 9172 9173 9174 |
| | 9176 9180 9184 9199 9200 9201 9202 9204 9206 9264 9272 9280 9297 9298 9301 9304 9319 9321 9325 9326 |
| | 9327 9329 9330 9335 9345 9349 9356 9357 9359 9360 9361 9362 9363 9364 9366 9371 9380 9382 9384 9385 |
| | 9387 9392 9393 9395 9399 9400 9402 9404 9408 9410 9412 9413 9415 9417 9419 9422 9424 9425 9435 9437 |
| | 9443 9445 9451 9452 9454 9455 9456 9457 9460 9461 9465 9478 9479 9480 9481 9483 9484 9486 9487 9488 |
| | 9492 9493 9497 9499 9500 9503 9516 9522 9525 9526 9527 9529 9530 9531 9533 9534 9537 9538 9543 9547 |
| | 9550 9552 9553 9555 9557 9561 9563 9571 9574 9575 9576 9577 9578 9579 9580 9582 9583 9598 9599 9601 |
| | 9602 9603 9606 9607 9608 9611 9612 9614 9623 9624 9626 9627 9631 9633 9656 9660 9662 9668 9684 9707 |
| | 9709 9730 9732 9765 9768 9771 9772 9776 9788 9789 9790 9793 9796 9807 9808 9816 9818 9819 9821 9824 |
| | 9845 9846 9847 9849 9851 9853 9854 9862 9865 9868 9870 9872 9885 9888 9891 9892 9896 9898 9899 9900 |
| | 9901 9903 9904 9905 9906 9929 9930 9931 9932 9934 9935 9936 9939 9940 9941 9964 9966 9969 9970 9973 |
| | 9975 9977 9980 9982 9983 10002 10013 10015 10018 10021 10026 10038 10041 10044 10046 10048 10074 |
| | 10077 10104 10106 10108 10112 10122 10126 10130 10133 10136 10138 10139 10140 10143 10145 10148 10149 |
| | 10152 10154 10155 10158 10159 10161 10164 10166 10167 10168 10170 10172 10173 10175 10179 10181 10186 |
| | 10188 10192 10193 10194 10195 10196 10197 10199 10200 10205 10207 10209 10213 10214 10215 10216 10218 |
| | 10220 10221 10222 10224 10225 10226 10227 10228 10230 10232 10234 10236 10239 10240 10243 10244 10246 |
| | 10248 10249 10252 10253 10255 10256 10258 10260 10262 10263 10267 10272 10273 10274 10275 10280 10283 |
| | 10287 10289 10291 10295 10297 10301 10303 10308 10309 10310 10315 10316 10317 10318 10321 10323 10329 |
| | 10331 10332 10336 10339 10346 10347 10349 10363 10366 10369 10371 10372 10374 10375 10378 10384 10403 |
| | 10406 10407 10409 10410 10412 10413 10416 10417 10419 10420 10424 10427 10430 10433 10442 10444 10447 |
| | 10449 10452 10462 |
| 169: | 6919 6922 6926 6930 6932 6933 6946 6948 6950 6953 6955 6957 6971 6972 6986 6991 6994 6998 7011 |
| | 7027 7028 7030 7033 7035 7044 7047 7049 7050 7051 7054 7056 7063 7067 7072 7077 7080 7083 7085 7088 |
| | 7093 7100 7101 7106 7112 7116 7117 7118 7124 7128 7129 7130 7132 7134 7136 7137 7138 7150 7153 7154 |
| | 7156 7157 7162 7164 7175 7216 7269 7327 7386 7394 7396 7398 7401 7403 7407 7412 7417 7430 7431 7433 |
| | 7438 7443 7445 7448 7455 7467 7469 7470 7472 7473 7478 7479 7485 7490 7493 7494 7495 7497 7499 7500 |
| | 7501 7502 7514 7518 7519 7523 7524 7526 7527 7539 7541 7544 7546 7547 7549 7550 7552 7560 7562 7566 |
| | 7578 7585 7756 7761 7762 7781 7786 7792 7804 7817 7830 7831 7833 7834 7836 7838 7840 7841 7849 7866 |
| | 7868 7869 7871 7873 7875 7879 7881 7884 7898 7899 7903 7904 7905 7906 7908 7910 7914 7921 7925 7934 |
| | 7937 7938 7941 7942 7943 7944 7946 7951 7965 7967 7974 7977 7980 7984 7985 8005 8011 8012 8016 8019 |
| | 8024 8041 8044 8047 8049 8051 8064 8066 8072 8077 8079 8081 8083 8085 8147 8169 8170 8172 8174 8175 |
| | 8178 8224 8233 8310 8328 8365 8374 8375 8377 8381 8382 8385 8386 8400 8401 8402 8404 8407 8408 8423 |
| | 8425 8426 8431 8436 8454 8455 8458 8459 8463 8472 8476 8487 8489 8490 8491 8492 8509 8513 8514 8516 |
| | 8517 8531 8542 8545 8546 8547 8549 8551 8552 8555 8564 8565 8568 8570 8574 8575 8576 8578 8579 8580 |
| | 8588 8591 8601 8603 8604 8606 8609 8613 8616 8617 8618 8622 8627 8640 8641 8642 8644 8645 8647 8649 |
| | 8653 8654 8656 8657 8659 8662 8663 8664 8667 8669 8672 8673 8678 8688 8689 8691 8693 8700 8705 8706 |
| | 8709 8710 8713 8715 8718 8729 8739 8741 8743 8746 8747 8748 8753 8759 8764 8776 8777 8779 8781 8782 |
| | 8785 8786 8791 8796 8813 8815 8818 8819 8822 8832 8833 8839 8841 8842 8844 8847 8848 8853 8855 8856 |
| | 8857 8859 8866 8869 8871 8877 8880 8881 8883 8884 8892 8898 8924 8933 8939 8953 8954 8955 8957 8958 |
| | 8960 8968 8970 8977 9003 9004 9005 9006 9007 9040 9041 9044 9045 9046 9047 9048 9049 9051 9052 9072 |
| | 9075 9076 9077 9079 9080 9082 9083 9086 9088 9090 9093 9108 9113 9114 9116 9117 9118 9120 9121 9122 |
| | 9124 9125 9127 9128 9130 9133 9154 9156 9160 9162 9164 9167 9168 9169 9172 9173 9174 9176 9180 9184 |
| | 9199 9200 9201 9202 9204 9206 9249 9264 9270 9298 9299 9301 9304 9315 9319 9320 9321 9325 9326 9327 |
| | 9329 9330 9331 9335 9338 9343 9344 9345 9349 9355 9356 9357 9358 9359 9360 9362 9363 9364 9366 9371 |
| | 9377 9380 9382 9384 9385 9387 9392 9393 9395 9396 9399 9400 9404 9410 9415 9417 9419 9422 9424 9425 |
| | 9430 9437 9443 9445 9451 9452 9454 9455 9456 9457 9458 9460 9461 9470 9471 9478 9480 9481 9483 9484 |
| | 9486 9487 9488 9492 9493 9495 9497 9499 9500 9503 9516 9522 9525 9526 9527 9529 9530 9531 9533 9534 |
| | 9537 9543 9547 9550 9552 9553 9555 9557 9561 9562 9563 9571 9574 9575 9576 9577 9578 9579 9580 9583 |
| | 9589 9590 9593 9597 9598 9599 9600 9601 9602 9603 9607 9608 9611 9612 9614 9620 9623 9624 9626 9627 |
| | 9631 9633 9638 9667 9669 9670 9686 9688 9712 9722 9724 9730 9732 9744 9748 9755 9758 9763 9765 9768 |
| | 9771 9772 9776 9781 9782 9784 9785 9788 9789 9790 9793 9796 9799 9805 9806 9808 9809 9812 9813 9814 |
| | 9816 9818 9819 9821 9824 9829 9837 9841 9845 9846 9847 9849 9851 9853 9854 9862 9865 9868 9870 9872 |
| | 9885 9888 9891 9892 9896 9898 9899 9900 9901 9903 9904 9905 9906 9926 9929 9930 9931 9932 9934 9935 |
| | 9936 9939 9940 9941 9963 9964 9966 9969 9970 9973 9975 9977 9980 9982 9983 10002 10003 10006 10013 |
| | 10014 10015 10018 10021 10026 10038 10041 10044 10046 10048 10058 10074 10108 10111 10122 10133 10136 |
| | 10138 10139 10140 10143 10145 10149 10150 10152 10154 10158 10159 10168 10170 10172 10173 10175 10179 |
| | 10181 10186 10188 10192 10193 10194 10195 10196 10197 10200 10205 10207 10209 10213 10214 10215 10216 |
| | 10218 10219 10220 10221 10222 10224 10226 10227 10228 10230 10234 10236 10239 10240 10243 10244 10246 |
| | 10248 10249 10251 10252 10253 10255 10256 10258 10260 10262 10263 10267 10271 10273 10274 10275 10279 |
| | 10283 10287 10289 10291 10295 10297 10300 10301 10303 10308 10309 10310 10315 10316 10317 10318 10321 |
| | 10329 10331 10332 10336 10339 10345 10346 10347 10349 10355 10357 10362 10363 10366 10369 10371 10372 |
| | 10374 10375 10378 10384 10391 10393 10403 10406 10407 10409 10410 10412 10413 10416 10417 10419 10424 |
| | 10427 10430 10433 10442 10444 10447 10449 10452 10462 |
| 170: | 6919 6922 6926 6930 6932 6933 6946 6948 6950 6953 6955 6957 6971 6972 6986 6991 6994 6998 7011 |
| | 7027 7028 7030 7033 7035 7044 7047 7049 7050 7051 7054 7056 7063 7067 7072 7077 7080 7083 7085 7088 |
| | 7093 7100 7101 7106 7112 7116 7117 7118 7124 7128 7129 7130 7132 7134 7136 7137 7138 7150 7153 7154 |
| | 7156 7157 7162 7164 7175 7216 7269 7327 7386 7394 7396 7398 7401 7403 7407 7412 7417 7430 7431 7433 |
| | 7438 7443 7445 7448 7455 7467 7469 7470 7472 7473 7478 7479 7485 7490 7493 7494 7495 7497 7499 7500 |
| | 7501 7502 7514 7518 7519 7523 7524 7526 7527 7539 7541 7544 7546 7547 7549 7550 7552 7560 7562 7566 |
| | 7578 7585 7756 7761 7762 7781 7786 7792 7804 7817 7830 7831 7833 7834 7836 7838 7840 7841 7849 7866 |
| | 7868 7869 7871 7873 7875 7879 7881 7884 7898 7899 7903 7904 7905 7906 7908 7910 7914 7921 7925 7934 |
| | 7937 7938 7941 7942 7943 7944 7946 7951 7965 7967 7974 7977 7980 7984 7985 8005 8011 8012 8016 8019 |
| | 8024 8041 8044 8047 8049 8051 8064 8066 8072 8077 8079 8081 8083 8085 8147 8169 8170 8172 8174 8175 |
| | 8178 8224 8233 8310 8328 8365 8374 8375 8377 8381 8382 8385 8386 8400 8401 8402 8404 8407 8408 8423 |
| | 8425 8426 8431 8436 8454 8455 8458 8459 8463 8472 8476 8487 8489 8490 8491 8492 8509 8513 8514 8516 |
| | 8517 8531 8542 8545 8546 8547 8549 8551 8552 8555 8564 8565 8568 8570 8574 8575 8576 8578 8579 8580 |
| | 8588 8591 8601 8603 8604 8606 8609 8613 8616 8617 8618 8622 8627 8640 8641 8642 8644 8645 8647 8649 |
| | 8653 8654 8656 8657 8659 8662 8663 8664 8667 8669 8672 8673 8678 8688 8689 8691 8693 8700 8705 8706 |
| | 8709 8710 8713 8715 8718 8729 8739 8741 8743 8746 8747 8748 8753 8759 8764 8776 8777 8779 8781 8782 |
| | 8785 8786 8791 8796 8813 8815 8818 8819 8822 8832 8833 8839 8841 8842 8844 8847 8848 8853 8855 8856 |
| | 8857 8859 8866 8869 8871 8877 8880 8881 8883 8884 8892 8898 8924 8933 8939 8953 8954 8955 8957 8958 |
| | 8960 8968 8970 8977 9003 9004 9005 9006 9007 9040 9041 9044 9045 9046 9047 9048 9049 9051 9052 9072 |
| | 9075 9076 9077 9079 9080 9082 9083 9086 9088 9090 9093 9108 9113 9114 9116 9117 9118 9120 9121 9122 |
| | 9124 9125 9127 9128 9130 9133 9154 9156 9160 9162 9164 9167 9168 9169 9172 9173 9174 9176 9180 9184 |
| | 9199 9200 9201 9202 9204 9206 9249 9264 9270 9298 9299 9301 9304 9315 9319 9320 9321 9325 9326 9327 |
| | 9329 9330 9331 9335 9338 9343 9344 9345 9349 9355 9356 9357 9358 9359 9360 9362 9363 9364 9366 9371 |
| | 9377 9380 9382 9384 9385 9387 9392 9393 9395 9396 9399 9400 9404 9410 9415 9417 9419 9422 9424 9425 |
| | 9430 9437 9443 9445 9451 9452 9454 9455 9456 9457 9458 9460 9461 9470 9471 9478 9480 9481 9483 9484 |
| | 9486 9487 9488 9492 9493 9495 9497 9499 9500 9503 9516 9522 9525 9526 9527 9529 9530 9531 9533 9534 |
| | 9537 9543 9547 9550 9552 9553 9555 9557 9561 9562 9563 9571 9574 9575 9576 9577 9578 9579 9580 9583 |
| | 9589 9590 9593 9597 9598 9599 9600 9601 9602 9603 9607 9608 9611 9612 9614 9620 9623 9624 9626 9627 |
| | 9631 9633 9638 9667 9669 9670 9686 9688 9712 9722 9724 9730 9732 9744 9748 9755 9758 9763 9765 9768 |
| | 9771 9772 9776 9781 9782 9784 9785 9788 9789 9790 9793 9796 9799 9805 9806 9808 9809 9812 9813 9814 |
| | 9816 9818 9819 9821 9824 9829 9837 9841 9845 9846 9847 9849 9851 9853 9854 9862 9865 9868 9870 9872 |
| | 9885 9888 9891 9892 9896 9898 9899 9900 9901 9903 9904 9905 9906 9926 9929 9930 9931 9932 9934 9935 |
| | 9936 9939 9940 9941 9963 9964 9966 9969 9970 9973 9975 9977 9980 9982 9983 10002 10003 10006 10013 |
| | 10014 10015 10018 10021 10026 10038 10041 10044 10046 10048 10058 10074 10108 10111 10122 10133 10136 |
| | 10138 10139 10140 10143 10145 10149 10150 10152 10154 10158 10159 10168 10170 10172 10173 10175 10179 |
| | 10181 10186 10188 10192 10193 10194 10195 10196 10197 10200 10205 10207 10209 10213 10214 10215 10216 |
| | 10218 10219 10220 10221 10222 10224 10226 10227 10228 10230 10234 10236 10239 10240 10243 10244 10246 |
| | 10248 10249 10251 10252 10253 10255 10256 10258 10260 10262 10263 10267 10271 10273 10274 10275 10279 |
| | 10283 10287 10289 10291 10295 10297 10300 10301 10303 10308 10309 10310 10315 10316 10317 10318 10321 |
| | 10329 10331 10332 10336 10339 10345 10346 10347 10349 10355 10357 10362 10363 10366 10369 10371 10372 |
| | 10374 10375 10378 10384 10391 10393 10403 10406 10407 10409 10410 10412 10413 10416 10417 10419 10424 |
| | 10427 10430 10433 10442 10444 10447 10449 10452 10462 |
| 171: | 6919 6922 6926 6930 6932 6933 6946 6948 6950 6953 6955 6972 6994 7027 7028 7030 7033 7035 7044 |
| | 7047 7049 7050 7051 7054 7063 7067 7072 7073 7077 7080 7083 7085 7088 7100 7101 7106 7112 7116 7117 |
| | 7118 7124 7128 7129 7130 7132 7134 7136 7137 7138 7150 7153 7154 7156 7157 7175 7338 7368 7394 7396 |
| | 7398 7401 7403 7412 7430 7431 7433 7438 7443 7445 7448 7454 7455 7467 7469 7472 7473 7478 7479 7484 |
| | 7493 7495 7499 7500 7501 7502 7514 7518 7519 7523 7524 7526 7527 7535 7539 7544 7546 7547 7549 7550 |
| | 7552 7553 7560 7562 7578 7585 7671 7680 7682 7692 7698 7700 7702 7717 7720 7722 7740 7743 7758 7785 |
| | 7795 7815 7819 7820 7830 7831 7833 7836 7838 7841 7848 7866 7868 7869 7871 7873 7874 7875 7876 7883 |
| | 7898 7899 7903 7904 7905 7906 7908 7910 7921 7925 7934 7937 7938 7941 7942 7946 7967 7974 7977 7980 |
| | 7984 7985 8011 8012 8016 8019 8024 8041 8044 8047 8049 8051 8056 8060 8061 8062 8070 8072 8077 8079 |
| | 8081 8083 8085 8104 8132 8166 8169 8172 8174 8175 8178 8185 8310 8365 8374 8375 8377 8381 8382 8400 |
| | 8402 8404 8407 8408 8419 8423 8425 8426 8431 8436 8454 8455 8457 8458 8459 8463 8484 8486 8487 8489 |
| | 8490 8491 8492 8509 8513 8514 8516 8517 8542 8545 8546 8547 8549 8564 8565 8568 8570 8574 8576 8578 |
| | 8580 8583 8584 8588 8589 8591 8601 8603 8604 8606 8608 8609 8613 8616 8618 8622 8627 8634 8637 8640 |
| | 8641 8642 8644 8645 8647 8649 8653 8656 8657 8658 8659 8662 8663 8664 8667 8669 8672 8673 8678 8688 |
| | 8691 8693 8694 8700 8701 8705 8706 8709 8710 8713 8715 8718 8737 8739 8741 8742 8743 8746 8747 8748 |
| | 8753 8759 8764 8768 8776 8777 8779 8781 8782 8785 8786 8791 8796 8813 8815 8818 8819 8822 8837 8839 |
| | 8841 8842 8844 8847 8853 8855 8856 8857 8861 8865 8866 8869 8870 8871 8880 8881 8883 8884 8928 8931 |
| | 8933 8939 8949 8957 8960 8968 8970 8977 9003 9004 9005 9007 9020 9040 9041 9044 9045 9046 9047 9048 |
| | 9049 9051 9052 9072 9075 9076 9077 9079 9080 9082 9083 9086 9088 9090 9093 9108 9113 9114 9116 9117 |
| | 9118 9120 9121 9122 9124 9125 9127 9128 9130 9133 9154 9156 9160 9162 9164 9167 9168 9169 9172 9173 |
| | 9174 9176 9180 9184 9199 9200 9201 9202 9204 9206 9264 9272 9280 9297 9298 9301 9304 9319 9321 9325 |
| | 9326 9327 9329 9330 9335 9345 9349 9356 9357 9359 9360 9361 9362 9363 9364 9366 9371 9380 9382 9384 |
| | 9385 9387 9392 9393 9395 9399 9400 9402 9404 9408 9410 9412 9413 9415 9417 9419 9422 9424 9425 9435 |
| | 9437 9443 9445 9451 9452 9454 9455 9456 9457 9460 9461 9465 9478 9479 9480 9481 9483 9484 9486 9487 |
| | 9488 9492 9493 9497 9499 9500 9503 9516 9522 9525 9526 9527 9529 9530 9531 9533 9534 9537 9538 9543 |
| | 9547 9550 9552 9553 9555 9557 9561 9563 9571 9574 9575 9576 9577 9578 9579 9580 9582 9583 9598 9599 |
| | 9601 9602 9603 9606 9607 9608 9611 9612 9614 9623 9624 9626 9627 9631 9633 9656 9660 9662 9668 9684 |
| | 9707 9709 9730 9732 9765 9768 9771 9772 9776 9788 9789 9790 9793 9796 9807 9808 9816 9818 9819 9821 |
| | 9824 9845 9846 9847 9849 9851 9853 9854 9862 9865 9868 9870 9872 9885 9888 9891 9892 9896 9898 9899 |
| | 9900 9901 9903 9904 9905 9906 9929 9930 9931 9932 9934 9935 9936 9939 9940 9941 9964 9966 9969 9970 |
| | 9973 9975 9977 9980 9982 9983 10002 10013 10015 10018 10021 10026 10038 10041 10044 10046 10048 10074 |
| | 10077 10104 10106 10108 10112 10122 10126 10130 10133 10136 10138 10139 10140 10143 10145 10148 10149 |
| | 10152 10154 10155 10158 10159 10161 10164 10166 10167 10168 10170 10172 10173 10175 10179 10181 10186 |
| | 10188 10192 10193 10194 10195 10196 10197 10199 10200 10205 10207 10209 10213 10214 10215 10216 10218 |
| | 10220 10221 10222 10224 10225 10226 10227 10228 10230 10232 10234 10236 10239 10240 10243 10244 10246 |
| | 10248 10249 10252 10253 10255 10256 10258 10260 10262 10263 10267 10272 10273 10274 10275 10283 10287 |
| | 10289 10291 10295 10297 10301 10303 10308 10309 10310 10315 10316 10317 10318 10321 10323 10329 10331 |
| | 10332 10336 10339 10346 10347 10349 10363 10366 10369 10371 10372 10374 10375 10378 10384 10403 10406 |
| | 10407 10409 10410 10412 10413 10416 10417 10419 10420 10424 10427 10430 10433 10442 10444 10447 10449 |
| | 10452 10462 |
| 172: | 7010 7053 7161 7293 7790 7823 7917 8065 8129 8917 8925 9042 9339 9490 9649 9804 10107 10147 10405 |
| 173: | 6974 6978 7064 7160 7223 7238 7364 7609 7773 7774 7845 7880 7911 7931 7947 8111 8113 8115 8145 |
| | 8210 8250 8264 8295 8296 8367 8495 8504 8523 8614 8679 8766 8793 8906 8963 9137 9406 9658 9681 9762 |
| | 9791 9794 10035 10065 10119 10129 10146 10151 10278 10359 10468 |
| 174: | 6964 7097 7110 7425 7591 7617 7710 7755 7991 8058 8091 8139 8326 8340 8346 8480 8541 8543 8765 |
| | 8773 8784 8809 8834 8915 9059 9097 9150 9276 9286 9650 9655 9836 9943 9997 10052 10134 10141 10338 |
| 175: | 7390 7580 8153 8508 8572 8695 9073 9084 9306 9333 9506 9588 9842 10010 10103 10206 10434 |
| 176: | 6918 6938 6966 6975 6976 6977 6996 6999 7000 7014 7020 7032 7060 7086 7115 7121 7123 7177 7178 |
| | 7185 7188 7191 7233 7237 7261 7262 7263 7271 7296 7298 7302 7306 7307 7317 7326 7337 7346 7349 7352 |
| | 7374 7376 7377 7378 7380 7383 7406 7409 7415 7426 7429 7437 7453 7464 7477 7504 7510 7515 7530 7574 |
| | 7576 7577 7588 7593 7594 7602 7614 7621 7623 7626 7654 7677 7679 7745 7797 7813 7877 7953 7954 7993 |
| | 8023 8032 8036 8059 8069 8088 8089 8093 8095 8098 8099 8150 8152 8177 8180 8209 8231 8235 8269 8281 |
| | 8290 8291 8294 8320 8357 8362 8363 8369 8379 8380 8388 8429 8438 8449 8453 8456 8500 8522 8563 8586 |
| | 8587 8593 8598 8612 8625 8631 8692 8714 8720 8725 8754 8757 8761 8772 8774 8792 8806 8808 8816 8826 |
| | 8843 8851 8854 8860 8872 8886 8888 8895 8900 8934 8951 8964 8972 8980 8981 8982 8983 8984 8985 8988 |
| | 8990 9008 9010 9011 9015 9016 9037 9054 9055 9064 9081 9103 9109 9123 9134 9145 9146 9151 9157 9158 |
| | 9177 9183 9188 9193 9223 9227 9228 9229 9230 9236 9237 9242 9243 9251 9254 9255 9256 9259 9267 9271 |
| | 9273 9290 9300 9303 9334 9347 9353 9369 9374 9420 9421 9423 9426 9446 9475 9514 9519 9523 9524 9554 |
| | 9556 9558 9559 9560 9581 9641 9644 9671 9673 9676 9696 9697 9698 9699 9700 9701 9702 9706 9716 9726 |
| | 9728 9729 9731 9733 9734 9752 9759 9766 9769 9840 9857 9859 9863 9873 9879 9890 9894 9895 9897 9907 |
| | 9909 9911 9915 9924 9927 9942 9954 9957 9965 9967 9990 9993 9998 10004 10016 10017 10061 10064 10069 |
| | 10070 10075 10096 10127 10131 10142 10171 10174 10203 10208 10237 10241 10259 10264 10276 10281 10292 |
| | 10304 10311 10312 10322 10422 10425 10437 10439 10457 10459 |
| 177: | 6925 6928 6934 6985 7046 7104 7108 7135 7163 7208 7308 7311 7402 7414 7631 7633 7767 7844 8008 |
| | 8073 8082 8200 8255 8282 8288 8298 8398 8485 8527 8535 8548 8557 8605 8708 8798 8811 8831 9017 9026 |
| | 9030 9211 9215 9284 9310 9350 9427 9462 9548 9632 9825 9848 9922 10049 10128 10162 10198 10266 10268 |
| | 10387 10411 |
| 178: | 6919 6922 6926 6930 6932 6933 6946 6948 6950 6953 6955 6957 6971 6972 6986 6991 6994 6998 7011 |
| | 7027 7028 7030 7033 7035 7044 7047 7049 7050 7051 7054 7056 7063 7067 7072 7077 7080 7083 7085 7088 |
| | 7093 7100 7101 7106 7112 7116 7117 7118 7124 7128 7129 7130 7132 7134 7136 7137 7138 7150 7153 7154 |
| | 7156 7157 7162 7164 7175 7216 7269 7327 7386 7394 7396 7398 7401 7403 7407 7412 7417 7430 7431 7433 |
| | 7438 7443 7445 7448 7455 7467 7469 7470 7472 7473 7478 7479 7485 7490 7493 7494 7495 7497 7499 7500 |
| | 7501 7502 7514 7518 7519 7523 7524 7526 7527 7539 7541 7544 7546 7547 7549 7550 7552 7560 7562 7566 |
| | 7578 7585 7756 7761 7762 7763 7781 7786 7792 7804 7817 7830 7831 7833 7834 7836 7838 7840 7841 7849 |
| | 7866 7868 7869 7871 7873 7875 7879 7881 7884 7898 7899 7903 7904 7905 7906 7908 7910 7914 7921 7925 |
| | 7934 7937 7938 7941 7942 7943 7944 7946 7951 7965 7967 7974 7977 7980 7984 7985 8005 8011 8012 8016 |
| | 8019 8024 8041 8044 8047 8049 8051 8064 8066 8072 8077 8079 8081 8083 8085 8147 8169 8170 8172 8174 |
| | 8175 8178 8224 8233 8310 8328 8365 8374 8375 8377 8381 8382 8385 8386 8400 8401 8402 8404 8407 8408 |
| | 8423 8425 8426 8431 8436 8454 8455 8458 8459 8463 8472 8476 8487 8489 8490 8491 8492 8509 8513 8514 |
| | 8516 8517 8531 8542 8545 8546 8547 8549 8551 8552 8555 8564 8565 8568 8570 8574 8575 8576 8578 8579 |
| | 8580 8588 8591 8601 8603 8604 8606 8609 8613 8616 8617 8618 8622 8627 8639 8640 8641 8642 8644 8645 |
| | 8647 8649 8653 8654 8656 8657 8659 8662 8663 8664 8667 8669 8672 8673 8678 8688 8689 8691 8693 8700 |
| | 8705 8706 8709 8710 8713 8715 8718 8729 8739 8741 8743 8746 8747 8748 8753 8759 8764 8776 8777 8779 |
| | 8781 8782 8785 8786 8791 8796 8813 8815 8818 8819 8822 8832 8833 8839 8841 8842 8844 8847 8848 8853 |
| | 8855 8856 8857 8859 8866 8869 8871 8877 8880 8881 8883 8884 8887 8892 8898 8924 8933 8939 8953 8954 |
| | 8955 8957 8958 8960 8968 8970 8977 9003 9004 9005 9006 9007 9040 9041 9044 9045 9046 9047 9048 9049 |
| | 9051 9052 9072 9075 9076 9077 9079 9080 9082 9083 9086 9088 9090 9093 9108 9113 9114 9116 9117 9118 |
| | 9120 9121 9122 9124 9125 9127 9128 9130 9133 9154 9156 9160 9162 9164 9167 9168 9169 9172 9173 9174 |
| | 9176 9180 9184 9199 9200 9201 9202 9204 9206 9249 9264 9270 9298 9299 9301 9304 9315 9319 9320 9321 |
| | 9325 9326 9327 9329 9330 9331 9335 9338 9343 9344 9345 9349 9355 9356 9357 9358 9359 9360 9362 9363 |
| | 9364 9366 9371 9377 9380 9382 9384 9385 9387 9392 9393 9395 9396 9399 9400 9404 9410 9415 9417 9419 |
| | 9422 9424 9425 9430 9443 9445 9451 9452 9454 9455 9456 9457 9458 9460 9461 9470 9471 9478 9480 9481 |
| | 9483 9484 9486 9487 9488 9492 9493 9495 9497 9499 9500 9503 9516 9522 9525 9526 9527 9529 9530 9531 |
| | 9533 9534 9537 9543 9547 9550 9552 9553 9555 9557 9561 9562 9563 9571 9574 9575 9576 9577 9578 9579 |
| | 9580 9583 9589 9590 9593 9597 9598 9599 9600 9601 9602 9603 9607 9608 9611 9612 9614 9620 9623 9624 |
| | 9626 9627 9631 9633 9638 9667 9669 9670 9686 9688 9712 9722 9724 9730 9732 9744 9748 9755 9758 9763 |
| | 9765 9768 9771 9772 9776 9781 9782 9784 9785 9788 9789 9790 9793 9796 9799 9805 9806 9808 9809 9812 |
| | 9813 9814 9816 9818 9819 9821 9824 9829 9837 9841 9845 9846 9847 9849 9851 9853 9854 9862 9865 9868 |
| | 9870 9872 9885 9888 9891 9892 9896 9898 9899 9900 9901 9903 9904 9905 9906 9926 9929 9930 9931 9932 |
| | 9934 9935 9936 9939 9940 9941 9963 9964 9966 9969 9970 9973 9975 9977 9980 9982 9983 10002 10003 10006 |
| | 10013 10014 10015 10018 10021 10026 10038 10041 10044 10046 10048 10058 10074 10108 10111 10122 10133 |
| | 10136 10138 10139 10140 10143 10145 10149 10150 10152 10154 10158 10159 10168 10170 10172 10173 10175 |
| | 10179 10181 10186 10188 10192 10193 10194 10195 10196 10200 10205 10207 10209 10213 10214 10215 10216 |
| | 10218 10219 10220 10221 10222 10224 10226 10227 10228 10230 10234 10236 10239 10240 10243 10244 10246 |
| | 10248 10249 10251 10252 10253 10255 10256 10258 10260 10262 10263 10267 10271 10274 10275 10279 10283 |
| | 10287 10289 10291 10295 10297 10300 10301 10303 10308 10309 10310 10315 10316 10317 10318 10321 10329 |
| | 10331 10332 10336 10339 10345 10346 10347 10349 10355 10357 10362 10363 10366 10369 10371 10372 10374 |
| | 10375 10378 10384 10391 10393 10403 10406 10407 10409 10410 10412 10413 10416 10417 10419 10424 10427 |
| | 10430 10433 10442 10444 10447 10449 10452 10462 |
| 179: | 6940 6943 7005 7015 7039 7040 7043 7061 7099 7181 7183 7186 7189 7258 7272 7282 7285 7356 7439 |
| | 7447 7451 7521 7525 7533 7535 7550 7553 7555 7558 7592 7598 7613 7640 7665 7687 7696 7768 7814 7851 |
| | 7865 7927 8052 8054 8057 8114 8141 8149 8173 8352 8356 8373 8422 8430 8446 8451 8551 8553 8566 8716 |
| | 8726 8730 8787 8801 8803 8804 8825 8830 8873 8902 8909 8912 8914 8916 8918 8919 8920 8973 8974 8991 |
| | 8994 9009 9023 9089 9099 9101 9111 9191 9194 9203 9245 9247 9250 9252 9289 9340 9351 9370 9390 9447 |
| | 9449 9494 9528 9535 9618 9647 9657 9663 9674 9694 9717 9741 9779 9833 9949 10023 10027 10029 10080 |
| | 10083 10137 10184 10185 10187 10189 10201 10210 10313 10328 |
| 180: | 6973 6989 6993 7004 7037 7058 7070 7092 7139 7220 7324 7371 7379 7488 7554 7620 7676 7726 7856 |
| | 7888 7945 7952 7997 8078 8167 8249 8468 8577 8696 8751 8760 8767 9163 9192 9232 9261 9268 9302 9336 |
| | 9482 9635 9661 9677 9703 9735 9753 9815 9831 9947 10043 10059 10062 10091 10182 10288 10333 10436 |
| | 10471 |
| 181: | 7025 7252 7463 7498 7777 7779 7780 8619 8623 9401 9414 9418 9880 9882 10350 10353 10463 |
| 182: | 7026 7279 7393 7411 7651 7753 7864 8300 8660 8932 8940 9058 9159 9296 9636 9678 10019 10176 |
| 183: | 6952 6968 6979 6984 7018 7019 7024 7057 7151 7316 7330 7355 7400 7405 7432 7442 7492 7529 7658 |
| | 7765 7812 7839 7862 7990 8022 8028 8031 8035 8037 8122 8160 8230 8355 8630 8648 8727 8752 8927 8950 |
| | 8961 9115 9178 9218 9453 9496 9594 9617 9659 9713 9736 9820 9843 9850 9945 9976 9978 10125 10190 10269 |
| | 10314 10469 |
| 184: | 6917 6920 6924 6942 6961 6963 6965 6967 6970 6981 6987 7001 7003 7007 7008 7016 7022 7023 7062 |
| | 7069 7076 7094 7103 7105 7109 7111 7114 7131 7133 7141 7145 7146 7148 7149 7152 7168 7169 7171 7172 |
| | 7174 7179 7182 7193 7194 7196 7197 7198 7199 7201 7203 7204 7206 7210 7214 7217 7218 7222 7226 7227 |
| | 7229 7231 7232 7235 7243 7245 7246 7247 7249 7250 7254 7255 7256 7257 7259 7260 7264 7275 7277 7280 |
| | 7281 7284 7286 7287 7288 7290 7294 7295 7304 7310 7312 7314 7315 7318 7319 7323 7329 7333 7340 7342 |
| | 7343 7344 7348 7351 7357 7359 7362 7365 7366 7367 7370 7373 7375 7395 7404 7408 7410 7420 7423 7436 |
| | 7441 7444 7446 7449 7456 7457 7458 7460 7461 7462 7471 7489 7516 7543 7561 7575 7582 7583 7584 7586 |
| | 7599 7601 7603 7606 7608 7610 7612 7615 7618 7619 7622 7625 7629 7632 7635 7636 7639 7642 7644 7645 |
| | 7648 7649 7650 7653 7662 7664 7667 7669 7670 7673 7674 7683 7684 7688 7691 7693 7695 7697 7699 7701 |
| | 7704 7705 7714 7715 7716 7723 7732 7736 7737 7739 7741 7752 7759 7760 7776 7778 7789 7798 7799 7801 |
| | 7802 7805 7807 7808 7810 7816 7821 7822 7824 7826 7828 7829 7832 7835 7837 7847 7850 7852 7853 7855 |
| | 7858 7861 7867 7872 7887 7889 7891 7892 7893 7896 7900 7919 7920 7922 7924 7926 7928 7929 7930 7933 |
| | 7940 7950 7956 7957 7958 7959 7960 7962 7964 7966 7973 7976 7978 7983 7986 7988 7992 7995 7996 7998 |
| | 7999 8000 8001 8002 8003 8004 8007 8014 8015 8018 8020 8021 8025 8026 8027 8030 8038 8043 8048 8050 |
| | 8075 8080 8090 8100 8102 8106 8109 8110 8119 8121 8124 8125 8133 8135 8136 8157 8158 8159 8163 8168 |
| | 8176 8179 8184 8186 8189 8193 8194 8197 8208 8213 8214 8215 8216 8217 8219 8234 8237 8239 8240 8241 |
| | 8242 8243 8244 8247 8252 8260 8262 8267 8268 8271 8272 8274 8275 8276 8278 8280 8284 8285 8286 8292 |
| | 8301 8303 8304 8305 8311 8317 8319 8322 8323 8325 8329 8330 8331 8332 8333 8342 8343 8345 8348 8349 |
| | 8351 8361 8364 8366 8378 8384 8397 8403 8406 8411 8416 8433 8461 8479 8493 8499 8502 8520 8525 8526 |
| | 8530 8532 8533 8540 8544 8554 8569 8581 8582 8610 8615 8633 8661 8666 8668 8671 8682 8684 8698 8699 |
| | 8703 8711 8719 8722 8732 8734 8738 8749 8755 8758 8783 8788 8790 8797 8799 8810 8814 8820 8821 8824 |
| | 8828 8835 8845 8850 8874 8876 8903 8905 8908 8910 8911 8913 8936 8937 8941 8943 8966 8969 8978 8986 |
| | 8996 9012 9018 9019 9021 9022 9024 9027 9028 9031 9035 9036 9038 9061 9065 9067 9068 9069 9070 9074 |
| | 9078 9091 9095 9100 9102 9106 9107 9112 9129 9131 9135 9138 9139 9140 9142 9148 9149 9152 9155 9161 |
| | 9165 9171 9182 9187 9190 9195 9196 9197 9198 9205 9208 9210 9214 9216 9217 9219 9225 9260 9274 9277 |
| | 9305 9332 9346 9348 9354 9365 9383 9391 9432 9434 9438 9440 9468 9472 9477 9491 9498 9501 9505 9507 |
| | 9509 9510 9512 9513 9515 9517 9541 9549 9567 9568 9585 9613 9625 9630 9634 9664 9680 9683 9685 9689 |
| | 9691 9692 9708 9711 9719 9720 9721 9742 9743 9749 9754 9760 9800 9832 9867 9884 9913 9914 9917 9919 |
| | 9920 9923 9928 9944 9948 9950 9953 9956 9968 9972 9974 9981 9987 9994 9995 9996 10011 10024 10028 |
| | 10032 10033 10045 10051 10067 10068 10071 10072 10073 10076 10078 10079 10081 10088 10090 10092 10093 |
| | 10094 10109 10113 10123 10144 10156 10163 10202 10223 10235 10254 10294 10302 10305 10307 10324 10341 |
| | 10343 10344 10352 10354 10356 10358 10377 10382 10383 10386 10388 10390 10392 10394 10396 10423 10426 |
| | 10431 10432 10438 10445 10448 10451 10454 10456 10458 10461 10464 10466 10467 10472 |
| 185: | 6923 6929 6931 6949 6954 6958 6983 7031 7036 7055 7065 7079 7096 7140 7176 7195 7202 7205 7212 |
| | 7213 7240 7268 7270 7276 7301 7303 7321 7322 7331 7332 7363 7372 7385 7466 7476 7483 7486 7487 7491 |
| | 7496 7508 7545 7548 7573 7589 7607 7628 7634 7641 7657 7666 7689 7694 7703 7708 7724 7764 7772 7803 |
| | 7846 7859 7860 7886 7890 7895 7897 7913 7982 8013 8017 8039 8046 8067 8068 8074 8084 8092 8118 8143 |
| | 8155 8156 8162 8181 8188 8192 8202 8205 8220 8228 8245 8246 8283 8289 8297 8307 8308 8316 8339 8353 |
| | 8354 8410 8413 8421 8437 8462 8488 8496 8497 8512 8519 8560 8573 8607 8611 8621 8643 8651 8652 8686 |
| | 8763 8771 8780 8800 8802 8805 8864 8868 8891 8923 8929 8971 9014 9032 9034 9039 9043 9060 9066 9096 |
| | 9175 9209 9213 9224 9239 9244 9262 9263 9265 9275 9279 9281 9293 9294 9308 9381 9386 9388 9397 9398 |
| | 9439 9442 9485 9508 9521 9542 9572 9596 9642 9648 9666 9704 9710 9715 9725 9727 9739 9740 9775 9835 |
| | 9856 9860 9861 9871 9875 9876 9887 9893 9902 9938 9960 9979 9991 9992 10000 10005 10008 10022 10039 |
| | 10053 10057 10082 10102 10114 10116 10120 10191 10217 10231 10284 10298 10299 10306 10320 10326 10365 |
| | 10381 10402 10441 10443 |
| 186: | 6936 6990 7071 7144 7147 7209 7382 7482 7738 7994 8218 8261 8391 8399 8447 8707 8823 8942 9085 |
| | 9450 9511 9646 9693 10054 10097 10265 10351 10379 |
| 187: | 6921 6927 6935 6937 6941 6945 6947 6951 6956 6959 6960 6962 6969 6980 6982 6988 6992 6995 6997 |
| | 7006 7009 7012 7013 7017 7021 7034 7038 7041 7042 7045 7052 7059 7066 7068 7074 7075 7084 7087 7089 |
| | 7090 7098 7102 7107 7113 7120 7122 7126 7127 7143 7155 7158 7159 7166 7167 7170 7173 7184 7190 7192 |
| | 7207 7211 7215 7221 7224 7225 7230 7234 7236 7241 7251 7265 7266 7267 7273 7274 7278 7283 7289 7292 |
| | 7299 7300 7305 7309 7313 7320 7325 7328 7335 7336 7339 7345 7347 7350 7353 7354 7358 7360 7361 7369 |
| | 7381 7384 7387 7388 7389 7391 7392 7413 7416 7419 7421 7422 7427 7428 7434 7435 7440 7450 7452 7468 |
| | 7474 7475 7480 7481 7503 7505 7507 7513 7517 7520 7522 7528 7537 7542 7551 7556 7557 7559 7563 7568 |
| | 7570 7571 7579 7587 7597 7605 7630 7638 7647 7656 7659 7663 7668 7672 7675 7681 7690 7713 7718 7719 |
| | 7721 7725 7728 7734 7742 7744 7747 7750 7754 7757 7771 7775 7782 7783 7784 7787 7791 7793 7794 7796 |
| | 7800 7806 7809 7811 7818 7825 7842 7843 7857 7863 7870 7878 7882 7885 7901 7912 7915 7916 7918 7923 |
| | 7932 7936 7939 7949 7961 7963 7968 7970 7971 7979 7981 7987 8006 8009 8010 8029 8033 8034 8040 8045 |
| | 8055 8063 8071 8076 8086 8087 8094 8097 8105 8107 8108 8112 8117 8120 8126 8127 8128 8130 8131 8134 |
| | 8138 8142 8146 8148 8151 8154 8161 8165 8171 8182 8190 8191 8195 8196 8198 8199 8201 8203 8206 8207 |
| | 8212 8221 8222 8223 8226 8227 8229 8232 8236 8238 8248 8251 8254 8256 8257 8259 8261 8263 8265 8266 |
| | 8270 8279 8287 8293 8299 8302 8306 8309 8313 8315 8321 8324 8327 8334 8335 8336 8338 8341 8344 8347 |
| | 8350 8358 8359 8360 8372 8376 8383 8387 8389 8390 8392 8394 8395 8405 8409 8415 8418 8424 8427 8428 |
| | 8434 8435 8439 8440 8441 8444 8445 8452 8464 8465 8467 8469 8474 8475 8478 8481 8482 8483 8501 8507 |
| | 8510 8511 8515 8518 8521 8528 8529 8537 8538 8550 8559 8562 8567 8585 8595 8600 8602 8620 8635 8636 |
| | 8638 8646 8650 8655 8665 8670 8675 8676 8677 8680 8681 8683 8685 8690 8712 8721 8723 8724 8728 8733 |
| | 8735 8736 8740 8744 8745 8756 8762 8769 8770 8775 8778 8789 8795 8807 8827 8840 8846 8849 8858 8862 |
| | 8867 8875 8878 8879 8882 8890 8894 8896 8897 8899 8901 8907 8921 8922 8926 8935 8945 8946 8947 8948 |
| | 8952 8959 8962 8965 8975 8976 8979 8989 8992 8993 8997 8998 8999 9000 9001 9002 9025 9029 9033 9053 |
| | 9062 9071 9087 9094 9098 9105 9126 9141 9143 9144 9147 9153 9166 9170 9179 9181 9186 9207 9212 9220 |
| | 9221 9222 9226 9231 9235 9238 9241 9246 9248 9258 9266 9269 9278 9282 9283 9285 9288 9295 9307 9311 |
| | 9313 9314 9316 9322 9323 9324 9337 9341 9342 9352 9376 9378 9379 9389 9394 9411 9416 9428 9459 9464 |
| | 9489 9502 9518 9520 9532 9539 9544 9546 9551 9564 9565 9566 9569 9570 9573 9584 9586 9587 9592 9595 |
| | 9605 9609 9610 9615 9619 9621 9622 9628 9629 9637 9639 9640 9645 9651 9652 9653 9654 9665 9672 9679 |
| | 9682 9687 9690 9695 9705 9718 9737 9747 9751 9757 9767 9770 9773 9774 9778 9786 9792 9795 9797 9798 |
| | 9802 9811 9817 9823 9826 9827 9828 9834 9839 9844 9852 9855 9858 9864 9869 9874 9877 9878 9886 9889 |
| | 9908 9910 9916 9918 9921 9925 9933 9951 9952 9955 9958 9959 9961 9962 9984 9985 9986 9989 9999 10001 |
| | 10007 10020 10025 10030 10034 10036 10037 10042 10047 10050 10055 10056 10063 10066 10085 10086 10089 |
| | 10095 10098 10099 10100 10101 10105 10110 10117 10118 10121 10124 10132 10135 10157 10160 10165 10169 |
| | 10178 10180 10204 10212 10233 10238 10242 10245 10247 10250 10257 10261 10270 10277 10282 10286 10290 |
| | 10293 10296 10319 10325 10330 10334 10335 10340 10342 10348 10370 10373 10376 10380 10385 10389 10397 |
| | 10399 10401 10415 10418 10421 10428 10429 10435 10440 10446 10450 10455 10460 10465 10470 |
| 188: | 7002 7091 7200 7219 7297 7334 7418 7424 7465 7590 7627 7707 7731 7733 7735 7902 7935 7975 8204 |
| | 8225 8253 8318 8337 8393 8412 8432 8450 8571 8597 8750 8836 8838 9050 9057 9110 9119 9132 9185 9240 |
| | 9291 9309 9328 9368 9675 9738 9912 9937 9971 10009 10012 10031 10040 10060 10177 10183 10211 10337 |
| | 10360 10361 |
| 189: | 7078 7082 7142 7291 7341 7399 7596 7907 8103 8211 8258 8314 8674 8717 8812 8829 8885 8889 8938 |
| | 8995 9013 9056 9063 9136 9189 9409 9476 9604 9746 9756 9761 9764 9783 9810 9866 9946 10115 10153 10229 |
| | 10327 10414 |
| 190: | 7078 7082 7142 7291 7341 7399 7596 7907 8103 8211 8258 8314 8674 8717 8812 8829 8885 8889 8938 |
| | 8995 9013 9056 9063 9136 9189 9409 9476 9604 9746 9756 9761 9764 9783 9810 9866 9946 10115 10153 10229 |
| | 10327 10414 |
| 191: | 7228 7459 7531 7565 7709 7894 7948 7969 7972 8101 8277 8396 8460 8506 8524 8687 8852 8863 8904 |
| | 8930 8956 8987 9092 9292 9312 9444 9474 9536 9545 9616 9643 9723 9803 9881 9988 10084 10285 10368 |
| | 10453 |
| 192: | 6939 6944 7029 7048 7081 7095 7119 7125 7165 7180 7187 7239 7242 7244 7248 7253 7397 7506 7509 |
| | 7512 7532 7534 7536 7538 7540 7564 7567 7569 7572 7581 7595 7600 7604 7611 7616 7624 7637 7643 7646 |
| | 7652 7655 7660 7661 7678 7685 7686 7706 7711 7712 7727 7729 7730 7746 7748 7749 7751 7766 7769 7770 |
| | 7788 7827 7854 7909 7955 7989 8042 8053 8096 8116 8123 8137 8140 8144 8164 8183 8187 8273 8312 8368 |
| | 8370 8371 8414 8417 8420 8442 8443 8448 8466 8470 8471 8473 8477 8494 8498 8503 8505 8534 8536 8539 |
| | 8556 8558 8561 8590 8592 8594 8596 8599 8624 8626 8628 8629 8632 8697 8702 8704 8731 8794 8817 8893 |
| | 8944 8967 9104 9233 9234 9253 9257 9287 9317 9318 9367 9372 9373 9375 9403 9405 9407 9429 9431 9433 |
| | 9436 9441 9448 9463 9466 9467 9469 9473 9504 9540 9591 9714 9745 9750 9777 9780 9787 9801 9822 9830 |
| | 9838 9883 10087 10364 10367 10395 10398 10400 10404 10408 |
| 193: | 10485 10487 10490 10492 10514 10515 10521 10561 10580 10586 10591 10615 10638 10641 10642 10668 |
| | 10684 10691 10695 10738 10762 10777 10912 10982 11170 11273 11294 11295 11418 11624 11747 11807 12093 |
| | 12130 12322 12327 12357 12492 12521 12754 12791 12859 12971 13133 13158 13240 13385 13412 13476 13510 |
| | 13618 13808 13859 14057 14076 14081 14102 14103 14104 14118 14120 14135 14141 14155 14199 14201 14294 |
| | 14368 14375 14453 14478 14554 14560 14617 14701 14713 14739 14747 14829 14858 14974 14980 14995 15003 |
| | 15093 15161 15167 15168 15172 15198 15200 15206 15208 15226 15229 15233 15240 15242 15243 15274 15275 |
| | 15301 15306 15323 15378 15411 15469 15785 15788 15819 15832 15855 15917 15972 16015 16192 16425 16492 |
| | 16574 16595 16600 16639 16796 16800 16914 17016 17061 17108 17184 17229 17261 17364 17365 17368 17371 |
| 194: | 10501 10536 10538 10575 10581 10589 10607 10623 10697 10700 10726 10754 10768 10787 10790 10842 |
| | 10883 10909 10916 10921 10957 10965 10966 10984 11018 11033 11045 11054 11069 11098 11114 11119 11135 |
| | 11138 11222 11240 11303 11380 11485 11509 11531 11542 11606 11647 11665 11699 11753 11784 11792 11802 |
| | 11809 11810 11838 11844 11906 11910 11911 11912 11936 11953 11969 12018 12032 12033 12047 12051 12068 |
| | 12070 12123 12174 12196 12279 12287 12302 12314 12334 12384 12386 12393 12409 12415 12418 12444 12458 |
| | 12479 12499 12527 12569 12583 12591 12592 12604 12645 12683 12684 12686 12729 12738 12757 12760 12761 |
| | 12764 12788 12822 12833 12836 12903 12904 12908 12916 12923 12936 12954 12965 13013 13059 13063 13065 |
| | 13068 13070 13079 13083 13100 13140 13157 13168 13177 13194 13203 13211 13216 13218 13220 13221 13266 |
| | 13268 13296 13354 13358 13369 13370 13372 13375 13394 13424 13451 13600 13602 13653 13695 13763 13767 |
| | 13793 13799 13843 13931 13952 14017 14018 14038 14042 14067 14070 14085 14113 14126 14139 14185 14192 |
| | 14202 14208 14240 14256 14258 14276 14297 14298 14300 14302 14327 14347 14351 14362 14366 14486 14507 |
| | 14563 14565 14569 14589 14609 14621 14667 14670 14690 14696 14705 14720 14732 14744 14777 14778 14780 |
| | 14790 14792 14793 14859 14884 14952 14955 14958 14964 14967 14968 14975 15037 15052 15053 15068 15095 |
| | 15096 15121 15132 15154 15155 15178 15231 15318 15363 15464 15472 15558 15622 15646 15677 15694 15716 |
| | 15740 15769 15781 15807 15836 15849 15863 15866 15878 15897 15904 15936 15941 15943 15956 15967 16016 |
| | 16070 16071 16124 16132 16149 16153 16199 16200 16202 16230 16280 16289 16327 16465 16467 16479 16532 |
| | 16534 16567 16591 16604 16642 16645 16687 16688 16745 16761 16773 16810 16845 16894 16947 16959 16980 |
| | 17043 17050 17051 17074 17093 17242 17294 17351 |
| 195: | 10501 10536 10575 10581 10589 10607 10623 10697 10700 10726 10754 10768 10787 10790 10795 10842 |
| | 10883 10916 10925 10956 10957 10965 10984 11018 11045 11054 11058 11069 11098 11114 11119 11135 11137 |
| | 11138 11222 11240 11303 11380 11433 11475 11485 11509 11531 11606 11647 11665 11674 11699 11753 11781 |
| | 11784 11792 11802 11809 11810 11838 11844 11910 11911 11912 11936 11959 12018 12029 12032 12033 12051 |
| | 12065 12070 12123 12155 12174 12196 12208 12213 12279 12287 12302 12310 12314 12384 12386 12392 12393 |
| | 12409 12415 12444 12449 12450 12479 12499 12569 12592 12645 12673 12683 12684 12686 12729 12736 12757 |
| | 12760 12761 12764 12783 12788 12812 12833 12836 12903 12904 12908 12916 12936 12965 13013 13015 13027 |
| | 13059 13065 13068 13070 13079 13083 13089 13100 13140 13157 13166 13168 13177 13192 13194 13203 13211 |
| | 13220 13221 13266 13268 13296 13354 13355 13369 13370 13375 13382 13394 13424 13451 13600 13602 13653 |
| | 13662 13695 13763 13767 13793 13799 13843 13952 14017 14018 14038 14042 14060 14067 14070 14085 14111 |
| | 14113 14126 14185 14192 14202 14208 14222 14240 14256 14258 14276 14298 14302 14327 14332 14347 14351 |
| | 14366 14456 14486 14506 14507 14539 14569 14589 14609 14621 14670 14690 14720 14744 14777 14778 14790 |
| | 14792 14793 14884 14967 14975 15037 15068 15096 15107 15121 15132 15154 15155 15178 15231 15258 15287 |
| | 15318 15330 15363 15404 15464 15472 15475 15547 15558 15622 15646 15677 15694 15716 15740 15744 15769 |
| | 15781 15807 15833 15836 15849 15863 15866 15878 15897 15927 15936 15941 15943 15967 15973 15979 16016 |
| | 16070 16071 16124 16132 16149 16199 16200 16202 16222 16230 16280 16289 16327 16354 16380 16451 16465 |
| | 16467 16474 16479 16508 16532 16534 16567 16575 16591 16604 16642 16661 16687 16688 16745 16773 16810 |
| | 16845 16849 16855 16959 16980 17043 17050 17074 17093 17154 17159 17242 17294 17351 |
| 196: | 10622 10696 10699 10914 10961 11053 11097 11118 11169 11220 11311 11460 11484 11508 11754 12173 |
| | 12289 12395 12408 12481 12500 13072 13169 13477 13702 13970 13988 14142 14344 14407 14430 14694 14876 |
| | 14928 15182 15237 15467 15556 15835 16544 16619 16632 16847 17041 17069 17086 17346 |
| 197: | 10810 11024 11029 11268 11278 11523 12222 12366 12565 12866 12914 13132 13160 13386 13402 13470 |
| | 13513 13915 14119 14165 14358 15294 15606 15852 15954 15976 16405 |
| 198: | 10796 10800 10815 10847 10964 11325 11406 11607 11798 12266 12338 12455 12690 12873 13872 14194 |
| | 14796 14813 14921 15039 15478 15651 15676 15686 16115 16622 17286 17358 17359 |
| 199: | 10498 10625 10829 10854 10892 10924 11039 11083 11101 11179 11326 11327 11358 11388 11436 11471 |
| | 11503 11630 11683 11692 11694 11703 11762 11764 11765 11869 11888 11915 11975 11999 12175 12220 12323 |
| | 12342 12375 12401 12584 12654 12742 12855 12933 12935 13037 13077 13145 13282 13292 13435 13575 13664 |
| | 13701 13822 14107 14224 14290 14458 14782 14803 14825 14875 14904 14988 15166 15179 15246 15297 15425 |
| | 15436 15471 15584 15723 15795 15809 15848 16047 16087 16126 16154 16211 16223 16300 16321 16339 16480 |
| | 16521 16700 16718 16857 16865 16889 16921 16944 17045 17084 17136 17169 17197 17282 17327 |
| 200: | 10498 10625 10829 10854 10892 10924 11039 11083 11101 11164 11254 11326 11327 11358 11388 11436 |
| | 11471 11503 11692 11694 11703 11715 11762 11764 11765 11869 11888 11915 11940 11975 11999 12062 12175 |
| | 12323 12342 12375 12401 12654 12677 12742 12855 12889 12918 12991 13037 13145 13292 13435 13552 13575 |
| | 13664 13701 13822 14079 14220 14224 14458 14578 14682 14803 14875 14904 14988 15166 15246 15297 15425 |
| | 15476 15584 15723 15795 15809 15848 16156 16211 16223 16300 16339 16480 16521 16700 16857 16865 16889 |
| | 16898 16944 17045 17084 17136 17169 17197 17243 17282 17327 17361 |
| 201: | 10848 11066 11163 11246 11286 11724 11806 11926 12008 12094 12207 12526 12549 12832 13149 13244 |
| | 13495 13511 13523 13721 13806 13809 13973 14312 14575 14832 14840 14865 15083 15105 15120 15125 15138 |
| | 15213 15678 15712 15725 15890 15911 15951 16141 16161 16190 16378 16408 16524 16654 16736 16874 16953 |
| | 17034 17107 17157 17188 |
| 202: | 10648 10815 10904 10927 11017 11081 11378 11406 11744 11856 11895 12043 12737 12891 13057 13239 |
| | 13837 13892 14082 14124 14197 14234 14662 15102 15949 16255 17286 |
| 203: | 10559 10657 11155 11344 11348 11514 11554 12284 12349 12538 12595 12637 13035 13044 13325 13357 |
| | 13479 13659 13805 14548 14861 15181 15846 15924 15930 15942 16263 16357 16448 16461 16684 16756 17062 |
| | 17363 |
| 204: | 10480 10520 10526 10528 10545 10552 10554 10596 10605 10608 10618 10626 10632 10637 10645 10688 |
| | 10690 10730 10745 10750 10764 10766 10772 10774 10809 10830 10879 10880 10886 10890 10960 10963 10979 |
| | 10985 10991 11001 11004 11025 11026 11031 11065 11080 11106 11127 11130 11152 11154 11157 11172 11176 |
| | 11177 11187 11208 11236 11253 11280 11292 11300 11356 11372 11376 11379 11387 11405 11456 11486 11516 |
| | 11521 11546 11570 11585 11588 11599 11610 11615 11616 11634 11662 11668 11669 11697 11698 11711 11712 |
| | 11720 11731 11758 11760 11770 11797 11812 11829 11836 11855 11864 11876 11890 11907 11937 11938 11945 |
| | 11950 11956 11958 11995 11997 12038 12048 12054 12071 12073 12088 12092 12146 12156 12195 12200 12271 |
| | 12294 12295 12333 12336 12352 12359 12361 12382 12407 12416 12434 12451 12456 12459 12476 12477 12486 |
| | 12497 12513 12531 12547 12554 12557 12558 12562 12588 12589 12611 12622 12655 12657 12658 12667 12681 |
| | 12703 12707 12709 12715 12727 12732 12733 12735 12805 12845 12850 12874 12876 12879 12884 12888 12901 |
| | 12907 12938 12942 12943 12955 12970 12974 12983 12990 13003 13014 13023 13049 13053 13054 13061 13062 |
| | 13064 13074 13090 13111 13119 13155 13174 13236 13238 13241 13242 13261 13264 13277 13284 13295 13313 |
| | 13331 13336 13348 13353 13361 13374 13376 13377 13378 13381 13383 13389 13423 13447 13471 13486 13515 |
| | 13529 13544 13546 13556 13637 13687 13696 13773 13786 13795 13802 13858 13866 13893 13906 13910 13918 |
| | 13923 13927 13942 13946 13956 13965 13994 14005 14051 14071 14073 14083 14097 14101 14117 14121 14138 |
| | 14143 14149 14157 14172 14191 14193 14200 14216 14229 14231 14233 14238 14239 14254 14255 14261 14262 |
| | 14273 14285 14291 14317 14338 14388 14395 14399 14402 14422 14436 14479 14496 14527 14535 14536 14610 |
| | 14612 14618 14633 14640 14651 14653 14672 14675 14685 14693 14699 14704 14714 14719 14736 14740 14750 |
| | 14754 14755 14784 14785 14816 14831 14839 14848 14851 14857 14874 14880 14883 14891 14909 14913 14932 |
| | 14939 14943 14945 14976 14978 15013 15030 15036 15042 15050 15054 15055 15063 15080 15088 15142 15144 |
| | 15148 15176 15197 15203 15214 15219 15230 15236 15255 15261 15307 15324 15328 15331 15333 15337 15340 |
| | 15342 15359 15362 15365 15370 15389 15391 15407 15415 15416 15424 15450 15456 15460 15463 15482 15483 |
| | 15500 15502 15505 15512 15520 15524 15540 15548 15564 15582 15599 15603 15607 15626 15629 15630 15644 |
| | 15656 15683 15693 15711 15720 15731 15734 15738 15761 15801 15803 15818 15834 15839 15847 15851 15871 |
| | 15886 15980 15989 16006 16011 16050 16057 16078 16095 16122 16139 16160 16163 16180 16185 16186 16187 |
| | 16194 16240 16260 16264 16294 16302 16312 16338 16358 16367 16375 16398 16442 16445 16446 16452 16472 |
| | 16483 16484 16499 16503 16510 16538 16558 16562 16568 16608 16617 16627 16631 16640 16646 16647 16662 |
| | 16667 16668 16677 16692 16695 16715 16731 16741 16757 16760 16764 16768 16790 16815 16824 16839 16864 |
| | 16871 16880 16892 16893 16902 16915 16919 16948 16956 16996 16999 17002 17008 17042 17046 17047 17053 |
| | 17072 17115 17119 17131 17144 17145 17150 17185 17220 17234 17247 17269 17270 17292 17295 17296 17298 |
| | 17300 17322 17332 17357 17370 |
| 205: | 10794 10845 11048 11239 11745 11980 12030 12223 12258 12529 12656 12695 12747 12964 13018 13122 |
| | 13338 13339 13413 13499 13826 13891 14176 14449 14524 14677 14820 15060 15077 15309 15888 15962 16268 |
| | 16636 16754 16940 17001 17267 |
| 206: | 10483 10711 10808 10841 10857 11116 11124 11151 11287 11355 11403 11733 11828 11870 11871 11905 |
| | 12089 12105 12335 13204 13708 13924 14188 14272 14437 14540 14600 14650 14659 14759 15069 15394 15516 |
| | 15933 15978 15983 16025 16171 16314 16471 16481 16569 16717 17180 17231 17236 |
| 207: | 10702 11091 11150 12001 12079 12316 12411 12653 13020 13585 13727 14359 14606 14914 14918 14984 |
| | 15576 16725 16941 17097 17129 |
| 208: | 11955 11991 14683 |
| 209: | 10512 10525 10531 10541 10569 10579 10584 10610 10619 10620 10670 10748 10786 10824 10856 10877 |
| | 10915 10920 10930 10954 10977 10983 10994 10999 11000 11016 11019 11021 11043 11049 11082 11087 11105 |
| | 11113 11121 11122 11131 11134 11141 11162 11166 11188 11195 11203 11212 11216 11218 11229 11269 11285 |
| | 11290 11317 11318 11330 11349 11354 11368 11396 11414 11432 11442 11452 11463 11479 11480 11498 11511 |
| | 11525 11545 11565 11578 11579 11591 11593 11594 11598 11602 11613 11637 11638 11746 11757 11779 11780 |
| | 11834 11854 11860 11867 11885 11889 11932 11935 11970 11981 11984 12031 12035 12066 12083 12125 12171 |
| | 12182 12190 12191 12206 12230 12237 12260 12278 12328 12339 12358 12360 12364 12371 12381 12385 12428 |
| | 12435 12438 12442 12462 12466 12493 12506 12508 12517 12522 12586 12594 12624 12627 12634 12638 12642 |
| | 12647 12661 12664 12668 12706 12708 12750 12762 12766 12769 12771 12779 12806 12820 12823 12858 12885 |
| | 12917 12947 12950 12967 12977 13011 13031 13047 13085 13108 13115 13126 13136 13191 13233 13280 13300 |
| | 13316 13329 13333 13335 13343 13400 13428 13432 13454 13457 13578 13607 13650 13651 13673 13684 13690 |
| | 13699 13703 13733 13743 13781 13790 13794 13814 13829 13846 13861 13874 13901 13954 13971 13993 14125 |
| | 14140 14146 14153 14161 14189 14217 14227 14241 14249 14259 14284 14287 14323 14330 14396 14398 14416 |
| | 14470 14471 14487 14490 14508 14519 14541 14550 14552 14571 14573 14576 14626 14631 14638 14689 14700 |
| | 14715 14722 14730 14734 14738 14761 14766 14775 14789 14794 14808 14819 14852 14853 14870 14892 14897 |
| | 14906 14937 14963 14999 15012 15016 15040 15066 15071 15175 15190 15221 15241 15265 15335 15374 15375 |
| | 15381 15438 15453 15465 15484 15485 15526 15577 15581 15595 15596 15600 15613 15645 15647 15648 15653 |
| | 15655 15682 15736 15741 15749 15752 15776 15780 15811 15822 15824 15825 15827 15828 15840 15844 15860 |
| | 15932 15934 15948 15961 15965 15969 15970 15975 16022 16037 16049 16075 16086 16092 16120 16131 16138 |
| | 16143 16152 16166 16169 16174 16184 16193 16197 16208 16214 16245 16298 16311 16437 16444 16450 16491 |
| | 16505 16527 16529 16590 16594 16601 16616 16618 16635 16644 16682 16685 16686 16694 16705 16735 16744 |
| | 16758 16786 16787 16791 16820 16823 16827 16851 16854 16869 16879 16890 16897 16899 16912 16917 16926 |
| | 16930 16939 16946 16985 16987 16988 16990 16994 17009 17011 17028 17031 17096 17125 17153 17155 17161 |
| | 17168 17198 17208 17214 17219 17233 17238 17253 17323 17349 |
| 210: | 10512 10531 10541 10569 10579 10584 10585 10610 10619 10620 10670 10748 10786 10824 10856 10877 |
| | 10915 10920 10930 10954 10977 10983 10994 10999 11000 11016 11019 11021 11043 11082 11087 11105 11113 |
| | 11121 11122 11134 11141 11166 11188 11195 11203 11212 11216 11218 11229 11285 11290 11317 11318 11330 |
| | 11333 11349 11354 11368 11396 11414 11432 11442 11452 11463 11480 11498 11510 11511 11525 11545 11565 |
| | 11578 11579 11591 11593 11594 11598 11602 11613 11638 11746 11779 11780 11834 11854 11860 11867 11885 |
| | 11889 11932 11935 11970 11981 11984 12031 12035 12066 12125 12171 12182 12183 12190 12191 12206 12230 |
| | 12237 12260 12278 12328 12339 12358 12360 12364 12371 12381 12385 12428 12435 12438 12442 12462 12466 |
| | 12493 12506 12508 12517 12522 12524 12586 12594 12624 12627 12630 12634 12638 12647 12661 12664 12706 |
| | 12708 12750 12762 12766 12769 12771 12779 12806 12820 12823 12858 12881 12885 12917 12947 12950 12961 |
| | 12967 12977 13011 13031 13085 13108 13115 13126 13136 13141 13191 13233 13280 13300 13316 13329 13333 |
| | 13343 13400 13428 13432 13454 13457 13578 13607 13650 13651 13673 13684 13690 13699 13703 13733 13743 |
| | 13781 13790 13794 13814 13829 13846 13901 13914 13954 13971 13993 14055 14114 14125 14140 14146 14153 |
| | 14161 14189 14217 14227 14241 14259 14284 14286 14287 14323 14330 14398 14416 14470 14471 14487 14490 |
| | 14508 14519 14541 14550 14571 14573 14576 14626 14631 14638 14689 14700 14715 14722 14730 14734 14738 |
| | 14761 14766 14789 14794 14808 14819 14852 14853 14870 14892 14906 14937 14963 14999 15012 15016 15040 |
| | 15066 15137 15175 15190 15241 15265 15335 15374 15375 15381 15438 15453 15465 15473 15484 15485 15526 |
| | 15577 15581 15595 15596 15600 15613 15645 15647 15648 15653 15655 15682 15736 15741 15743 15749 15752 |
| | 15776 15780 15811 15822 15824 15825 15827 15828 15840 15844 15860 15932 15934 15944 15948 15961 15965 |
| | 15969 15975 16022 16037 16049 16075 16086 16092 16120 16131 16138 16143 16152 16157 16162 16164 16166 |
| | 16169 16174 16184 16193 16197 16208 16214 16245 16273 16298 16311 16437 16444 16450 16491 16505 16527 |
| | 16529 16590 16594 16601 16616 16618 16655 16682 16685 16686 16694 16705 16735 16744 16758 16786 16787 |
| | 16791 16820 16823 16827 16851 16854 16869 16879 16890 16897 16899 16912 16917 16930 16939 16946 16985 |
| | 16987 16988 16990 16994 17009 17011 17028 17031 17096 17125 17153 17155 17161 17168 17198 17208 17219 |
| | 17233 17238 17253 17323 17349 |
| 211: | 10624 11030 11197 11952 12245 12377 12886 13016 13094 13170 13297 13373 13675 13785 14021 14093 |
| | 14502 14745 14846 15162 15620 15798 16137 17166 17189 17245 17273 |
| 213: | 10628 10650 10683 10694 10922 11079 11538 11562 11664 11843 11887 11924 12229 12674 12705 12860 |
| | 13330 13393 13526 13750 13987 14115 14133 14776 14799 14800 15044 15056 15414 15588 15592 15658 16020 |
| | 16614 16755 16799 16938 17014 17112 17143 |
| 215: | 10789 |
| 216: | 10484 10542 10778 11520 11663 11690 12378 12857 13568 14461 15805 15854 15858 16238 16487 16981 |
| 217: | 10828 11215 11394 12100 12204 13012 13758 13937 15262 15870 16740 |
| 218: | 10474 10475 10477 10504 10507 10516 10519 10524 10533 10535 10544 10547 10549 10550 10553 10562 |
| | 10583 10588 10590 10594 10595 10604 10609 10612 10644 10655 10661 10666 10673 10674 10676 10678 10679 |
| | 10685 10693 10701 10706 10709 10710 10712 10715 10719 10720 10723 10725 10729 10732 10734 10751 10765 |
| | 10769 10770 10780 10783 10798 10803 10806 10811 10816 10827 10835 10836 10852 10863 10885 10901 10919 |
| | 10933 10936 10937 10938 10973 10975 10980 10981 11002 11006 11009 11010 11012 11014 11015 11020 11034 |
| | 11035 11061 11062 11085 11089 11092 11096 11100 11110 11120 11132 11133 11142 11145 11148 11149 11153 |
| | 11158 11161 11167 11181 11183 11199 11202 11205 11221 11227 11242 11249 11251 11259 11263 11272 11281 |
| | 11282 11291 11293 11305 11322 11323 11324 11331 11371 11375 11381 11386 11408 11409 11412 11413 11415 |
| | 11425 11431 11440 11446 11449 11465 11468 11469 11487 11488 11490 11497 11505 11506 11532 11537 11548 |
| | 11553 11557 11568 11569 11582 11584 11586 11587 11590 11592 11596 11605 11609 11612 11614 11617 11618 |
| | 11621 11622 11629 11631 11646 11650 11653 11655 11658 11671 11682 11691 11693 11708 11714 11719 11723 |
| | 11737 11738 11739 11740 11743 11763 11768 11776 11778 11785 11830 11837 11839 11842 11847 11850 11851 |
| | 11852 11859 11873 11875 11878 11879 11880 11884 11891 11899 11903 11904 11916 11923 11933 11951 11957 |
| | 11989 11990 12005 12007 12010 12011 12014 12016 12017 12028 12034 12037 12042 12050 12060 12075 12076 |
| | 12078 12087 12109 12112 12113 12115 12116 12121 12124 12139 12151 12162 12179 12217 12227 12231 12241 |
| | 12256 12270 12276 12277 12283 12286 12303 12313 12315 12317 12326 12374 12402 12403 12420 12433 12440 |
| | 12445 12447 12460 12463 12467 12468 12469 12472 12485 12489 12510 12511 12512 12515 12516 12520 12523 |
| | 12530 12533 12536 12537 12539 12541 12542 12543 12550 12552 12555 12564 12568 12576 12577 12578 12581 |
| | 12582 12585 12593 12602 12607 12608 12612 12618 12621 12626 12631 12632 12633 12635 12636 12644 12648 |
| | 12652 12663 12685 12688 12689 12693 12704 12714 12716 12717 12719 12722 12724 12740 12741 12744 12745 |
| | 12748 12767 12768 12770 12789 12793 12804 12809 12813 12817 12828 12854 12869 12872 12880 12919 12932 |
| | 12937 12968 13010 13017 13030 13039 13050 13051 13135 13139 13144 13173 13178 13182 13183 13188 13208 |
| | 13215 13224 13250 13251 13252 13254 13257 13258 13259 13265 13275 13276 13278 13279 13281 13283 13301 |
| | 13356 13362 13363 13364 13365 13384 13397 13401 13407 13409 13411 13414 13422 13426 13429 13431 13434 |
| | 13436 13437 13445 13450 13456 13461 13463 13464 13465 13467 13475 13484 13489 13490 13493 13494 13497 |
| | 13498 13504 13505 13507 13512 13517 13518 13520 13522 13528 13533 13537 13539 13541 13543 13550 13554 |
| | 13555 13559 13561 13562 13564 13567 13572 13573 13584 13588 13590 13592 13593 13596 13598 13599 13605 |
| | 13610 13613 13621 13625 13627 13628 13629 13631 13633 13636 13638 13644 13645 13646 13649 13658 13669 |
| | 13671 13672 13678 13683 13685 13688 13692 13693 13694 13713 13732 13734 13751 13755 13761 13777 13807 |
| | 13820 13838 13855 13856 13863 13867 13878 13880 13882 13887 13889 13890 13896 13899 13903 13907 13908 |
| | 13913 13919 13925 13928 13930 13932 13936 13938 13945 13958 13963 13987 14007 14024 14027 14034 14040 |
| | 14056 14074 14077 14105 14109 14123 14128 14137 14151 14159 14178 14180 14186 14187 14195 14209 14214 |
| | 14235 14244 14250 14263 14264 14265 14270 14289 14292 14299 14303 14306 14307 14308 14309 14310 14314 |
| | 14315 14318 14322 14340 14345 14346 14348 14349 14352 14353 14354 14355 14356 14371 14378 14382 14383 |
| | 14386 14389 14392 14394 14397 14400 14403 14404 14405 14410 14413 14424 14426 14428 14431 14434 14435 |
| | 14438 14464 14465 14466 14468 14473 14474 14475 14480 14482 14485 14495 14497 14498 14499 14500 14503 |
| | 14510 14515 14516 14520 14521 14528 14534 14537 14542 14543 14545 14555 14557 14581 14583 14587 14596 |
| | 14607 14623 14642 14644 14649 14652 14684 14691 14695 14703 14707 14709 14710 14723 14726 14737 14748 |
| | 14772 14774 14783 14786 14810 14814 14817 14826 14847 14850 14862 14863 14868 14879 14881 14888 14901 |
| | 14908 14915 14917 14919 14922 14923 14924 14925 14926 14929 14931 14946 14948 14949 14953 14956 14962 |
| | 14979 15000 15002 15014 15017 15019 15020 15024 15025 15026 15028 15031 15033 15038 15043 15045 15046 |
| | 15047 15049 15051 15057 15061 15082 15087 15089 15094 15100 15104 15108 15109 15113 15114 15115 15116 |
| | 15117 15119 15122 15123 15139 15145 15146 15150 15156 15158 15159 15160 15163 15171 15186 15191 15193 |
| | 15196 15201 15202 15204 15207 15210 15220 15222 15224 15225 15227 15247 15248 15256 15257 15260 15263 |
| | 15266 15268 15271 15279 15285 15288 15296 15302 15303 15310 15314 15343 15346 15349 15352 15353 15355 |
| | 15372 15392 15398 15403 15418 15426 15431 15443 15444 15457 15461 15466 15480 15494 15497 15529 15535 |
| | 15537 15554 15559 15565 15567 15570 15575 15578 15590 15597 15601 15615 15617 15637 15659 15662 15664 |
| | 15665 15667 15680 15689 15698 15730 15739 15742 15762 15764 15782 15786 15820 15826 15843 15875 15876 |
| | 15879 15881 15895 15915 15918 15919 15921 15939 15966 15981 16000 16003 16010 16013 16029 16038 16044 |
| | 16083 16113 16116 16148 16158 16165 16167 16170 16173 16178 16219 16220 16246 16250 16272 16281 16290 |
| | 16292 16295 16307 16315 16317 16318 16320 16323 16328 16332 16355 16360 16364 16366 16368 16370 16372 |
| | 16377 16382 16385 16387 16392 16393 16395 16396 16397 16400 16402 16403 16409 16412 16426 16429 16430 |
| | 16432 16434 16436 16441 16447 16456 16459 16462 16470 16477 16482 16493 16494 16497 16500 16511 16515 |
| | 16516 16517 16519 16523 16535 16541 16545 16553 16576 16577 16582 16586 16589 16603 16605 16606 16607 |
| | 16620 16637 16652 16656 16657 16659 16660 16669 16675 16679 16710 16711 16712 16713 16721 16723 16724 |
| | 16726 16746 16752 16765 16774 16777 16788 16807 16819 16821 16848 16853 16875 16888 16900 16911 16916 |
| | 16923 16951 16952 16957 16978 16982 16995 17019 17021 17026 17049 17063 17075 17081 17110 17114 17120 |
| | 17141 17151 17156 17162 17171 17178 17192 17201 17221 17241 17252 17257 17260 17277 17281 17299 17304 |
| | 17307 17308 17311 17314 17317 17321 17328 17331 17334 17345 17347 17348 17352 17360 17372 |
| 219: | 10473 10489 10494 10537 10539 10551 10568 10570 10573 10614 10631 10634 10689 10747 10756 10767 |
| | 10814 10821 10832 10839 10846 10864 10868 10869 10897 10906 10907 10911 10926 10929 10931 10934 10949 |
| | 10953 10976 10978 10996 11003 11011 11032 11038 11074 11109 11143 11165 11184 11260 11271 11283 11284 |
| | 11298 11347 11360 11362 11422 11429 11434 11445 11450 11451 11459 11502 11528 11533 11534 11535 11543 |
| | 11544 11572 11595 11604 11636 11643 11645 11652 11659 11680 11681 11684 11705 11706 11707 11725 11741 |
| | 11772 11775 11788 11803 11808 11827 11841 11863 11881 11883 11914 11925 11931 11943 11954 11967 12002 |
| | 12025 12067 12095 12111 12122 12167 12168 12172 12236 12263 12275 12280 12282 12306 12332 12337 12347 |
| | 12404 12405 12410 12421 12424 12436 12457 12465 12473 12488 12560 12561 12579 12610 12643 12649 12659 |
| | 12671 12679 12743 12759 12775 12780 12782 12787 12815 12819 12835 12912 12922 12963 12972 12989 12992 |
| | 12993 13005 13007 13021 13022 13036 13045 13058 13066 13076 13088 13093 13107 13137 13142 13153 13165 |
| | 13172 13187 13195 13207 13209 13227 13260 13262 13289 13308 13324 13327 13328 13345 13347 13359 13368 |
| | 13390 13399 13404 13406 13408 13410 13441 13443 13492 13496 13503 13538 13542 13547 13549 13551 13612 |
| | 13617 13635 13640 13643 13710 13719 13720 13730 13737 13745 13747 13754 13770 13784 13801 13812 13819 |
| | 13853 13854 13883 13894 13897 13900 13904 13909 13917 13926 13940 13943 13949 13959 13966 13989 13992 |
| | 13997 14010 14011 14013 14015 14020 14022 14059 14069 14096 14134 14148 14158 14166 14169 14170 14173 |
| | 14181 14182 14184 14210 14213 14218 14219 14226 14245 14246 14253 14296 14301 14313 14373 14432 14440 |
| | 14481 14488 14504 14558 14559 14572 14580 14657 14668 14712 14725 14727 14758 14773 14791 14795 14807 |
| | 14835 14841 14866 14873 14877 14885 14887 14894 14899 14902 14910 14911 14912 14916 14971 14989 14992 |
| | 14993 15035 15110 15126 15188 15272 15290 15295 15334 15367 15376 15399 15406 15412 15430 15441 15468 |
| | 15474 15481 15536 15550 15618 15621 15624 15649 15652 15668 15703 15704 15709 15717 15721 15729 15737 |
| | 15783 15800 15808 15823 15862 15887 15906 15907 15912 15928 15946 15947 15952 15985 16014 16017 16018 |
| | 16059 16068 16073 16076 16084 16088 16101 16110 16147 16177 16188 16201 16206 16215 16216 16217 16233 |
| | 16256 16265 16333 16335 16340 16347 16365 16386 16475 16501 16504 16520 16552 16559 16565 16572 16578 |
| | 16587 16598 16653 16693 16702 16714 16732 16738 16750 16767 16832 16862 16863 16866 16881 16906 16908 |
| | 16910 16924 16929 16942 16945 16949 16950 16958 16963 16965 17006 17015 17017 17036 17038 17052 17077 |
| | 17091 17104 17105 17230 17239 17249 17250 17289 17305 17309 17329 17338 17342 17353 |
| 220: | 10532 10540 10557 10658 10663 10704 10708 10713 10714 10837 10851 11047 11064 11190 11346 11357 |
| | 11383 11574 11666 11833 11886 11909 11998 12012 12013 12086 12131 12144 12225 12379 12452 12514 12616 |
| | 12844 13110 13114 13161 13255 13274 13321 13398 13462 13862 13967 14237 14363 14645 15027 15169 15199 |
| | 15315 15435 15531 15602 15608 15950 16226 16613 16690 16699 16719 17070 17212 17225 17240 17244 17248 |
| | 17276 |
| 221: | 10574 10705 10819 11529 11710 12188 12394 12792 13285 13314 13315 13665 13798 13888 13902 13934 |
| | 14162 14183 14369 14546 14549 14855 15041 15067 15070 15072 15124 15253 15254 15442 15713 15894 16251 |
| | 16348 16401 16651 16920 16962 17176 17339 |
| 222: | 10478 10482 10493 10523 10530 10563 10564 10565 10597 10611 10613 10630 10636 10639 10643 10647 |
| | 10652 10654 10667 10677 10682 10718 10741 10755 10771 10781 10791 10793 10805 10818 10850 10855 10866 |
| | 10867 10894 10905 10910 10943 10955 10992 11005 11036 11037 11040 11041 11046 11059 11060 11063 11076 |
| | 11123 11146 11147 11168 11171 11173 11186 11201 11204 11232 11234 11238 11248 11261 11289 11301 11332 |
| | 11335 11391 11404 11428 11438 11441 11444 11458 11500 11504 11552 11589 11644 11687 11688 11718 11726 |
| | 11730 11748 11767 11791 11804 11823 11826 11831 11861 11862 11874 11898 11902 11920 11976 11983 11987 |
| | 12027 12057 12145 12150 12161 12199 12205 12233 12259 12281 12300 12305 12329 12331 12341 12353 12363 |
| | 12383 12387 12397 12413 12461 12487 12490 12548 12615 12641 12651 12712 12774 12821 12875 12877 12883 |
| | 12890 12926 12940 12957 12969 12995 12999 13029 13056 13086 13087 13092 13097 13099 13147 13197 13210 |
| | 13213 13214 13217 13226 13243 13248 13271 13272 13294 13303 13318 13344 13371 13379 13380 13392 13395 |
| | 13405 13516 13582 13595 13604 13648 13668 13731 13757 13759 13783 13797 13803 13823 13824 13835 13879 |
| | 13920 13964 13976 14106 14112 14131 14206 14242 14247 14321 14335 14372 14393 14406 14419 14439 14454 |
| | 14505 14530 14547 14570 14574 14584 14586 14591 14592 14593 14597 14604 14613 14619 14622 14663 14679 |
| | 14680 14687 14697 14728 14756 14788 14811 14821 14822 14842 14898 14903 14957 14959 14965 14966 14970 |
| | 14996 15001 15022 15029 15078 15092 15136 15165 15194 15232 15321 15336 15338 15341 15345 15348 15356 |
| | 15368 15405 15409 15421 15432 15448 15492 15579 15604 15628 15641 15669 15670 15726 15735 15746 15750 |
| | 15754 15812 15814 15816 15884 15909 15958 16060 16064 16066 16196 16198 16203 16204 16205 16212 16231 |
| | 16236 16259 16271 16341 16349 16419 16476 16485 16547 16556 16566 16592 16597 16629 16663 16665 16678 |
| | 16691 16701 16720 16742 16772 16782 16818 16822 16828 16830 16837 16891 17010 17012 17055 17123 17132 |
| | 17137 17160 17195 17199 17205 17222 17254 17284 17312 17366 |
| 223: | 10478 10482 10493 10523 10530 10563 10564 10565 10597 10611 10613 10630 10636 10639 10643 10647 |
| | 10652 10654 10677 10682 10718 10741 10755 10771 10781 10791 10793 10805 10818 10850 10855 10866 10867 |
| | 10905 10910 10943 10955 10992 11005 11036 11037 11040 11041 11046 11059 11060 11063 11076 11123 11146 |
| | 11147 11168 11171 11173 11186 11201 11204 11232 11234 11238 11248 11261 11289 11301 11332 11335 11404 |
| | 11428 11438 11441 11444 11458 11500 11504 11552 11589 11644 11687 11688 11718 11726 11730 11748 11767 |
| | 11791 11804 11823 11826 11831 11861 11862 11874 11898 11920 11983 11987 12027 12057 12145 12150 12161 |
| | 12199 12205 12233 12259 12281 12300 12305 12329 12331 12341 12353 12363 12383 12387 12413 12461 12487 |
| | 12490 12548 12615 12641 12651 12712 12774 12821 12875 12877 12883 12890 12926 12940 12957 12969 12995 |
| | 12999 13029 13056 13086 13087 13092 13097 13099 13147 13197 13210 13213 13214 13217 13226 13243 13248 |
| | 13271 13272 13294 13303 13318 13344 13371 13380 13392 13395 13405 13516 13582 13595 13604 13648 13668 |
| | 13731 13757 13759 13783 13797 13803 13823 13824 13835 13879 13920 13964 13976 14106 14112 14131 14206 |
| | 14242 14321 14335 14372 14393 14406 14419 14439 14454 14505 14530 14547 14570 14574 14584 14586 14591 |
| | 14592 14593 14597 14604 14613 14619 14622 14663 14680 14697 14728 14756 14788 14811 14821 14822 14842 |
| | 14898 14903 14957 14959 14965 14966 14970 14996 15001 15022 15029 15078 15092 15136 15165 15194 15232 |
| | 15321 15336 15338 15341 15345 15348 15356 15368 15405 15409 15421 15432 15448 15492 15579 15604 15628 |
| | 15641 15669 15670 15726 15735 15746 15750 15754 15812 15814 15816 15884 15909 15958 16060 16064 16066 |
| | 16196 16198 16203 16204 16205 16212 16231 16236 16259 16271 16341 16349 16419 16476 16485 16547 16556 |
| | 16566 16592 16597 16629 16663 16665 16678 16691 16701 16720 16742 16772 16782 16818 16822 16828 16830 |
| | 16837 16891 17010 17012 17055 17123 17132 17137 17195 17199 17205 17222 17254 17284 17312 17366 |
| 224: | 10479 10491 10496 10503 10506 10509 10511 10517 10518 10578 10593 10600 10603 10616 10617 10621 |
| | 10633 10681 10698 10717 10740 10744 10773 10782 10784 10799 10802 10820 10823 10843 10862 10871 10873 |
| | 10875 10882 10891 10939 10942 10948 10974 10990 11008 11052 11057 11068 11070 11072 11073 11084 11099 |
| | 11102 11128 11144 11175 11185 11206 11207 11217 11219 11226 11228 11237 11243 11250 11252 11258 11274 |
| | 11275 11276 11277 11288 11359 11453 11467 11472 11494 11501 11507 11541 11549 11564 11601 11608 11626 |
| | 11633 11657 11660 11661 11670 11695 11709 11732 11735 11749 11756 11783 11786 11787 11796 11799 11801 |
| | 11816 11894 11897 11918 11919 11922 11939 11944 11977 11992 11994 12009 12015 12041 12056 12059 12061 |
| | 12063 12064 12085 12120 12135 12138 12153 12164 12186 12203 12226 12239 12243 12290 12292 12309 12311 |
| | 12343 12367 12369 12390 12399 12414 12419 12425 12431 12453 12475 12498 12518 12532 12535 12546 12566 |
| | 12572 12575 12580 12596 12600 12601 12603 12625 12640 12660 12682 12694 12713 12718 12773 12777 12778 |
| | 12811 12829 12830 12831 12843 12868 12871 12915 12921 12930 12931 12934 12946 12960 12980 12981 12988 |
| | 13019 13033 13043 13046 13069 13101 13104 13118 13152 13206 13228 13263 13298 13299 13317 13342 13350 |
| | 13366 13388 13391 13416 13420 13442 13444 13446 13448 13449 13466 13468 13473 13480 13483 13485 13502 |
| | 13553 13566 13652 13657 13661 13682 13697 13709 13749 13766 13804 13841 13845 13851 13870 13898 13953 |
| | 13957 13975 13977 13981 13985 14001 14052 14062 14066 14068 14092 14110 14136 14147 14154 14156 14174 |
| | 14179 14203 14221 14225 14228 14230 14248 14275 14278 14283 14324 14325 14381 14417 14444 14467 14509 |
| | 14523 14529 14553 14579 14594 14615 14624 14630 14635 14648 14654 14655 14665 14671 14686 14735 14746 |
| | 14801 14812 14823 14824 14836 14844 14872 14878 14890 14893 14905 14907 14942 14987 15006 15009 15015 |
| | 15097 15101 15129 15134 15135 15140 15141 15143 15149 15157 15173 15177 15180 15183 15216 15223 15238 |
| | 15244 15278 15308 15325 15327 15354 15379 15380 15408 15423 15447 15449 15488 15511 15513 15532 15539 |
| | 15563 15573 15585 15593 15594 15614 15631 15633 15654 15674 15679 15701 15702 15706 15710 15724 15748 |
| | 15751 15766 15772 15773 15774 15777 15790 15806 15815 15845 15859 15864 15869 15872 15877 15880 15898 |
| | 15901 15902 15914 15922 15945 15999 16001 16002 16004 16005 16009 16012 16036 16039 16040 16072 16082 |
| | 16108 16112 16144 16145 16146 16168 16175 16176 16181 16189 16209 16227 16237 16257 16262 16266 16284 |
| | 16342 16346 16352 16384 16421 16435 16454 16458 16463 16469 16525 16540 16554 16560 16573 16593 16623 |
| | 16625 16626 16628 16630 16633 16641 16648 16666 16671 16674 16676 16680 16683 16697 16698 16737 16751 |
| | 16753 16766 16770 16771 16785 16794 16814 16816 16834 16850 16856 16858 16861 16877 16895 16896 16960 |
| | 16972 16975 16976 16977 16989 16992 17023 17040 17068 17095 17102 17226 17246 17251 17278 17279 17302 |
| | 17303 17318 17354 17373 17374 |
| 225: | 10476 10486 10488 10500 10502 10508 10513 10527 10566 10567 10571 10572 10598 10599 10656 10659 |
| | 10660 10662 10664 10665 10669 10687 10716 10736 10749 10753 10761 10775 10776 10792 10797 10801 10804 |
| | 10822 10834 10858 10865 10876 10878 10881 10888 10896 10900 10917 10918 10932 10947 10952 10959 10968 |
| | 10988 11013 11042 11051 11056 11075 11077 11086 11088 11093 11094 11095 11117 11136 11140 11156 11160 |
| | 11178 11182 11193 11194 11214 11225 11231 11233 11235 11264 11265 11267 11296 11297 11310 11321 11329 |
| | 11343 11350 11352 11353 11384 11400 11402 11410 11411 11419 11421 11424 11443 11448 11462 11470 11478 |
| | 11519 11536 11540 11567 11571 11573 11597 11611 11635 11639 11640 11641 11642 11649 11651 11654 11667 |
| | 11672 11673 11676 11677 11678 11679 11700 11717 11722 11727 11729 11755 11769 11771 11773 11774 11789 |
| | 11800 11814 11818 11822 11825 11840 11866 11877 11896 11901 11908 11917 11941 11960 11965 11966 11968 |
| | 11971 11972 11988 11996 12023 12046 12053 12055 12058 12090 12091 12128 12143 12163 12166 12169 12211 |
| | 12216 12228 12234 12235 12248 12255 12268 12296 12308 12321 12325 12340 12362 12398 12400 12412 12423 |
| | 12426 12427 12432 12437 12439 12441 12454 12464 12478 12480 12496 12507 12544 12545 12553 12563 12606 |
| | 12620 12646 12650 12662 12666 12676 12678 12699 12702 12720 12723 12746 12751 12765 12772 12786 12790 |
| | 12794 12796 12800 12803 12816 12824 12825 12827 12856 12870 12887 12896 12897 12900 12906 12929 12941 |
| | 12998 13009 13048 13067 13071 13073 13084 13103 13106 13131 13134 13154 13171 13180 13181 13185 13201 |
| | 13205 13247 13253 13287 13290 13291 13305 13312 13322 13334 13337 13340 13349 13351 13360 13396 13418 |
| | 13419 13421 13438 13440 13459 13460 13478 13482 13501 13508 13509 13514 13536 13545 13565 13580 13624 |
| | 13674 13698 13706 13716 13717 13725 13753 13778 13800 13817 13825 13833 13834 13836 13857 13868 13876 |
| | 13884 13905 13912 13933 13960 13968 13983 13986 13991 13999 14014 14016 14019 14031 14037 14041 14046 |
| | 14064 14075 14080 14088 14091 14094 14098 14099 14108 14129 14132 14145 14152 14167 14175 14190 14204 |
| | 14205 14207 14215 14223 14232 14243 14260 14271 14277 14282 14316 14320 14329 14343 14357 14361 14364 |
| | 14380 14409 14415 14425 14429 14455 14472 14484 14492 14512 14514 14531 14533 14538 14544 14561 14567 |
| | 14568 14598 14599 14611 14614 14616 14636 14637 14639 14646 14656 14661 14674 14676 14678 14681 14692 |
| | 14698 14716 14718 14721 14724 14729 14742 14751 14753 14757 14762 14764 14805 14806 14815 14830 14837 |
| | 14843 14849 14856 14896 14935 14944 14947 14950 14961 14969 14982 15005 15008 15018 15021 15023 15034 |
| | 15048 15059 15065 15076 15079 15081 15090 15091 15118 15128 15133 15147 15174 15185 15189 15205 15209 |
| | 15211 15212 15215 15217 15234 15235 15250 15251 15252 15326 15332 15347 15373 15377 15388 15395 15397 |
| | 15417 15420 15428 15434 15437 15439 15446 15455 15489 15490 15491 15496 15499 15504 15510 15515 15518 |
| | 15521 15528 15561 15569 15571 15574 15583 15605 15623 15625 15635 15638 15681 15699 15708 15715 15792 |
| | 15793 15797 15817 15821 15838 15841 15850 15856 15861 15873 15882 15883 15889 15891 15900 15931 15937 |
| | 15938 15963 15964 15971 15974 15977 16007 16019 16024 16043 16081 16109 16118 16119 16191 16224 16229 |
| | 16232 16234 16235 16261 16287 16291 16297 16299 16309 16343 16344 16353 16390 16404 16411 16414 16486 |
| | 16507 16557 16563 16564 16585 16599 16602 16612 16624 16643 16649 16658 16670 16672 16673 16681 16696 |
| | 16709 16716 16729 16730 16734 16739 16748 16759 16763 16776 16789 16802 16809 16825 16842 16859 16860 |
| | 16901 16903 16909 16961 16974 16983 16991 16998 17000 17003 17005 17007 17018 17022 17027 17030 17066 |
| | 17067 17078 17092 17100 17101 17113 17128 17149 17175 17179 17182 17191 17194 17203 17204 17207 17215 |
| | 17232 17262 17265 17268 17271 17280 17283 17285 17306 17313 17376 |
| 226: | 10662 10775 10801 10804 10952 11117 11193 11214 11231 11649 11651 11676 11678 11679 11814 12163 |
| | 12228 12400 12800 13106 13171 13340 13396 13508 13717 13983 14014 14099 14132 14190 14277 14380 14472 |
| | 14753 14837 14843 15189 15420 15490 15605 15635 16624 16649 16730 16763 16909 17027 17113 17191 17207 |
| | 17280 |
| 227: | 10950 11017 11107 11198 11210 11304 11517 11566 11759 11777 11846 11900 11929 11964 12165 12176 |
| | 12257 12351 12629 12826 12987 13113 13472 13715 13771 13865 13921 13935 14082 14171 14280 14288 14311 |
| | 14643 14769 14927 15245 15360 15440 15684 15732 16140 16150 16207 16275 16496 16611 16650 16979 |
| 228: | 10838 10889 11126 11393 11561 11858 12024 13367 13608 13609 13656 13827 13864 13955 14127 14211 |
| | 14628 14629 14768 15084 15153 15317 16369 16610 16775 16806 16852 17202 |
| 230: | 10505 10556 10635 10672 10759 10860 10946 10986 10998 11200 11241 11316 11328 11351 11407 11476 |
| | 11477 11482 11483 11555 11558 11560 11575 11577 11580 11581 11628 11782 11795 11821 11849 11865 11949 |
| | 12072 12099 12102 12106 12108 12126 12127 12129 12132 12133 12134 12137 12142 12149 12178 12193 12320 |
| | 12324 12344 12391 12422 12443 12483 12484 12528 12534 12540 12551 12599 12619 12692 12839 12878 13138 |
| | 13151 13245 13246 13273 13288 13307 13311 13320 13474 13571 13626 13632 13634 13639 13681 13686 13689 |
| | 13769 13831 13848 13871 13911 13929 14026 14044 14087 14412 14441 14442 14493 14517 14518 14588 14641 |
| | 14658 14706 14708 14731 14828 14834 14882 14889 14936 15062 15064 15228 15281 15283 15284 15289 15291 |
| | 15312 15316 15319 15322 15445 15553 15598 15673 15695 15778 15830 15908 15913 15940 16046 16052 16074 |
| | 16080 16085 16183 16218 16296 16316 16337 16423 16722 17135 17163 17343 17356 17375 |
| 231: | 10703 10903 11022 11090 11320 11551 11930 11982 11993 12004 12298 12417 12758 12851 12952 13270 |
| | 13332 13387 14025 14050 14089 14305 14627 14941 14960 15075 15184 15454 15517 15627 15643 15671 15733 |
| | 15760 15767 15768 15829 15916 15994 16179 16308 16468 16621 16708 16927 17211 17316 |
| 232: | 10543 10800 11044 14341 14390 14733 15514 15611 16225 17148 |
| 233: | 10592 10722 10908 10940 10944 11055 11125 11374 11481 11539 11892 12026 12448 12491 12598 12680 |
| | 12799 12834 12838 13098 13304 13531 13691 13886 14023 14625 14760 14802 14838 14933 15103 15164 15192 |
| | 15195 15853 16041 16077 16091 16107 16728 16762 17369 |
| 234: | 10763 10970 11270 11299 11382 11620 11648 11868 12202 12691 12701 12841 12853 12986 13078 13430 |
| | 13611 13832 13961 14045 14198 14577 14900 14997 15300 15402 15546 15874 15903 15910 15920 16035 16151 |
| | 16410 16596 16638 16689 16769 |
| 235: | 10495 10497 10499 10534 10546 10558 10576 10577 10587 10646 10651 10671 10675 10742 10743 10746 |
| | 10785 10788 10807 10817 10826 10833 10844 10849 10859 10861 10870 10874 10884 10887 10895 10898 10902 |
| | 10913 10923 10928 10935 10941 10951 10972 11007 11028 11067 11071 11078 11103 11104 11112 11115 11129 |
| | 11139 11174 11180 11189 11191 11192 11196 11209 11213 11224 11230 11247 11256 11257 11262 11302 11307 |
| | 11313 11319 11334 11370 11373 11437 11447 11473 11474 11489 11513 11527 11550 11556 11576 11600 11619 |
| | 11623 11627 11632 11686 11696 11702 11704 11716 11721 11728 11734 11751 11752 11761 11790 11793 11805 |
| | 11811 11813 11820 11824 11835 11845 11848 11872 11882 11921 11927 11928 11934 11942 11947 11948 11961 |
| | 11962 11963 11974 11978 11979 12000 12003 12021 12045 12069 12117 12119 12170 12194 12197 12210 12214 |
| | 12232 12246 12250 12254 12262 12273 12274 12293 12307 12318 12330 12350 12354 12356 12365 12372 12389 |
| | 12396 12430 12446 12471 12494 12495 12503 12505 12519 12525 12556 12567 12571 12573 12574 12587 12597 |
| | 12614 12617 12623 12639 12665 12687 12700 12721 12734 12749 12752 12755 12785 12798 12807 12814 12847 |
| | 12849 12852 12863 12905 12913 12959 12962 12966 12973 12994 13006 13025 13026 13060 13081 13095 13129 |
| | 13130 13167 13184 13200 13225 13231 13256 13267 13269 13293 13309 13310 13319 13326 13341 13352 13415 |
| | 13417 13427 13433 13469 13487 13525 13527 13530 13532 13535 13569 13574 13587 13589 13594 13615 13620 |
| | 13623 13655 13705 13714 13740 13741 13742 13764 13765 13768 13774 13775 13776 13779 13788 13792 13811 |
| | 13815 13828 13830 13852 13860 13873 13875 13877 13881 13885 13948 13982 13990 13995 14004 14006 14009 |
| | 14028 14029 14033 14048 14049 14053 14072 14084 14086 14095 14116 14122 14130 14144 14160 14164 14177 |
| | 14196 14252 14257 14267 14269 14279 14281 14304 14350 14360 14385 14433 14445 14446 14451 14477 14494 |
| | 14501 14511 14513 14525 14556 14585 14595 14605 14620 14666 14669 14673 14702 14767 14787 14798 14804 |
| | 14818 14833 14864 14895 14930 14940 14951 14954 14972 14973 14977 14985 14994 15004 15010 15011 15073 |
| | 15074 15085 15086 15099 15106 15127 15131 15151 15152 15170 15187 15218 15249 15259 15270 15273 15277 |
| | 15320 15329 15358 15369 15470 15477 15486 15487 15506 15507 15566 15610 15640 15650 15660 15675 15688 |
| | 15691 15697 15707 15714 15719 15747 15753 15755 15756 15757 15758 15759 15770 15837 15857 15885 15905 |
| | 15925 15960 15968 15982 15997 15998 16008 16045 16065 16089 16114 16117 16136 16155 16210 16228 16239 |
| | 16244 16249 16274 16276 16304 16336 16351 16376 16383 16391 16399 16406 16407 16413 16416 16418 16440 |
| | 16449 16478 16489 16506 16513 16522 16531 16555 16581 16634 16664 16703 16704 16743 16817 16846 16887 |
| | 16904 16918 16922 16925 16928 16932 16954 16955 16967 16970 16973 16984 16993 16997 17004 17020 17024 |
| | 17025 17032 17044 17048 17099 17117 17118 17122 17127 17147 17158 17164 17173 17200 17217 17235 17263 |
| | 17274 17301 17315 17319 17325 17341 17344 |
| 236: | 11742 12406 |
| 237: | 11223 11832 12406 12559 12911 16502 |
| 238: | 10840 11211 11713 11815 11817 11819 11893 12181 12185 12192 12388 12776 13286 13453 13667 13772 |
| | 14047 14090 14150 14532 14562 14566 14603 14647 14664 14743 14763 14779 14860 14867 14934 15007 15032 |
| | 15364 15586 15831 16134 16195 16270 16286 16301 16706 16707 16749 16784 16886 16986 17033 17035 17039 |
| | 17060 17121 17264 17293 17350 17362 |
| 239: | 10563 10611 10639 10643 10647 10677 10793 10955 11040 11046 11147 11238 11718 11898 12150 12281 |
| | 12329 12341 12641 12651 12774 12883 12926 12999 13097 13099 13371 13604 13835 13964 14106 14112 14131 |
| | 14372 14547 14597 14613 14756 14970 15194 15232 15341 15345 15628 15669 16064 16198 16203 16205 16271 |
| | 16691 16837 17012 17055 17132 17284 |
| 240: | 10529 10602 10606 10629 10707 10728 10752 10760 10779 10825 10831 10853 10872 10893 11027 11108 |
| | 11159 11245 11315 11377 11420 11427 11454 11499 11559 11583 11689 11701 11794 11853 11857 11946 11973 |
| | 12020 12081 12201 12253 12570 12882 12893 12910 12945 12948 12975 12976 12978 12979 12982 12996 12997 |
| | 13000 13001 13002 13004 13008 13038 13040 13041 13042 13302 13323 13439 13603 13680 13736 13739 13744 |
| | 13746 13796 13840 13939 13984 14100 14168 14236 14326 14334 14401 14522 14551 14582 14601 14602 14608 |
| | 14632 14634 14688 14797 14809 14845 14886 14920 15112 15130 15292 15293 15339 15344 15351 15382 15383 |
| | 15384 15385 15387 15401 15509 15519 15522 15538 15545 15549 15551 15552 15555 15580 15587 15589 15591 |
| | 15609 15634 15636 15663 15666 15687 15690 15692 15718 15722 15745 15763 15765 15787 15796 15799 15804 |
| | 15842 15867 15893 15926 15929 16042 16079 16130 16133 16135 16142 16159 16172 16221 16278 16326 16331 |
| | 16334 16371 16374 16420 16439 16473 16526 16548 16549 16550 16551 16584 16615 16747 16934 17013 17059 |
| | 17079 17080 17083 |
| 241: | 10582 10601 10813 10945 11279 11547 11675 11736 12355 12482 12590 12609 12909 12939 13034 13102 |
| | 13105 13121 13306 13679 13718 13842 13922 13962 14000 14212 14319 14367 14526 14564 14590 14749 14854 |
| | 14871 14938 14998 15098 15111 15413 15523 15661 15771 15775 15935 16213 16580 16609 17090 17116 17139 |
| | 17237 17275 17288 17310 17355 |
| 242: | 10481 10510 10522 10548 10555 10560 10627 10640 10649 10653 10680 10686 10692 10721 10724 10727 |
| | 10731 10733 10735 10737 10739 10757 10758 10812 10899 10958 10962 10967 10969 10971 10987 10989 10993 |
| | 10995 10997 11023 11050 11111 11244 11255 11266 11306 11308 11309 11312 11314 11336 11337 11338 11339 |
| | 11340 11341 11342 11345 11361 11363 11364 11365 11366 11367 11369 11385 11389 11390 11392 11395 11397 |
| | 11398 11399 11401 11416 11417 11423 11426 11430 11435 11439 11455 11457 11461 11464 11466 11491 11492 |
| | 11493 11495 11496 11512 11515 11518 11522 11524 11526 11530 11563 11603 11625 11656 11685 11750 11766 |
| | 11913 11985 11986 12006 12019 12022 12036 12039 12040 12044 12049 12052 12074 12077 12080 12082 12084 |
| | 12096 12097 12098 12101 12103 12104 12107 12110 12114 12118 12136 12140 12141 12147 12148 12152 12154 |
| | 12157 12158 12159 12160 12177 12180 12184 12187 12189 12198 12209 12212 12215 12218 12219 12221 12224 |
| | 12238 12240 12242 12244 12247 12249 12251 12252 12261 12264 12265 12267 12269 12272 12285 12288 12291 |
| | 12297 12299 12301 12304 12312 12319 12345 12346 12348 12368 12370 12373 12376 12380 12429 12470 12474 |
| | 12501 12502 12504 12509 12605 12613 12628 12669 12670 12672 12675 12696 12697 12698 12710 12711 12725 |
| | 12726 12728 12730 12731 12739 12753 12756 12763 12781 12784 12795 12797 12801 12802 12808 12810 12818 |
| | 12837 12840 12842 12846 12848 12861 12862 12864 12865 12867 12892 12894 12895 12898 12899 12902 12920 |
| | 12924 12925 12927 12928 12944 12949 12951 12953 12956 12958 12984 12985 13024 13028 13032 13052 13055 |
| | 13075 13080 13082 13091 13096 13109 13112 13116 13117 13120 13123 13124 13125 13127 13128 13143 13146 |
| | 13148 13150 13156 13159 13162 13163 13164 13175 13176 13179 13186 13189 13190 13193 13196 13198 13199 |
| | 13202 13212 13219 13222 13223 13229 13230 13232 13234 13235 13237 13249 13346 13403 13425 13452 13455 |
| | 13458 13481 13488 13491 13500 13506 13519 13521 13524 13534 13540 13548 13557 13558 13560 13563 13570 |
| | 13576 13577 13579 13581 13583 13586 13591 13597 13601 13606 13614 13616 13619 13622 13630 13641 13642 |
| | 13647 13654 13660 13663 13666 13670 13676 13677 13700 13704 13707 13711 13712 13722 13723 13724 13726 |
| | 13728 13729 13735 13738 13748 13752 13756 13760 13762 13780 13782 13787 13789 13791 13810 13813 13816 |
| | 13818 13821 13839 13844 13847 13849 13850 13869 13895 13916 13941 13944 13947 13950 13951 13969 13972 |
| | 13974 13978 13979 13980 13996 13998 14002 14003 14008 14012 14030 14032 14035 14036 14039 14043 14054 |
| | 14058 14061 14063 14065 14078 14163 14251 14266 14268 14274 14293 14295 14328 14331 14333 14336 14337 |
| | 14339 14342 14365 14370 14374 14376 14377 14379 14384 14387 14391 14408 14411 14414 14418 14420 14421 |
| | 14423 14427 14443 14447 14448 14450 14452 14457 14459 14460 14462 14463 14469 14476 14483 14489 14491 |
| | 14660 14711 14717 14741 14752 14765 14770 14771 14781 14827 14869 14981 14983 14986 14990 14991 15058 |
| | 15239 15264 15267 15269 15276 15280 15282 15286 15298 15299 15304 15305 15311 15313 15350 15357 15361 |
| | 15366 15371 15386 15390 15393 15396 15400 15410 15419 15422 15427 15429 15433 15451 15452 15458 15459 |
| | 15462 15479 15493 15495 15498 15501 15503 15508 15525 15527 15530 15533 15534 15541 15542 15543 15544 |
| | 15557 15560 15562 15568 15572 15612 15616 15619 15632 15639 15642 15657 15672 15685 15696 15700 15705 |
| | 15727 15728 15779 15784 15789 15791 15794 15802 15810 15813 15865 15868 15892 15896 15899 15923 15953 |
| | 15955 15957 15959 15984 15986 15987 15988 15990 15991 15992 15993 15995 15996 16021 16023 16026 16027 |
| | 16028 16030 16031 16032 16033 16034 16048 16051 16053 16054 16055 16056 16058 16061 16062 16063 16067 |
| | 16069 16090 16093 16094 16096 16097 16098 16099 16100 16102 16103 16104 16105 16106 16111 16121 16123 |
| | 16125 16127 16128 16129 16182 16241 16242 16243 16247 16248 16252 16253 16254 16258 16267 16269 16277 |
| | 16279 16282 16283 16285 16288 16293 16303 16305 16306 16310 16313 16319 16322 16324 16325 16329 16330 |
| | 16345 16350 16356 16359 16361 16362 16363 16373 16379 16381 16388 16389 16394 16415 16417 16422 16424 |
| | 16427 16428 16431 16433 16438 16443 16453 16455 16457 16460 16464 16466 16488 16490 16495 16498 16509 |
| | 16512 16514 16518 16528 16530 16533 16536 16537 16539 16542 16543 16546 16561 16570 16571 16579 16583 |
| | 16588 16727 16733 16778 16779 16780 16781 16783 16792 16793 16795 16797 16798 16801 16803 16804 16805 |
| | 16808 16811 16812 16813 16826 16829 16831 16833 16835 16836 16838 16840 16841 16843 16844 16867 16868 |
| | 16870 16872 16873 16876 16878 16882 16883 16884 16885 16905 16907 16913 16931 16933 16935 16936 16937 |
| | 16943 16964 16966 16968 16969 16971 17029 17037 17054 17056 17057 17058 17064 17065 17071 17073 17076 |
| | 17082 17085 17087 17088 17089 17094 17098 17103 17106 17109 17111 17124 17126 17130 17133 17134 17138 |
| | 17140 17142 17146 17152 17165 17167 17170 17172 17174 17177 17181 17183 17186 17187 17190 17193 17196 |
| | 17206 17209 17210 17213 17216 17218 17223 17224 17227 17228 17255 17256 17258 17259 17266 17272 17287 |
| | 17290 17291 17297 17320 17324 17326 17330 17333 17335 17336 17337 17340 17367 |

[0102] Recombinant DNA constructs are prepared using the DNA encoding each of the identified homologs and the constructs are used to prepare multiple events of transgenic corn, soybean, canola and cotton plants as illustrated in Examples 2-5. Plants are regenerated from the transformed plant cells and used to produce progeny plants and seed that are screened for enhanced water use efficiency, enhanced cold tolerance, increased yield, enhanced nitrogen use efficiency, enhanced seed protein and enhanced seed oil. From each group of multiple events of transgenic plants with a specific recombinant DNA for a homolog the event that produces the greatest enhancement in yield, water use efficiency, nitrogen use efficiency, enhanced cold tolerance, enhanced seed protein and enhanced seed oil is identified and progeny seed is selected for commercial development.

### EXAMPLE 7

### Consensus Sequence

[0103] This example illustrates the identification of consensus amino acid sequence for the proteins and homologs encoded by DNA that is used to prepare the transgenic seed and plants of this invention having enhanced agronomic traits.

[0104] ClustalW program was selected for multiple sequence alignments of the amino acid sequence of SEQ ID NO: 122, 133, 136, 138, 141, 143, 153, 155, 173-174, 182, 197, 203, 206, 208, 215, 217, 229, 234, 236-237, 240 and their homologs. Three major factors affecting the sequence alignments dramatically are (1) protein weight matrices; (2) gap open penalty; (3) gap extension penalty. Protein weight matrices available for ClustalW program include Blosum, Pam and Gonnet series. Those parameters with gap open penalty and gap extension penalty were extensively tested. On the basis of the test results, Blosum weight matrix, gap open penalty of 10 and gap extension penalty of 1 were chosen for multiple sequence alignment.

[0105] The consensus amino acid sequence can be used to identify DNA corresponding to the full scope of this invention that is useful in providing transgenic plants, for example corn and soybean plants with enhanced agronomic traits, for example improved nitrogen use efficiency, improved yield, improved water use efficiency and/or improved growth under cold stress, due to the expression in the plants of DNA suppressing a protein with amino acid sequence identical to the consensus amino acid sequence.

[0106] The SEQ ID NOs for the identified consensus sequences are reported in table 8 below and the full consensus sequences are provided in the attached sequence listing.

TABLE 8

| Gene ID | PEP SEQ ID NO | Consensus SEQ ID NO |
|---|---|---|
| Mnom000132- | 122 | 17381 |
| Mnom000134 | | |
| Mnom000451 | 133 | 17382 |
| Mnom000481 | 136 | 17383 |
| Mnom000486 | 138 | 17384 |
| Mnom000494 | 141 | 17385 |
| Mnom000497 | 143 | 17386 |
| Mnom000636 | 153 | 17387 |
| Mnom000640 | 155 | 17388 |
| Mnom000766- | 173 | 17389 |
| Mnom000767 | | |
| Mnom000822- | 174 | 17390 |
| Mnom000823 | | |
| Mnom000986 | 182 | 17391 |
| PHE0002862 | 197 | 17392 |
| PHE0004853 | 203 | 17393 |
| PHE0006378 | 206 | 17394 |
| PHE0006496 | 208 | 17395 |
| PHE0008407 | 215 | 17396 |
| PHE0008541 | 217 | 17397 |
| PHE0011028 | 229 | 17398 |
| PHE0013205 | 234 | 17399 |
| PHE0013712 | 236 | 17400 |
| PHE0013713 | 237 | 17401 |
| TRG0000291 | 240 | 17402 |

### EXAMPLE 9

### Identification of Amino Acid Domain by Pfam Analysis

[0107] This example illustrates the identification of domain and domain module by Pfam analysis.

[0108] The amino acid sequence of the expressed proteins that are shown to be associated with an enhanced trait were analyzed for Pfam protein family against the current Pfam collection of multiple sequence alignments and hidden Markov models using the HMMER software in the appended computer listing. The Pfam protein domains and modules for the proteins of SEQ ID NOs: 123-132, 134-135, 137, 139-140, 142, 145-152, 154, 156-172, 175-181, 183-196, 198-202, 204-205, 207, 209-211, 213, 216, 218-228, 230-233, 235, 238-239, and 241-242 are shown in Tables 9, 10 and 11. The Hidden Markov model databases for the identified patent families are also in the appended computer listing allowing identification of other homologous proteins and their cognate encoding DNA to enable the full breadth of the invention for a person of ordinary skill in the art. Certain proteins are identified by a single Pfam domain and others by multiple Pfam domains.

TABLE 9
Pfam annotation

| PEP SEQ ID NO | Gene ID | Pfam domain name | Begin | Stop | Score | E-value |
|---|---|---|---|---|---|---|
| 123 | Mnom000202 | Copine | 116 | 264 | 331.7 | 1.50E−96 |
| 124 | Mnom000215- | CBFB_NFYA | 97 | 153 | 143.1 | 8.50E−40 |
| | Mnom000216 | | | | | |
| 125 | Mnom000219- | CBFD_NFYB_HMF | 25 | 90 | 124.7 | 3.10E−34 |
| | Mnom000220 | | | | | |
| 126 | Mnom000256- | Glu_synthase | 115 | 494 | 683.3 | 2.00E−202 |
| | Mnom000257 | | | | | |
| 127 | Mnom000260- | HEAT | 183 | 219 | 22.6 | 0.0016 |
| | Mnom000261 | | | | | |
| 127 | Mnom000260- | HEAT | 716 | 753 | 17.5 | 0.057 |
| | Mnom000261 | | | | | |
| 127 | Mnom000260- | FAT | 1435 | 1801 | 483.5 | 2.90E−142 |
| | Mnom 000261 | | | | | |
| 127 | Mnom000260- | Rapamycin_bind | 1908 | 2007 | 232.8 | 8.80E−67 |
| | Mnom000261 | | | | | |
| 127 | Mnom000260- | PI3_PI4_kinase | 2074 | 2324 | 370.7 | 2.70E−108 |
| | Mnom000261 | | | | | |
| 127 | Mnom000260- | FATC | 2432 | 2464 | 65.9 | 1.60E−16 |
| | Mnom000261 | | | | | |
| 128 | Mnom000262 | F-box | 29 | 76 | 36.2 | 1.30E−07 |
| 129 | Mnom000324 | AP2 | 136 | 188 | 81.9 | 2.30E−21 |
| 130 | Mnom000372 | SAP | 34 | 68 | 45.6 | 1.90E−10 |
| 130 | Mnom000372 | zf-MIZ | 357 | 406 | 111.3 | 3.20E−30 |
| 131 | Mnom000412- | 14-3-3 | 4 | 219 | 277.4 | 3.20E−80 |
| | Mnom000413 | | | | | |
| 132 | Mnom000444 | GATase_2 | 39 | 409 | 772.4 | 3.20E−229 |
| 132 | Mnom000444 | Glu_syn_central | 483 | 784 | 680.2 | 1.80E−201 |
| 132 | Mnom000444 | Glu_synthase | 841 | 1226 | 867.4 | 8.10E−258 |
| 132 | Mnom000444 | GXGXG | 1304 | 1499 | 387.2 | 2.90E−113 |
| 134 | Mnom000471 | Glyco_transf_20 | 16 | 482 | 1010.3 | 7.40E−301 |
| 134 | Mnom000471 | Trehalose_PPase | 572 | 819 | 382.5 | 7.50E−112 |
| 135 | Mnom000480 | Response_reg | 16 | 128 | 26.4 | 5.90E−06 |
| 137 | Mnom000485 | FAR1 | 67 | 160 | 131.4 | 2.90E−36 |
| 137 | Mnom000485 | FAR1 | 204 | 298 | 126.8 | 6.90E−35 |
| 139 | Mnom000490 | PTR2 | 1 | 257 | 46.1 | 1.30E−10 |
| 140 | Mnom000491 | PPR | 151 | 185 | 14.4 | 0.18 |
| 140 | Mnom000491 | PPR | 186 | 219 | 11.9 | 0.35 |
| 140 | Mnom000491 | PPR | 220 | 254 | 5.4 | 2 |
| 140 | Mnom000491 | PPR | 258 | 292 | 18.4 | 0.029 |
| 140 | Mnom000491 | PPR | 293 | 327 | 25.4 | 0.00024 |
| 140 | Mnom000491 | PPR | 328 | 362 | 26.1 | 0.00014 |
| 140 | Mnom000491 | PPR | 363 | 397 | 32 | 2.40E−06 |
| 140 | Mnom000491 | PPR | 398 | 432 | 12.1 | 0.33 |
| 140 | Mnom000491 | PPR | 434 | 468 | 23.7 | 0.00076 |
| 140 | Mnom000491 | PPR | 469 | 503 | 29.4 | 1.50E−05 |
| 140 | Mnom000491 | PPR | 534 | 568 | 34.5 | 4.20E−07 |
| 142 | Mnom000496 | efhand | 109 | 137 | 23.6 | 0.00082 |
| 145 | Mnom000517 | 14-3-3 | 8 | 225 | 391.1 | 1.90E−114 |
| 146 | Mnom000554 | DUF761 | 9 | 329 | 302.9 | 6.80E−88 |
| 147 | Mnom000570 | SAP | 11 | 45 | 49.3 | 1.50E−11 |
| 147 | Mnom000570 | PHD | 114 | 168 | 35.4 | 2.20E−07 |
| 147 | Mnom000570 | zf-MIZ | 359 | 408 | 88.1 | 3.10E−23 |
| 148 | Mnom000580 | HSP20 | 133 | 230 | 144.1 | 4.20E−40 |
| 149 | Mnom000616- | Fer2 | 19 | 88 | 47.5 | 5.30E−11 |
| | Mnom000617 | | | | | |
| 149 | Mnom000616- | Fer2_2 | 98 | 173 | 127.1 | 5.70E−35 |
| | Mnom000617 | | | | | |
| 149 | Mnom000616- | FAD_binding_5 | 260 | 440 | 273.4 | 5.10E−79 |
| | Mnom000617 | | | | | |
| 149 | Mnom000616- | CO_deh_flav_C | 447 | 558 | 151.7 | 2.20E−42 |
| | Mnom000617 | | | | | |
| 149 | Mnom000616- | Ald_Xan_dh_C | 612 | 719 | 168.1 | 2.60E−47 |
| | Mnom000617 | | | | | |
| 149 | Mnom000616- | Ald_Xan_dh_C2 | 727 | 1272 | 756.1 | 2.50E−224 |
| | Mnom000617 | | | | | |
| 150 | Mnom000618- | Fer2 | 11 | 80 | 42.5 | 1.70E−09 |
| | Mnom000619 | | | | | |
| 150 | Mnom000618- | Fer2_2 | 90 | 165 | 126.5 | 8.50E−35 |
| | Mnom000619 | | | | | |
| 150 | Mnom000618- | FAD_binding_5 | 252 | 432 | 271.6 | 1.80E−78 |
| | Mnom000619 | | | | | |
| 150 | Mnom000618- | CO_deh_flav_C | 439 | 550 | 145.5 | 1.60E−40 |
| | Mnom000619 | | | | | |
| 150 | Mnom000618- | Ald_Xan_dh_C | 604 | 711 | 159.3 | 1.20E−44 |
| | Mnom000619 | | | | | |
| 150 | Mnom000618- | Ald_Xan_dh_C2 | 719 | 1264 | 746.6 | 1.90E−221 |
| | Mnom000619 | | | | | |
| 151 | Mnom000626- | 2OG-FeII_Oxy | 180 | 280 | 121.3 | 3.10E−33 |
| | Mnom000627 | | | | | |
| 152 | Mnom000628 | 2OG-FeII_Oxy | 180 | 280 | 121.3 | 3.10E−33 |
| 154 | Mnom000637 | B3 | 312 | 417 | 118.5 | 2.30E−32 |
| 154 | Mnom000637 | Auxin_resp | 439 | 524 | 160.7 | 4.30E−45 |
| 154 | Mnom000637 | AUX_IAA | 681 | 826 | −74.9 | 0.00048 |
| 156 | Mnom000641 | XRN_N | 1 | 256 | 589.7 | 3.10E−174 |
| 156 | Mnom000641 | zf-CCHC | 263 | 280 | 28.9 | 8.30E−06 |
| 157 | Mnom000643 | PALP | 36 | 329 | 341 | 2.30E−99 |
| 158 | Mnom000645 | DAO | 164 | 518 | −26.1 | 0.00058 |
| 158 | Mnom000645 | GMC_oxred_N | 210 | 434 | 358.8 | 1.00E−104 |
| 159 | Mnom000647 | Peptidase_S10 | 42 | 455 | 562.2 | 6.00E−166 |
| 160 | Mnom000682 | Glycos_transf _1 | 296 | 459 | 121.8 | 2.20E−33 |
| 161 | Mnom000690 | Redoxin | 76 | 232 | 56.6 | 9.30E−14 |
| 161 | Mnom000690 | AhpC-TSA | 77 | 211 | 214 | 4.10E−61 |
| 161 | Mnom000690 | 1-cysPrx_C | 221 | 265 | 64.5 | 4.10E−16 |
| 162 | Mnom000107 | PAS_2 | 70 | 186 | 231.5 | 2.10E−66 |
| 162 | Mnom000107 | GAF | 219 | 404 | 105.2 | 2.10E−28 |
| 162 | Mnom000107 | Phytochrome | 415 | 595 | 408.4 | 1.20E−119 |
| 162 | Mnom000107 | PAS | 622 | 737 | 93.7 | 6.60E−25 |
| 162 | Mnom000107 | PAS_4 | 628 | 742 | 18.7 | 0.0033 |
| 162 | Mnom000107 | PAS | 752 | 877 | 101.1 | 3.70E−27 |
| 162 | Mnom000107 | HisKA | 897 | 961 | 27.7 | 4.90E−05 |
| 162 | Mnom000107 | HATPase_c | 1011 | 1123 | 67.2 | 6.00E−17 |
| 163 | Mnom000108 | PAS_2 | 70 | 186 | 231.5 | 2.10E−66 |
| 163 | Mnom000108 | GAF | 219 | 404 | 108.6 | 2.10E−29 |
| 163 | Mnom000108 | Phytochrome | 415 | 595 | 408.4 | 1.20E−119 |
| 163 | Mnom000108 | PAS | 622 | 737 | 93.7 | 6.60E−25 |
| 163 | Mnom000108 | PAS_4 | 628 | 742 | 18.7 | 0.0033 |
| 163 | Mnom000108 | PAS | 752 | 877 | 101.1 | 3.70E−27 |
| 163 | Mnom000108 | HisKA | 897 | 961 | 27.7 | 4.90E−05 |
| 163 | Mnom000108 | HATPase_c | 1011 | 1123 | 67.2 | 6.00E−17 |
| 164 | Mnom000109 | PAS_2 | 70 | 186 | 231.5 | 2.10E−66 |
| 164 | Mnom000109 | GAF | 219 | 404 | 101.3 | 3.20E−27 |
| 164 | Mnom000109 | Phytochrome | 415 | 595 | 408.4 | 1.20E−119 |
| 164 | Mnom000109 | PAS | 622 | 737 | 93.7 | 6.60E−25 |
| 164 | Mnom000109 | PAS_4 | 628 | 742 | 18.7 | 0.0033 |
| 164 | Mnom000109 | PAS | 752 | 877 | 101.1 | 3.70E−27 |
| 164 | Mnom000109 | HisKA | 897 | 961 | 27.7 | 4.90E−05 |
| 164 | Mnom000109 | HATPase_c | 1011 | 1123 | 67.2 | 6.00E−17 |
| 165 | Mnom000110 | PAS_2 | 97 | 217 | 213.1 | 7.30E−61 |
| 165 | Mnom000110 | GAF | 250 | 432 | 111.1 | 3.80E−30 |
| 165 | Mnom000110 | Phytochrome | 443 | 622 | 414.3 | 1.90E−121 |
| 165 | Mnom000110 | PAS | 653 | 769 | 123.6 | 6.20E−34 |
| 165 | Mnom000110 | PAS_4 | 659 | 774 | 28.3 | 3.20E−05 |
| 165 | Mnom000110 | PAS | 784 | 906 | 89.3 | 1.30E−23 |
| 165 | Mnom000110 | HisKA | 926 | 990 | 53.4 | 8.90E−13 |
| 165 | Mnom000110 | HATPase_c | 1038 | 1150 | 50.3 | 7.40E−12 |
| 166 | Mnom000111 | PAS_2 | 97 | 217 | 213.1 | 7.30E−61 |
| 166 | Mnom000111 | GAF | 250 | 432 | 114.7 | 3.00E−31 |
| 166 | Mnom000111 | Phytochrome | 443 | 622 | 414.3 | 1.90E−121 |
| 166 | Mnom000111 | PAS | 653 | 769 | 123.6 | 6.20E−34 |
| 166 | Mnom000111 | PAS_4 | 659 | 774 | 28.3 | 3.20E−05 |
| 166 | Mnom000111 | PAS | 784 | 906 | 89.3 | 1.30E−23 |
| 166 | Mnom000111 | HisKA | 926 | 990 | 53.4 | 8.90E−13 |
| 166 | Mnom000111 | HATPase_c | 1038 | 1150 | 50.3 | 7.40E−12 |
| 167 | Mnom000112 | PAS_2 | 97 | 217 | 213.1 | 7.30E−61 |
| 167 | Mnom000112 | GAF | 250 | 432 | 110.1 | 7.50E−30 |
| 167 | Mnom000112 | Phytochrome | 443 | 622 | 414.3 | 1.90E−121 |
| 167 | Mnom000112 | PAS | 653 | 769 | 123.6 | 6.20E−34 |
| 167 | Mnom000112 | PAS_4 | 659 | 774 | 28.3 | 3.20E−05 |
| 167 | Mnom000112 | PAS | 784 | 906 | 89.3 | 1.30E−23 |
| 167 | Mnom000112 | HisKA | 926 | 990 | 53.4 | 8.90E−13 |
| 167 | Mnom000112 | HATPase_c | 1038 | 1150 | 50.3 | 7.40E−12 |
| 168 | Mnom000113, | PAS_2 | 70 | 186 | 231.5 | 2.10E−66 |
| | Mnom000116 | | | | | |
| 168 | Mnom000113, | GAF | 219 | 404 | 102.6 | 1.40E−27 |
| | Mnom000116 | | | | | |
| 168 | Mnom000113, | Phytochrome | 415 | 595 | 408.4 | 1.20E−119 |
| | Mnom000116 | | | | | |
| 168 | Mnom000113, | PAS | 622 | 737 | 93.7 | 6.60E−25 |
| | Mnom000116 | | | | | |
| 168 | Mnom000113, | PAS_4 | 628 | 742 | 18.7 | 0.0033 |
| | Mnom000116 | | | | | |
| 168 | Mnom000113, | PAS | 752 | 877 | 101.1 | 3.70E−27 |
| | Mnom000116 | | | | | |
| 168 | Mnom000113, | HisKA | 897 | 961 | 27.7 | 4.90E−05 |
| | Mnom000116 | | | | | |
| 168 | Mnom000113, | HATPase_c | 1011 | 1123 | 67.2 | 6.00E−17 |
| | Mnom000116 | | | | | |
| 169 | Mnom000114, | PAS_2 | 97 | 217 | 213.1 | 7.30E−61 |
| | Mnom000117 | | | | | |
| 169 | Mnom000114, | GAF | 250 | 432 | 112.6 | 1.30E−30 |
| | Mnom000117 | | | | | |
| 169 | Mnom000114, | Phytochrome | 443 | 622 | 414.3 | 1.90E−121 |
| | Mnom000117 | | | | | |
| 169 | Mnom000114, | PAS | 653 | 769 | 123.6 | 6.20E−34 |
| | Mnom000117 | | | | | |
| 169 | Mnom000114, | PAS_4 | 659 | 774 | 28.3 | 3.20E−05 |
| | Mnom000117 | | | | | |
| 169 | Mnom000114, | PAS | 784 | 906 | 89.3 | 1.30E−23 |
| | Mnom000117 | | | | | |
| 169 | Mnom000114, | HisKA | 926 | 990 | 53.4 | 8.90E−13 |
| | Mnom000117 | | | | | |
| 169 | Mnom000114, | HATPase_c | 1038 | 1150 | 50.3 | 7.40E−12 |
| | Mnom000117 | | | | | |
| 170 | Mnom000115, | PAS_2 | 97 | 217 | 213.1 | 7.30E−61 |
| | Mnom000118 | | | | | |
| 170 | Mnom000115, | GAF | 250 | 432 | 115.9 | 1.30E−31 |
| | Mnom000118 | | | | | |
| 170 | Mnom000115, | Phytochrome | 443 | 622 | 414.3 | 1.90E−121 |
| | Mnom000118 | | | | | |
| 170 | Mnom000115, | PAS | 653 | 769 | 123.6 | 6.20E−34 |
| | Mnom000118 | | | | | |
| 170 | Mnom000115, | PAS_4 | 659 | 774 | 28.3 | 3.20E−05 |
| | Mnom000118 | | | | | |
| 170 | Mnom000115, | PAS | 784 | 906 | 89.3 | 1.30E−23 |
| | Mnom000118 | | | | | |
| 170 | Mnom000115, | HisKA | 926 | 990 | 53.4 | 8.90E−13 |
| | Mnom000118 | | | | | |
| 170 | Mnom000115, | HATPase_c | 1038 | 1150 | 50.3 | 7.40E−12 |
| | Mnom000118 | | | | | |
| 171 | Mnom000119 | PAS_2 | 70 | 186 | 231.5 | 2.10E−66 |
| 171 | Mnom000119 | GAF | 219 | 404 | 107 | 6.20E−29 |
| 171 | Mnom000119 | Phytochrome | 415 | 595 | 408.4 | 1.20E−119 |
| 171 | Mnom000119 | PAS | 622 | 737 | 93.7 | 6.60E−25 |
| 171 | Mnom000119 | PAS_4 | 628 | 742 | 18.7 | 0.0033 |
| 171 | Mnom000119 | PAS | 752 | 877 | 101.1 | 3.70E−27 |
| 171 | Mnom000119 | HisKA | 897 | 961 | 27.7 | 4.90E−05 |
| 171 | Mnom000119 | HATPase_c | 1011 | 1123 | 67.2 | 6.00E−17 |
| 172 | Mnom000738 | DUF260 | 7 | 108 | 203.5 | 5.70E−58 |
| 175 | Mnom000857, | DUF231 | 364 | 542 | 272.2 | 1.20E−78 |
| | Mnom000858, | | | | | |
| | Mnom000860 | | | | | |
| 176 | Mnom000873 | Glyco_hydro_18 | 27 | 306 | 45.5 | 1.70E−10 |
| 177 | Mnom000886 | Synaptobrevin | 132 | 238 | 56.1 | 1.40E−13 |
| 178 | Mnom000923- | PAS_2 | 97 | 217 | 213.1 | 7.30E−61 |
| | Mnom000924 | | | | | |
| 178 | Mnom000923- | GAF | 250 | 432 | 115.9 | 1.30E−31 |
| | Mnom000924 | | | | | |
| 178 | Mnom000923- | Phytochrome | 443 | 622 | 406.8 | 3.60E−119 |
| | Mnom000924 | | | | | |
| 178 | Mnom000923- | PAS | 653 | 769 | 123.6 | 6.20E−34 |
| | Mnom000924 | | | | | |
| 178 | Mnom000923- | PAS_4 | 659 | 774 | 28.3 | 3.20E−05 |
| | Mnom000924 | | | | | |
| 178 | Mnom000923- | PAS | 784 | 906 | 89.3 | 1.30E−23 |
| | Mnom000924 | | | | | |
| 178 | Mnom000923- | HisKA | 926 | 990 | 53.4 | 8.90E−13 |
| | Mnom000924 | | | | | |
| 178 | Mnom000923- | HATPase_c | 1038 | 1150 | 50.3 | 7.40E−12 |
| | Mnom000924 | | | | | |
| 179 | Mnom000937 | PAS | 116 | 230 | 22.8 | 0.0014 |
| 179 | Mnom000937 | PAS_3 | 141 | 227 | 19.9 | 0.0011 |
| 179 | Mnom000937 | PAS | 390 | 504 | 10.5 | 0.047 |
| 179 | Mnom000937 | Pkinase | 582 | 870 | 291.4 | 2.00E−84 |
| 179 | Mnom000937 | Pkinase_Tyr | 582 | 877 | −58.7 | 8.00E−10 |
| 180 | Mnom000942, | TP6A_N | 89 | 156 | 84.6 | 3.50E−22 |
| | Mnom000955- | | | | | |
| | Mnom000956 | | | | | |
| 181 | Mnom000985 | Response_reg | 16 | 128 | 26.4 | 5.90E−06 |
| 183 | Mnom001055 | Peptidase_S10 | 42 | 455 | 562.2 | 6.00E−166 |
| 184 | Mnom001090- | Gln-synt_N | 31 | 111 | 149.1 | 1.30E−41 |
| | Mnom001092 | | | | | |
| 184 | Mnom001090- | Gln-synt_C | 117 | 369 | 295.8 | 9.50E−86 |
| | Mnom001092 | | | | | |
| 185 | Mnom001138 | UDPGP | 26 | 443 | 913.5 | 1.00E−271 |
| 186 | Mnom001140 | DnaJ | 11 | 80 | 75 | 2.80E−19 |
| 187 | Mnom001141 | DnaJ | 12 | 78 | 109 | 1.60E−29 |
| 188 | Mnom001142 | NAPRTase | 175 | 439 | 150.5 | 5.10E−42 |
| 189 | Mnom001146 | DUF296 | 114 | 234 | 180.6 | 4.40E−51 |
| 190 | Mnom001147 | DUF296 | 114 | 234 | 180.6 | 4.40E−51 |
| 191 | Mnom001160 | zf-A20 | 14 | 38 | 34.2 | 5.10E−07 |
| 191 | Mnom001160 | zf-AN1 | 115 | 155 | 72.8 | 1.20E−18 |
| 192 | Mnom001162 | Cellulose_synt | 284 | 1107 | 1889.4 | 0 |
| 193 | PHE0000597 | Mannitol_dh | 10 | 132 | 181.9 | 1.80E−51 |
| 193 | PHE0000597 | Mannitol_dh_C | 157 | 383 | 394.4 | 1.90E−115 |
| 194 | PHE0001556 | RimK | 226 | 486 | −20.7 | 1.20E−05 |
| 194 | PHE0001556 | Mur_ligase_M | 498 | 711 | 138.1 | 2.70E−38 |
| 194 | PHE0001556 | Mur_ligase_C | 735 | 821 | 75.8 | 1.60E−19 |
| 195 | PHE0001557 | RimK | 217 | 370 | −48.2 | 0.0014 |
| 195 | PHE0001557 | Mur_ligase_M | 491 | 704 | 138.5 | 2.10E−38 |
| 195 | PHE0001557 | Mur_ligase_C | 728 | 813 | 80.8 | 5.00E−21 |
| 196 | PHE0001559 | Peptidase_S51 | 52 | 212 | 44.4 | 4.40E−10 |
| 198 | PHE0003348 | HLH | 310 | 359 | 70 | 8.90E−18 |
| 199 | PHE0003706 | SSF | 54 | 471 | −94.5 | 2.00E−05 |
| 200 | PHE0003708 | SSF | 46 | 463 | −112.6 | 8.80E−05 |
| 201 | PHE0004230 | E2F_TDP | 227 | 292 | 134 | 4.90E−37 |
| 202 | PHE0004820 | HLH | 113 | 162 | 62.1 | 2.10E−15 |
| 204 | PHE0006017 | Na_H_Exchanger | 26 | 445 | 173.4 | 6.40E−49 |
| 205 | PHE0006102 | Brix | 27 | 342 | 311.1 | 2.30E−90 |
| 207 | PHE0006380 | RNase_PH_C | 129 | 201 | 61.9 | 2.40E−15 |
| 209 | PHE0006610 | GSHPx | 119 | 227 | 234.2 | 3.30E−67 |
| 210 | PHE0006613 | GSHPx | 29 | 137 | 200.6 | 4.10E−57 |
| 211 | PHE0006916 | RAMP4 | 49 | 112 | 130 | 7.80E−36 |
| 213 | PHE0007643 | LRRNT_2 | 38 | 79 | 39.3 | 1.60E−08 |
| 213 | PHE0007643 | LRR_1 | 155 | 177 | 12.5 | 1.2 |
| 213 | PHE0007643 | LRR_1 | 179 | 201 | 15 | 0.31 |
| 213 | PHE0007643 | LRR_1 | 227 | 249 | 16.4 | 0.12 |
| 213 | PHE0007643 | Pkinase_Tyr | 429 | 696 | 0.6 | 9.10E−14 |
| 216 | PHE0008411 | DUF778 | 41 | 162 | 269.1 | 1.00E−77 |
| 218 | PHE0008602 | Gln-synt_N | 103 | 184 | 168.6 | 1.80E−47 |
| 218 | PHE0008602 | Gln-synt_C | 191 | 472 | 579.1 | 5.00E−171 |
| 219 | PHE0009339 | HSP70 | 66 | 673 | 1343.3 | 0 |
| 220 | PHE0009341 | TrkH | 211 | 569 | 125.4 | 1.80E−34 |
| 221 | PHE0010195 | PTR2 | 85 | 432 | 70 | 8.70E−18 |
| 222 | PHE0010352 | CBFD_NFYB_HMF | 31 | 96 | 132.4 | 1.40E−36 |
| 223 | PHE0010354 | CBFD_NFYB_HMF | 34 | 99 | 128.8 | 1.80E−35 |
| 224 | PHE0010646 | Spermine_synth | 46 | 291 | 500.6 | 2.10E−147 |
| 225 | PHE0010648 | SNF2_N | 25 | 373 | −19.4 | 1.30E−07 |
| 225 | PHE0010648 | Helicase_C | 441 | 520 | 59.4 | 1.40E−14 |
| 226 | PHE0010649 | ResIII | 18 | 230 | 2.1 | 3.60E−05 |
| 226 | PHE0010649 | SNF2_N | 24 | 374 | 4.4 | 5.60E−09 |
| 226 | PHE0010649 | Helicase_C | 442 | 521 | 56.7 | 8.90E−14 |
| 227 | PHE0010852 | HLH | 403 | 451 | 40.3 | 7.80E−09 |
| 228 | PHE0010956 | Nucleoside_tran | 167 | 450 | 514.2 | 1.70E−151 |
| 230 | PHE0011063 | Globin | 49 | 145 | 53 | 1.20E−12 |
| 231 | PHE0011543 | zf-B_box | 4 | 50 | 27.5 | 5.50E−05 |
| 232 | PHE0013202 | HLH | 172 | 221 | 22.2 | 0.00075 |
| 233 | PHE0013203 | SAM_2 | 236 | 302 | 54.6 | 3.70E−13 |
| 233 | PHE0013203 | SAM _1 | 237 | 300 | 85.7 | 1.60E−22 |
| 233 | PHE0013203 | DRMBL | 609 | 707 | 160.2 | 6.20E−45 |
| 235 | PHE0013292 | PDZ | 220 | 304 | 34.6 | 4.00E−07 |
| 235 | PHE0013292 | Peptidase_S41 | 340 | 503 | 244.8 | 2.20E−70 |
| 238 | PHE0013734 | SRF-TF | 9 | 59 | 64.9 | 3.00E−16 |
| 239 | TRG0000049 | CBFD_NFYB_HMF | 75 | 140 | 100.2 | 7.10E−27 |
| 241 | TRG0000332 | CBFB_NFYA | 192 | 248 | 141.2 | 3.30E−39 |
| 242 | 1071693 | PAS_2 | 98 | 218 | 192.3 | 1.30E−54 |
| 242 | 1071693 | GAF | 251 | 433 | 116.9 | 6.70E−32 |
| 242 | 1071693 | Phytochrome | 444 | 623 | 409.1 | 7.40E−120 |
| 242 | 1071693 | PAS | 654 | 738 | 30.7 | 5.80E−06 |

TABLE 10
Pfam module annotation

| PEP SEQ ID NO | Gene ID | Pfam domain module | Position |
|---|---|---|---|
| 123 | Mnom000202 | Copine | 116-264 |
| 124 | Mnom000215- | CBFB_NFYA | 97-153 |
| | Mnom000216 | | |
| 125 | Mnom000219- | CBFD_NFYB_HMF | 25-90 |
| | Mnom000220 | | |
| 126 | Mnom000256- | Glu_synthase | 115-494 |
| | Mnom000257 | | |
| 127 | Mnom000260- | HEAT::HEAT::FAT::Rapamycin_ | 183-219::716-753::1435- |
| | Mnom000261 | bind::PI3_PI4_kinase::FATC | 1801::1908-2007::2074- |
| | | | 2324::2432-2464 |
| 128 | Mnom000262 | F-box | 29-76 |
| 129 | Mnom000324 | AP2 | 136-188 |
| 130 | Mnom000372 | SAP::zf-MIZ | 34-68::357-406 |
| 131 | Mnom000412- | 14-3-3 | 4-219 |
| | Mnom000413 | | |
| 132 | Mnom000444 | GATase_2::Glu_syn_central:: | 39-409::483-784::841- |
| | | Glu_synthase::GXGXG | 1226::1304-1499 |
| 134 | Mnom000471 | Glyco_transf_20::Trehalose_ | 16-482::572-819 |
| | | PPase | |
| 135 | Mnom000480 | Response_reg | 16-128 |
| 137 | Mnom000485 | FAR1::FAR1 | 67-160:: 204-298 |
| 139 | Mnom000490 | PTR2 | 1-257 |
| 140 | Mnom000491 | PPR::PPR::PPR::PPR::PPR::PPR:: | 151-185::186-219::220- |
| | | PPR::PPR::PPR::PPR::PPR | 254::258-292::293-327::328- |
| | | | 362::363-397::398-432::434- |
| | | | 468::469-503::534-568 |
| 142 | Mnom000496 | Efhand | 109-137 |
| 145 | Mnom000517 | 14-3-3 | 8-225 |
| 146 | Mnom000554 | DUF761 | 9-329 |
| 147 | Mnom000570 | SAP::PHD::zf-MIZ | 11-45::114-168::359-408 |
| 148 | Mnom000580 | HSP20 | 133-230 |
| 149 | Mnom000616- | Fer2::Fer2_2::FAD_binding_5:: | 19-88::98-173::260-440::447- |
| | Mnom000617 | CO_deh_flav_C::Ald_Xan_dh_ | 558::612-719::727-1272 |
| | | C::Ald_Xan_dh_C2 | |
| 150 | Mnom000618- | Fer2::Fer2_2::FAD_binding_5:: | 11-80::90-165::252-432::439- |
| | Mnom000619 | CO_deh_flav_C::Ald_Xan_dh_ | 550::604-711: :719-1264 |
| | | C::Ald_Xan_dh_C2 | |
| 151 | Mnom000626- | 2OG-FeII_Oxy | 180-280 |
| | Mnom000627 | | |
| 152 | Mnom000628 | 2OG-FeII_Oxy | 180-280 |
| 154 | Mnom000637 | B3::Auxin_resp::AUX_IAA | 312-417::439-524::681-826 |
| 156 | Mnom000641 | XRN_N::zf-CCHC | 1-256::263-280 |
| 157 | Mnom000643 | PALP | 36-329 |
| 158 | Mnom000645 | GMC_oxred_N | 210-434 |
| 159 | Mnom000647 | Peptidase_S10 | 42-455 |
| 160 | Mnom000682 | Glycos_transf_1 | 296-459 |
| 161 | Mnom000690 | AhpC-TSA::1-cysPrx_C | 77-211::221-265 |
| 162 | Mnom000107 | PAS_2::GAF::Phytochrome:: | 70-186::219-404::415- |
| | | PAS::PAS::HisKA::HATPase_c | 595::622-737::752-877::897- |
| | | | 961::1011-1123 |
| 163 | Mnom000108 | PAS_2::GAF::Phytochrome:: | 70-186::219-404::415-595:: |
| | | PAS::PAS::HisKA::HATPase_c | 622-737::752-877::897-961:: |
| | | | 1011-1123 |
| 164 | Mnom000109 | PAS_2::GAF::Phytochrome:: | 70-186::219-404::415-595:: |
| | | PAS::PAS::HisKA::HATPase_c | 622-737::752-877::897-961:: |
| | | | 1011-1123 |
| 165 | Mnom000110 | PAS_2::GAF::Phytochrome:: | 97-217::250-432::443-622:: |
| | | PAS::PAS::HisKA::HATPase_c | 653-769::784-906::926-990:: |
| | | | 1038-1150 |
| 166 | Mnom000111 | PAS_2::GAF::Phytochrome:: | 97-217::250-432::443-622:: |
| | | PAS::PAS::HisKA::HATPase_c | 653-769::784-906::926-990:: |
| | | | 1038-1150 |
| 167 | Mnom000112 | PAS_2::GAF::Phytochrome:: | 97-217::250-432::443-622:: |
| | | PAS::PAS::HisKA::HATPase_c | 653-769::784-906::926-990:: |
| | | | 1038-1150 |
| 168 | Mnom000113, | PAS_2::GAF::Phytochrome:: | 70-186::219-404::415-595:: |
| | Mnom000116 | PAS::PAS::HisKA::HATPase_c | 622-737::752-877::897-961:: |
| | | | 1011-1123 |
| 169 | Mnom000114, | PAS_2::GAF::Phytochrome:: | 97-217::250-432::443-622:: |
| | Mnom000117 | PAS::PAS::HisKA::HATPase_c | 653-769::784-906::926-990:: |
| | | | 1038-1150 |
| 170 | Mnom000115, | PAS_2::GAF::Phytochrome:: | 97-217::250-432::443-622:: |
| | Mnom000118 | PAS::PAS::HisKA::HATPase_c | 653-769::784-906::926-990:: |
| | | | 1038-1150 |
| 171 | Mnom000119 | PAS_2::GAF::Phytochrome:: | 70-186::219-404::415-595:: |
| | | PAS::PAS::HisKA::HATPase_c | 622-737::752-877::897-961:: |
| | | | 1011-1123 |
| 172 | Mnom000738 | DUF260 | 7-108 |
| 175 | Mnom000857, | DUF231 | 364-542 |
| | Mnom000858, | | |
| | Mnom 000860 | | |
| 176 | Mnom000873 | Glyco_hydro_18 | 27-306 |
| 177 | Mnom000886 | Synaptobrevin | 132-238 |
| 178 | Mnom000923- | PAS_2::GAF::Phytochrome:: | 97-217::250-432::443-622:: |
| | Mnom000924 | PAS::PAS::HisKA::HATPase_c | 653-769::784-906::926-990:: |
| | | | 1038-1150 |
| 179 | Mnom000937 | PAS_3::PAS::Pkinase | 141-227::390-504::582-870 |
| 180 | Mnom000942, | TP6A_N | 89-156 |
| | Mnom000955- | | |
| | Mnom000956 | | |
| 181 | Mnom000985 | Response_reg | 16-128 |
| 183 | Mnom001055 | Peptidase_S 10 | 42-455 |
| 184 | Mnom001090- | Gln-synt_N::Gln-synt_C | 31-111::117-369 |
| | Mnom001092 | | |
| 185 | Mnom001138 | UDPGP | 26-443 |
| 186 | Mnom001140 | DnaJ | 11-80 |
| 187 | Mnom001141 | DnaJ | 12-78 |
| 188 | Mnom001142 | NAPRTase | 175-439 |
| 189 | Mnom001146 | DUF296 | 114-234 |
| 190 | Mnom001147 | DUF296 | 114-234 |
| 191 | Mnom001160 | zf-A20::zf-AN1 | 14-38::115-155 |
| 192 | Mnom001162 | Cellulose_synt | 284-1107 |
| 193 | PHE0000597 | Mannitol_dh::Mannitol_dh_C | 10-132::157-383 |
| 194 | PHE0001556 | RimK::Mur_ligase_M::Mur_ | 226-486::498-711::735-821 |
| | | ligase_C | |
| 195 | PHE0001557 | RimK::Mur_ligase_M::Mur_ | 217-370::491-704::728-813 |
| | | ligase_C | |
| 196 | PHE0001559 | Peptidase_S51 | 52-212 |
| 198 | PHE0003348 | HLH | 310-359 |
| 199 | PHE0003706 | SSF | 54-471 |
| 200 | PHE0003708 | SSF | 46-463 |
| 201 | PHE0004230 | E2F_TDP | 227-292 |
| 202 | PHE0004820 | HLH | 113-162 |
| 204 | PHE0006017 | Na_H_Exchanger | 26-445 |
| 205 | PHE0006102 | Brix | 27-342 |
| 207 | PHE0006380 | RNase_PH_C | 129-201 |
| 209 | PHE0006610 | GSHPx | 119-227 |
| 210 | PHE0006613 | GSHPx | 29-137 |
| 211 | PHE0006916 | RAMP4 | 49-112 |
| 213 | PHE0007643 | LRRNT_2::LRR_1::LRR_1:: | 38-79::155-177::179-201: : |
| | | LRR_1::Pkinase_Tyr | 227-249: :429-696 |
| 216 | PHE0008411 | DUF778 | 41-162 |
| 218 | PHE0008602 | Gln-synt_N::Gln-synt_C | 103-184::191-472 |
| 219 | PHE0009339 | HSP70 | 66-673 |
| 220 | PHE0009341 | TrkH | 211-569 |
| 221 | PHE0010195 | PTR2 | 85-432 |
| 222 | PHE0010352 | CBFD_NFYB_HMF | 31-96 |
| 223 | PHE0010354 | CBFD_NFYB_HMF | 34-99 |
| 224 | PHE0010646 | Spermine_synth | 46-291 |
| 225 | PHE0010648 | SNF2_N::Helicase_C | 25-373::441-520 |
| 226 | PHE0010649 | SNF2_N::Helicase_C | 24-374::442-521 |
| 227 | PHE0010852 | HLH | 403-451 |
| 228 | PHE0010956 | Nucleoside_tran | 167-450 |
| 230 | PHE0011063 | Globin | 49-145 |
| 231 | PHE0011543 | zf-B_box | 4-50 |
| 232 | PHE0013202 | HLH | 172-221 |
| 233 | PHE0013203 | SAM_1::DRMBL | 237-300::609-707 |
| 235 | PHE0013292 | PDZ::Peptidase_S41 | 220-304: :340-503 |
| 238 | PHE0013734 | SRF-TF | 9-59 |
| 239 | TRG0000049 | CBFD_NFY B_HMF | 75-140 |
| 241 | TRG0000332 | CBFB_NFYA | 192-248 |
| 242 | 1071693 | PAS_2::GAF::Phytochrome::PAS | 98-218::251-433::444-623:: |
| | | | 654-738 |

TABLE 11
Description of Pfam domains

| | Accession | Gathering | |
|---|---|---|---|
| Pfam domain name | number | cutoff | Domain description |
| 14-3-3 | PF00244.12 | 25.0000; | 14-3-3 protein |
| 1-cysPrx_C | PF10417.1 | 36.0000; | C-terminal domain of 1-Cys |
| | | | peroxiredoxin |
| 200-FeII_Oxy | PF03171.12 | 11.5000; | 2OG-Fe(II) oxygenase superfamily |
| AhpC-TSA | PF00578.13 | 4.8000; | AhpC/TSA family |
| Ald_Xan_dh_C | PF01315.14 | −7.6000; | Aldehyde oxidase and xanthine |
| | | | dehydrogenase, a/b hammerhead |
| | | | domain |
| Ald_Xan_dh_C2 | PF02738.10 | −233.0000; | Aldehyde oxidase and xanthine |
| | | | dehydrogenase, molybdopterin |
| | | | binding domain |
| AP2 | PF00847.12 | 21.7000; | AP2 domain |
| AUX_IAA | PF02309.8 | −83.0000; | AUX/IAA family |
| Auxin_resp | PF06507.5 | 25.0000; | Auxin response factor |
| B3 | PF02362.13 | 26.5000; | B3 DNA binding domain |
| Brix | PF04427.10 | 0.1000; | Brix domain |
| CBFB_NFYA | PF02045.7 | 25.0000; | CCAAT-binding transcription factor |
| | | | (CBF-B/NF-YA) subunit B |
| CBFD_NFYB_HMF | PF00808.15 | 18.4000; | Histone-like transcription factor |
| | | | (CBF/NF-Y) and archaeal histone |
| Cellulose_synt | PF03552.6 | −257.9000; | Cellulose synthase |
| CO_deh_flav_C | PF03450.9 | −1.0000; | CO dehydrogenase flavoprotein |
| | | | C-terminal domain |
| Copine | PF07002.8 | −36.5000; | Copine |
| DAO | PF01266.16 | −34.9000; | FAD dependent oxidoreductase |
| DnaJ | PF00226.23 | −8.0000; | DnaJ domain |
| DRMBL | PF07522.6 | 25.0000; | DNA repair metallo-beta-lactamase |
| DUF231 | PF03005.7 | −46.3000; | Arabidopsis proteins of unknown |
| | | | function |
| DUF260 | PF03195.6 | −30.4000; | Protein of unknown function DUF260 |
| DUF296 | PF03479.7 | −3.0000; | Domain of unknown function (DUF296) |
| DUF761 | PF05553.3 | −97.7000; | Cotton fibre expressed protein |
| DUF778 | PF05608.4 | −38.6000; | Protein of unknown function (DUF778) |
| E2F_TDP | PF02319.12 | 17.0000; | E2F/DP family winged-helix |
| | | | DNA-binding domain |
| Efhand | PF00036.24 | 21.7000; | EF hand |
| FAD_binding_5 | PF00941.13 | −57.4000; | FAD binding domain in molybdopterin |
| | | | dehydrogenase |
| FAR1 | PF03101.7 | −12.7000; | FAR1 DNA-binding domain |
| FAT | PF02259.15 | −64.1000; | FAT domain |
| FATC | PF02260.12 | 16.5000; | FATC domain |
| F-box | PF00646.25 | 14.7000; | F-box domain |
| Fer2 | PF00111.19 | 11.2000; | 2Fe-2S iron-sulfur cluster binding domain |
| Fer2_2 | PF01799.12 | −19.5000; | [2Fe-2S] binding domain |
| GAF | PF01590.18 | 23.0000; | GAF domain |
| GATase_2 | PF00310.13 | −91.6000; | Glutamine amidotransferases class-II |
| Gln-synt_C | PF00120.16 | −124.0000; | Glutamine synthetase, catalytic domain |
| Gln-synt_N | PF03951.11 | 9.0000; | Glutamine synthetase, beta-Grasp domain |
| Globin | PF00042.14 | −7.3000; | Globin |
| Glu_syn_central | PF04898.6 | 25.0000; | Glutamate synthase central domain |
| Glu_synthase | PF01645.9 | −198.4000; | Conserved region in glutamate synthase |
| Glyco_hydro_18 | PF00704.20 | 13.0000; | Glycosyl hydrolases family 18 |
| Glyco_transf_20 | PF00982.13 | −243.6000; | Glycosyltransferase family 20 |
| Glycos_transf 1 | PF00534.12 | −7.3000; | Glycosyl transferases group 1 |
| GMC_oxred_N | PF00732.11 | −71.1000; | GMC oxidoreductase |
| GSHPx | PF00255.11 | −16.0000; | Glutathione peroxidase |
| GXGXG | PF01493.11 | 5.0000; | GXGXG motif |
| HATPase_c | PF02518.18 | 22.4000; | Histidine kinase-, DNA gyrase B-, and |
| | | | HSP90-like ATPase |
| HEAT | PF02985.14 | 16.4000; | HEAT repeat |
| Helicase_C | PF00271.23 | 6.9000; | Helicase conserved C-terminal domain |
| HisKA | PF00512.17 | 22.1000; | His Kinase A (phosphoacceptor) domain |
| HLH | PF00010.18 | 8.3000; | Helix-loop-helix DNA-binding domain |
| HSP20 | PF00011.13 | 13.0000; | Hsp20/alpha crystallin family |
| HSP70 | PF00012.12 | −286.0000; | Hsp70 protein |
| LRR_1 | PF00560.25 | 10.9000; | Leucine Rich Repeat |
| LRRNT_2 | PF08263.4 | 18.6000; | Leucine rich repeat N-terminal domain |
| Mannitol_dh | PF01232.15 | −10.5000; | Mannitol dehydrogenase Rossmann |
| | | | domain |
| Mannitol_dh_C | PF08125.5 | −79.1000; | Mannitol dehydrogenase C-terminal |
| | | | domain |
| Mur_ligase_C | PF02875.13 | 8.0000; | Mur ligase family, glutamate ligase |
| | | | domain |
| Mur_ligase_M | PF08245.4 | −44.7000; | Mur ligase middle domain |
| Na_H_Exchanger | PF00999.13 | −67.9000; | Sodium/hydrogen exchanger family |
| NAPRTase | PF04095.8 | −88.5000; | Nicotinate phosphoribosyltransferase |
| | | | (NAPRTase) family |
| Nucleoside_tran | PF01733.10 | −85.0000; | Nucleoside transporter |
| PALP | PF00291.17 | −70.0000; | Pyridoxal-phosphate dependent enzyme |
| PAS | PF00989.16 | 0.0000; | PAS fold |
| PAS_2 | PF08446.3 | −2.1000; | PAS fold |
| PAS_3 | PF08447.3 | 17.2000; | PAS fold |
| PAS_4 | PF08448.2 | 16.4000; | PAS fold |
| PDZ | PF00595.16 | 20.7000; | PDZ domain (Also known as DHR or |
| | | | GLGF) |
| Peptidase_S10 | PF00450.14 | −198.0000; | Serine carboxypeptidase |
| Peptidase_S41 | PF03572.10 | −25.8000; | Peptidase family S41 |
| Peptidase_S51 | PF03575.9 | −11.1000; | Peptidase family S51 |
| PHD | PF00628.21 | 26.2000; | PHD-finger |
| Phytochrome | PF00360.12 | 13.0000; | Phytochrome region |
| PI3_PI4_kinase | PF00454.19 | 14.8000; | Phosphatidylinositol 3- and 4-kinase |
| Pkinase | PF00069.17 | 70.3000; | Protein kinase domain |
| Pkinase_Tyr | PF07714.9 | −155.0000; | Protein tyrosine kinase |
| PPR | PF01535.12 | 1.6000; | PPR repeat |
| PTR2 | PF00854.13 | −50.0000; | POT family |
| RAMP4 | PF06624.4 | 25.0000; | Ribosome associated membrane |
| | | | protein RAMP4 |
| Rapamycin_bind | PF08771.3 | 25.0000; | Rapamycin binding domain |
| Redoxin | PF08534.2 | 8.9000; | Redoxin |
| ResIII | PF04851.7 | 0.8000; | Type III restriction enzyme, res subunit |
| Response_reg | PF00072.16 | 4.1000; | Response regulator receiver domain |
| RimK | PF08443.3 | −56.1000; | RimK-like ATP-grasp domain |
| RNase_PH_C | PF03725.7 | 20.0000; | 3′ exoribonuclease family, domain 2 |
| SAM_1 | PF00536.22 | 11.3000; | SAM domain (Sterile alpha motif) |
| SAM_2 | PF07647.9 | 0.0000; | SAM domain (Sterile alpha motif) |
| SAP | PF02037.19 | 1.5000; | SAP domain |
| SNF2_N | PF00176.15 | −72.0000; | SNF2 family N-terminal domain |
| Spermine_synth | PF01564.9 | −93.8000; | Spermine/spermidine synthase |
| SRF-TF | PF00319.10 | 11.0000; | SRF-type transcription factor |
| | | | (DNA-binding and dimerisation domain) |
| SSF | PF00474.9 | −162.3000; | Sodium:solute symporter family |
| Synaptobrevin | PF00957.13 | 25.0000; | Synaptobrevin |
| TP6A_N | PF04406.6 | 25.0000; | Type IIB DNA topoisomerase |
| Trehalose_PPase | PF02358.8 | −49.4000; | Trehalose-phosphatase |
| TrkH | PF02386.8 | −96.5000; | Cation transport protein |
| UDPGP | PF01704.10 | −265.2000; | UTP-glucose-l-phosphate |
| | | | uridylyltransferase |
| XRN _N | PF03159.10 | 25.0000; | XRN 5′-3′ exonuclease N-terminus |
| zf-A20 | PF01754.8 | 25.0000; | A20-like zinc finger |
| zf-AN1 | PF01428.8 | 0.0000; | AN1-like Zinc finger |
| zf-B_box | PF00643.16 | 15.3000; | B-box zinc finger |
| zf-CCHC | PF00098.15 | 17.9000; | Zinc knuckle |
| zf-MIZ | PF02891.12 | −2.2000; | MIZ/SP-RING zinc finger |

1. A recombinant DNA construct comprising a polynucleotide encoding a protein that has an amino acid sequence having at least 95% identity over at least 95% of the length of a reference sequence selected from the group consisting of SEQ ID NO: 122-242 when said amino acid sequence is aligned with said reference sequence.

2. A recombinant DNA construct comprising a promoter that is functional in a plant cell and that is operably linked to a polynucleotide that, when expressed in a plant cell:
(a) encodes a protein:
i) having an amino acid sequence selected from the group consisting of SEQ ID NO: 123-140, 145-151, 153-173, 175-187, 189, 191-202, 204-207, 209-238, and 242;
ii) having an amino acid sequence having at least 95% identity over at least 95% of a reference sequence selected from the group consisting of SEQ ID NO: 123-140, 145-151, 153-173, 175-187, 189, 191-202, 204-207, 209-238, and 242 when said amino acid sequence is aligned to said reference sequence; or
iii) that is a homolog of a protein with an amino acid sequence selected from the group consisting of SEQ ID NO: 123-140, 145-151, 153-173, 175-187, 189, 191-202, 204-207, 209-238, and 242; or
(b) is transcribed into an RNA molecule that suppresses the level of an endogenous protein in said plant cell wherein said endogenous protein has an amino acid sequence selected from the group consisting of SEQ ID NO: 122, 141-144, 152, 174, 188, 190, 203, 208, or 239-241 or is a homolog thereof;
wherein said construct is stably integrated into plant chromosomal DNA.

3. A transgenic plant cell comprising the recombinant DNA construct of claim 2 wherein said plant cell is in a plant selected by screening a population of transgenic plants that have been transformed with said construct for an enhanced trait as compared to control plants; and wherein said enhanced trait is enhanced water use efficiency, enhanced cold tolerance, increased yield, enhanced nitrogen use efficiency, enhanced seed protein or enhanced seed oil.

4. A mixture comprising plant cells of claim 3 and an antibody to a protein produced in said cells wherein said protein has an amino acid sequence that has at least 95% identity over at least 95% of the length of a reference sequence selected from the group consisting of SEQ ID NO: 122-242 when said amino acid sequence is aligned to said reference sequence.

5. The plant cell of claim 3 further comprising DNA expressing a protein that provides tolerance from exposure to an herbicide comprising an agent applied at levels that are lethal to a wild type of said plant cell.

6. The plant cell of claim 5 wherein the agent of said herbicide is a glyphosate, dicamba, or glufosinate compound.

7. A transgenic plant comprising a plurality of plant cells of claim 3.

8. The transgenic plant of claim 7 which is homozygous for said recombinant DNA.

9. A transgenic seed comprising a plurality of plant cells of claim 3.

10. The transgenic seed of claim 9 from a corn, soybean, cotton, canola, alfalfa, wheat, rice, sugarcane, or sugar beet plant.

11. Grain comprising transgenic seed identifiable by the recombinant DNA construct of claim 2.

12. Seed meal produced from transgenic seed identifiable by the recombinant DNA construct of claim 2.

13. A transgenic pollen grain comprising a haploid derivative of a plant cell nucleus having a chromosome comprising the recombinant DNA construct of claim 2.

14. A method for manufacturing non-natural, transgenic seed that can be used to produce a crop of transgenic plants with an enhanced trait resulting from expression of the stably-integrated, recombinant DNA construct of claim 2, said method comprising:
(a) screening a population of plants for said enhanced trait and said recombinant DNA, wherein individual plants in said population exhibit said trait at a level less than, essentially the same as or greater than the level that said trait is exhibited in control plants which do not contain said recombinant DNA, wherein said enhanced trait is selected from the group of enhanced traits consisting of enhanced water use efficiency, enhanced cold tolerance, increased yield, enhanced nitrogen use efficiency, enhanced seed protein and enhanced seed oil;
(b) selecting from said population one or more plants that exhibit said trait at a level greater than the level that said trait is exhibited in control plants, and
(c) collecting seed from selected plant from step b.

15. The method of claim 14 wherein said method for manufacturing said transgenic seed further comprises:
(a) verifying that said recombinant DNA is stably integrated in said selected plants, and
(b) analyzing tissue of said selected plant to determine the expression or suppression of a protein having the function of a protein having an amino acid sequence selected from the group consisting of one of SEQ ID NOs: 122-242.

16. The method of claim 15 wherein said seed is corn, soybean, cotton, canola, alfalfa, wheat, rice, sugarcane, or sugar beet seed.

17. A method of producing hybrid corn seed comprising:
(a) acquiring hybrid corn seed from an herbicide tolerant corn plant which also has the stably-integrated, recombinant DNA construct of claim 2;
(b) producing corn plants from said hybrid corn seed, wherein a fraction of the plants produced from said hybrid corn seed is homozygous for said recombinant DNA, a fraction of the plants produced from said hybrid corn seed is hemizygous for said recombinant DNA, and a fraction of the plants produced from said hybrid corn seed has none of said recombinant DNA;
(c) selecting corn plants which are homozygous and hemizygous for said recombinant DNA by treating with an herbicide;
(d) collecting seed from herbicide-treated-surviving corn plants and planting said seed to produce further progeny corn plants;
(e) repeating steps (c) and (d) at least once to produce an inbred corn line; and
(f) crossing said inbred corn line with a second corn line to produce hybrid seed.

The application's sequence listing, which the Patent Office published only in electronic form, follows.

SEQUENCE LISTING (17402 sequences)

SEQ ID NO: 1 - DNA, 1296 bp, Glycine max
atgggtaataaacttgggaggaggagacaagtggtagatgagaaatatacgaggccgcaagggttgtataatcataaagatgtggatcacaagaagctgaggaagctaatactagaatcgaagttagcaccttgctatcccggagatgaagaaaccgcatacgatcgtgaagagtgcccgatttgctttctgtattatccaagtctaaaccgatcaagatgttgcacaaagagcatttgtacagagtgctttttgcagatgaaagttccaaattcaacccggcctacacaatgtcccttctgcaaaacggcaaattatgctgtggagtatcgcggtgtgaaatctaaagaagagaagggattggaacagattgaagagcaacgtgttatagaggcaaaaattaggatgcggcagcaggaacttcaggatgaagaggaaagaatgcacaaaagactggaaatgagctcctcgaatgtgaatgtggcagttgcagatgttgaatacagttcaaatgcagtgtcttcatcttcagtttctgttgttgaaaatgatgaaattgtttcttctcaagactcatgtgccacatcagtggttagagcaaatgcaaccactaggaccaatagagatgatgaatttgacgttgaccttgaggacatcatggtcatggaagcaatttggctttccattcaggagaatggcaggcggagaaatttatcttttgtcgatgctacttctggacactatgtagctgacggccgctatgtttcatccgtctcatctgtctcatccgtcatgggtccaccaacgggatcatcctcgtctccatctgggggtctcgcttgtgccattgcagctcttgctgagcgccagcaaatggctggagaatcatctatgagcctcaccaatgaaaatatgccatcattcaacaccctaccgggttccagaagattttataacagacttggtagggatatggctaattatccgcctggtgacaacctcaatgaggagccactggatgaagctgtgacaatgactaggagtcatggtgaatgggacatggaccatgggacacagttgactgaaacagcaaccagctatacaaactctgtcgcagcagaagatcgtggtgaactatcatctttgccacggtctgatgacaatgatggaagccttcaaagtgccacagaacccattgttcccgagagttttgaggagcagatgatgctcgccatggctgtctctttggctgaagctcgagccatgtcaagtggacagagtgcttcttggcagtag

SEQ ID NO: 2 - DNA, 1380 bp, Arabidopsis thaliana
atgggaggaagtagctctaaagagtcacctagaggaggtggaagtggtcgtaggtatgaacgtagtgtgtctgggagctcatcttattcgtctgcttgggaccagagcagctattatcagacaccaaaccatccatctgcgtctcctgtttcatcctataattctgggagacaaacaccgaagaatcttgagaggaagtattcacggattgctgataactaccgttccattgatgaggttaccgctgctctttcacatgccggtttggagtcctcgaatctcattgttggtatagatgtcaccaagagcaacgagtggacaggggcgagatcatttggtaggaagagtctgcatttcattggaactactccaaacccttatcaacaagctatttccatcattggaaagactttatcggtttttgatgaggataatttgatcccctgttatggatttggagatgctacaactcatgatcaggatgtcttcagtttcaatcccaatgatacatattgtaacgggtttgaagaagttctcatgtgttacagagagattgttccccagcttcgtctctcaggtccgacatcttttgcacctatcatcgaaagggccatgacaattgtggaagaaagtggtggccagtaccatgttcttctcattatcgctgatggacaggtgacaagaagtgttgatacagataacggtggattcagtccacaagagcagcagactattgatgccattgttagagcaagtgaatatcctttgtctatagttcttgttggtgttggagatggtccctgggacaccatgagacagtttgatgacaacatccccgctcgtgcctttgacaatttccaggtaataatatcaacatgtttctacaatagtgtagatagatcccttgtctttttcctggcaaatgtatcaatttcaaagtttgtgaatttcacggatataatgtcaaagaacattgatccagcaagaaaagaggcagaattcgcgctttctgccttgatggagatcccgtctcagtataaagccaccctcgaactaggcttacttggacaaagaaccggacattgtccagacaggattgcgcttccaccaccaacttatgctactcaatctatgcgcaacagcccaagaacttcccgatcaaccagttttcaaaacaaaccatatgataatggtgtttcctctacaccaccttcaactactcataacgagagccagcaacagttttgccccgtatgtctagtgagtgcaaagaacatggctttcaattgtggtcatcagacttgcgctggatgtggggaagacctccatgtgtgtcccatttgccggagctcaatctcggttcgtatcaagctttattaa

SEQ ID NO: 3 - DNA, 765 bp, Triticum aestivum
atgcttctcccctcttcttcgtcttcctcctacgatcccaaaggtgactcctttgggaaatcggttgacgatcatatgaggtcaactttgacttttggtgataagcattctgtatttgcaagtcaaaacactgactatggccacccaatggcttgcatttcatacccattcaatgattctggttctgtttgggcggcctatgggtcacgggctatgttccagcccctcatggcggaaggaggggcatctgcgaccgcaagagttccattgcctgtcgaattagcagcggatgagcccatatttgtcaatcccaaacaatataatgggattctccggcgaaggcagctgcgcgccaagttagaggcccagaataaactcacaaaaaacagaaagccctacctccacgagtctcgccatcttcacgcgatgaagcgggcaagaggttccgggggacgtttcctcaattccaaacagctgaagcagcagcagcagcagtctggcagtgcatgcacgaaggccattgcggatggcgcgaattccttgggttcaacccatctacggctaggcagcggcgcagccggagaccgaagcaactcggcgtccaaggcgatgtcctcccaagagaacagcaagagagtcgccgccccggctcccgccttcaccatgattcaagcggcgcgcaaagacgacgacttcttccaccatcacggccaccatctcagcttctccgaccacttcggccagtcgagcgaccggtatacgtaa

SEQ ID NO: 4 - DNA, 618 bp, Zea mays
atgccggactccgacaacgacgagtccggcgggccgagcaacgcggacttctcgtcgccgcgggagcaggaccggttcctgccgatcgcgaacgtgagccggatcatgaagaaggcgctcccggccaacgccaagatatccaaggacggcaaggagacggtgcaggagtgcgtgtccgagttcatctccttcatcaccggtgaggcctccgacaagtgccagcgcgagaagcgcaagaccatcaacggcgacgacctcctctgggccatgaccacgctcggcttcgaggactacgtcgagccgctcaagctctacctccacaagttccgcgagctcgagggcgacaaggcggccgcgggctcgcagccgccgccgccgccgtcgtcaacgcacaatggcgcgggagtgcccgtcggctacggcatgtacggcgccggcggaggcagcggcatgatcatgatgatgggacagcccatgtacccgccggccgcgtcgtcggggtactcgcagcagccgccgcaccaccagatgtccatgggcgggaaaggtggcgcgtatggccactgcgacggctcgtcgtcatcgccgtcagggctccgcaggcacgacgggttgtga

SEQ ID NO: 5 - DNA, 1578 bp, Bacillus subtilis
atggagaccatcattatcgccctgatcgccttcatcattggcatcattgccatcccgatcgtgctcttcgcctggatctacattaaggacgagaagcagcaggagcacagcatcctgaggaactacccggtgatcggcaggttcaggtacatcctcgagaagatcggcccggagctcaggcagtacctctacagcaacgacaacgaggaacagccgttcagcaggaaggagtacgagcagaccgtgatcagcggcaagtacaagagcaggatgatgggcttcggcagcgtgcgcgacttcgacaagccgggctactatatccgcaacgccatgttcccgaagcagcgcgaggaaatgcacgtgaaccagacccctaagatcgagacccagatctacaagatggacgccgacaacctcttcaagcgcaaggagcacgccgagcacatcaaggccgacccttacttcctccaccctgacgatgtgcaggtgatcggcgagcacacctgcgagaagcctttctacgtgaagggcctcgtgggccagagcgccatgagttacggctccctcggcgagcgcgccgtgaccgccctctccaagggcctccacctcgcgggcgggacatggatgaacacaggcgagggcgggctctccgagtatcacctgaagggcggggcggacatcatttgccagatcggccctggcctgttcggggtgcgcaagcggaacggggagttctcctgggaggaattcaagcggaagtcccggatcgaccagatcaaggcgttcgagctgaagctggcgcagggggcgaagacacgggggggacacgtggacggggcgaaggtctccgaggaagtcgcggacattagaaacgtcgagcctgggaagtctattgactctccaaacagattctatgagttctctaacccacccgagatgctggacttcattgagaagctgagagatgtcgggcaaaagccagtcggaattaagctggtcgcgggacacccagaggaactgcatgaactgtttagtcatatgcaaaaatctggaaaacatccagattttattacaattgatggatctgaaggaggtacaggagcgtcattttatgaacttgctgatactgtcggacttccaattatgactgctcttcccattgtcgatactcttttgaaacaatatggacttagatcacaacttaaaatttttgctagtggtaaacttttgactcccgataaaattgctgtcgctttggctttgggtgctgattttgttaatatagctcgtggtatgatgttttcagttggttgcatacgtgctttggtttgccatacgaatacgtgtcccgcaggtgttgcaacgacggatcccaaattgcaaaaagcactatcagttgaagaaaaacaacatcgtgtttgtaattatgttatatcactacgagaaggtctatttaatttagcagcagcagcaggtataaattcgcccatacatttttcgaaagaacatgtagtatatcgaaaagaagatggttcgataataaatatagataatttaatacatcaatttgtatcgtag

SEQ ID NO: 6 - DNA, 7395 bp, Zea mays
atgaagccctcgccgcacttcccggagatcggaaagaagcctaaagatttgattgctaaggaccacacatttaacatcgcggcttacatctcgtctggagcggatgttattgctgccgcgctccgtaaacatgttgaggaggaagcccgagatctcagcggtgaagcttttttaaggtttatggatcagctctatgagcagatatctagtttactgcagagcaacgatgttaatgaaaatttactggctctccgtgctatcgatgcgttaattgatatgccctttggagaaggcgcttccaaagtttctaagtttgccagcttcttgagaaacgtatttgaagtgaagcgcgaccctgaaatcctagttcccgcaagtgaagtgctgggtcatttagcaaaagcgggaggagcaatgactgcagatgaagtggagcggcagattaaaacggctttggggtggcttactggtgaacgagtggaatatcgccgatttgcagctgtactcattctcaaagagatggcagaaaatgcgtcaacagttttcaatgttcatgttcctgagtttgttgatgctatatgggtagcactgagagaccctaaacaagctgttcgtgaaaaagcagttgaagccttgcgcgcttgtctccatgttattgaaaaacgggagacacgttggcgtgtacaatggtattaccggatgtgtgaagccgcacaagttgggcttggcaggaatgcttctgttcatagtattcatggatcattattggccgttggagaattgctgaggaatacaggggagtttatgatgtctcggtacagagaagtggctgatattgtcctcgattatttaaagcatcgagatcagcttgttcgacgtagtataacatcacttcttcctcgaattgcccacttcctgcgtgacagatttgtgactaattacctgaagatttgtatggatcatatcttgtttgttctacgtacaccagacgagcgcgctagtggttttgttgcccttggagagatggctggggctctgggtgttgaacttgtgccttatttaccagcaattacctcacatttgcaagatgcgattgctcctcgcagaggaaggccatctcttgaggcaatttcttgtgtaggaagctttgcaaaagctatgggtcctgcaatggaacctcatattcgtagcggacttctagatgctatgttttttgctggtctttctgataaacttatagatgcactcgagtctataagcacaagcatcccgtctttactacccacaatacaggagcgtttattggattgtatatctcaagcactaccaaagtcatcaataaggccaggtgcttctgttggtcgagcaagcaggtcaaacaatttgcaacagtttgtggactctaatagtcctgttcttgtgcaacttgcactgtggactctagcaaacttcaactttaagggccatgaacttctggaattcgctagagagagtgtcatactttatttggaagatgaagatagcagtaccagaaaagctgcctctttgtgctgttgcaaattagttgcacactccctttctgcttcttcagcttcacagttcggttcaaataggacaaatcgtattggaggagctaagcgccgccggcttgtagaggagatagtggagaaacttcttatggctgcagttgctgatgctgatgttggtgttagaagttcagtcttcaaggctttgtatcgaaatccagcttttgatgatttcttggcccaagctgacatcttgacttcaatttttgttgccttaaatgatgaggaatatgatgtcagagaattggcaatttctgttgctggtcgattgtctgaaaagaatcctgcatatgtactgcctgcccttcgtcgctatcttatacaattgctcacatatcttgaccagagtatggatagcaagtgtagagaggaaagtgctagattattgggttgtttaattaggagctgcgcgcggctcattcttccttacattgctccagttcacaaggcactagtgactagattgtgtgaaggaacgggaccaaatgctaataatgctcttgctgcgggagtgcttgccactgttggagaactggccaaagtgggtggctttgctatgaggcaatatcttcctgagctgatgcctgtagttgtggattctcttttagatggaggtgctgttagtaaaagggaagtggcagtgtcaactctgggacagattatccagagcacaggctatgttattgccccctataatgagtaccccccattgcttggcttactcttgaagttgcttaatggtgaattggaatggtcaactagactagaagtgctgaaggttttagggattatgggtgcattggaccctcacgcacacaagcgtaatcagcacaatctacctggtcagcatagagaggtcctacggccaacatcgaaaccgcacaacatattgtttccatggaagaacctaccgactgactactggccttcttttcagcatccgaggactactattcaacagttgcaattagctccctcatgcgaattcttcgagatccttctctttcaagttatcaccaaatggtggttggctcccttatctttatttttaagtcaatgggccttggctgtgttcccatacttaccaaaggttcttcctgatctattccgtgctgttcgcatgtgcgaggatggtgctttaaaagagttcataacctggaaacttggaacattgatatctattgtccggcagcacatccgaaaatatttacaagacatactttccctcatctctgagctgtggacttcctcattcagcttggctgcaccaaatcggaccatacagggcccacagggttcaccggttcttcaccttgtcgagcaactatgcttagctttaaatgatgagttcagaatgtatttacttcacattctaccgagttgtatccaagtcttaggtgacgctgaacgttgcaatgattattactatgttcctgacatattacacacacttgaagtttttggcggaaatttggatgagcacatgcacttggttgctccggtgcttgttcgtttatttaaagtggagctggttgatatcaggcggcgtgcaattgttactttgactaatcttatacctaaggttcaggttggtactcatgtttcggctttagtgcatcatctgaagcttgtcttggatggcaacaacgatgatctgcggaaagatgctgcagaagcgctctgctgcctcgcccttggagaagactttactatcttcataccatcaatacgcaaaattcttgtgaagcaccacttgcggtacagaaaatgggatgagattgaaaatcggctactgaggcgagagctactcatcactgaaaacttgtctgtgcaaaagtacacacaatgtccacctgatgtcattagtgacccccttgatgattgtgatggtacaccttctgagatagctgatgaaacacagcgacaagcaagaagtcatcaagtcaatgatgtccggttgcggagtgccggtgaggcttctcaaaggagtactagggaagactgggctgaatggatgaggcatttcagtattgcgcttctcaaagagtcaccatctccagctttacgcacctgtgcaaggctagctcagcttcagccttctgttggccgcgagttgtttgctgcaggttttgcaagttgctgggcccaaatgagtgaatcctcccaggaacagctagtgagaagtctcaagacagccttctcatctcagaacattcctcctgaaattcttgccacgctgctgaacttagcagaatttatggaacatgatgagaagccgcttcctattgatacaagactgcttggtgcacttgctgagaagtgtcgagcatttgcaaaggcactccattataaagaaatggaatttgaagctgtgtgcaccaagaagatgggtgcaaatcctgttacagtggttgaatcccttattcatattaacaatcaactacagcagcatgaggcagctattggcatattgacttactcacagcaaaattcggaagttcaattgaaagaatcatggtatgaaaagttgcaccgttgggatgaggctcttaaagcatacaccgtgaaatcatctcaaacatctggtcctttacaaaacttggatgctacattaggtcgaatgaggtgtctagcagctttggctcggtgggaagatttaagtgcattgtgtagagagcaatggacgggtgcagaaccatctgctcgactggaaatggctccaatggctgcaaatgctgcttggcatatgggtgagtgggaccatatggcagactatgtttctcgcctggatgatgcagatgaaaataagctccgtatgttgggtaacgcaacagctagtggtgacggaagcagtaatggtgctttcttccgggcagttcttttagttcgttacaaaaagtatgatgacgctcggatgtatgttgagcgagctcggcggtgtttagctacagaacttgcagcactggtacttgagagttatgagcgagcgtataataacatggtgcgtgttcaacaactttcagaactggaagaggtgattgattactgcactcttcccatggaaagcccgattgctgacggacggagggaacttattcgcaatatgtggaatgaacggattaaaggaacaaaacggaatgtcgaggtgtggcaagccctacttgctgtcagggagttggttcttccccctaacgaagacagagacacctggataaagttcgctgaactttgctggaagaacggtcgtattagtcaggctagatctacgttagtcaaacttttacagtttgatcctgaatcttcccctgaattgacactgtatcatgcacatccacaagtagctctggcttatctaaaataccagtatgcagttggtgatgagcttaaaaggagggatgcattttctaaactgcaagagttgtctgtgcaggttgctaccaccatgggcaatttacctggaacatcagcaaaccatggcaccatgtcaaatgctggagtaccactcattgctcgtgtctacttgacacttggtagctggaagaaggcactatcacctgcattagatgacgattccattcaagaaattttgatttcttaccataatgccacgctaagtgcaaaggactgggggaaggcctggcacatatgggctttgttcaacacagaagtcatgtcacgctatactttccgaggccgaccagatattgctggaaaatatgttgttgcagcagtaactgggtatttctattctattgcttgtgcatctactacgaaaggggtcgatgatagcttgcaggatatccttcgtctgttaactctttggttcaaccatggggatacctcagaagttcaaacagcgttgcagaaaggtttttcccttgtcaagattgagatgtggctggttgtgctgccccagataattgctaggattcattcgaacaatagagtagttagagaactgatacaatctttgctagttcgaattggaaaggggcatccacaggctttgatgtatcctctcttggttgcctgcaaatcaataagtatattgagacaacgtgcagcgcaggaggtcgttgataagatccgccagcacagtggaggtcttgttgaccaggcacaacttgtgtcgaaggaactgatacgggtagcaattttgtggcatgaaatgtggcatgaggcactcgaggaagctagcaggatgtattttggtgagcacaatatcgaaggaatgcttgctgtacttgagccattgcatgcaatgcttgagaggggggatgagacaattaaagaaaatgccttcattcaggcttatgggcatgaattactggaagctcatgaatgctgtttgaaatatcgggctacaggagaggatgctgagctaactaaggcctgggatttgtattaccatgttttcagaagaatcgacaaacagcttccaagtcttacgaccctcgatctgcactctgtttcgcctgagctactcaaatgtcgaaagttggaacttgctgtgccaggaacttatgctgcagattcaccacttgtgacgattgagtattttgttccccaattgattgttataacgtccaaacaaagaccaagaaagctgacaattcatggaagtgatggcaatgattatgcattcttgcttaaaggccacgaagatttgcggcaagatgaacgagtaatgcagctttttggtttggtgaatactctcctagagaactcaaggaaaacatcagagaaggatttatcaatccaaagatatgctgttatacctttgtcacctaacagtggtttaattggatgggttccaaactgtgacacacttcatgctctgatccgtgaatacagagatgccaggaagattttcttgaatcaggagcacagacttatgttggcttttgcacccgattatgatcacttacccctcattgcaaaggtggaagtgtttcagcatgctttgcaaaatactgagggaaatgaccttgcgaaggttctgtggctgaagagtcgaacttcggaagtatggcttgagcgccgcacaaactacgctagaagcctggctgttatgagcatggttgggtatttgcttggtttaggagatcggcatccaagcaaccttatgttagatcgctatagtggaaaaatattacacatcgacttcggagattgctttgaggcttcaatgaatcgagaaaagttccctgaaaaagtaccattccgtttgactcgaatgcttgtgaaagctatggaagttagcggtattgagggtacattccgaacaacttgtgaaaatgtgatgcaagtccttcgcacaaacagagacagcgttatggccatgatggaggcatttgtacatgacccgttaatcaattggcgtctgttcaatttcaatgaggttcctcaagtgtcgaactatggtaatgttcatgctcacacggttgtcagtagtgaagaagcagtggctaaccgagagctcatgcaacctcagcgaggagcacgtgagagggaactgctacaggctgtcaatcaactcggtgatgccaatgaggttttgaatgagcgtgctgtagctgtgatggcacggatgagtgacaaactaacagggcgtgacttctcttctgggtcagctttggctggagcaggtagctctatccaacatggcagtgagcatttggcttcaggagatgcccgggatgcccaacctggtctctcagtgaaggttcaggttcagaagctcatactccaagcgacttcacacgaaaatttgtgccaaaactatgtcgggtggtgtccgttctggtga

SEQ ID NO: 7 - DNA, 1302 bp, Zea mays
atgatgcaccagcaccaccctcaccaccttccgcgcttccactcgccgttgtcctcctcatctgaggcggtggacatggatccccgcgtgtggggccggctgccgcagccgctggtggatcgcgtgctggcgtgcctaccgacgccgtccttcctccgcctccgggccacctgccgccgcttctgcagcctcatctactcgtcgccgttcctccattcccacctcctcctctccccgcacctccccttcttcgccttcgcggtcccttctgcggggtacctcctcctgctcgaccccaccaggcaggcgccttcctggtcccgcctcccgctgccgctgcccgctcccggcgctggccaagggttctccccggcggccgcgtcggcgggcctgctggcgttcctgtcggacgcgtccggccacaagacgctgctcctcgccaaccccatcacgcgcctcctcgcgccgctgccgctctgccccacagcgcgcctctctcccactgtcggcctcgccgcgggacccacctctttcatcgccgtcattgccggcgatgaccttgtgtcccccttcgcggtcaagaacatctccgcggacacattcgtcgccgatgccgcctccgtcccgccctccggtttctgggccccaagttccatcctgccccgcctctcctccctcgacccccgcgccggcatggctttcgcgtccggaaggttctactgcatgagctcgtcgccgttcgcggtgcttgtgttcgacgtggcggccaacgtctggagcaaggtgcagccgccgatgaggaggttcctgcggtcgccggcgctcgtggagttcggcggcgggagggagcgcgaggcgagggtggcgctggtctccgccgtcgagaagagccgcctcagcgtgccacggagcgtgcgcatgtggacgctgcgcggcggagggcacggagtcgccggcggaagcagcggcagcggggcgtggaccgaagtggcgcggatgccagctgacgtgcacgcgcattttgcggcggccgagggcgggcgcgggttcgagtgcgcagcgcacggcgacttcgtggtgctggcgccacgcgggcccgcgagccccgtgctcgtgttcgactcgcgccgcgacgagtggcgctgggcgccgccgtgcccgtataatccgtacgtcggggggatcgccgcgggaggcccggggttcagggtgttcgcttacgaaccccgcctggctacgccggccatcggtctcctggatgccacggcgccggcggcgtttttgcatgggatgcagggctag

SEQ ID NO: 8 - DNA, 768 bp, Glycine max
atgtacggacagagtagtagtagcagtagttcttacgaatcggatttggcgctgttggattcgattcggcaccacttgctgggcgagtccgaatccatattcggcgccccgaatttcgggtcgggtcggagctccagtttcagcagcttggactcgtgtttgagcgacaattggggcgagcttccgtttaaggaggacgatacagaagacatggtgttgtacggcgttctccgtgacgccgttaacgtcgggtgggtcccatctctcgatgccgggtcgcccgagagcgtgtcgtcgggttttccggcggtgaagctggagccggacttgatgccggcgctgataagtccgtgtccgcctccggcggctgcggcggaggagaagaaggttgttccggcgaaggggaagcactaccgcggcgtgcggcagcggccgtgggggaagttcgcggcggagatccgcgacccggcgaagaacggagcaagggtttggctggggacgtttgagacggcggaggacgcggcgttggcgtacgaccgcgccgcctaccggatgagggggtcgagggcgttgctgaattttccgttgagggttaactccggcgagcccgatccggtgagggtgaagtcgaagcggtcgtcgtcgccagagagtgcggcggcgctgccggcgaagagaaagaaagttgtggtggtggggacggtgcaagagcaagtggggagtcaagtggcagagtgtacacgtggcgagcagttattggttagctga

SEQ ID NO: 9 - DNA, 2715 bp, Saccharomyces cerevisiae
atgataaatttagaggattactgggaagatgaaacgcctgggcctgatagggaaccgactaatgaactaagaaacgaggtggaggaaaccatcactctgatggaactgctgaaagtgtccgaattgaaggatatttgcaggtctgtatctttcccggtttccggtcgcaaggccgttctacaggaccttatcaggaatttcttgcagaacgctttagtagtaggcaagtctgatccttatagagttcaagccgttaaatttctgatagaacggatcagaaagaatgaacctttgcctgtttataaagatctttggaacgctttaagaaagggtaccccattgagtgctatcacagtacgttctatggaggggcctcccacggtgcagcagcaatcaccttccgttattaggcagtctcccactcaacggcggaaaacgtctaccacatcttccacatctcgtgcaccaccacctacaaatccagatgcctcttcttcttcatcatcttttgctgtaccgacaattcattttaaagagtctccattttacaaaatacaaaggctaatccctgaattagtgatgaacgtggaagtcacaggcggaagaggtatgtgctctgcgaaatttaaattgtccaaagcagactataatctattaagtaacccgaatagcaaacacaggctatacttattttctgggatgattaatccattaggatcccgaggtaatgaacccatccaatttccattcccaaatgaattaaggtgcaataatgttcaaatcaaagataatataagaggtttcaagagtaagccgggcacagctaagccggcggatttaacgcctcatctcaaaccttatactcaacaaaacaatgtggagctgatatatgccttcaccacgaaggaatacaagctatttgggtacattgtagaaatgatcactccggagcaactcctggaaaaagtattacagcatccaaaaattattaaacaagccacgttactttacttgaaaaaaacacttcgggaggatgaagaaatgggcttgactaccacatctactatcatgagtctgcaatgtccaatttcgtacacaagaatgaaatacccttcaaaatcaataaattgtaagcatctgcaatgttttgatgcattatggttcctacactcccaactacaaattcctacgtggcaatgcccagtatgtcaaattgatatagctttggaaaatttagcaatttccgaatttgttgatgacattttacagaactgtcaaaaaaacgttgaacaggtagaacttacttctgatggtaagtggacagccatattggaagacgatgatgacagcgacagtgacagcaatgatggtagtagaagcccagaaaaaggtacttcagtatcggatcatcattgttcttcttcacatccaagtgaaccgattatcataaatctcgatagtgatgatgacgaaccaaatggaaataatcctcatgttactaataatcatgatgatagcaacaggcatagtaatgataacaataataatagtatcaaaaataatgatagtcataataaaaataataataataataataataacaataataataataatgataataataatagtatcgaaaataatgatagtaatagtaataataaacatgatcatggtagtcgcagtaatactcccagtcataatcatactaaaaatttaatgaacgataatgatgacgatgatgatgatcgacttatggcggaaataactagcaatcaccttaaaagtactaatacagatattctaactgaaaaaggttcaagtgcaccctcgagaaccctggatccaaaaagttataacatagttgcttcagaaactactactccggtgacaaacagggttattcctgagtacctcggaaacagttccagttatattggtaaacaattgccgaacattctgggaaaaacgcctttaaatgtgactgctgttgataattcatcccacttaatctctccagatgttagcgtatcatccccaacgccaagaaacaccgcttcaaatgcaagttcgagcgctctcagtacccctcccttaataagaatgagttcattagatcccaggggatccactgttcccgataaaacaataaggcctcccataaattccaacagttatactgcatcgatatcagattcatttgtccagcctcaagaatcttcagtttttccaccacgtgaacagaatatggatatgtcctttccttccaccgtgaactcaagatttaatgatccacgtttgaataccacaagattccctgattcaacattgcgtggggcaactattttgtcgaataatgggcttgatcaaaggaataactctctaccaacaacagaagcaatcacgaggaatgacgtcgggcgacaaaattctacgcctgtacttcccacgttgccccagaacgtcccaattcgtacaaactctaacaagtctgggcttcctttgataaacaatgaaaacagtgtccccaatcctcccaacactgcaaccataccgttgcagaagtccagactcattgtaaatccattcattccaaggaggccttactctaatgtactgccccaaaaaagacaactttctaatacatcctcaacttcacccataatgggtacatggaaaacgcaagattatggaaagaaatacaacagtggttaa

SEQ ID NO: 10 - DNA, 693 bp, Oryza sativa
atgaaggagagggagaaggtggtgcgactggccaagctcgccgagcaggcggagagatacgacgatatggtggaatttatgaagacacttgctaggatggatgtggatatgagtgctgaagagaggcttttattttcagttggttttaagaaaactattggtgccaggagagcatcatggagaatccttgaatcacttgagcagaaggtgacagctggtgaccaaccaggtgtaacaataaatggctacaaaaagaaagtagaggatgaactaagggcagtttgcaatgaagtattatcaattattgctattcattgccttccattggccaattcgggtgaaaatgtcgtgttcttttataagatgaagggtgactactaccgttacttggctgaatttagcactggaactgaaaagaaggctgctactgatcagtcccttatggcctatcaggcttggccttgcgctcaacttttcagtcttcttgagataatgaactctcctgagagagctagccaagtggcaaaacaagcacttgatgaggctactgctgagattaactctgctggtgtggagggttacaaggacagcatgcttatgatgcagctcctgaaggagaacctggcattgtggacatcagaactaactggaggtgaaacatctaaggacgatgatgttgttatggagggctaa

SEQ ID NO: 11 - DNA, 4656 bp, Leptolyngbya boryana
atgaaccgcattaaccctcccatgagccaggcttccgtgcctagccctaacgagtcccagtccatctctaacggctacgccggtcagcgctggctagtggaggagcgtgacgcctgcggcgtgggcttcatcgtggaccagcaaggtcgcgcctcccacgacctcatgagcaaggccctcatcgccctctcctgcatggagcaccgcggcggttgctccgccgaccaggactccggcgacggcgctggcgtgatggccgagattccctgggagatcctcaaccagtgggcctccgatcgcggcgtgaccctcaagcctggctacaccggcgtgggcatggtgttcctccctcaggactccgccatcgccgctgagaccaagcaagtggccgagaagatcattgccgaggaaggcttgaccctcctgggctggcgctccgtgcccgtgcagcccgaggtgctcggcgtgcaagcccgcgacaaccagcccttgatcgagcagctcatcgtgcagtccgaggtggccgacgaggaactcgaacgcaagctctacgtggcccgcaagcgcatccaccgcaccctcgccgtgcgccctgaggccggtttcgacgagctgtacgtctgctccttctccacccgcaccatcgtgtacaagggcatggtgcgctccgagatcctcggcaagttctacctcgacctccagaaccctgagtacaagaccactttcgccctctaccaccgccgcttctccaccaacaccatgcccaagtggcagctcgcccagcccatgaggctcctgggccacaacggcgagatcaacacccagctcggcaacgtgaactggatgagggcccgcgaggccgacctcgcccacgaggtgtggggcgaccgcatcgacctcctgaaacccaccgtgaactccaacaatagcgactccgccaacctcgacaacgtgatggagctgctcgtgcgctccggccgctctcccgtggaggccctcatgatgatggtgcccgaggcttacaagaaccagcccgagctggccgaccaccctgagatcaccaacttctacgagtacaactccggcgtgcaagaggcttgggacggccctgccctcctggccttctgcgacggcaagatcgtgggcgctaccctcgaccgcaacggcctccgccctgcccgctactccatcaccagggacggctacttcgtggtcggctccgaggccggtgtggtcgatctccctgagtccgagatcattgagaagggccgtctcggccctggccagatgatcgccttcgacctccagtccagggaggtgctcaagaactgggagatcaagcagaggatcgccaacgcccacccttacggcgagtggctcaagcagaacaggaagaccctcaagtcccacgccttcctcgaatccaccgccctcgacgccaagtccctcctgacccaccagaccgccttcggctacaccctcgaagacctcgaaatggtgattcaggacatggccgctcagggcaaggagcccaccttctgcatgggcgacgacatccctctcgccgtgctctccgagaggcctcacctcctgtacgattacttcaagcagaggttcgcccaagtgaccaaccctcccatcgaccctctcagggagaagctcgtgatgtccctcaccatgcagctcggcgagcgtggcaacctcctgaagatcaacagcgacggcgctaacctcttcctcctggacagccctgtgctcaccgagcccgagctggaccagatcagggagagcggcctcgccaccgccaacctcagcaccctcttcgaggtggccgctggccctgagggcctcaaagccgctgtggccaggctctgcgagcaagccaccgaggccgtgaggagcggcagcaagatcctggtgctgagcgacaggctggaccagagcggcaaccctacccagcttaacgccgactacagctacatcccgcccatgctggccgtcggcgctgtccaccatcacctgatccagaagggcctgaggatgagggccagcctggtcgttgataccgcccaggcttggagcactcaccacttcgcctgcctgatcggctacggcgcttctgccgtctgcccgtacctggccctggagagcgtcaggcagtggtggagcgacagcaagactcaggctctgatggagcgtggcaagatcaagagcgcttctatcgctgcggtccaggctaacttcaggaaggctatcgaggacggcctgcttaagatcctgagcaagatgggcatcagcctgcttagctcttaccagggcgctcaaatcttcgaggctatcggcatcggcggtgacctgcttaacactggcttctttggcactgctagtaggctgggcggtctgactctggctgagctggctcaggagatcctgtctttccatagtaaggctttcccggagctgactactaagaaactggagaacttcggcttcgtccagtacaggcccggcggtgagtaccacatgaactctcccgagatggctaagcacctgcaccaggctgtcaggactaagaacccggaccactacgacctgtaccagaagcacctggctggccgtcccttgactgctctgcgtgacctgcttgacttcaagtctgaccgtgctgcgatctctatcgacgaggttgagcccgctatcgacatcgttaagcgtttctgcactggtgggatgagtctgggtgctctgtctcgtgaggctcacgaggtcttggctatcgctatgaaccgtatcggtgggaagtctaactctggtgagggtggtgaggatcccgttcgttacaagatcctgaacgaggtcgagaacgggacttctcccttgctgccgcacctgaaaggtctgcaaactggtgatactgctaacagtgctatcaagcaagtcgctagtggtagattcggtgtcactccggagtacctgatgagtgctaagcagatcgagatcaagatggctcagggtgctaagccgggtgagggtgggcagcttccgggtccgaaggtctctccgtacatcgcgctgcttcggagatcgaagccgggtgtcactctgatctctccgccaccgcaccatgacatctattctattgaggatcttgcacagcttatcttcgatcttcaccagattaacccgcttgcacaagtctctgtcaagttggtcgcggaggtcggtattggtactattgcggcgggtgtcgcaaaggcgaacgcggacattattcagataagtggtcacgatggtgggactggtgcgtctccgctttcgtcgattaagcacgcgggtagtccgtgggagcttggtcttacggaggtccatagagtccttatggagaaccagcttcgggatagagtcattcttcgggtcgatggtgggattaagacgggatgggatgtcgttatgggagcgcttatgggagcggaggaatacgggttcgggtcaattgcgatgattgcggagggctgcattatggcgcggatttgccatacgaactcgtgcccggtcggagtcgcgtcgcagaaggaggaacttcggaagcggttcccagggacgccggagcatgtcgttaatttcttcttgtttattgcggaggaagtccggtcgcttcttgcgcggttgggatacaagtcgcttgatgagattattgggcgggcggatcttcttaagccacgggaggcggtcaatttgacgaagacgcagcttcttaacttggattgccttacgcagcttccagatacgcggtcggatagaacgtggcttaatcatgagacggtccatagtaatggagcggtccttgatgaccagcttctttcggacccagatttgcaagcggcaattcagaatcagggagatgtcacgaagtcggtcgaggtcgttaatacggatagaacggtcgggacaagaataagcggagcgatagcgaagcagtatgggaatagcgggtttagcgggcaagttacattgaatttcacaggagcggttgggcagtcattcggagcgtttaatttgccatgcatgacattgaatttggttggagaggcgaatgattatgttgggaagggaatgcacggaggagagatagcgataaagccatcaccagaagcgacatacgatccatcacagaatgttatcatagggaatacctgtttgtacggagcaacaggaggaagactatttgcaaatgggcaagccggagaaagatttgcagttcgaaattcactagcagaagcagttgtagaaggagttggagatcattgttgtgagtacatgacaggaggagttgtagttgtactagggcgagccgggcgaaatgttggagccgggatgacaggcgggttagcatacttcttagatgaagatgggtcattccaggagaaggttaatccagaaatagttaaagttcagcgagttgtagcaccagccggcgaacaacaactaaaggaactattagaagcccatgttgaacatacagggtcaccaaaggcaaaggcagttctagcaaattggtcagaatacctaccaaagttctggcaagttgtaccaccatcagagaaagatacaccagaagcaaatccagatgttgagaaagttgcagtatcagcatga

SEQ ID NO: 12 - DNA, 783 bp, Glycine max
atgaccgccacctcgcggccacagcatcccaacgggagcctagccccggcctccgacggcggcgagtccttcgccaagttcttcgagtgctggatcttggagcagtcccgtgacctggccgcgctccgcgccgcggccacggcgcggcccgacgacgctgacctccggcgcctcgtcgatcgtgtcctcggccactacgagcactactaccgcgccaagtccgcggccgcctccgccgatgtgctccccatgttcgcgccctcgtggatctccgccaccgagagcctctacctctggtgcggcggctggcgccccacttccgcgatccagctgctctactccaagtccggcctgcagctcgaggcccagctcccggccttcctcgacggcggcagcctcggggacggtgacctgggcggcctctccgcggagcagctccaggccgccgaccagctgcagcgccgcaccatccggagggaacgggagatcgaggaggccgccgccggcgcgcaggagtcgttggcgacgacgaagatggtggagctcgccggaaagggagggatggacgcggcggaggggatggagctggagatggatgccaaggcggaggcgatgaagcgcgtgctggagatggcggacgggctgaggctggagacgctgcgcggcgtggtggggctgctccggcctgcccaggccgtgcacttcctcgtggccgccgcggagctccacctcgccgtgcacaagttcggccggcgcaaggacggcgccgcggcggcggagtga

SEQ ID NO: 13 - DNA, 2682 bp, Saccharomyces cerevisiae
atgactacggataacgctaaggcgcaactgacctcgtcttcagggggtaacattattgtggtgtccaacaggcttcccgtgacaatcactaaaaacagcagtacgggacagtacgagtacgcaatgtcgtccggagggctggtcacggcgttggaagggttgaagaagacgtacactttcaagtggttcggatggcctgggctagagattcctgacgatgagaaggatcaggtgaggaaggacttgctggaaaagtttaatgccgtacccatcttcctgagcgatgaaatcgcagacttacactacaacgggttcagtaattctattctatggccgttattccattaccatcctggtgagatcaatttcgacgagaatgcgtggttggcatacaacgaggcaaaccagacgttcaccaacgagattgctaagactatgaaccataacgatttaatctgggtgcatgattaccatttgatgttggttccggaaatgttgagagtcaagattcacgagaagcaactgcaaaacgttaaggtcgggtggttcctgcacacaccattcccttcgagtgaaatttacagaatcttacctgtcagacaagagattttgaagggtgttttgagttgtgatttagtcgggttccacacatacgattatgcaagacatttcttgtcttccgtgcaaagagtgcttaacgtgaacacattgcctaatggggtggaataccagggcagattcgttaacgtaggggccttccctatcggtatcgacgtggacaagttcaccgatgggttgaaaaaggaatccgtacaaaagagaatccaacaattgaaggaaactttcaagggctgcaagatcatagttggtgtcgacaggctggattacatcaaaggtgtgcctcagaagttgcacgccatggaagtgtttctgaacgagcatccagaatggaggggcaaggttgttctggtacaggttgcagtgccaagtcgtggagatgtggaagagtaccaatatttaagatctgtggtcaatgagttggtcggtagaatcaacggtcagttcggtactgtggaattcgtccccatccatttcatgcacaagtctataccatttgaagagctgatttcgttatatgctgtgagcgatgtttgtttggtctcgtccacccgtgatggtatgaacttggtttcctacgaatatattgcttgccaagaagaaaagaaaggttccttaatcctgagtgagttcacaggtgccgcacaatccttgaatggtgctattattgtaaatccttggaacaccgatgatctttctgatgccatcaacgaggccttgactttgcccgatgtaaagaaagaagttaactgggaaaaactttacaaatacatctctaaatacacttctgccttctggggtgaaaatttcgtccatgaattatacagtacatcatcaagctcaacaagctcctctgccaccggatccgtggctaaatctattaacatggctttgaaattggacaaggaagaaaagtccaatttagaatcaaaattatggaaagaagttcctacaattcaagattggactaataagtttttgagttcattaaaggaacaggcgtcatctaatgatgatatggaaaggaaaatgactccagcacttaatagacctgttcttttagaaaattacaagcaggctaagcgtagattgttcctttttgattacgatggtactttgaccccaattgtcaaagacccagctgcagctattccatcggcaagactttatacaattctacaaaaattatgtgctgatcctcataatcaaatctggattatttctggtcgtgaccagaagtttttgaacaagtggttaggcggtaaacttcctcaactgggtctaagtgcggagcatggatgtttcatgaaagatgtttcttgccaagattgggtcaatttgaccgaaaaagttgatatgtcttggcaagtacgcgtcaatgaagtgatggaagaatttaccacaaggaccccaggttcattcatcgaaagaaagaaagtcgctctaacttggcattatagacgtaccgttccagaattgggtgaattccacgccaaagaactgaaagaaaaattgttatcatttactgatgactttgatttagaggtcatggatggtaaagcaaacattgaagttcgtccaagattcgtcaacaaaggtgaaatagtcaagagactagtctggcatcaacatggcaaaccacaggacatgttgaagggaatcagtgaaaaactacctaaggatgaaatgcctgattttgtattatgtttgggtgatgacttcactgacgaagacatgtttagacagttgaataccattgaaacttgttggaaagaaaaatatcctgaccaaaaaaatcaatggggcaactacggattctatcctgtcactgtgggatctgcatccaagaaaactgtcgcaaaggctcatttaaccgatcctcagcaagtcctggagactttaggtttacttgttggtgatgtctctctcttccaaagtgctggtacggtcgacctggattccagaggtcatgtcaagaatagtgagagcagtttgaaatcaaagctagcatctaaagcttatgttatgaaaagatcggcttcttacaccggcgcaaaggtttga

SEQ ID NO: 14 - DNA, 1185 bp, Zea mays
atgggcactcaaatagtaagggaacaaacgagtggtagcctcactgccattgttgtggacgaaaatctatgccatgccagggctgcaagctgcatgcttgccaacctccagtgtaaagtgattgtgtatgcgagtcctgttgatgcgctcaagtttcttaaggatcaccaaagagatactgattttgcgttagtggaagtcaacatgaaagagatgcatggttttcagttccttgacatgtccaggaagttgcacaaaagccttcaagtgatcatgatgtcagctgatacgacatggcccacgatgaagagaagtgtcgagcttggtgcacgtttcttgattaaaaagcctcttgatgcaaatacgatgaataacctgtggcagcatcttgacctaaaatttcaacggaccgacaagatcaaggccttattcccaggttggagctactggaaaacggggaatgcatttgaggaagggaccaagcagaggggaactcacttgatgtggactccattcctgcagaggaagtttttgcaagctgttgaactacttggggaagacgcatctccgaagaagatacagttgctcatgaatgtgaactccgttagtcgcaaacagatctctgctcatcttcagaaacaccgaaagaaggtcgagaaagaactacgtaattcaaatgcaaacaactccagccatggcattggcggcgcctcgaattcacggccttcgaggatttttgaaataagccatggcagcacattccagtacaatcgtcccgacgtccaaccagaacatagatctgatgaatccgtatccgtggagcagacagaaaccatcgaggaaacacaaagcaacaggttgtatgaagcaatgcgaagagccttgcaacttgggagtgttttcgaggaaccacagttgcccaatattgatcctcctgctggtaaagatgcaagagaagttgaagaagtcgaaatgacgatgagggatggtaattatcgagatgctggcacagatgcatttggtgataagaatgaggcatctggaactcacagttcagatgataataacgcgaaggtgaagagcaaggatgattctgctgacaagctggtttcttgtcacgatgagctgcgaccagttgtgacgcttgtgacctattcagactcggaagatggtgaaacgctctag

SEQ ID NO: 15 - DNA, 216 bp, Zea mays
atgaatggtttcatggtgtttcttggcggagctgaccttcgagtgcctgcttctaatggcctacagtacgcaaggagcctgatagaaagaggaggcgatgtcaaaatcatgatgttcccagaggacatacacgaaatcaatttaccgcggtccgatttcgaaagcttcctcaacattggggtatggttcaagaaacatctgaatgcagtggcatga

SEQ ID NO: 16 - DNA, 2046 bp, Zea mays
atggaagggacagtaatcagaatagctagtgagtcaaaacgaggcaatgagcaaacagactctttgacagaggtgcctagagctattgggactttagtaacacataatcgtgaagtagaaaacttaattgtacttgaagatgacacggaattaacaccttatgaaggaatggagtttgagtctgaagatgctgcaagggatttctacagcacatatgcaagaagtgcaggttttcggattcggatcagcaggtatactcgctcccgacgtgataattcagttatttctcgtcgaattgtgtgttcaaaagagggatttcatgaaacccgtgcttgtgatggcctccatcctgaacaaaaacaacaagaacgggcaggtactagagttggttgcaaggcaatgatattaattaaaaagtttagtcctggcaagtgggtggtaaccaaattcataaagaaccataatcatggaccagttccaccaagaaaacttgattccagactagtagaccaggactgtgatccaatggagaagccacattctattgaggtggaccctgttgaggagccatttgagggcatggaatttgaatcggaagaagctgcaaaattgttctatgtaaactatgcaaggctaaatggttttcgtgcacgtattagtagatattgtcgttcaaggcgtgataattcaattatttctcgccagattgtgtgttctaaggaaggcttccgtgaagttcggaccaagaaagtgttgacagatgaaggaaaaacaaagcgcccaagaatgataactagagttggttgcaaagctatgattgtagtgaaaaagatgaactctggaaagtggatggtttcgaaatttgagaaggagcataatcattcgctgtcatattctaaaatggtccctagtacctcaaacattacttctggagaaattgtcgatttagctgcaaagggtgcacatcctagtgaagtaaaaaatgaaggatacagtgcaggaacccaatgtaatcctgcagattccctcactatactttataacaacttatgccaggaggccataaaatttgcaaaagaaggttcagtcacagaagaaatttaccatgtggcagtttctgccttaaaagaggctgcagaaaaggttgctgaagtcaaaaggagtcgtccaacattgtcacattgtggtttcgttagagaaagcaaacatgatgtcttacaggagaaaagtatgagtgctttgcaatgttcaaatcaggttgaactgacaagaacatctcctgggtccaggcctcttcaagattctgcatcaaatcttctgctgataccaaccgacattttgactgattcaaggttatatagcggtgtcgatactgctcctctaacaggaggtttccccacaaatgagagtgaaagtacacatgcatcagaaagttcttttatgcattttaagaacacaaagaaaacctcttcagaaaaatctcagcattttttggtatttcattttggaccagaagatgcttatttgttgctggaaccacagaacacttgttttaatcaactcatccatggaaaggagcaaggtatccatggatcttctaaagataccatggttgctattcctgcgatacctcttgcactgtgcatgcctgtgacgcagagcttacctggatcttctacaggtccatttggaggtgttctgtctgaactgaagaaccaaggaacagtccccaaatctatagttcatgctacagctcttgcttgtggtgctcgtgctgttcctcttgaagatgcagcttcgcttattagtgccattgaatccaaaatcagatctggaggggccataatagcgaaacttccttcaaacaacctagcacctctagttcctccagccattgctatgtcatcttctagtgaagatgacgaggagcatgaccacagtgagcccgcaatgatcgatgtcgatcgcaacgttaatcatcagagctccaacgcgatgaagcttcagagggagctatcggagttcgaaactgaagctggcaactga

SEQ ID NO: 17 - DNA, 645 bp, Zea mays
atggcgctccgcatgccctgtgacgacggtggctctcagcccccttacggaagaaagaggacggccctcttacagagggttggccgcgcggggaaggacggaacggcgctcgcgcaaggccgctcgctccctcccgcgtggacgcttgtaaccccctactgcaagcgcacccgacctgggcgcggggctaacacgaaggccgcgggttccacgctcccacgcctgtctccctccggctgcttctccccccttcgcgttccgcctcgcgccgacccatctgggctggggcacgcggtgacgatttactcgtcggtccagggaccccccggcgccaatggtcacctatggtgtcaaatccaacagctaggcgcaccggataggggcatcggactgtccggtgaccccaccggactatccgctagctcgtcgccccccatggctgactggggccccgtggtgatcgcgacggtgctgttcgtgctgctcacgccgggcctgctgttccagctgccggcgcacggccgcatcgtcggattcggcaccatgcacaccagcggcgtcgccatcctcgtccacgccgtcctctacttcgcgctcatcaccatcttcctcatcgccatcggcgtccacatctacgccggctag

SEQ ID NO: 18 - DNA, 981 bp, Zea mays
atggtaagacttcagctattgaggggagtcgtaagctggagcacagtagtgaattcagatattcatttatactgcacttttgttctgacattgcatgcttttaagcttgtgtcttggaacttcctggacacagcaaccttttttcagacctatgcacgtttccttgacaaagcggcagtcattttgtggaatgaatgtgatggtcctcgcaattcatggagactttgcacagtcacacaagttgaagagcttaaaatactactgaggatgtttccaatctgggcaacaggaattgtgttcttcaccgtatgtgctcaaaactcatcgatgttcatagaacaggggatgaccctcgataaccaaattggtccattcaagattccagcagcaactctgtcgtccctagatgttatcagtgttgtcgtttgggttccaatttatgagaggttagttgtgcccatagccaggagattcagtgggaaagagagaggtttctcagaacttcaacggatggggatcggtctatttgtgtctacagtcgcagtggcagttgcagcgctagtcgagatcaatcgtctacaggtggcagtggcagaggacctggttcatcagaaggtacctgttcctatgagcatcctttggcaagcgcctcagtatttgctggtcggtgtgggcgaggtgttcacatcaattggtcaagctgagtttttctacaatcagtcaccagatgccatgagaagcttatgctcagctttcgctctcgttaccgtgtcacttggaagttatctcagctcattcatcttaagcctggtgtcatatttcacaactcggaatgggcaattggggtggatccctgataacttgaacgaaggccatcttgaccgctttttctggctgatagccggtctcagctcactaaatttccttgtttttatatattacgctcaacaatacaagtgcaagatagcttctgttgcttaa

SEQ ID NO: 19 - DNA, 1746 bp, Zea mays
atggctacggtttggagcggctgcagcacgagctgcggctccttcggccaagaactgcccccgcgcggcaaacggggcggtggtgagggcacaagattccttccgcgaaggagaggccggatcagaggtgacgcccgccagacacaagctctaagcgccgccatggttacggtcggagcttgcgtttgtagagcggctccatgcttgcttgattcggtggtcgacgggacggaggacgtcagcgttgggtttgggggcatcgacggtgaaccgctcgccgatgggtatgatggtggcaagaggcgcggtccgcgtcggcgtccgacgaggccgaccgtttttcagaaggaggtgggcgcaagaactgctccaccggcgatggcgtcggagccggacagcaaatctgagcatggggtgtcgaggctgcacttcctggaggagagggacgaggagacgctgtcaagaaggttgataaagctcagccaaaacaacaaggtcagaagtgccactgagctgtttgattcaatgcgcgcatctgggctgcaaccgagcgcacatgcctgcaactccctgttggcttgctatgtgcgtagaagtccactggcggatgcaatgaggatgtttgagttcatgaaggcgaaaggaatggcgacagggcacacgtataccatgatactcaaggctgttgcgagcaatcagggttatgtttctgcactggaaatgttcgataagattgaggaggaggagggttcaaagaaaatcattgacgtaattgtttataatacgatgatatctgtttgtggaagagcgaaagaatggatgcttgtggagagactatggagaaggctagagcaacattctttgaatggaactttactgacatacgatttgttagtcagcatattcgtgcaatgtgggcagtctgagttagcaattgctgcatatcaggaaatgctccagaagggacttgatccgagcgaggatataatgaaggctatcattgcatcctgcactaaagaagggaaatgggagtttgcaatgtcaacatttagtagaatgctgagggctggcatgaaacccagtttaattttgttcaactcaatcatcaactcactggggaaggctggtcaagatgaactcgcctttaggatgtaccatctgctggaaaaatcaggccttaagcctgatcaatatacatggagcgcactgttgttggcattatacaggtccgggcgatgctgggattgcctaaagcttttccatggaatcaaaggcaagcatccgacactcttaaatgatcatctctacaacactgctttgatgtcctgcgaaaagcttggtcaatgggaacatggtttgcagctgctgtggttgatggaaaaaagaggactgaaattatcagtggtatcttacaatcatgtgataggtgcttgtgaggttgctagcaagccaaaagttgctcttaaagtgtaccagcgcatgattaatcagaggtgttcgccagacacattcacacatttgtctgttatacgagcttgcatctggggatctctttggactgaagtagaggatatattggaggaggtggctccagactcttcgatctacaacgcggtcatccacgggctgtgtttgcgaggcaagaccgggctagccaacaaggtgtacgccaagatgcggagcatggggctggtaccggacggcaagacgagagcgttcatgctgcagcacattgctacggactag

SEQ ID NO: 20 - DNA, 482 bp, Zea mays
atggtgaacgacatccataacagagacgggattgtcctcggaacctcaagagatactaaccagatttatatatcgaaggcgatggcattcagaaaggtgattgacaagtcatttggatttcacgctgctgtggaggaggcccaaagggccctcaatgccgctcatgtcgaggctgaaagtgtagacaatggcattggtgttgtgaagctaatgggtcacaactgttgttttactgcagtgtgcttctctagctagccgttatgtggattgttgtttaatcccagagtcacccttctacctcgaagggaagagacgactcctcgagttcatttagagacgacgtgaggacaagggtcatgtggttcatcgtgctggctgagggtgctgatcaggacctcatcgtgagaagtatgaatttcatggacacctaagatgcttctggagataaactgcttctagatggctgcctttggctattctag

SEQ ID NO: 21 - DNA, 602 bp, Zea mays
gcacgaggattccttcccgtcccatccccgagcagaaaccaaccccaccaccaccgcgccctcctcctccgcccggtcgccggcgccatgaccggcgcggcggcccccgcggcgcccgcggggaacagagcgggatgcgagccggtgcggaaggcggggcccatgaccatggagcgctgctagcgctccatgagacggaggctgagcgggaagcgcggatccgagacatgtttgccttcttcgacaccgcggggagtgggcagctcgactacgcgcagatcgaggctggcctcgccgctctgcaggtgcccgccgagtgcaagtacgcgagggagctgctccgcgcctgcgaccgcgatcacgacggccgcgtcggctatgatgacttcaggcgctacatggatgacaaagagctcgagctctaccgcatcttccaggccatagacgtcgagcacaacggatgcatgctccccgaggagctatgggacgcgctcatcaaggctggtatgtgtttcccatgccgaaccacgcttctcgcctccctgatccccagtatctgtgcagccgcgccggtgattctggccacctctgtgctgtgctga

SEQ ID NO: 22 - DNA, 540 bp, Zea mays
atgcagcgattcatggtgaacgacatccataacagagacgggtttgtcctcggaacctcaagaggagggcatgacactgcgaaaatcattgattgtcttcaggaccgtgatactaaccagatttatattatcgaaggcgatggcattcagaaaggtgattgacaagtcatttggatttcacgctgctgtggaggaggcccaaagggccctcaatgccgctcatgtcgaggctgaaagtgtagacaatggcattggtgttgtgaagctaatgggtcacaactgttgttttactgcagtgtgcttctctagctagccgttatgtggattgttgtttaatcccagagtcacccttctacctcgaagggaagagacgactcctcgagttcatttagagacgacgtgaggacaagggtcatgtggttcatcgtgctggctgagggtgctgatcaggacctcatcgtgagaagtatgaatttcatggacacctaagatgcttctggagataaactgcttctagatggctgcctttggctattctag

SEQ ID NO: 23 - DNA, 513 bp, Zea mays
aggcgaatgaatgaaaacagaaaagcatgccgagagcaatctagatgcagtgtttcaacgcagccaaattcaagaacaagggatggctcctcaagaattctgagtgctcctccaattgaatctttcagatatgaaagaaataaagatgcccctttcagggaccagaaccgttcagatattgaatctttcagatatcgaagagatataaacacgcttttgagggaccagagcccttcaaatgaggttcgtaagtatgggaaaggcaggggaggaactaaagcacagagccatagggtaagaaaggatttcaaggcacaacctagcataaatcatgaaaagagcataatgccatccatcgagccaacatggactcctcttgacaagagagcgagacaaaaacttacatttgcaacatatgggaacgaaaaacaaagcaagctggtttggagacatcaaagcagccccggtgttggatgtggcttccctaaaaagtaccatgaagaaggtacgtag

SEQ ID NO: 24 - DNA, 728 bp, Gossypium hirsutum
atgtcgccaaccgaatcatcacgagaggaaaatgtttacatggccaagctggctgagcgggccgagcgctatgaggaaatggtagagttcatggaaaatgtagcaaaaactgtagatgttggtgagctgactgtcgaggaaaggaaccttccctctgtagcttacaaaaatgtgattggggctaggagggcttcatggaggattatctcttctattgagcagaaggaagagagcagaggaaatgaggatcatgttgcaaccatcaagaagtataggagcaagattgaagctgagctcagcaagatatgtgatgggattttgagcctccttgagtctcacctcattccttcagcttcatctgccgagtccaaggtgtttttccttaaaatgaagggtgattatcataggtatcttgctgagttcaagactgctgctgagaggaaggaagctgctgagagcactttgttggcttacaagtctgcacaggatattgctctcggtgacctagcgccaactcatccaattaggctgggtacttgtctcgtcctctgcctgatgaggctatttctgagttggatacattgggtgaggaatcctacaaggatagtacattgatcatgcaacttcttcgggacaacctaaccctttggacatctgatatcacggacgaagctggagacgagatcaaggaagcttccaaacccgagtcaggggagggacagcagtga

SEQ ID NO: 25 - DNA, 1014 bp, Medicago truncatula
atgaaaatgaattctctatctctgaaaacagctctaatctccactgcaattttatcaacagcaatggcgctgaaactcacagtaccaatggtttcacatttcatcctcaacgaagctccaactatctggaacttcatcctctcttgcttcactccaccttacctttatctccttctcaacctcatcatcctcaccatcgtcatcacttccaaattccacaatcatcaccaccattctccgccggagacacctttcgacggaataccttctcctgttcctgttcctgttcagatccctgtgccggagacacttcagatctctgaaaccgctactctaacgaactacaacggcttcgtttctgaagcttctgaaggttaccgttatgaactgaaaaccgatgaaacagttgcagtaagtaacgaatctaacgattctgttgcttacgtcgccgatgagattactccggtgaaaacaacggttgttggagttgaggactccgttcatgtttccaatttgcagaagaaagtaccgttgcagttcgcatttaacgatgagaatgagaaacctccgatttcagctaggtctagtcaccggaaaaccgttagatcaagtccagaaggtactgtgaatgcgttgagagtagcgaagacgaagaagcaggaaacattggagagtacgtggaagacgataacggaaggaagagcgatgccgttaaacaggcatttgaaaaaatcggagacgtttgaatcacagccacgtcgtaacggcgtgccgttagcggatttgaacggcggtgtcggcggaggaagtggtccggtgatgaagaaatcggatacgttttccggtatggagaagagtacttctccggtgaggaaagaaccgtcgctgagtcaggacgagttgaatcggcgagttgaagcatttattaacaagttcaacgcggagatgaggttgcagagacaagaatcgttgaggcagtatcgggagatggtgaacggtggtagaacttgttga

SEQ ID NO: 26 - DNA, 2658 bp, Arabidopsis thaliana
atggatttggaagctaattgtaaggaaaaactttcatattttcggataaaagagctcaaggatgtgctcactcagctgggactttcgaaacagggaaagaagcaggaacttgtcgaccggatcttgacccttctttctgatgaacaagctgccaggttgttgtctaaaaagaatacagtggcaaaggaagcagttgccaaattagtggacgatacatataggaaaatgcaagtatctggggcaagtgatttagcatcaaaaggacaagtgagttcagataccagtaatctgaaagttaagggagagcctgaagaccccttccaaccagaaattaaagttcgatgtgtttgtggaaactcgctagaaacagactcaatgatacagtgtgaggatccaagatgccatgtttggcagcatgttggctgtgttattctcccagataagcctatggatgggaatccaccacttccggaatcattttattgtgaaatctgccgacttactcgagctgacccattttgggttacagtggcacatccactctctccagtgaggctgactgcaacgactatcccaaatgatggtgcaagcacaatgcagagtgtggagagaacatttcaaatcacaagggcagacaaggaccttttggccaaaccagagtacgatgttcaggcttggtgtatgctcttgaatgataaagttctctttaggatgcagtggcctcagtatgctgatctgcaggtcaatggtgtgcctgtacgtgcaattaatcgacctggaggacagcttttgggagtcaacggccgcgacgatggacccattattacatcttgtattagggatggagttaacagaatatccttgagtggaggtgacgttcggattttttgttttggggtcagacttgtgaagcgcaggactctacaacaggttctaaatttgattccagaagagggtaaaggggagacttttgaagatgctcttgcacgtgtccgccgatgcattggaggtggaggtggagatgataatgccgacagtgatagtgacattgaagttgttgctgatttcttcggtgtcaatcttcggtgtcctatgagcggttctaggataaaagttgctgggagatttttaccctgtgtgcacatgggctgttttgaccttgatgtgtttgtggagttgaatcaacgttccagaaagtggcagtgccctatttgtctgaagaactactcagtggagcatgtaatcgtcgatccttattttaaccgtatcacgtctaagatgaagcattgtgatgaagaggtgactgaaattgaagtgaaacctgatggttcttggcgtgtaaagttcaaaagagagagtgagcgaagggaactgggggaactctcacagtggcatgcacctgatggtagcctttgcccctctgctgttgatattaaacggaagatggaaatgttaccggttaagcaagaaggttactcagatggtccagccccgctaaaacttggaataaggaagaatcgtaatggcatttgggaagttagcaaacctaatacaaatggattatcttccagtaataggcaagaaaaggttgggtatcaggagaagaatattataccaatgagtagtagtgctactggaagtggtagggatggtgatgatgcaagcgtaaaccaggatgctattggaacttttgactttgtagccaacggcatggaacttgattccatttccatgaatgttgattcaggttataactttcctgacagaaaccaatctggcgagggtggaaataatgaagtcatcgttctgagtgattctgatgacgagaatgatttagtgatcactccagggcctgcatacagtggttgtcaaacagatggtggacttacttttccactgaaccctcctggaataattaactcatataatgaggacccacacagcatagctgggggaagttcaggcttaggtcttttcaatgatgatgatgaatttgatacgcccctttggtcatttccttctgaaactccagaagcccctgggttccaactatttagatctgatgctgacgtttcaggaggtttagttggtttgcatcatcatagtccactaaactgttctcctgaaataaatggaggttataccatggctcctgagacatcaatggcatctgttcctgtggttcctggctctactggccgatctgaagcaaacgatggcctagttgacaatcctcttgcatttggtagagacgatccctcacttcaaatatttttgccaacaaaaccagatgcttcagctcagtcgggttttaaaaaccaagctgatatgtcaaatggtctccgtagtgaagactggatctcgcttaggctaggcgatagcgcctctgggaatcatggagatcctgcaactacaaacgggattaactcaagccatcagatgtctacgagggaaggttctatggatactacaacagagactgcgtcgttgcttctgggtatgaatgacagtagacaagacaaggcaaagaagcaaagatcagataatccattttcatttcctcgccagaagcgttctgtaagacctcggatgtacctctccattgactcggattctgaaacaatgaacaggatcatcagacaagacaccggagtttaa

SEQ ID NO: 27 - DNA, 693 bp, Gossypium hirsutum
atggcttcgactgtatcttgctcattttcaccattggtattaaacaaggctaatctgccctgttctactaatgctataaagccattcactgtatcttttctgtccaagaattcttgcaacagccggctgtctgttgtaagggcagaggctactcgggatcataacagagatacatcggtggacgtgcatgttagcaaagataataaaggccaagagagagctgttgagaaaaggcctaaacggttggctatggatgtctctccttttggtttgttggaccccatgtcacctatgagatcaatgcgtcaaatgatggacacaatggaccggatattcgaggacgcaatgacattccccggcaccaacagaacacgaggagacgtacgtgcaccttgggacatcaaagatggcgaacacgacatcaaaatgcgattcgacatgccagggctcggaaaagacgaggttaaggtttccgtagaagacgacatactggtcataaagggagaacacaaaaaggaagaaacccaagacgattggacaaacagaagctacagttcttacaatactagtctccaactaccagacaactgcgacaaagataacatcaaagcagagcttaagaatggagttctcttcatctccattcccaaaacaaaagttgaacgcaaagttattgatgtagatattcggtaa

SEQ ID NO: 28 - DNA, 4086 bp, Arabidopsis thaliana
atgggttcactgaaaaaggacggcgagatcggagatgagtttacggaggcgttactgtacgttaacggcgttcgtagagtcttgcctgatggattggctcatatgacacttctcgaatatctcagagatttaggattgaccggtacaaagctgggatgcggcgaaggtggttgtggggcttgcacggtgatggtgtctagttatgacaggaagtcaaagacctctgtgcattatgctgtcaacgcttgcctagcacctctctattctgtagaagggatgcatgtaatatccattgagggacttgggcatcgcaaacttggcttgcaccctgtccaggagtctttggcatcttcccatggttcccaatgtgggttttgtactcccgggtttatcatgtccatgtattcgttgttgaggtcaagtaaaaactcaccttctgaggaggagattgaagaatgtcttgcaggaaatctatgtcgttgtactggttatcgacccattgttgatgcgtttcgggtttttgcaaaatctgatgatgctctctactgtggtgtatcttcacttagccttcaagatggttctactatttgcccatctactggcaaaccttgctcttgtggatcaaaaacaacaaatgaagttgccagttgtaatgaagatagatttcagtcaatctcttatagtgatatagatggagctaagtatacagataaggagcttattttcccccctgaacttttgctgaggaagttaactcccttaaagttaaggggaaatggggggattacctggtatagacccgtatgtcttcagaacttgcttgagctcaaagcaaattatcctgatgcaaaactactggtaggtaatacagaggtgggaatcgaaatgagattgaagaggttacagtatcaggtgctgatctctgttgctcaagtcccagaactcaacgcattgaatgtcaatgacaatgggatagaggttggttcagctttgagactttctgaactcctgaggttattcaggaagatagtaaaggagcgtcctgcacatgaaacatcagcatgcaaggcttttatcgaacagctgaagtggtttgctgggacacaaataagaaatgttgcttgcattggtggaaacatctgtacagctagtccaatatctgatttaaatcctctttggatggcttcaagagcagagtttcggataaccaactgcaatggagatgttaggtctatacctgcaaaagatttcttcctcggttatcgtaaagtggatatggggagcaacgagatcttgttgtcggtattccttccatggacaagacccttagagtatgtgaaagaatttaagcaggcccatcgcagggatgatgatatagctattgtcaatggtggaatgcgtgtgtttcttgaagacaagggtcaacaattgttcgtttctgatgcatccattgcttatggaggtgtggctcctctttctttgtgtgcgagaaagactgaagagtttctaattggaaagaattggaataaagatcttctgcaggatgcgcttaaggtcatacagagcgatgtcgtgattaaggaagatgctcctgggggaatggtggagtttcggaaatctctaaccctaagcttcttctttaaatttttcttatgggtttctcataatgtcaataatgcaaattctgcgatagagaccttcccaccctcccatatgtcagctgtgcaacctgttcctcggttatctagaattggaaaacaagactatgagacagtaaagcagggaacatctgttggctcgtcggaggtgcatctttcagcgagaatgcaggtcacaggggaagcggaatatactgatgatactccagtacctcctaataccttacatgctgcctttgtgctaagcaaagtgccacatgcccgcatcctttcaatcgatgattcggcagccaaatcttcatctggttttgttggtctgtttcttgccaaagatattcctggggataatatgattggaccaattgttcccgacgaagaattatttgctacagatgtggtcacgtgtgtgggacaagtcattggtgtggtcgtcgcggatacacatgaaaatgcaaaaactgcagcaggaaaagttgacgttaggtatgaggaactaccagcaatattatcaatcaaggaggctattaatgctaaaagtttccatccgaacacagagaaaaggctaagaaaaggggatgtcgagctgtgttttcaatctggtcagtgtgacagggtaatagagggagaggttcaaatgggtggtcaggaacacttctacttggagcctaatggtagtttggtttggacagtagatgggggcagcgaagttcatatgatttcatccacacaggctcctcaaaagcaccagaaatatgtgtcgcatgttcttggtcttccgatgtctaaagtggtatgcaaaaccaaacgaattggtggtggctttggtggtaaagaaacaagatcagctttcattgctgcggcagcttctgttccttcctacctattgaatcgacctgtgaaactcatactggaccgagatgtggacatgatgataactggtcatcgtcatagttttcttggaaagtacaaggttggatttacgaacgaaggaaaaatattggcgttggaccttgaaatttacaacaatggtggcaactctttggatctctccctttctgttcttgaacgtgccatgtttcactcggataacgtttatgagatcccgcatgtaaggattgttgggaatgtttgctttactaattttcctagcaacactgctttccgagggtttggaggcccccaaggtatgcttataactgaaaactggattcaaagaatcgcagctgagcttaataaaagccctgaagaaatcaaagagatgaactttcaagtggaaggatcagtcacccattactgtcagactcttcagcactgcacattgcatcagctctggaaagagctgaaagtatcgtgcaacttcttaaaggcccgcagagaagctgacgaatttaatagtcataatcggtggaaaaagcgtggtgtagctatggttcccacaaaatttggcatatcatttaccacaaagttcatgaatcaggccggagctcttgttcatgtttacactgacgggactgttttagtgactcatggtggtgtggagatgggtcaaggattgcatacaaaggtcgctcaagttgctgcatccgcctttaacattccacttagctcagttttcgtgtcagagacaagcactgacaaggttcctaatgcgtcaccaactgctgcttctgcgagctctgatatgtatggtgctgcagttttagacgcttgtgagcagattatagcaagaatggaacctgttgcatctaagcacaatttcaacacatttactgagctagtaagtgcctgctactttcaacggatagacctatcagctcatggttttcacatagttcctgatcttgggtttgactggatatctggaaaagggaacgcctttagatattacacatatggagctgcctttgcggaagttgagatagatacattgactggtgatttccacacaagagcagctgatataatgttggacctcggatattctcttaacccagccattgatgttggacaaatagaaggagcgtttgtacaaggactgggttgggtagctttagaagaactcaaatggggagatgcagctcataaatggattaaaccaggaagtttactcacttgcggacccggaaactacaaaataccttccatcaacgacatgccgttcaacctcaatgtttcgcttctcaaggggaatccgaatacaaaggcaatacattcatctaaagcagtgggtgagccaccattctttcttgcatcatcggttttctttgcgataaaggaagctattaaagcggctagaaccgaggtgggtctcacagactggttccctctagagagtccagccactccagagcgtatcaggatggcttgtttcgacgaattttcagctccttttgtaaattcagatttctaccctaatcttagtgtttga

SEQ ID NO: 29 - DNA, 4062 bp, Arabidopsis thaliana
atggagcagaacgagttcatggaggcaataatgtacgttaatggtgttcgtagagttttgcctgatggattagctcacatgacgcttctcgaatatctcagagatttaggattgaccgggacaaagctcggatgcggcgaaggtggttgtgggtcttgcaccgtgatggtgtctagttatgaccgagagtcaaagacatgtgtgcattatgctgtcaacgcttgcctagcacctctctactctgtagaagggatgcatgtaatatccattgaaggagttggtcatcggaaacttggcttgcaccctcttcaggagtcattggcatcttcgcatggttctcaatgtgggttttgtactcccggttttgtcatgtcgatgtatgccttgttgaggtcaagtaaaaactcaccttctgaggaggagattgaagaatgccttgcaggaaatttgtgtcgttgtactggttatagacccatcattgatgcgtttcgggtttttgcaaaatctgatgatgctctatacagtggtttatcttcacttagccttcaggacggttcaaatatttgtccatctactggcaaaccttgttcttgtggatcaaaaacaacaagtgaagcagctacttgtaatgaagatagatttcagtcaatctcttatagtgatatagatggagctaagtatacagataaggagcttatttttccccctgaacttctgctgaggaagttagctcccttaaagttagggggaaatgaggggattacctggtatagacccgtaagtcttcagaacttgcttgaactcaaagcaaattttcctgatgcaaaactactggttggtaacacggaggtgggaatcgaaatgagactaaagaggttacagtatccggtgctaatctctgctgctcaagtcccagaactcaacgcattgaatgtcaatgacaatgggatagaggttggttcagctttgagactttctgaactcctgaggttattcaggaaggtagtaaaggagcgtcctgcacatgaaacatcagcatgcaaggcttttatcgaacagctgaagtggtttgctgggacacaaataagaaatgttgcttgcattggtggaaacatctgtacagctagtccaatatctgatttaaatcctctttggatggcttcaagagcagagtttcggataatcaactgcaatggagatgctagatctatacctgcaaaagatttcttccttggctatcgtaaagtggatatgggaagcaacgagatcttgttgtcggtattccttccatggacaaggcctttagagtatgtgaaagaatttaagcaggcccatcgcagggatgatgatatagctattgtcaatggtggaatgcgtgtgtttcttgaagagaaagggcaacaattgtttgtttctgatgcatctattgtttatggtggtgtggctcctctttcgttgcgtgcaagaaacactgaggaacttctaattggtaagaattggaataaatgtcttctgcaagacgcacttaaggtcatacagagtgatgtcttgattaaggaaggtgctcctgggggaatggtggagtttcgcaaatctctaaccctaagcttcttctttaaatttttcttatgggttactcatcatgtaaataatgtaaatcccactatagagacctttccaccctcgcatatgtcagctgtgcaacttgttcctcggttctctagaattggaaaacaagactatgagacagtaaaacagggtacatctgttggcttgccagaggtccatctttcggcaagaatgcaggtcacaggggaagcagaatatactgatgataccccattgccgccttgtaccttgcatgctgctttagtgctaagtaaagttccacatgcccgcatcctttcagttgatgattcggcagccaaatcttcatctggttttgttggtctgtttcttgccaaagatgttcccgggaataatatgattggaccaattgttgccgacgaagaattatttgctacagacgtggtcacgtgtgtgggacaagtcattggtgtgcttgtcgcggatacacatgaaaatgcaaaaactgcagcaagaaaagttgacgttaggtatcaggaactgccagcaatattatcaatcaaggaggcgattaatgctaaaagtttccatccgaacacagagagaaggcttagaaaaggggatgtcgagctgtgctttcaatctggtcagtgtgacagaataatagagggagaggttcaaatgggtggtcaggaacacttttacttggagcctaatggtagtttggtttggactatagatggaggcaacgaagttcatatgatttcatccacacaagctcctcaacagcaccagaaatatgtgtctcatgttcttggtcttccaatgtctaaagtggtatgcaaaaccaaacgacttggtggtggctttggtggtaaggaaacaagatcagctttcattgctgcagcagcttctgttccttcctacctattgaatcgacccgtgaaactcatactggacagagatgtggacatgatgattactggtcatcgccatagtttcgttggaaagtacaaggttggatttacgaacgaagggaaaatattggcgttggaccttgaaatctacaacaatggtggaaactctatggatctctctctttctaatcttgaacgtgccatgtttcactcggataacgtttatgagatcccacatgtgaggatcgttgggaacgtttgctttactaattttcccagcaacaccgctttccgagggtttggagggccccaaggtatgcttataactgaaaattggattcagagaattgcagctgagctggataaaatccctgaagaaatcaaagagatgaactttcaagtggaaggatcgatcacacattactttcagtcacttcagcactgcacattgcaccaactctggaaagaactgaaagtatccagcaacttcctaaagactcgtagagaagcggacgagtttaatagtcataatcggtggaaaaagcgtggtgtagctatggttcccacaaaatttggcatatcctttaccacaaagttcatgaatcaggccggtgctcttgttcacgtttacaccgatgggactgttttggtgacacatggaggtgttgagatgggccaagggttgcatacaaaggttgctcaagttgctgcaacggcctttaacattctccttagttcggtttttgtgtcagaaacaagcaccgacaaggttcctaatgcgtcacctactgctgcttctgcgagttctgatatgtatggtgctgcagttttagacgcttgtgagcagattatagcaagaatggagcctgttgcatctaaacacaatttcaacacattctctgagctagcaagtgcctgctactttcaacgtatagacctatcagctcacggttttcacattgttccagaacttgaatttgattgggtatctggaaaagggaacgcatatagatattacacatatggagctgcctttgctgaagttgagatagatacattgactggtgattttcacacaagaaaagcagacataatgttggatctcggatattctcttaacccaaccattgatattggacaaatagaaggagcgtttgtacaaggactaggttgggtagctctagaagaactcaagtggggagatgcagctcataaatggattaaaccaggaagtttactcacttgcggacccggaagctacaaaataccttccatcaacgacatgccgttccaactgaatgtttctcttctcaagggtaatccaaatgcaaaggcaatacattcatctaaagcagtgggtgagccaccgttctttcttgcagcatcagccttctttgcaataaaggaagcaatcaaagcggctagaagcgaggtaggtctcaccaactggttccctctggagactccagccactccagagcgtatcaggatggcttgtttcgacgagttttcagctccttttgcaaattcagatttctgcccaaagcttagtgtttga

SEQ ID NO: 30 - DNA, 1002 bp, Zea mays
atggtggtcctcaccaagggcgagctggagcagatcgcgctgccggccgtgcagcgcgcatcgccgccgccgccggccgccgtgccggaggtcgacctggcagccggggacgccgccgccgccgcgcgcgcggtggccaaggcgtgcgaggaccacggcttcttcaaggtgacgggccacggcgtgccgccgcacctcctggcgcgcctcgaggccgccgcggccgcgttcttcgcgctcccgcagcgggagaaggacagggccgccggctgcccgttcggatacgccagcaagcggattggcgccaacggcgatctcggctgggtcgagtacctcctgcttgccgtcaccgccgccggcgcagcggccgcgccggggtctgcgtgcgagggcgcggagccgtcctgtttccgtgctgtgctggacgagtacgtggcggcggtgaggcgcatgacctgcacggtgctgcagctgatggcgcaggggctgggcctcgacgacagggacgtgttcagccggctggtgctggaccgggacagcgactccatgctgagggtgaaccactacccgccagcggcggagacgaggcggctgacggggttcggcgagcacaccgacccgcagatcatctccgtcctccgctccaacgacgcgtccggcctcgagatcacgctgcgggacggcacctgggtgtccgtgccctccgacacggaatccttcttcgtcaatgtcggcgacgcgttgcaggtgctgaccaacgggcggttccggagcgtgcggcaccgggtgatggtgagcagcgcgcggccgcgggtgtcggtgatcttcttcggcggcccgccgccgcgggagcgcctggcgccgctgccgggtctggtggaccgggagggcggccgacgccgctacagggagttcacgtggagggagtacaagaactcggcgtaccggaccaagctggcagacaacaggctctgctccttcgagaccatggcgacgagctag

SEQ ID NO: 31 - DNA, 1002 bp, Zea mays; identical to SEQ ID NO: 30

SEQ ID NO: 32 - DNA, 1389 bp, Zea mays
atggacgacatacgtctcgggagggcggtttgtctgcgatcggttgatcaggccaatggcgtgcgtggtggcgacgatgagccgacatatatggacgtgcagacgaagaggcgtggccacgccaggctttccgagtacgctgtaggccacaccagttgcaccgttgaagaagatgaagaaaccggtgttgttgaagccgttgtcgatgatgtgcgagttgataggcgcatggatggttactgttgctatattcatcctatcattgagaaaaggttgcaaggcaaaactgccatggaagtctgtaaagcacaatcatcagatactctcaagctttcacctgatgacgaaatagaaggggaaatagtttatttacaatccaggctacttgatggtgttgtttctatgaagcagagatatgaagatttgatactcaaggttgtccagaatatttcttatgagttggattctttcaataaaagaaaatgggatcatatcattgtgaatcagtttcttcgtgatctgagagaagctaagaagcgcggaaactcagagaggagacacaaggaagctctagctattctggctgcaactgcaccttctgttacaccgacctcacgaaacacaacagtgaggaaagagacagaaaacaatgtgacacctgctaaacgagagaacatgccaagaagcattactggatcctcaagaattggccaactatcttcttcaccacaagcaaaggatttatcattttccaacagtgatgtctcagacgaaactaactttggcattttcaatctggcgaagttctccaagaaaagtgctcttccctgtgatatatgcatgcgatgtgatacaatattgaaccgtatttttgtttgctcgagctgtaaggctactgtacacttagattgctaccagagtctggtgtatcccactggcccatggaaatgtgaactttgccatgagatgccctcagattctgttacctctggtgaacaatcagaccaaaatggtccgaaagcttgtttggtgcaatgtggtttatgccatggaacatctggtgcttttagaaagactgtgaagggtcaatgggttcatgctttctgtgctgagtgctgtacattagattgtcaaattacttttcatccttcatgtgctagagatgctggtctttacatgaatacaaaaagattgggtaatatgttacaacataaagcatactgttgtagacacagtattgaacagagaaaggcctatagtcaacaatatggtcctgatgaaatcaagggcatgaaacaaatgagggttgaactggaactattacgtttcctttgtgagaggattgttaagagagaaaaagtgaaggtatttgaaattgaacttaaatag

SEQ ID NO: 33 - DNA, 2538 bp, Zea mays
atgcaggagcagcgcgcgtacggcaatgcgtgcatcggccttggcctgggtgggtggtccggccgtccgggtgggggcgccatccgtagccagccactcgcccgtgaaagcttttacttctacggaaagaaccgaggcgcggcccgcgggcgccaacctgttcccacccagaggagaggagtggtcaagtccgaggccacctgcccaggctcagacctcccccgccacaacgcgagccgcatcgcctcgtctcctccacgccatacacgcccgccttcccttccccggcgaccaggacccctcgcccgcggcgccagcgagctcccccggccagtcgtaggcctcccggagctcagcacgcacgcaggtgggtccagtgaggcctggttgtgcgcgttcctgcgggcgtcgtcggggcagatccatggaactcagccgcccgcagcgcggatagtactgcacttgtgcaccagccaccagcggatcgccaggaccgcccacctgctgctgcttgtgtcgctagccatttttcgggcgtctggcttggaggatatggccgcggcgatggacgcgcccaaccctggagcggctgctggcccaggaatgcctagtgacgccctgtaccaggagctgtggcatgcgtgtgctggcccgttggtcacagtacctagacaaggcgagcgtgtctattacttccctcagggccatatggagcagctcgaggcgtctgcacaccaccagcagcttgatcagtacttaccgatgttcgatctaccacccaagatcctatgcagagtagtcaacgtggaactacgggccgaagctgattcagatgaagtttatgctcaaattatgttgcagccagaagctgatcaaaatgaactcaccagcctggacgctgaaccacaagaacgtgaaaaatgcactgcccattccttctgcaagacactgacagcttcagatacgagcactcacggcgggttttctgttcttcggaggcatgctgaggaatgtcttcctcagctggacatgtctcaaaatccaccttgccaagaactggttgccaaagatctccatggcactgaatggcattttcggcacatttttcgagggcaacccaagaggcatctccttaccaccggctggagtgtctttgttagctcaaaaagattggtttctggggatgcattcatcttcatgagaggtgaaaatggtgagctacgggttggtgtaaggaggctcatgagacaagtaaatagcatgccgtcatctgtcatatcaagccacagcatgcatcttggagtattggccacagcctcccatgccatctccactggaaccctcttttctgttttctacaaaccaagaactagtcgctctgattttattgtgagtgtgaacaagtaccttgaagctaagaagcagaaaatatctgttggaatgaggtttaagatgagatttgaaggtgatgatgctcctgaaagaaggttcagcggaacaatcattggcatcgggagtttgccggcaatgtcaaaatctctgtgggcagattctgactggagatctctaaaggttcaatgggatgaaccttcatccattcttcgtccagatagaatctcaccatgggaagtggagccactggatgcagctaatccacaatcccctcaacctccactaagggctaagcgtccacgacccccagcttcaccttgtatggtttcggaactgccttcaggttttggactctggaaatccccaattgaatcatcctgtacactctcattttcggaacctcaacgggctcgagagttatttccttcaatccccacgtcaaccttgtcatcttcatcaaatgtcagttttaattcaaagaatgagccgtccatgctaaccagtcagttctactggtcagcaaggcatacaagagctgactcctgcgctgctagcaccaacacagtcgtaattgaaaagaagcaagagccaagttctggtggttgtagattgtttggaattaatatatgctcagctgaggaagaagtattacctgaggttactgctccaggtgttggttatgagcagactgctgcctctgtagagttgaactcggataagctctcacagccatctgatgtcaacaattctgatgccctagcagctagcagtgaacgttcacctcttgaatcccaaagccggcaagtgaggagctgtaccaaggtaattatgcaaggaatggcagtaggaagggctgtagacctgacaaagcttagtggctacagcgatctttgccagaagctggaggagatgtttgacatccagggggagctgggttccacactaaagaaatggcgggtcattttcactgatgatgaggatgacatgatgcttgttggagatgatccttgggatgagttttgcaggatggtgaaaaggatttacatttacacatacgaggaggcaaagaagctgacatccaagtcaaagttaccggttagcagtgacagcagcaagctgagcgctgcgaactcactgtctgaatga

SEQ ID NO: 34 - DNA, 294 bp, Zea mays
atggggtacctgtggagggtgcggctgtcttcatttgctgccggcgcggcgacggcttcggcggcggggttcttcctcctctacaaggaccacctgctcgcccgcgctgccatcatcagccagaaatattacaacctcatgatgaattttccatttatgtctttgttttcccttatcaggccggtggaggacatcaaggaaacttctgaaaagcattatgcagccctaaataagaggatatcagcactggaaagcagaagagaaccaggaactatcaaagaggcatcagattaa

SEQ ID NO: 35 - DNA, 2976 bp, Zea mays
atgggagtcccggcgttctaccggtggctggcggaccgctacccgctgacggtgtctgacgcggaggaggaggagcccgtggagctcgagcccggcgccttcgtccccgttgacctccgccgccccaatcccaacggcctcgagtttgacaacctctacctcgacatgaatggtatcatccacccatgcttccaccccgagggccggccggcgcccaccacctacgacgaggtgttcaagtcgatttttgattacatcgaccacctcttcggcctcatccgccccaggaagcttctctacatggccattgatggtgttgctccaagggcaaaaatgaaccagcagaggtccaggcgattccgggctgctaaggacgcggctgatgcggcagcggaggaagagaggctgaggaaggagtttgaggcagagggtaggactctagcccagaaagagaagtcggaggcaattgactccaatgtcattactccagggacggagttcatgtttgtactatctacggcgcttcagtactacatacagctgaggctgaatcacacgcttggatggcagtctgtaaagataatactgtctgattccaatgtccctggagagggagagcacaaaattatgtcatacatccgcctgcagcgcaatcttcctggctttgatcccaatacacgccattgcttatatggcctggacgctgatttgattatgcttgctctagcgactcacgaggttcacttctcaattttaagagaggtgatctccatgccagggcaacatgaaaaatgttttctttgtggtcaagttgggcatttggctgctgaatgcagaggtcctagtcagcctgataattctgtggagctacctcctattcataaaaagaaataccagtttcttaacatatgggtgttgcgtgaatacctggcaaaggatttggaaattatagatgctcccttcaagataaactttgaacgtcttattgatgattttgtgtttatgtgtttctttgttggcaatgactttcttcctcatatgccaactttggaaattctgcgagagggtgccattaatcttctcatgagtatctacaggtcggagttcacatcaatgggtggttacctaactgatgtgggtgaggttatattggaccgagtggaacatttcatccagtctgttgcggtcaatgaagaacagattttccagaaacgggcacgcattcaacaggcacgtgagaataatgaagagaaacataaaatgcagagagagaattctgaggaggatcaatatgtggataaggtgaagttaggagagccaggatacagggagcgttattatgctgataagtttaaagaagaggcagaatcaaaacccattgttcaagttcggagagatgttgtccagaaatacgtggaaggtctttgttgggttatgagatactactatcaaggtgtttgttcatggcagtggttttatccctatcattatgcgcctttcgcatctgatctaaaaggcttggctgaattggaaataaccttttttttgggtcaacctttcaagccatttgatcaactaatgggaaccctaccagctgcaagctccaatgcactgccaaaatactatggggatttgatgagtgatccagattcaccgttgaagtctttctacccaaaagattttgagatagacatgaatgggaaacgttttgcatggcagggtgttgcaaaattgccttttattgatgaaaggcgtctgcttgcggaaacaagaaaacttgaagatactttgacagaagaagagaaattcaggaataggactatgcttgacataatttacgttagagatactcatccattgatcactcagattatcttcctgtatcagaactattaccatctatcaagaacagacccttatgttattcccattgagcctgctgctagtggtggaatgaatggattcctatgtttatctgaaaggaactggtatagtgtcactgtcacttctccagttaaggggttcaatggcattgctcagaacagagttttgaatgctgcctatctcaatcctcagtatcacaaacacatcccagagcctccagcgggggtcatcatacctgcgaagatactgaagcctagtgatttcaaaccctttcctgtgttgtggcatcaagataatagtcgtcgacaagtaagagaaaggcctcaggtttctggagccctgtccggttctctcttaggagaagctgcacaccgactggtgaaaaactccctccagatcagatctggcaatgctgctgggttactttatatgccatacagaggtgcaccctatggccctggaaacagaccaaggcctgctgggccattggggtatgagaggggttttgtggataatccataccatgcacacatgtctagaagtgttccaaaccctcacgctcaattctttggtgattctcaagctaacagacagcccatgcggatactagaacggccagactcccgaagtcatgatgctggtatccgtgcatcaatgtctaaactgacaatccaagaagggccaaggcctcatcaaaataacaggatgcagaattccgggtactggcccaatcaaccacatcctactcactttactggacccccagcccagcggcctatgcagaacatcagttttacacctcagcgacctttccaaaccgggggatttccgcagcagagacctgtaaatggggctccaccaccattacctcccagtaactggattggtaagcaaccaagtggatgccacatgagtgtatcacctgcaaaactcgatccaaggacagctccagacagacagcccaagcaggataacccaagatctcaacaggataagaggcagcaggcgaccaaggtataccgtgtcaaaactcaagctactaatgttaatggtttgtcagagccaggtaaacaggaagaacctgaagggtaa

SEQ ID NO: 36 - DNA, 1059 bp, Zea mays
atggatggcgaggaggttggcaggaggggtattcctactctgctgaagccgtcttcctcctccagcgacggcagtgccggggaacaagagcacatcgcttctgacgtcactcagctcataggatggacgccgctggtcgaattgaagcgaatcgccagcgaggctgggatcgatgcgcggatcgtcggcaagatggaggcttaccagccactttgctccatcaaggaccgctctgctttgagaatgatagaggatgctgaggagaggggattgatttcgcctggagtcacaacactggtggagccgacgagtggtaacatggggttagggttggtcctcttcgctattcagagaggttacaggctcattgcagtcatgccggctaaatactcgcttgacaagcagatcttgctgaggttcatgggcgcggagctatacttaactgatccggcccttggctttccgggcatgtttgacaaagttgaacagctccgaaaacagctgccaaatgtacatgttctgaaccaagtcacgaacaaagcgaattctgaagcccacttcagattgaccgctgttgctgggcctgagatctggaaggacacggcaggcaaggtggatgtattcgtagccggttcaggcacaggaggcactgtttctggcgtcgggaagtatctgaagatgcaaaagccaggcgtcaagatcatctgcgttgagcctgcagaaagcccagtgatttcaggtggcgcgcctggcaagcataaaatccagggagtaggcccagggtttctacctgaagttctggacacctcggtcatcgacgagaccgtcaccgtgagcaccgaggaggccatggcgaatgcgaggaggctggccagggaagagggcctgctcgtgggcatttcttccggagcaaacctggcagcttgtttgaaggtcgcttcgagacaggagaacaagggcaagatgatcgtcactgtgttcccaagtggcggcgagagatacatcaactccgacctctttgcagatgtgcgagaggagtgcattgccatgacattttga

SEQ ID NO: 37 - DNA, 1902 bp, Zea mays
atggtgacgcggtgcatccgcgaggcggtggcgctggcgtgggtggtgctttgggcgctgagcacgcgggcgggcacgctgctgctgtgcggccggctcagcctcggcgccggcttcccctacgtgcgcaggttcgccgacatggcgccggagcggcgggaggcggccctgcggcgctggaaccgggtgcgctggctcttcccgctccgcatcgccttcgccatcgtcaagatcctctgccactacgtcttctacgccatggtgaacgagaactccgagaatccatactggaaagcgataggatacagcgtggacgagccacgggaggatcgggctcggacggcgacaccgtcgccgtcccggcccctcgacgtcggcgtcgtggagaccaggctgctggacgacaacaagctgctcagatcgctcgtggggaggggcctcacggtgaagccggcgtcgtcggacgcgaaccaccacacagtgcaatgcgacgccgtcatcgtggggtccggctgcggcggtggcgtggccgcggccgtgctcgcgtccgcggggtacaaggtggtggtcgtcgagaaaggcgactacttcaccgccgaggactacagctcgatcgagggcccgtccatggagcgcctcttcgagcgaggcggcatcttctgcacgtccaacgtgaccaccatgatcttcacgggcgccacggtcggcggcggctcggcggtgaactggtcggcgagtatccggacgccggaggaggtgacgcaggagtgggcgcgcgagcacgggctcccggtgttcgcgagccccgggtatgcgcaggccatggacgcggtgtgcgcccggctcggcgtcaccgacgggtgccaggaggaggggttccagaacaaggtggtccgccgcgggtgcgaggctctcgggctgtgcgccgacgctgtgccgcgcaactcgtcggatgctcacttctgcgggagctgcaacttcggttgcccgaccggggacaagcgcggcaccgacacgacgtggctcgtggacgccgtcgcgcgcggcgcggtcatcctgaccggctgcaaggctgagtacttcgtcctcgagaagaaccacagcagcggcagcggaagcgggcggggcaagaagtgcgtgggcctggtggcgacctgcgcgagcaacggcgtcaccaagaaactgcgcatcgaggccaaggtttcgatcgcggcttgtggggcgctgatgacgccgccgctgctgcggcgtagcgggctcaagaaccggcacatcggcagcaacctccacctccacccggtgtccatggcgtggggttacttcccggagaacaagcaggaccccccgctctctggcaagaagcgcatgcgccggtactcccgcacggcgcacgcctatgcgctggtccgcgaccgcggcgtcgggttcgtggacggcgaaggacgcgtgcgcttcaccccgagccgcgaggacgtcgacgagctccgcaacggcctacgccgcgtgctgcgcatcttggtggcggcgggggccgcggaggtcgggacccaccgcagtgacggtctccggctgcggtgcaagggcctccgcgacgaggacctcgaggggttcctggacgaggtgaccatcgagaaggggcccatgcactcgagggttgacaagtgggctctccactgctcagcgcaccagatgggcagctgtcgtatggggtccagccctaaggacggcgccgtggatggccgcggcgagagctgggaggcagagggcctgtacgtgtgcgacggcagcctgctgcccacggcggtgggcgtcaaccccatgatcaccatccagtctatcgccttctgcctctccaagggcatcgccgagaccatggcccaggggcagggcaagggacagtag

SEQ ID NO: 38 - DNA, 1404 bp, Zea mays
atggcgacgaccatgaacgtcagggcgctgtgcctggccgtcgcgaccgtcttctgcgtgctctcacggcagagcctcgccgccggcgagggctccaaggaggcggacaggatcgccgcgctgcctgggcagccaccggacgcggccgtccagcagtactccggctacgtcagcctcgatgacaaggccggcaagtcgctcttctactacttcgtggaggccaccgctgatccggctacgaaaccgcttcttctctggctcaatggagggcctggctgctcttcgtttggaatcggagcattccaggagataggtcctttccgcgtggacacggacggcaagaccctctgcaatttcaaatatgcctggaacacagtggcgaacgtgctgtacctggagagccccgtgggcgtgggcttctcgtacgccgccaacacgggcgtgtacaaggtgatgggcgacaacatgaccgcggacgactcgctccagttcctgctcaagtggctggaccgcttcccggagtacaagggccgcgacttcttcatcgccggcgagagctacgccggccactacgtcccggagctcgccgcctccatcctcgccgccaataacgcgcggcccaaggacatggcctccgtcaacctcaagggaatcgcgatcgggaacgccatcctggagttcgcggcggagcagagcgcgttgtacgagtacttgtggcagcacgcgttcctgtcggacacggcgcacacgctcatcggccagcgctgcaagaacgccgaggacaactcgccgctctgctcggggaccaaggacgccgcctacaaccagctcggcaacatcgacgcgtacaacatctacgcgacgacctgccatgacaagaaagtcaagcccagaggatccaactgcatggacttggctgatccttgcgctcaatactacgtggaggcgtacctgaaccagccagaggtgatgaagaccatccgtgccaacacagggctcaagtacagatggactagatgcaggggcacgttctacaacctgctcaagttcggtgactcgccgtcgaaatcgatgctgccctacgtcaaggccgtcgccgccgccggcgtccgcgtgtgggtcttcagtggcgacctggacgccatggttcccgtgatcgcgacgaagcggtccatggagaagctcggcctcggcgtcgtggaggactggcgcccctggtccatcgacgccaaggaccaggaggtcgccgggtacgtgatcgagtacaagggcgtggtgttcgcgacggtgcgcgggtccgggcacatggtaccgatcgaccagccgggccgcggcttcgctctcttctcgtccttcatcaaggggcagccgctccccaaggccgcgccgatggtcgacggatga

SEQ ID NO: 39 - DNA, 1533 bp, Arabidopsis thaliana
atgacgactctttcttctataaatctctctatacctcctcatttgcttcctagcacgactaacacttgttcttcttcctctgcaacctcttgttctcctcccaggtcttcttcttttgttcttcattcccctctttcgtttggtcaccggagattacccattagcaagaaaagcaagctccgcttctgtggagtgattacaaaggaagctgtttctgggtccaacgatatgactattactcaagtcagagaagatgacgaatcggagattgatgcgccgcttctcgatcctgagtcgctctctaagcctaggagaattgctctctttgttgagccttctccctttgcctatgtatccggctacaaaaacagattccagaatttcattagatacctccgtgaaatgggagacgaggttatagtcgtgacgacacatgaaggtgttcctgaagagttttatggagccagagtcattggatcaagaagcttcccttgtccttattaccaaaaggttccactctcgcttgcgcttagtccaagaatcatctctgaaattgcacggtttaagcctgacattatacacgcttcatctcccggagttatggtctttggtgctctggcaatagcaaaaatgctatctgtaccaatagtaatgtcttaccacacacacgtccctgtatacatcccaagatacacttttagttggttggtaaaaccaatgtggtctataataaggttccttcacagagcggctgatcttacattagttccttctgctgccattggaaaagatcttatagcagctggtgcaactgcagctaatcaacttcgactttggaataagggtgtcgattcagaaagcttcaatccccgtttccgttctcaagaaatgcgtataagactgagtaatggcgaaccagaaaagccactagtgattcatgtaggtcgcattggcgtagaaaagagtttggagcttttaaagagtgtaatggacaaattacctgaagctcggattgctttcattggagatggaccatacaaagaggatcttgagaagttgtttaccggaatgccagcggttttcactggaacgttacaaggcgatgaactctcacaagcttacgcaagtggagatgtgtttgtgatgccatcagagtcggagacacttggccttgtggttcttgaagcaatgtcttcaggacttcctgtcgtcgcggcccgtgccggtggaatccctgatataatccctgaagatcaggagggaaaaaccggatttttgttcaaccctggagatgttgaagattgcgtgacaaaactgagaactttactgcacgaccgtgaaacaagagagatcattggaaaagcggcaagagaagagaccgagaaatatgattggagagcagcaacgacaaagatacgcaatgaacagtacagtgcagcgatttggttctggaggaaaaagaaagttcatgttttgggaccaatcaattggttgattaaacgactgtttccagtaccggaaggtaacgtgtag

SEQ ID NO: 40 - DNA, 807 bp, Artificial sequence
  2-cys peroxiredoxin CTP fused to soy 2-cys peroxiredoxin enzyme domain
atggcgtctgtagcttcttcaaccactctcatctcctcctccgctagtgttctcccagccaccaagtcttcgcttcttccatctccctccctctctttccttccaaccctctcctctccttccccatccgcttctctccggctcgctcgtccctctcccctcacctcaatccgctctcactctcgccgctccttcgttgtcaaagcctcctccagcgagcttccgctggttggtaacaccgcaccggatttcgaagcagaggctgtgtttgaccaggagtttatcaacgtgaaactatctgattacattgggaagaaatatgttgtgctcttcttctacccgttggacttcacctttgtctgccccacagaaatcactgctttcagtgaccgacatgcagagttcgaggcactaaatactgagatattgggtgtttcagttgacagtgtgttctcgcaccttgcatggatccaaacagatagaaagtcaggtggccttggtgacttgaactatcctttgatttctgatgtcaccaaatccatatcgaaatcttatggtgttctcattcctgatcagggaattgcattgagaggattgttcattattgacaaggaaggggttattcagcattctaccattaacaacttggcaattggtagaagtgttgacgagacaaagagaactctccaggccttacagtatgtgcaggagaacccagatgaagtttgccctgctgggtggaagcctggggagaagtccatgaaaccagaccctaaacttagcaaagactactttgcagcggtgtag

SEQ ID NO: 41 - DNA, 3396 bp, Zea mays
atgtcttcctcgaggcctgcccactcttcaagttcatccagcaggactcgccagagctcccgggcaaggatattagcacaaacaacccttgatgctgaactcaatgcagagtacgaagaatctggtgattcctttgattactccaagttggttgaagcacagcggagcactccacctgagcagcaagggcgatcgggaaaggtcatagcctacttgcagcatattcaaagaggaaagcttatccaaccatttggttgcctgttggcccttgacgagaagagcttcagggtcattgcattcagtgagaatgcacctgaaatgcttacaacggtcagccatgctgtgccaaacgttgatgatcccccgaagctaggaattggtaccaatgtgcgctcccttttcactgaccctggtgctacagcactgcagaaggcacttggatttgctgatgtttctttgctgaatcctatcctggttcagtgcaagacctcaggcaagccattctatgccattgttcacagggcaactggttgtctggtggtagattttgagcctgtgaagcctacagaatttcctgccactgctgctggggctttgcagtcctacaagcttgctgccaaggcaatctccaagatccagtcactactaggtggaagcatggaggccttatgcaataccgtggttaaggaagtctttgacctgacaggttatgacagggttatggcttacaagttccatgaagatgagcatggggaggtctttgctgagatcaccaaacctggtattgagccctatataggcctgcactatccagccactgatatccctcaagctgccaggtttctcttcatgaagaacaaagtcagaatgatctgtgattgccgtgcaagatccgtgaagattattgaagatgaggcactctccagggatattagcttgtgtggttcaactcttagagcaccacatagctgtcaccttaagtatatggagaacatgaactcgattgcatctcttgtcatggctgttgtggtcaatgaaaatgaagaggatgatgaacccgagcctgaacaaccaccacaacagcagaagaagaagaggctgtggggtctcattgtttgccaccatgagagccccagatatgtcccgttcccactgcgggctgcctgtgaagccttggcccaagtgtttgctgtccatgtaaacaaggagtttgaattggagaagcagatacgagagaaaaacattctgcgaatgcaaacaatgctctctgacatgctgttcaaggaatcatctcccttgagtatcgtgtctgggagtccaaatatcatggacctagttaagtgtgatggcgctgctcttttgtatggggacaaagtatggcggcttcaaacggctccaaccgagtctcagattcgtgatattgccttctggctttcagaagttcatggggattccactggcttgagtactgatagcctccaggatgctggatatccaggagctgcttcccttggtgacatgatttgtggaatggcagtggccaagatcacgtccaaggacattcttttctggttcaggtcacatacagctgctgaaatcaaatggggaggtgcaaagcatgatccatctgataaggatgacaacagaaggatgcaccctaggttatcctttaaggctttccttgaggttgtcaagacgaagagtttgccatggagtgactacgagatggatgctattcactcattgcagcttattcttagaggtacactgaatgatgcctcgaagccagcccaggcatctggtttagataaccagatcggtgatctaaaacttgatgggcttgctgaattgcaagcagtgacaagtgaaatggtccgcctgatggaaacagcaactgttccgatcttggcagtagatggcaatggattggtcaatggatggaaccaaaaggtagcggagttgtcaggtctgagagttgatgaggctataggaagacacatacttacacttgtggaggattcttctgtatcacttgttcagaggatgctatatttagctctgcaaggcagagaagagaaggaagttcgatttgagctgaaaacacatggctccaagagggatgatggccctgttatcttggtcgtaaatgcttgtgccagtcgtgatcttcatgaccatgttgttggggtgtgctttgtagcccaggacatgactgttcacaagttggtcatggacaaatttactcgggtcgagggggactacaaggcaatcatccacaacccgaacccactcattcctcctatatttggtgctgaccagtttggatggtgctctgagtggaatgcagccatgaccaagcttaccgggtggcacagagatgaagtggttgataagatgctccttggcgaggtttttaacagcagcaatgcttcctgccttctgaagagcaaagatgcctttgtacgtctttgcattgtcatcaacagtgcattagctggtgaagaggcagaaaaggcttcattcggcttctttgaccgcaatgagaaatatgtcgaatgccttctgtcggtgaacaggaaagtaaatgcagatggtgttgtcactggagtgttctgtttcatccatgttcctagtgatgacctgcagcatgcgctacatgtgcagcaagcctctgagcagacagcacaaagaaagttgaaggctttctcgtacatgcgacatgccatcaacaaacctctctcaggtatgctttattctagggaaacactcaagagcacaggtctgaatgaagagcagatgaggcaggttcgcgtcggagacaattgccatcgccagctaaacaagatacttgccgacttggatcaagataacatcactgacaagtcaagctgcttggatttggatatggctgaatttgtgttgcaagatgtggtggtgtctgctgtaagtcaagtgctgataggttgccaggctaaaggtatcagagttgcttgcaacctgccagagagatccatgaagcaaaaggtttacggggatggtatccgactccagcagatcgtctccgacttcctatttgtttcggtgaagttctctcctgctggtggctctgttgacatctcttccaagctgactaagaacagcattggggaaaaccttcacctcatagacttcgaacttaggatcaagcaccgaggagcaggagtcccagcggaaatattgtcgcaaatgtatgaggaggacaataaagagcagtcagaggagggcttcagccttgctgtttctagaaaccttctgaggctcatgaatggtgacattcgtcacctcagggaagctggcatgtcaaccttcattctcactgctgaacttgctgctgctccttcagcagttggacgatga

SEQ ID NO: 42 - DNA, 3396 bp, Zea mays
atgtcttcctcgaggcctgcccactcttcaagttcatccagcaggactcgccagagctcccgggcaaggatattagcacaaacaacccttgatgctgaactcaatgcagagtacgaagaatctggtgattcctttgattactccaagttggttgaagcacagcggagcactccacctgagcagcaagggcgatcgggaaaggtcatagcctacttgcagcatattcaaagaggaaagcttatccaaccatttggttgcctgttggcccttgacgagaagagcttcagggtcattgcattcagtgagaatgcacctgaaatgcttacaacggtcagccatgctgtgccaaacgttgatgatcccccgaagctaggaattggtaccaatgtgcgctcccttttcactgaccctggtgctacagcactgcagaaggcacttggatttgctgatgtttctttgctgaatcctatcctggttcagtgcaagacctcaggcaagccattctatgccattgttcacagggcaactggttgtctggtggtagattttgagcctgtgaagcctacagaatttcctgccactgctgctggggctttgcagtcctacaagcttgctgccaaggcaatctccaagatccagtcactactaggtggaagcatggaggccttatgcaataccgtggttaaggaagtctttgacctgacaggttatgacagggttatggcttacaagttccatgaagatgagcatggggaggtctttgctgagatcaccaaacctggtattgagccctatataggcctgcactatccagccactgatatccctcaagctgccaggtttctcttcatgaagaacaaagtcagaatgatctgtgattgccgtgcaagatccgtgaagattattgaagatgaggcactctccagggatattagcttgtgtggttcaactcttagagcaccacatagctgtcaccttaagtatatggagaacatgaactcgattgcatctcttgtcatggctgttgtggtcaatgaaaatgaagaggatgatgaacccgagcctgaacaaccaccacaacagcagaagaagaagaggctgtggggtctcattgttgcccaccatgagagccccagatatgtcccgttcccactgcggtatgcctgtgaattcttggcccaagtgtttgctgtccatgtaaacaaggagtttgaattggagaagcagatacgagagaaaaacattctgcgaatgcaaacaatgctctctgacatgctgttcaaggaatcatctcccttgagtatcgtgtctgggagtccaaatatcatggacctagttaagtgtgatggcgctgctcttttgtatggggacaaagtatggcggcttcaaacggctccaaccgagtctcagattcgtgatattgccttctggctttcagaagttcatggggattccactggcttgagtactgatagcctccaggatgctggatatccaggagctgcttcccttggtgacatgatttgtggaatggcagtggccaagatcacgtccaaggacattcttttctggttcaggtcacatacagctgctgaaatcaaatggggaggtgcaaagcatgatccatctgataaggatgacaacagaaggatgcaccctaggttatcctttaaggctttccttgaggttgtcaagacgaagagtttgccatggagtgactacgagatggatgctattcactcattgcagcttattcttagaggtacactgaatgatgcctcgaagccagcccaggcatctggtttagataaccagatcggtgatctaaaacttgatgggcttgctgaattgcaagcagtgacaagtgaaatggtccgcctgatggaaacagcaactgttccgatcttggcagtagatggcaatggattggtcaatggatggaaccaaaaggtagcggagttgtcaggtctgagagttgatgaggctataggaagacacatacttacacttgtggaggattcttctgtatcacttgttcagaggatgctatatttagctctgcaaggcagagaagagaaggaagttcgatttgagctgaaaacacatggctccaagagggatgatggccctgttatcttggtcgtaaatgcttgtgccagtcgtgatcttcatgaccatgttgttggggtgtgctttgtagcccaggacatgactgttcacaagttggtcatggacaaatttactcgggtcgagggggactacaaggcaatcatccacaacccgaacccactcattcctcctatatttggtgctgaccagtttggatggtgctctgagtggaatgcagccatgaccaagcttaccgggtggcacagagatgaagtggttgataagatgctccttggcgaggtttttaacagcagcaatgcttcctgccttctgaagagcaaagatgcctttgtacgtctttgcattgtcatcaacagtgcattagctggtgaagaggcagaaaaggcttcattcggcttctttgaccgcaatgagaaatatgtcgaatgccttctgtcggtgaacaggaaagtaaatgcagatggtgttgtcactggagtgttctgtttcatccatgttcctagtgatgacctgcagcatgcgctacatgtgcagcaagcctctgagcagacagcacaaagaaagttgaaggctttctcgtacatgcgacatgccatcaacaaacctctctcaggtatgctttattctagggaaacactcaagagcacaggtctgaatgaagagcagatgaggcaggttcgcgtcggagacaattgccatcgccagctaaacaagatacttgccgacttggatcaagataacatcactgacaagtcaagctgcttggatttggatatggctgaatttgtgttgcaagatgtggtggtgtctgctgtaagtcaagtgctgataggttgccaggctaaaggtatcagagttgcttgcaacctgccagagagatccatgaagcaaaaggtttacggggatggtatccgactccagcagatcgtctccgacttcctatttgtttcggtgaagttctctcctgctggtggctctgttgacatctcttccaagctgactaagaacagcattggggaaaaccttcacctcatagacttcgaacttaggatcaagcaccgaggagcaggagtcccagcggaaatattgtcgcaaatgtatgaggaggacaataaagagcagtcagaggagggcttcagccttgctgtttctagaaaccttctgaggctcatgaatggtgacattcgtcacctcagggaagctggcatgtcaaccttcattctcactgctgaacttgctgctgctccttcagcagttggacgatga

SEQ ID NO: 43 - DNA, 3396 bp, Zea mays
atgtcttcctcgaggcctgcccactcttcaagttcatccagcaggactcgccagagctcccgggcaaggatattagcacaaacaacccttgatgctgaactcaatgcagagtacgaagaatctggtgattcctttgattactccaagttggttgaagcacagcggagcactccacctgagcagcaagggcgatcgggaaaggtcatagcctacttgcagcatattcaaagaggaaagcttatccaaccatttggttgcctgttggcccttgacgagaagagcttcagggtcattgcattcagtgagaatgcacctgaaatgcttacaacggtcagccatgctgtgccaaacgttgatgatcccccgaagctaggaattggtaccaatgtgcgctcccttttcactgaccctggtgctacagcactgcagaaggcacttggatttgctgatgtttctttgctgaatcctatcctggttcagtgcaagacctcaggcaagccattctatgccattgttcacagggcaactggttgtctggtggtagattttgagcctgtgaagcctacagaatttcctgccactgctgctggggctttgcagtcctacaagcttgctgccaaggcaatctccaagatccagtcactactaggtggaagcatggaggccttatgcaataccgtggttaaggaagtctttgacctgacaggttatgacagggttatggcttacaagttccatgaagatgagcatggggaggtctttgctgagatcaccaaacctggtattgagccctatataggcctgcactatccagccactgatatccctcaagctgccaggtttctcttcatgaagaacaaagtcagaatgatctgtgattgccgtgcaagatccgtgaagattattgaagatgaggcactctccattgatattagcttgtgtggttcaactcttagagcaccacatagctgtcaccttaagtatatggagaacatgaactcgattgcatctcttgtcatggctgttgtggtcaatgaaaatgaagaggatgatgaacccgagcctgaacaaccaccacaacagcagaagaagaagaggctgtggggtctcattgtttgccaccatgagagccccagatatgtcccgttcccactgcggtatgcctgtgaagccttggcccaagtgtttgctgtccatgtaaacaaggagtttgaattggagaagcagatacgagagaaaaacattctgcgaatgcaaacaatgctctctgacatgctgttcaaggaatcatctcccttgagtatcgtgtctgggagtccaaatatcatggacctagttaagtgtgatggcgctgctcttttgtatggggacaaagtatggcggcttcaaacggctccaaccgagtctcagattcgtgatattgccttctggctttcagaagttcatggggattccactggcttgagtactgatagcctccaggatgctggatatccaggagctgcttcccttggtgacatgatttgtggaatggcagtggccaagatcacgtccaaggacattcttttctggttcaggtcacatacagctgctgaaatcaaatggggaggtgcaaagcatgatccatctgataaggatgacaacagaaggatgcaccctaggttatcctttaaggctttccttgaggttgtcaagacgaagagtttgccatggagtgactacgagatggatgctattcactcattgcagcttattcttagaggtacactgaatgatgcctcgaagccagcccaggcatctggtttagataaccagatcggtgatctaaaacttgatgggcttgctgaattgcaagcagtgacaagtgaaatggtccgcctgatggaaacagcaactgttccgatcttggcagtagatggcaatggattggtcaatggatggaaccaaaaggtagcggagttgtcaggtctgagagttgatgaggctataggaagacacatacttacacttgtggaggattcttctgtatcacttgttcagaggatgctatatttagctctgcaaggcagagaagagaaggaagttcgatttgagctgaaaacacatggctccaagagggatgatggccctgttatcttggtcgtaaatgcttgtgccagtcgtgatcttcatgaccatgttgttggggtgtgctttgtagcccaggacatgactgttcacaagttggtcatggacaaatttactcgggtcgagggggactacaaggcaatcatccacaacccgaacccactcattcctcctatatttggtgctgaccagtttggatggtgctctgagtggaatgcagccatgaccaagcttaccgggtggcacagagatgaagtggttgataagatgctccttggcgaggtttttaacagcagcaatgcttcctgccttctgaagagcaaagatgcctttgtacgtctttgcattgtcatcaacagtgcattagctggtgaagaggcagaaaaggcttcattcggcttctttgaccgcaatgagaaatatgtcgaatgccttctgtcggtgaacaggaaagtaaatgcagatggtgttgtcactggagtgttctgtttcatccatgttcctagtgatgacctgcagcatgcgctacatgtgcagcaagcctctgagcagacagcacaaagaaagttgaaggctttctcgtacatgcgacatgccatcaacaaacctctctcaggtatgctttattctagggaaacactcaagagcacaggtctgaatgaagagcagatgaggcaggttcgcgtcggagacaattgccatcgccagctaaacaagatacttgccgacttggatcaagataacatcactgacaagtcaagctgcttggatttggatatggctgaatttgtgttgcaagatgtggtggtgtctgctgtaagtcaagtgctgataggttgccaggctaaaggtatcagagttgcttgcaacctgccagagagatccatgaagcaaaaggtttacggggatggtatccgactccagcagatcgtctccgacttcctatttgtttcggtgaagttctctcctgctggtggctctgttgacatctcttccaagctgactaagaacagcattggggaaaaccttcacctcatagacttcgaacttaggatcaagcaccgaggagcaggagtcccagcggaaatattgtcgcaaatgtatgaggaggacaataaagagcagtcagaggagggcttcagccttgctgtttctagaaaccttctgaggctcatgaatggtgacattcgtcacctcagggaagctggcatgtcaaccttcattctcactgctgaacttgctgctgctccttcagcagttggacgatga

SEQ ID NO: 44 - DNA, 3473 bp, Zea mays
atggcgtcgggcagccgcgccacgcccacgcgctccccctcctccgcgcggcccgaggcgccgcgtcacgcgcaccaccaccaccactcccagtcgtcgggcgggagcacgtcccgcgcgggcgggggagccgcggccacggagtcggtctccaaggccgtcgcccagtacaccctagacgcgcgcctacacgcggtgttcgagcaatcgggcgcgtcgggccgcagcttcgactactcccaatcgctgcgcgcgccgcccacgccgtcctccgagcagcagatcgccgcctacctctcccgcatccagcgcggcggccacatccagcccttcggctgcacgctcgctgttgccgacgactcctccttccgcctcctcgccttctccgagaactcccccgacctgctcgacctgtcgcctcaccactccgttccctcgctggactcctctgcgccgccccacgtttccctgggtgccgacgcgcgcctcctcttctccccctcgtccgcggtcctcctagagcgcgccttcgccgcgcgcgagatctcgctgctcaacccgatatggatccactccagggtctcctccaagccgttctacgccatcctccaccgcatcgacgtcggcgtcgtcatcgacctcgagcccgcccgcaccgaggaccccgctctctccatcgccggtgcagtccagtcccagaaactggcggtccgcaccatctcccgcctccaggcgctacccggcggggacgtcaagcttctctgcgacacagtcgtggagcatgttcgcgagctcacgggttatgaccgtgtcatggtgtacaggttccatgaagacgagcacggggaagttgtcgccgagagccggcgcgacaaccttgagccttacctcggattgcattatcccgccacagatatcccccaggcgtcgcgcttcctgttccggcagaaccgcgtgcgaatgattgccgattgccatgccaccccggtgagagttattcaagatcctgggctgtcgaggcctctgtgtttggtaggctccacgctacgcgctccacacgggtgtcatgcacagtacatggcgaacatggggtcaattgcgtcgcttgttatggcagtcatcattagcagtggcggtgacgatgagcaaacaggtcggggtggcatctcctcggcaatgaagttgtgggggttagtggtgtgccaccatacatcaccacggtgtatcccttttccattgagggctgcttgcgaggctctcatgcaggtatttgggttgcagctcaacatggagttgcagcttgcgcaccagctgtcagagaagcacattctgcgaactcagacgctattgtgtgacatgctactacgagattcaccaactggcatcgtcacgcagagccccagcatcatggaccttgtgaagtgcgacggggctgcactgtattatcatgggaaatactatccattgggtgtcactcccactgagtctcagattaaggatatcatcgagtggttgacggtgtttcatggggactcaacagggctcagcacagatagcctggctgatgcaggctaccttggtgctgctgcactaggggaggctgtgtgtggaatggcggtggcttatattacaccgagtgattacttgttttggtttcggtcacacacagctaaagagatcaaatggggtggcgcaaagcatcaccctgaggataaggatgatggtcagaggatgcacccacggtcgtcattcaaggcatttcttgaagtggttaaaagcagaagcctaccatgggagaatgcagaaatggacgcaatacattccttgcagctcatattgcgtgactccttcagggatgctgcagagggcaccaacaactcaaaagccattgtcaatggacaagttcagcttcgggagctagaattgcgggggataaatgagcttagttccgtagcaagagagatggttcggttgatagagacagcaacagtacccatatttgcagtagatactgatgggtgtataaatggttggaatgcaaagattgctgagttgacagggctttcagttgaggaggcaatgggcaaatctctggtaaatgatcttatcttcaaggaatctgaggcgacagttgaaaaactactctcacgagctttaagaggtgaggaagacaaaaatgtggagataaagctgaagacatttgggtcagagcaatctaagggaccaatatttgttgttgtcaatgcttgttctagtagagattacacacaaaatattgttggtgtctgttttgttggacaagatgtcacaggacaaaaggtggtcatggataaatttgttaacatacaaggggactacaaagctattgtacacaatcctaatcctctgataccaccaatttttgcatcagatgagaacacttcttgttcagaatggaatacagccatggaaaaacttacaggatggtcgagaggtgaagttgttggtaagtttcttattggagaggtgtttggaaattgttgtcgactcaagggcccagatgcattgacaaaattcatggttattattcacaacgctataggagggcaggattatgagaagttccctttttcattttttgacaagaatggaaagtatgtgcaggccttattgaccgccaatacaaggagcaaaatggatggtaaatccattggagccttttgtttcctgcagattgcaagcgctgaaatacagcaagccattgagattcagagacaacaagaaaagaagtgttacgcaaggatgaaagaattggcctatatttgccaggagataaagaatcctcttagtggcatccgatttaccaactctctgttgcagatgactgatttaaatgatgaccagaggcagttccttgaaactagctctgcttgtgagaaacagatgtccaagattgttaaggacgccagtctccaaagtatcgaggacggctctttggtgcttgagcaaagtgagttttctcttggagacgttatgaatgctgttgtcagccaagcaatgttattgttgagagagagggatttacaacttattcgggacatccctgatgaaatcaaggatgcgtcagcgtatggtgatcaatgtagaattcaacaagttttggctgacttcttgctaagcatggtgcggtctgctccatccgagaatggttgggtagaaatacaagtcagaccaaatgtaaaacagaattctgatggaacaaatacagaacttttcatattcaggtttgcctgccctggtgagggcctccctgctgacgtcgtccaggatatgttcagcaattcccaatggtcaacacaagaaggcgtaggactaagcacatgcaggaagatcctcaaattgatgggtggcgaggtccaatacatcagagagtcagagcggagtttcttcctcatcgtcctcgagcagccccaacctcgtccagcagctggtag

SEQ ID NO: 45 - DNA, 3473 bp, Zea mays
atggcgtcgggcagccgcgccacgcccacgcgctccccctcctccgcgcggcccgaggcgccgcgtcacgcgcaccaccaccaccactcccagtcgtcgggcgggagcacgtcccgcgcgggcgggggagccgcggccacggagtcggtctccaaggccgtcgcccagtacaccctagacgcgcgcctacacgcggtgttcgagcaatcgggcgcgtcgggccgcagcttcgactactcccaatcgctgcgcgcgccgcccacgccgtcctccgagcagcagatcgccgcctacctctcccgcatccagcgcggcggccacatccagcccttcggctgcacgctcgctgttgccgacgactcctccttccgcctcctcgccttctccgagaactcccccgacctgctcgacctgtcgcctcaccactccgttccctcgctggactcctctgcgccgccccacgtttccctgggtgccgacgcgcgcctcctcttctccccctcgtccgcggtcctcctagagcgcgccttcgccgcgcgcgagatctcgctgctcaacccgatatggatccactccagggtctcctccaagccgttctacgccatcctccaccgcatcgacgtcggcgtcgtcatcgacctcgagcccgcccgcaccgaggaccccgctctctccatcgccggtgcagtccagtcccagaaactggcggtccgcaccatctcccgcctccaggcgctacccggcggggacgtcaagcttctctgcgacacagtcgtggagcatgttcgcgagctcacgggttatgaccgtgtcatggtgtacaggttccatgaagacgagcacggggaagttgtcgccgagagccggcgcgacaaccttgagccttacctcggattgcattatcccgccacagatatcccccaggcgtcgcgcttcctgttccggcagaaccgcgtgcgaatgattgccgattgccatgccaccccggtgagagttattcaagatcctgggctgtcgaggcctctgtgtttggtaggctccacgctacgcgctccacacgggtgtcatgcacagtacatggcgaacatggggtcaattgcgtcgcttgttatggcagtcatcattagcagtggcggtgacgatgagcaaacaggtcggggtggcatctcctcggcaatgaagttgtgggggttagtggtggcccaccatacatcaccacggtgtatcccttttccattgaggtatgcttgcgagtttctcatgcaggtatttgggttgcagctcaacatggagttgcagcttgcgcaccagctgtcagagaagcacattctgcgaactcagacgctattgtgtgacatgctactacgagattcaccaactggcatcgtcacgcagagccccagcatcatggaccttgtgaagtgcgacggggctgcactgtattatcatgggaaatactatccattgggtgtcactcccactgagtctcagattaaggatatcatcgagtggttgacggtgtttcatggggactcaacagggctcagcacagatagcctggctgatgcaggctaccttggtgctgctgcactaggggaggctgtgtgtggaatggcggtggcttatattacaccgagtgattacttgttttggtttcggtcacacacagctaaagagatcaaatggggtggcgcaaagcatcaccctgaggataaggatgatggtcagaggatgcacccacggtcgtcattcaaggcatttcttgaagtggttaaaagcagaagcctaccatgggagaatgcagaaatggacgcaatacattccttgcagctcatattgcgtgactccttcagggatgctgcagagggcaccaacaactcaaaagccattgtcaatggacaagttcagcttcgggagctagaattgcgggggataaatgagcttagttccgtagcaagagagatggttcggttgatagagacagcaacagtacccatatttgcagtagatactgatgggtgtataaatggttggaatgcaaagattgctgagttgacagggctttcagttgaggaggcaatgggcaaatctctggtaaatgatcttatcttcaaggaatctgaggcgacagttgaaaaactactctcacgagctttaagaggtgaggaagacaaaaatgtggagataaagctgaagacatttgggtcagagcaatctaagggaccaatatttgttgttgtcaatgcttgttctagtagagattacacacaaaatattgttggtgtctgttttgttggacaagatgtcacaggacaaaaggtggtcatggataaatttgttaacatacaaggggactacaaagctattgtacacaatcctaatcctctgataccaccaatttttgcatcagatgagaacacttcttgttcagaatggaatacagccatggaaaaacttacaggatggtcgagaggtgaagttgttggtaagtttcttattggagaggtgtttggaaattgttgtcgactcaagggcccagatgcattgacaaaattcatggttattattcacaacgctataggagggcaggattatgagaagttccctttttcattttttgacaagaatggaaagtatgtgcaggccttattgaccgccaatacaaggagcaaaatggatggtaaatccattggagccttttgtttcctgcagattgcaagcgctgaaatacagcaagccattgagattcagagacaacaagaaaagaagtgttacgcaaggatgaaagaattggcctatatttgccaggagataaagaatcctcttagtggcatccgatttaccaactctctgttgcagatgactgatttaaatgatgaccagaggcagttccttgaaactagctctgcttgtgagaaacagatgtccaagattgttaaggacgccagtctccaaagtatcgaggacggctctttggtgcttgagcaaagtgagttttctcttggagacgttatgaatgctgttgtcagccaagcaatgttattgttgagagagagggatttacaacttattcgggacatccctgatgaaatcaaggatgcgtcagcgtatggtgatcaatgtagaattcaacaagttttggctgacttcttgctaagcatggtgcggtctgctccatccgagaatggttgggtagaaatacaagtcagaccaaatgtaaaacagaattctgatggaacaaatacagaacttttcatattcaggtttgcctgccctggtgagggcctccctgctgacgtcgtccaggatatgttcagcaattcccaatggtcaacacaagaaggcgtaggactaagcacatgcaggaagatcctcaaattgatgggtggcgaggtccaatacatcagagagtcagagcggagtttcttcctcatcgtcctcgagcagccccaacctcgtccagcagctggtag

SEQ ID NO: 46 - DNA, 3473 bp, Zea mays
atggcgtcgggcagccgcgccacgcccacgcgctccccctcctccgcgcggcccgaggcgccgcgtcacgcgcaccaccaccaccactcccagtcgtcgggcgggagcacgtcccgcgcgggcgggggagccgcggccacggagtcggtctccaaggccgtcgcccagtacaccctagacgcgcgcctacacgcggtgttcgagcaatcgggcgcgtcgggccgcagcttcgactactcccaatcgctgcgcgcgccgcccacgccgtcctccgagcagcagatcgccgcctacctctcccgcatccagcgcggcggccacatccagcccttcggctgcacgctcgctgttgccgacgactcctccttccgcctcctcgccttctccgagaactcccccgacctgctcgacctgtcgcctcaccactccgttccctcgctggactcctctgcgccgccccacgtttccctgggtgccgacgcgcgcctcctcttctccccctcgtccgcggtcctcctagagcgcgccttcgccgcgcgcgagatctcgctgctcaacccgatatggatccactccagggtctcctccaagccgttctacgccatcctccaccgcatcgacgtcggcgtcgtcatcgacctcgagcccgcccgcaccgaggaccccgctctctccatcgccggtgcagtccagtcccagaaactggcggtccgcaccatctcccgcctccaggcgctacccggcggggacgtcaagcttctctgcgacacagtcgtggagcatgttcgcgagctcacgggttatgaccgtgtcatggtgtacaggttccatgaagacgagcacggggaagttgtcgccgagagccggcgcgacaaccttgagccttacctcggattgcattatcccgccacagatatcccccaggcgtcgcgcttcctgttccggcagaaccgcgtgcgaatgattgccgattgccatgccaccccggtgagagttattcaagatcctgggctgtcgcagcctctgtgtttggtaggctccacgctacgcgctccacacgggtgtcatgcacagtacatggcgaacatggggtcaattgcgtcgcttgttatggcagtcatcattagcagtggcggtgacgatgagcaaacaggtcggggtggcatctcctcggcaatgaagttgtgggggttagtggtgtgccaccatacatcaccacggtgtatcccttttccattgaggtatgcttgcgaggctctcatgcaggtatttgggttgcagctcaacatggagttgcagcttgcgcaccagctgtcagagaagcacattctgcgaactcagacgctattgtgtgacatgctactacgagattcaccaactggcatcgtcacgcagagccccagcatcatggaccttgtgaagtgcgacggggctgcactgtattatcatgggaaatactatccattgggtgtcactcccactgagtctcagattaaggatatcatcgagtggttgacggtgtttcatggggactcaacagggctcagcacagatagcctggctgatgcaggctaccttggtgctgctgcactaggggaggctgtgtgtggaatggcggtggcttatattacaccgagtgattacttgttttggtttcggtcacacacagctaaagagatcaaatggggtggcgcaaagcatcaccctgaggataaggatgatggtcagaggatgcacccacggtcgtcattcaaggcatttcttgaagtggttaaaagcagaagcctaccatgggagaatgcagaaatggacgcaatacattccttgcagctcatattgcgtgactccttcagggatgctgcagagggcaccaacaactcaaaagccattgtcaatggacaagttcagcttcgggagctagaattgcgggggataaatgagcttagttccgtagcaagagagatggttcggttgatagagacagcaacagtacccatatttgcagtagatactgatgggtgtataaatggttggaatgcaaagattgctgagttgacagggctttcagttgaggaggcaatgggcaaatctctggtaaatgatcttatcttcaaggaatctgaggcgacagttgaaaaactactctcacgagctttaagaggtgaggaagacaaaaatgtggagataaagctgaagacatttgggtcagagcaatctaagggaccaatatttgttgttgtcaatgcttgttctagtagagattacacacaaaatattgttggtgtctgttttgttggacaagatgtcacaggacaaaaggtggtcatggataaatttgttaacatacaaggggactacaaagctattgtacacaatcctaatcctctgataccaccaatttttgcatcagatgagaacacttcttgttcagaatggaatacagccatggaaaaacttacaggatggtcgagaggtgaagttgttggtaagtttcttattggagaggtgtttggaaattgttgtcgactcaagggcccagatgcattgacaaaattcatggttattattcacaacgctataggagggcaggattatgagaagttccctttttcattttttgacaagaatggaaagtatgtgcaggccttattgaccgccaatacaaggagcaaaatggatggtaaatccattggagccttttgtttcctgcagattgcaagcgctgaaatacagcaagccattgagattcagagacaacaagaaaagaagtgttacgcaaggatgaaagaattggcctatatttgccaggagataaagaatcctcttagtggcatccgatttaccaactctctgttgcagatgactgatttaaatgatgaccagaggcagttccttgaaactagctctgcttgtgagaaacagatgtccaagattgttaaggacgccagtctccaaagtatcgaggacggctctttggtgcttgagcaaagtgagttttctcttggagacgttatgaatgctgttgtcagccaagcaatgttattgttgagagagagggatttacaacttattcgggacatccctgatgaaatcaaggatgcgtcagcgtatggtgatcaatgtagaattcaacaagttttggctgacttcttgctaagcatggtgcggtctgctccatccgagaatggttgggtagaaatacaagtcagaccaaatgtaaaacagaattctgatggaacaaatacagaacttttcatattcaggtttgcctgccctggtgagggcctccctgctgacgtcgtccaggatatgttcagcaattcccaatggtcaacacaagaaggcgtaggactaagcacatgcaggaagatcctcaaattgatgggtggcgaggtccaatacatcagagagtcagagcggagtttcttcctcatcgtcctcgagcagccccaacctcgtccagcagctggtag

SEQ ID NO: 47 - DNA, 3396 bp, Zea mays
atgtcttcctcgaggcctgcccactcttcaagttcatccagcaggactcgccagagctcccgggcaaggatattagcacaaacaacccttgatgctgaactcaatgcagagtacgaagaatctggtgattcctttgattactccaagttggttgaagcacagcggagcactccacctgagcagcaagggcgatcgggaaaggtcatagcctacttgcagcatattcaaagaggaaagcttatccaaccatttggttgcctgttggcccttgacgagaagagcttcagggtcattgcattcagtgagaatgcacctgaaatgcttacaacggtcagccatgctgtgccaaacgttgatgatcccccgaagctaggaattggtaccaatgtgcgctcccttttcactgaccctggtgctacagcactgcagaaggcacttggatttgctgatgtttctttgctgaatcctatcctggttcagtgcaagacctcaggcaagccattctatgccattgttcacagggcaactggttgtctggtggtagattttgagcctgtgaagcctacagaatttcctgccactgctgctggggctttgcagtcctacaagcttgctgccaaggcaatctccaagatccagtcactactaggtggaagcatggaggccttatgcaataccgtggttaaggaagtctttgacctgacaggttatgacagggttatggctcacaagttccatgaagatgagcatggggaggtctttgctgagatcaccaaacctggtattgagccctatataggcctgcactatccagccactgatatccctcaagctgccaggtttctcttcatgaagaacaaagtcagaatgatctgtgattgccgtgcaagatccgtgaagattattgaagatgaggcactctccattgatattagcttgtgtggttcaactcttagagcaccacatagctgtcaccttaagtatatggagaacatgaactcgattgcatctcttgtcatggctgttgtggtcaatgaaaatgaagaggatgatgaacccgagcctgaacaaccaccacaacagcagaagaagaagaggctgtggggtctcattgttgcccaccatgagagccccagatatgtcccgttcccactgcggtatgcctgtgaattcttggcccaagtgtttgctgtccatgtaaacaaggagtttgaattggagaagcagatacgagagaaaaacattctgcgaatgcaaacaatgctctctgacatgctgttcaaggaatcatctcccttgagtatcgtgtctgggagtccaaatatcatggacctagttaagtgtgatggcgctgctcttttgtatggggacaaagtatggcggcttcaaacggctccaaccgagtctcagattcgtgatattgccttctggctttcagaagttcatggggattccactggcttgagtactgatagcctccaggatgctggatatccaggagctgcttcccttggtgacatgatttgtggaatggcagtggccaagatcacgtccaaggacattcttttctggttcaggtcacatacagctgctgaaatcaaatggggaggtgcaaagcatgatccatctgataaggatgacaacagaaggatgcaccctaggttatcctttaaggctttccttgaggttgtcaagacgaagagtttgccatggagtgactacgagatggatgctattcactcattgcagcttattcttagaggtacactgaatgatgcctcgaagccagcccaggcatctggtttagataaccagatcggtgatctaaaacttgatgggcttgctgaattgcaagcagtgacaagtgaaatggtccgcctgatggaaacagcaactgttccgatcttggcagtagatggcaatggattggtcaatggatggaaccaaaaggtagcggagttgtcaggtctgagagttgatgaggctataggaagacacatacttacacttgtggaggattcttctgtatcacttgttcagaggatgctatatttagctctgcaaggcagagaagagaaggaagttcgatttgagctgaaaacacatggctccaagagggatgatggccctgttatcttggtcgtaaatgcttgtgccagtcgtgatcttcatgaccatgttgttggggtgtgctttgtagcccaggacatgactgttcacaagttggtcatggacaaatttactcgggtcgagggggactacaaggcaatcatccacaacccgaacccactcattcctcctatatttggtgctgaccagtttggatggtgctctgagtggaatgcagccatgaccaagcttaccgggtggcacagagatgaagtggttgataagatgctccttggcgaggtttttaacagcagcaatgcttcctgccttctgaagagcaaagatgcctttgtacgtctttgcattgtcatcaacagtgcattagctggtgaagaggcagaaaaggcttcattcggcttctttgaccgcaatgagaaatatgtcgaatgccttctgtcggtgaacaggaaagtaaatgcagatggtgttgtcactggagtgttctgtttcatccatgttcctagtgatgacctgcagcatgcgctacatgtgcagcaagcctctgagcagacagcacaaagaaagttgaaggctttctcgtacatgcgacatgccatcaacaaacctctctcaggtatgctttattctagggaaacactcaagagcacaggtctgaatgaagagcagatgaggcaggttcgcgtcggagacaattgccatcgccagctaaacaagatacttgccgacttggatcaagataacatcactgacaagtcaagctgcttggatttggatatggctgaatttgtgttgcaagatgtggtggtgtctgctgtaagtcaagtgctgataggttgccaggctaaaggtatcagagttgcttgcaacctgccagagagatccatgaagcaaaaggtttacggggatggtatccgactccagcagatcgtctccgacttcctatttgtttcggtgaagttctctcctgctggtggctctgttgacatctcttccaagctgactaagaacagcattggggaaaaccttcacctcatagacttcgaacttaggatcaagcaccgaggagcaggagtcccagcggaaatattgtcgcaaatgtatgaggaggacaataaagagcagtcagaggagggcttcagccttgctgtttctagaaaccttctgaggctcatgaatggtgacattcgtcacctcagggaagctggcatgtcaaccttcattctcactgctgaacttgctgctgctccttcagcagttggacgatga

SEQ ID NO: 48 - DNA, 3473 bp, Zea mays
atggcgtcgggcagccgcgccacgcccacgcgctccccctcctccgcgcggcccgaggcgccgcgtcacgcgcaccaccaccaccactcccagtcgtcgggcgggagcacgtcccgcgcgggcgggggagccgcggccacggagtcggtctccaaggccgtcgcccagtacaccctagacgcgcgcctacacgcggtgttcgagcaatcgggcgcgtcgggccgcagcttcgactactcccaatcgctgcgcgcgccgcccacgccgtcctccgagcagcagatcgccgcctacctctcccgcatccagcgcggcggccacatccagcccttcggctgcacgctcgctgttgccgacgactcctccttccgcctcctcgccttctccgagaactcccccgacctgctcgacctgtcgcctcaccactccgttccctcgctggactcctctgcgccgccccacgtttccctgggtgccgacgcgcgcctcctcttctccccctcgtccgcggtcctcctagagcgcgccttcgccgcgcgcgagatctcgctgctcaacccgatatggatccactccagggtctcctccaagccgttctacgccatcctccaccgcatcgacgtcggcgtcgtcatcgacctcgagcccgcccgcaccgaggaccccgctctctccatcgccggtgcagtccagtcccagaaactggcggtccgcaccatctcccgcctccaggcgctacccggcggggacgtcaagcttctctgcgacacagtcgtggagcatgttcgcgagctcacgggttatgaccgtgtcatggtgcacaggttccatgaagacgagcacggggaagttgtcgccgagagccggcgcgacaaccttgagccttacctcggattgcattatcccgccacagatatcccccaggcgtcgcgcttcctgttccggcagaaccgcgtgcgaatgattgccgattgccatgccaccccggtgagagttattcaagatcctgggctgtcgcagcctctgtgtttggtaggctccacgctacgcgctccacacgggtgtcatgcacagtacatggcgaacatggggtcaattgcgtcgcttgttatggcagtcatcattagcagtggcggtgacgatgagcaaacaggtcggggtggcatctcctcggcaatgaagttgtgggggttagtggtgtgccaccatacatcaccacggtgtatcccttttccattgaggtatgcttgcgagtttctcatgcaggtatttgggttgcagctcaacatggagttgcagcttgcgcaccagctgtcagagaagcacattctgcgaactcagacgctattgtgtgacatgctactacgagattcaccaactggcatcgtcacgcagagccccagcatcatggaccttgtgaagtgcgacggggctgcactgtattatcatgggaaatactatccattgggtgtcactcccactgagtctcagattaaggatatcatcgagtggttgacggtgtttcatggggactcaacagggctcagcacagatagcctggctgatgcaggctaccttggtgctgctgcactaggggaggctgtgtgtggaatggcggtggcttatattacaccgagtgattacttgttttggtttcggtcacacacagctaaagagatcaaatggggtggcgcaaagcatcaccctgaggataaggatgatggtcagaggatgcacccacggtcgtcattcaaggcatttcttgaagtggttaaaagcagaagcctaccatgggagaatgcagaaatggacgcaatacattccttgcagctcatattgcgtgactccttcagggatgctgcagagggcaccaacaactcaaaagccattgtcaatggacaagttcagcttcgggagctagaattgcgggggataaatgagcttagttccgtagcaagagagatggttcggttgatagagacagcaacagtacccatatttgcagtagatactgatgggtgtataaatggttggaatgcaaagattgctgagttgacagggctttcagttgaggaggcaatgggcaaatctctggtaaatgatcttatcttcaaggaatctgaggcgacagttgaaaaactactctcacgagctttaagaggtgaggaagacaaaaatgtggagataaagctgaagacatttgggtcagagcaatctaagggaccaatatttgttgttgtcaatgcttgttctagtagagattacacacaaaatattgttggtgtctgttttgttggacaagatgtcacaggacaaaaggtggtcatggataaatttgttaacatacaaggggactacaaagctattgtacacaatcctaatcctctgataccaccaatttttgcatcagatgagaacacttcttgttcagaatggaatacagccatggaaaaacttacaggatggtcgagaggtgaagttgttggtaagtttcttattggagaggtgtttggaaattgttgtcgactcaagggcccagatgcattgacaaaattcatggttattattcacaacgctataggagggcaggattatgagaagttccctttttcattttttgacaagaatggaaagtatgtgcaggccttattgaccgccaatacaaggagcaaaatggatggtaaatccattggagccttttgtttcctgcagattgcaagcgctgaaatacagcaagccattgagattcagagacaacaagaaaagaagtgttacgcaaggatgaaagaattggcctatatttgccaggagataaagaatcctcttagtggcatccgatttaccaactctctgttgcagatgactgatttaaatgatgaccagaggcagttccttgaaactagctctgcttgtgagaaacagatgtccaagattgttaaggacgccagtctccaaagtatcgaggacggctctttggtgcttgagcaaagtgagttttctcttggagacgttatgaatgctgttgtcagccaagcaatgttattgttgagagagagggatttacaacttattcgggacatccctgatgaaatcaaggatgcgtcagcgtatggtgatcaatgtagaattcaacaagttttggctgacttcttgctaagcatggtgcggtctgctccatccgagaatggttgggtagaaatacaagtcagaccaaatgtaaaacagaattctgatggaacaaatacagaacttttcatattcaggtttgcctgccctggtgagggcctccctgctgacgtcgtccaggatatgttcagcaattcccaatggtcaacacaagaaggcgtaggactaagcacatgcaggaagatcctcaaattgatgggtggcgaggtccaatacatcagagagtcagagcggagtttcttcctcatcgtcctcgagcagccccaacctcgtccagcagctggtag

SEQ ID NO: 49 - DNA, 3486 bp, Zea mays
atggcgtcgggcagccgcgccacgcccacgcgctccccctcctccgcgcggcccgaggcgccgcgtcacgcgcaccaccaccaccactcccagtcgtcgggcgggagcacgtcccgcgcgggcgggggagccgcggccacggagtcggtctccaaggccgtcgcccagtacaccctagacgcgcgcctacacgcggtgttcgagcaatcgggcgcgtcgggccgcagcttcgactactcccaatcgctgcgcgcgccgcccacgccgtcctccgagcagcagatcgccgcctacctctcccgcatccagcgcggcggccacatccagcccttcggctgcacgctcgctgttgccgacgactcctccttccgcctcctcgccttctccgagaactcccccgacctgctcgacctgtcgcctcaccactccgttccctcgctggactcctctgcgccgccccacgtttccctgggtgccgacgcgcgcctcctcttctccccctcgtccgcggtcctcctagagcgcgccttcgccgcgcgcgagatctcgctgctcaacccgatatggatccactccagggtctcctccaagccgttctacgccatcctccaccgcatcgacgtcggcgtcgtcatcgacctcgagcccgcccgcaccgaggaccccgctctctccatcgccggtgcagtccagtcccagaaactggcggtccgcaccatctcccgcctccaggcgctacccggcggggacgtcaagcttctctgcgacacagtcgtggagcatgttcgcgagctcacgggttatgaccgtgtcatggtgtacaggttccatgaagacgagcacggggaagttgtcgccgagagccggcgcgacaaccttgagccttacctcggattgcattatcccgccacagatatcccccaggcgtcgcgcttcctgttccggcagaaccgcgtgcgaatgattgccgattgccatgccaccccggtgagagttattcaagatcctgggctgtcgcagcctctgtgtttggtaggctccacgctacgcgctccacacgggtgtcatgcacagtacatggcgaacatggggtcaattgcgtcgcttgttatggcagtcatcattagcagtggcggtgacgatgagcaaacaggtcggggtggcatctcctcggcaatgaagttgtgggggttagtggtgtgccaccatacatcaccacggtgtatcccttttccattgaggtatgcttgcgagtttctcatgcaggtatttgggttgcagctcaacatggagttgcagcttgcgcaccagctgtcagagaagcacattctgcgaactcagacgctattgtgtgacatgctactacgagattcaccaactggcatcgtcacgcagagccccagcatcatggaccttgtgaagtgcgacggggctgcactgtattatcatgggaaatactatccattgggtgtcactcccactgagtctcagattaaggatatcatcgagtggttgacggtgtttcatggggactcaacagggctcagcacagatagcctggctgatgcaggctaccttggtgctgctgcactaggggaggctgtgtgtggaatggcggtggcttatattacaccgagtgattacttgttttggtttcggtcacacacagctaaagagatcaaatggggtggcgcaaagcatcaccctgaggataaggatgatggtcagaggatgcacccacggtcgtcattcaaggcatttcttgaagtggttaaaagcagaagcctaccatgggagaatgcagaaatggacgcaatacattccttgcagctcatattgcgtgactccttcagggatgctgcagagggcaccaacaactcaaaagccattgtcaatggacaagttcagcttcgggagctagaattgcgggggataaatgagcttagttccgtagcaagagagatggttcggttgatagagacagcaacagtacccatatttgcagtagatactgatgggtgtataaatggttggaatgcaaagattgctgagttgacagggctttcagttgaggaggcaatgggcaaatctctggtaaatgatcttatcttcaaggaatctgaggcgacagttgaaaaactactctcacgagctttaagaggtgaggaagacaaaaatgtggagataaagctgaagacatttgggtcagagcaatctaagggaccaatatttgttgttgtcaatgcttgttctagtagagattacacacaaaatattgttggtgtctgttttgttggacaagatgtcacaggacaaaaggtggtcatggataaatttgttaacatacaaggggactacaaagctattgtacacaatcctaatcctctgataccaccaatttttgcatcagatgagaacacttcttgttcagaatggaatacagccatggaaaaacttacaggatggtcgagaggtgaagttgttggtaagtttcttattggagaggtgtttggaaattgttgtcgactcaagggcccagatgcattgacaaaattcatggttattattcacaacgctataggagggcaggattatgagaagttccctttttcattttttgacaagaatggaaagtatgtgcaggccttattgaccgccaatacaaggagcaaaatggatggtaaatccattggagccttttgtttcctgcagattgcaagcgctgaaatacagcaagccattgagattcagagacaacaagaaaagaagtgttacgcaaggatgaaagaattggcctatatttgccaggagataaagaatcctcttagtggcatccgatttaccaactctctgttgcagatgactgatttaaatgatgaccagaggcagttccttgaaactagctctgcttgtgagaaacagatgtccaagattgttaaggacgccagtctccaaagtatcgaggacggctctttggtgcttgagcaaagtgagttttctcttggagacgttatgaatgctgttgtcagccaagcaatgttattgttgagagagagggatttacaacttattcgggacatccctgatgaaatcaaggatgcgtcagcgtatggtgatcaatgtagaattcaacaagttttggctgacttcttgctaagcatggtgcggtctgctccatccgagaatggttgggtagaaatacaagtcagaccaaatgtaaaacagaattctgatggaacaaatacagaacttttcatattcaggtttgcctgccctggtgagggcctccctgctgacgtcgtccaggatatgttcagcaattcccaatggtcaacacaagaaggcgtaggactaagcacatgcaggaagatcctcaaattgatgggtggcgaggtccaatacatcagagagtcagagcggagtttcttcctcatcgtcctcgagcagccccaacctcgtccagcagctggtagagaaatcgtctag

SEQ ID NO: 50 - DNA, 3396 bp, Zea mays
atgtcttcctcgaggcctgcccactcttcaagttcatccagcaggactcgccagagctcccgggcaaggatattagcacaaacaacccttgatgctgaactcaatgcagagtacgaagaatctggtgattcctttgattactccaagttggttgaagcacagcggagcactccacctgagcagcaagggcgatcgggaaaggtcatagcctacttgcagcatattcaaagaggaaagcttatccaaccatttggttgcctgttggcccttgacgagaagagcttcagggtcattgcattcagtgagaatgcacctgaaatgcttacaacggtcagccatgctgtgccaaacgttgatgatcccccgaagctaggaattggtaccaatgtgcgctcccttttcactgaccctggtgctacagcactgcagaaggcacttggatttgctgatgtttctttgctgaatcctatcctggttcagtgcaagacctcaggcaagccattctatgccattgttcacagggcaactggttgtctggtggtagattttgagcctgtgaagcctacagaatttcctgccactgctgctggggctttgcagtcctacaagcttgctgccaaggcaatctccaagatccagtcactactaggtggaagcatggaggccttatgcaataccgtggttaaggaagtctttgacctgacaggttatgacagggttatggcttacaagttccatgaagatgagcatggggaggtctttgctgagatcaccaaacctggtattgagccctatataggcctgcactatccagccactgatatccctcaagctgccaggtttctcttcatgaagaacaaagtcagaatgatctgtgattgccgtgcaagatccgtgaagattattgaagatgaggcactctccattgatattagcttgtgtggttcaactcttagagcaccacatagctgtcaccttaagtatatggagaacatgaactcgattgcatctcttgtcatggctgttgtggtcaatgaaaatgaagaggatgatgaacccgagcctgaacaaccaccacaacagcagaagaagaagaggctgtggggtctcattgtttgccaccatgagagccccagatatgtcccgttcccactgcggtatgcctgtgaattcttggcccaagtgtttgctgtccatgtaaacaaggagtttgaattggagaagcagatacgagagaaaaacattctgcgaatgcaaacaatgctctctgacatgctgttcaaggaatcatctcccttgagtatcgtgtctgggagtccaaatatcatggacctagttaagtgtgatggcgctgctcttttgtatggggacaaagtatggcggcttcaaacggctccaaccgagtctcagattcgtgatattgccttctggctttcagaagttcatggggattccactggcttgagtactgatagcctccaggatgctggatatccaggagctgcttcccttggtgacatgatttgtggaatggcagtggccaagatcacgtccaaggacattcttttctggttcaggtcacatacagctgctgaaatcaaatggggaggtgcaaagcatgatccatctgataaggatgacaacagaaggatgcaccctaggttatcctttaaggctttccttgaggttgtcaagacgaagagtttgccatggagtgactacgagatggatgctattcactcattgcagcttattcttagaggtacactgaatgatgcctcgaagccagcccaggcatctggtttagataaccagatcggtgatctaaaacttgatgggcttgctgaattgcaagcagtgacaagtgaaatggtccgcctgatggaaacagcaactgttccgatcttggcagtagatggcaatggattggtcaatggatggaaccaaaaggtagcggagttgtcaggtctgagagttgatgaggctataggaagacacatacttacacttgtggaggattcttctgtatcacttgttcagaggatgctatatttagctctgcaaggcagagaagagaaggaagttcgatttgagctgaaaacacatggctccaagagggatgatggccctgttatcttggtcgtaaatgcttgtgccagtcgtgatcttcatgaccatgttgttggggtgtgctttgtagcccaggacatgactgttcacaagttggtcatggacaaatttactcgggtcgagggggactacaaggcaatcatccacaacccgaacccactcattcctcctatatttggtgctgaccagtttggatggtgctctgagtggaatgcagccatgaccaagcttaccgggtggcacagagatgaagtggttgataagatgctccttggcgaggtttttaacagcagcaatgcttcctgccttctgaagagcaaagatgcctttgtacgtctttgcattgtcatcaacagtgcattagctggtgaagaggcagaaaaggcttcattcggcttctttgaccgcaatgagaaatatgtcgaatgccttctgtcggtgaacaggaaagtaaatgcagatggtgttgtcactggagtgttctgtttcatccatgttcctagtgatgacctgcagcatgcgctacatgtgcagcaagcctctgagcagacagcacaaagaaagttgaaggctttctcgtacatgcgacatgccatcaacaaacctctctcaggtatgctttattctagggaaacactcaagagcacaggtctgaatgaagagcagatgaggcaggttcgcgtcggagacaattgccatcgccagctaaacaagatacttgccgacttggatcaagataacatcactgacaagtcaagctgcttggatttggatatggctgaatttgtgttgcaagatgtggtggtgtctgctgtaagtcaagtgctgataggttgccaggctaaaggtatcagagttgcttgcaacctgccagagagatccatgaagcaaaaggtttacggggatggtatccgactccagcagatcgtctccgacttcctatttgtttcggtgaagttctctcctgctggtggctctgttgacatctcttccaagctgactaagaacagcattggggaaaaccttcacctcatagacttcgaacttaggatcaagcaccgaggagcaggagtcccagcggaaatattgtcgcaaatgtatgaggaggacaataaagagcagtcagaggagggcttcagccttgctgtttctagaaaccttctgaggctcatgaatggtgacattcgtcacctcagggaagctggcatgtcaaccttcattctcactgctgaacttgctgctgctccttcagcagttggacgatga

SEQ ID NO: 51 - DNA, 699 bp, Zea mays
atgacggggttcgggtcaccgtgcggagcgtgcaagttcctgcggcgcaggtgcgcgcgcggctgcgtcttcgcgccctacttctgcgacgagcagggcgcggcgcacttcgccgccatccacaaggtgttcggcgccagcaacgcgtccaagctgctcgcgcacctgccgctcgccgaccgcccggaggccgccgccaccatctcctacgaggcgcaggcgaggctgcgcgaccccacctacggctgcgtcgcccacatcttcgcgctccagcagcaggtgatggccctgcagacgcagctggcgtcgctcacggtcacggcgcaggggcagcagcgcgtgcacgacgtcgacgacgccaagggctacgtgggcaccgccgccgcggggcagctagggtgcagcagcaatggaagcgtcgcgccggccacgtacggcaatgtcgggcacgagtccctgaccgcgctgctgaggtcggagtcggactacttgcagcagtcgccgtgccacgcgttcgagcacgccggcgcggacgacaaggacgacgacggccggcaggggaacaccttcgacttcgaggcagcggccgactcctcgtcgttcggggcggaggagagcgggtggaggtcgttgtcagggtaccgagactgcgaggacctgcagagcgtggcttatgcttacctgaaccatctctcttaa

SEQ ID NO: 52 - DNA, 1560 bp, Chlamydomonas reinhardtii
atggctctacaaaatgcttggcaaaacacgaaggagcgtgcccgcgagacctgggcgcaactcacctggtccgaggtgtctggctcgctgggcgacctgggcacgttccttcctttgctgatcggcctggttcagaaggtccatctggacctggggacgacccttactattacaggtctgtacaacatcatcagtgggtggcagttccgcatccccatgtgcgtgcagccgatgaagaccattgccgcggtggcgctggcgggcggagcggccggtctggatctgcctcagctgctgcacgcgggcctgttcgtggcgggctgtgtggggctgttgggtgccagccaggccatcgacctgttcaactggctggtgccgccacccgtcatccgcggcgtgcagctggcggtgggcgtcaagctggccatgaagggtgtagacatggcgttgcggctgcacggcggcccctccagcggctggcggccgtggctgggcactgaggggctggtggtgggggcggtggcgctggcggctatgatcgcgaccaccctgccgccgcgtgccgcccgccgcggcaccctggaagcggccgatgagggcggtctgggcccccgccccactgacaccgccttcgagccgctgctgcgccgcctgcccgcctgttgcggcggcggcgaccgcgccccgcaagtggagggcgccgccgtcagcgcggagcgggcggggctgctggcgcacgcggagggcggcgagcgcagcggcaacctggatgacggcacggaggcgggcgtgggcgctgcggctggaggtggagggtgtggcggaggtggaggcggcggcaggatccccagcgcgctcattgcggtggtggtgggcctagcgatggcggtgctgcaccggccggggctggtgtgggagctgcggctgggtcccacattgccgcgcctgctgcggccctcctggcccgacttcaagaccggcgcgctgcggggcgggctgccgcagctgccgctgaccacgctcaactccgtcatcgccgtgacacagctcgctaacgcgctcttcggcgacaagccggaggcggagcggcggcgctggcggccctctgcggtggcgctgtcagtggcgcttctgaatggcgcgggcgtgtggctgggagccatgccctgttgccacggcgcaggcgggctggcggcccagtacaagttcggcgcgcgcacgggccacgcgcccatcctgctgggctgcatcaaggcagctctggggctgctgtttgggggcagtctggtggttcttctggaggcattcccgcagccgctgctgggcgcgctgctgactgtgtccggcattgagctggcgtccgttgtgcgccacacgcggtctccccgcggctacacctttgcgctgctgacggccgttgccatcctggccctggacaacaccggcaccggcttcctagtggggctggtaggggtggcggctgtagcagcctacgagggcgcagtagcagctgcggccgctcgttggccgcgggtctttgctcgcggtggcagggcgtga

SEQ ID NO: 53 - DNA, 1287 bp, Zea mays
atggggaaccggataggcgggcggcgcaagtcgggggtggaggagcggttcacgcggccgcagggtctctacgaccacaaggacatcgaccagaagaagctgcgcaagctcatcctcgaggccaagctcgcgccctgctacccgggcgccgacgacgccgcgcccggcggaggggacctcgaggagtgccccatctgcttcctgtactacccaagcctcaaccgttcaaagtgttgctcaaaggggatatgtacagagtgttttcttcaaatgaaaccaactcatactgctcgacctacacagtgcccattctgcaaaacgcctaattatgctgtggagtatcgtggtgtgaaaacaaaggaggaaaggagcatagagcagtttgaagaacagaaagtcatagaagcacagttgaggatgcgccaaaaagaactccaagatgaagaagctaaaatgagaagaaaacagggcaggtgttcttctagcagaacggtaacaccaacaacagaagttgagtatcgagatatttgcagcacatccttttcagtgccatcatatcaatgtactgagcaaggaaatgaatgctgttcatctgaaccttcatgctctagccaggctaacaggcggcctttccattctagacacaaccgtgatgataatgttgacatgaatctggagaacatgatggttatggaagcaatttggcgttccattcagcaggaacaaggacatctagtaaatcctgtttgtggcagctactttcctgtaattgagccaccatcacgtgaaaggcaggcatttcttccggctgctcctctagaaatgcctcatccaggtggatactcttgtgttgcggctttggctgagcaccagccaccaagcatggatttctcttacatggctggcagtagcacatacccagtctttgacatgatccgccgaccgtgcaacatgtctagtggaagcttgtgcagcgtcgagaacagttcactagacacctggagcgggatggcaccaaattgcagcagaggagtggtaagagaggagggagagtgctcaaccgaccactggtcggagggtgcggaggcgggaacaagctatgccggatcggacatcatggtggatgcaggggccatgcaaccgctgcctttcgctgagaatttcaccatggctccaagccacttccgcccggagagcatcgaggagcagatgatgttttccatggccgtgtcactagcagaaggtcatcatggtaggacgcaagcgcaaggtctggcatggttgtaa

SEQ ID NO: 54 - DNA, 1668 bp, Zea mays
atgcarcagcggcgcaagtcggtgttcgcgtccgcgccgttcgcgatgaagcaggcggcgctgggagccggcgtggcggcgcgcaagaacggcgcgccgctgtcgctggccgcggtggtgttcgcgctcttcgtcttcgcgacgttcctctacaacgaggacatcaagtccatcaccgacttccagttcagctccggcgccatccgcgccaagtcccccgacctgcacctcctgcaggaggccgaggccgcggcgcacgccgccgtgaacaccctggccaagcgcggggaggaggtgatcgtgcgcgtcctcgaggtcgaggcgccgcccgtcgtcaacactagcagcgtgctggcggccgccgcgaaggccagcgccaaggccaacgcggtggacgtggggcaggagaaggagcgggacgtgacgctcccgacggtgacggggggccgaggcggggccgacgaggcccggcggcgcgctgacgaggaggtcgctgagaaggccgcgtcggcgaaggcggcggcggccaccgccgctctgcgcggcgtggtgagcgtgccgcagacgtgcgacctgtaccggggcagctgggtgtacgacgaggtgagcgcgccggtgtacaaggagggcgagtgcgagttcctgacggagcaggtgacctgcatgcgcaacgggcggcgcgacgactcgtaccagaagtggcggtggcagccggcgggctgcgacctgccgcggttcgacgcgcggctgctgctggagcggctgcggaacaagcggctgatgttcgtgggggactcgctgaaccggaaccagtgggagtcgatggtgtgcctggtgcagtcggtgatccccgacagggggcagaagacgctgacaaagttcgtcaacggcgggtccagcaacgtgttctacgcgcacgagtacaacgcgacggtggagttctactgggcgcccttcctggtggagtccaactccgacaaccccaaggtgcacagcgtccccgaccgggtcatccagtggcacgccatcgccaagcacgcgcgcaactggatcggcgtcgactacctcgtcttcaacacgtacatctggtggctcaacacgctcgacatcaaagtcctgaagcaggggtcgtccttcgatgaccagggctccaccgactacgtggaggtggaccggcccgtggcgtacaaggaggtgctgacgacgtgggcgaaatgggtggaccgcaacatcgaccccaacaggacgaccgtcttcttcatgggcatgtctcccaaccacatcacgcctgaggcttggggcaacaagggcgggatcaagtgcgccatggagacgctgccgatcgcgagcaaccgcagcgcggcgctggacgtgggcacggactggcgcctctacgcgggggcgcgggaggtgctgcccacgctgcgccgggtgcccgtccacttcgtcgacatcaccgcgctgtcggagctgcgcaaggacgcgcacacctcggtgcacacgctgcgccaggggaagctgctcaccccggagcagcaggccgaccccaagacctacgccgactgcatccactggtgcctcccgggcctgcccgacacctggaaccagttcctctacgcccgcatcgcatccagcccatggcccaacgacgcccaggcccagcagtag

SEQ ID NO: 55 - DNA, 966 bp, Trichoderma harzianum
atgccttcattgactgctcttgcgagcttgctcgctcttgttccttctgctctggctggctggaatgtgaactcgaagcaaaatattgctgtatactggggtcagaactctgccaactcgcaaagcacccagcagcgtctctccttctactgcaatgacgccaacatcaacgtcattgacattgctttcttgaacggaattactcctcccatgaccaactttgccaatgccggtgaccgatgcacgcccttttccgacaacccctggctcttgcaatgccctgaaattgaggccgatatcaagacttgccaggccaatggcaagaccatcctcctttctctcggcggcgattcttacactcagggcggctggagctcaacaggcgctgctcaatcggctgctgatcaagtctgggccatgttcggccccgttcaatccggaagctctgtccaccgcccctttggcagtgccgtcgtcgatggcttcgacttcgactttgaagctaccaccaacaacctcgctgcctttggcgcccagctgaagagccgaaccaacgctgccggcggcaagaagtactacttctctgctgctccccagtgcttcttccccgacgcggctgtcggcgccctcatcaacgccgtgcccatggactggatccagattcagttctacaacaacccctgtggcgtcagcggcttcactcccggcaccagcacccagaacaactacaactaccagacctgggagaactgggccaagacgagccccaaccccaatgtcaagcttctcgttggcattcccgctggcccaggtgctggtcgcggctacgtctctggctctcaacttacgtcggtcttccagtactcgaagggatttagcacttttgccggtgccatgatgtgggatatgtcccagctttaccagaacactggtttcgagacgcaggttgtcaatgctttgaggtaa

SEQ ID NO: 56 - DNA, 717 bp, Zea mays
atggttaagctgactatgatagcgcgtgtcactgatggccttccattgtcggagggattagatgatagtcgggatctgaaagatgctgacttctacaagcagcaagcaaaactgttgttcaagaacttgtccagagggcagcatgaggcgtcaaggatgtcaattgagacaggaccataccttttccactacatcatagaaggccgtgtttgctatttgactttgtgtgaccgttcttatcccaagaaacttgcattccagtatctcgaagatctcaaaaatgaatttgagaaagtcaatggcagccaaattgaaacagctgcaaggccatatgcatttattaaatttgatgcattcatacagaagaccaagaaactgtatttggataccagaacacagaggaaccttgctaagctgaatgatgagctctatgaggtgcaccagatcatgactcgcaatgttcaagaagttctcggtgttggtgaaaaactagaccaggtgagtgagatgtcaagtaggttgacttcggatactagaatctatgcagagaaggcgaaagatctcaatcgccaggcattgattcgtaaatggacgtcgaaatctatgagaaaaggcgaaagatccaatcgccaggcattgattcgtaaatatgcccccgttgctattgtgattgggatagtggtgatgctcttctgggtgaagaacaagatatggtga

SEQ ID NO: 57 - DNA, 3486 bp, Zea mays
atggcgtcgggcagccgcgccacgcccacgcgctccccctcctccgcgcggcccgaggcgccgcgtcacgcgcaccaccaccaccactcccagtcgtcgggcgggagcacgtcccgcgcgggcgggggagccgcggccacggagtcggtctccaaggccgtcgcccagtacaccctagacgcgcgcctacacgcggtgttcgagcaatcgggcgcgtcgggccgcagcttcgactactcccaatcgctgcgcgcgccgcccacgccgtcctccgagcagcagatcgccgcctacctctcccgcatccagcgcggcggccacatccagcccttcggctgcacgctcgctgttgccgacgactcctccttccgcctcctcgccttctccgagaactcccccgacctgctcgacctgtcgcctcaccactccgttccctcgctggactcctctgcgccgccccacgtttccctgggtgccgacgcgcgcctcctcttctccccctcgtccgcggtcctcctagagcgcgccttcgccgcgcgcgagatctcgctgctcaacccgatatggatccactccagggtctcctccaagccgttctacgccatcctccaccgcatcgacgtcggcgtcgtcatcgacctcgagcccgcccgcaccgaggaccccgctctctccatcgccggtgcagtccagtcccagaaactggcggtccgcaccatctcccgcctccaggcgctacccggcggggacgtcaagcttctctgcgacacagtcgtggagcatgttcgcgagctcacgggttatgaccgtgtcatggtgtacaggttccatgaagacgagcacggggaagttgtcgccgagagccggcgcgacaaccttgagccttacctcggattgcattatcccgccacagatatcccccaggcgtcgcgcttcctgttccggcagaaccgcgtgcgaatgattgccgattgccatgccaccccggtgagagttattcaagatcctgggctgtcgcagcctctgtgtttggtaggctccacgctacgcgctccacacgggtgtcatgcacagtacatggcgaacatggggtcaattgcgtcgcttgttatggcagtcatcattagcagtggcggtgacgatgagcaaacaggtcggggtggcatctcctcggcaatgaagttgtgggggttagtggtgtgccaccatacatcaccacggtgtatcccttttccattgaggtatgcttgcgagtttctcatgcaggtatttgggttgcagctcaacatggagttgcagcttgcgcaccagctgtcagagaagcacattctgcgaactcagacgctattgtgtgacatgctactacgagattcaccaactggcatcgtcacgcagagccccagcatcatggaccttgtgaagtgcgacggggctgcactgtattatcatgggaaatactatccattgggtgtcactcccactgagtctcagattaaggatatcatcgagtggttgacggtgtttcatggggactcaacagagctcagcacagatagcctggctgatgcaggctaccttggtgctgctgcactaggggaggctgtgtgtggaatggcggtggcttatattacaccgagtgattacttgttttggtttcggtcacacacagctaaagagatcaaatggggtagcgcaaagcatcaccctgaggataaggatgatggtcagaggatgcacccacggtcgtcattcaaggcatttcttgaagtggttaaaagcagaagcctaccatgggagaatgcagaaatggacgcaatacattccttgcagctcatattgcgtgactccttcagggatgctgcagagggcaccaacaactcaaaagccattgtcaatggacaagttcagcttcgggagctagaattgcgggggataaatgagcttagttccgtagcaagagagatggttcggttgatagagacagcaacagtacccatatttgcagtagatactgatgggtgtataaatggttggaatgcaaagattgctgagttgacagggctttcagttgaggaggcaatgggcaaatctctggtaaatgatcttatcttcaaggaatctgaggcgacagttgaaaaactactctcacgagctttaagaggtgaggaagacaaaaatgtggagataaagctgaagacatttgggtcagagcaatctaagggaccaatatttgttgttgtcaatgcttgttctagtagagattacacacaaaatattgttggtgtctgttttgttggacaagatgtcacaggacaaaaggtggtcatggataaatttgttaacatacaaggggactacaaagctattgtacacaatcctaatcctctgataccaccaatttttgcatcagatgagaacacttcttgttcagaatggaatacagccatggaaaaacttacaggatggtcgagaggtgaagttgttggtaagtttcttattggagaggtgtttggaaattgttgtcgactcaagggcccagatgcattgacaaaattcatggttattattcacaacgctataggagggcaggattatgagaagttccctttttcattttttgacaagaatggaaagtatgtgcaggccttattgaccgccaatacaaggagcaaaatggatggtaaatccattggagccttttgtttcctgcagattgcaagcgctgaaatacagcaagccattgagattcagagacaacaagaaaagaagtgttacgcaaggatgaaagaattggcctatatttgccaggagataaagaatcctcttagtggcatccgatttaccaactctctgttgcagatgactgatttaaatgatgaccagaggcagttccttgaaactagctctgcttgtgagaaacagatgtccaagattgttaaggacgccagtctccaaagtatcgaggacggctctttggtgcttgagcaaagtgagttttctcttggagacgttatgaatgctgttgtcagccaagcaatgttattgttgagagagagggatttacaacttattcgggacatccctgatgaaatcaaggatgcgtcagcgtatggtgatcaatgtagaattcaacaagttttggctgacttcttgctaagcatggtgcggtctgctccatccgagaatggttgggtagaaatacaagtcagaccaaatgtaaaacagaattctgatggaacaaatacagaacttttcatattcaggtttgcctgccctggtgagggcctccctgctgacgtcgtccaggatatgttcagcaattcccaatggtcaacacaagaaggcgtaggactaagcacatgcaggaagatcctcaaattgatgggtggcgaggtccaatacatcagagagtcagagcggagtttcttcctcatcgtcctcgagcagccccaacctcgtccagcagctggtagagaaatcgtctag

SEQ ID NO: 58 - DNA, 2736 bp, Zea mays
atggctttcaaaggactcccgcgtgattcccgagggtccctcgaagtcttcaatccagacgcccctgtttcagatcgtgcaaccacctccccgttcctcctccctcctgcggtcgcgtcccatcccagcctcctcgccgccggagatggcggcgatgctgacgtgggtcgggcgacacagagggccgccgagtggggcctcgtcctccagaccgacgagcacaccggccgcccccagggtgtcgtcgcccgtccctccggttccaaccgcaccagcgagagtggcaactccatcgacgagagggccgccgccgccggtgctggtagagctctcccccgggtgtcggaggagcttcgcgccgcgctctcagcgttccagcagaccttcgtcgtgtccgatgccacccgccctgaccaccccatcctctacgccagcgctggattcttcaacatgacgggctactcctccaatgaggtcgtcggaaggaactgccgcttccttcaaggttctgggaccgaccccgtagagatttccaagatcagacaggctctcgcagctgggtcaaattactgtggccgtatcctcaactacaagaaggatggcacaccattctggaacctcctaaccgttgcccccataaaggatgaggatggcagggtcctcaagttcattgggatgcaagtggaagtaagtaagtacacggaaggtaacaaagatactgctcttcgtccaaatggattgccagagtcactcatcaaatatgatgcaaggcagaaggatcatgctcgtagctcagtctcggagctcctacttgccctgaaggatccacggtcattgtcagaatcaagaaacaataccttaaaaaggaaatcacaggaatcagcaggttcagctctagttcccggcaagagaagctccgaaactggatcccgtcgtaactcacatagtggaatgagaaactctctacaaaaaatcagtgaggtgcctgaaggagggaataagaccaggaaatctggtttgcgttcttttatgggccttattggtatgggacatgggaatgtagagaagaacattctaaaaccaagggaagatcccctacttgatagcgatgatgagagaccagatagcttcgatgacgatttcaggaagaaagaaatgagaaagggcatagatttggctaccacacttgaacgtattgaaaagaattttgtcatcaccgacccgaggttaccagataatccaattatatttgcatcggatagctttttgcgtttgacagagtattgccgcgaagaaatattgggaagaaactgcaggtttcttcaaggacctgaaactgaccgtgggacagtaaagaagataagagatgccatagataaccaaacagaagttactgttcagctgataaattatacaaagagcggtaagaaattctggaacctctttcacttgcagcctatgcgtgatcagaagggtgatgttcaatacttcattggggttcaattggatggaactgagcgtgttcgagaggctgctgcaaaagatggtgccatactggagaagaaaactgaagacaatgaagatgaggctgcaaaggagcttccggatgctaatttgagacctgaggatctatgggctaatcactcaaaaccagtcttgccaaagccacatatgaaggatactgcatcgtggagagccatccaaaaggttcttgagaacggtgaaagcattgatttgaaacatttcagaccagtaaggcctttaggatctggtgatactggcagtgtccacttggtggagttgcttggcacaggtgaatactttgccatgaaagctatggataaaagtgtcatgcttaaccgaaacaaggtccatagagctaccgctgaacgacaaatccttgatatgttggaccacccattccttccgacattgtatgcatcatttcagacaaagacacatatatgtcttattgttgactattgtgctggtggggaactctttatgctccttgataggcaacctatgaaggttctgaaggaggatgcggtcaggttctatgctgcagaagtggtcacagcacttgaatacctacattgccaaggtataatctacagagacttaaagccagagaacattttacttcatagagatgggcacatttcattgacagactttgatttgtcttgcttgacatcctgccgaccacaagtgtttcttccacacgatattgataagaagaaaaagaggaggaagagcaggagtaatcccatattttttgctgaaccaatgcgagcatcaaattcttttgttggtacagaggagtacattgcaccggagattattaccggagctggccatacgagtgctgtagattggtgggcgctaggaattcttctatatgagatgttatatggttatacacccttcagagggaaaacaagacaaaggacatttgctaatattctgcacaaggatatcagatttcctgcgagcatacaggtgagcctggcggcaaggcagctgatataccggttgctacaccgagaccctgcaaataggctaggttcctatgagggcgctatggagatcaaacaacaccccttctttcgtggcataaactgggctctagttcgtgccgccacgcccccagagctggaggctcccctccaggatacattggaggccacactgcctcctcctgcagctgatgcggctcacaccgatatgttctga

SEQ ID NO: 59 - DNA, 1146 bp, Oryza sativa
atggcggggagggagaagaggcggcgggtggcggcgctcgacggcgaagagcggcggcggcggcaggaggaagcggcgaccctcctccacaggatcagagggttggtgcgctgggtcgtcgccgaggtcgccgccggccgctccccgaccgtcgcgctccaccgctaccagaactactgctcctccgcctccgccgccgccgcgtccccatgcgcctgcagctacgacgtccccgtgggcacagatgtactctcgctcctccaccggggctcccacgcctcccggctcaatgtgctcctcagggttcttctcgtcgtgcagcaactcctgcagcagaacaagcactgctccaagagggacatctactacatgtacccctccatattccaagaacaagcggttgttgaccgtgcaatcaatgatatatgcgtactcttcaagtgcagccggcacaatctcaatgtggttcctgtggcaaaaggcttggtgatgggctggattagatttttagagggagaaaaggaagtctattgtgtaacgaatgtcaatgctgccttctctatcccagttagcatcgaagcaataaaagatgttgttagtgttgcggactacatacttattgtcgagaaggagacagtgtttcaacgtttggctaatgacaagttctgtgaaaggaatcgctgcattgtgattacaggaagaggctacccagatattccaacaagaagattcttgcgctaccttgttgaacagctgcatttgccagtttactgtttggtggatgcagacccttatggtttcgacattctggctacctacaaatttggttcactgcaattggcatacgatgcaaatttcctgcgtgtgcctgatattcggtggcttggggtcttcacatctgattttgaggattatcgccttccagactgctgcctacttcacttgtcgtctgaagacagaaggaaagctgaaggaattctctcaaggtgttacttgcacagggaagccccacaatggaggttggagttagaagccatgttgcaaaagggtgtcaaatttgagattgaggcgttatctgcatgttccatttcctttttatcagaagagtacattcccaagaagatcaaacaaggaagacatatataa

SEQ ID NO: 60 - DNA, 1185 bp, Zea mays; identical to SEQ ID NO: 14

SEQ ID NO: 61 - DNA, 216 bp, Zea mays; identical to SEQ ID NO: 15

SEQ ID NO: 62 - DNA, 1404 bp, Zea mays; identical to SEQ ID NO: 38

SEQ ID NO: 63 - DNA, 1161 bp, Arabidopsis thaliana
atgggctttagagttcttgctctccaatctgataacagtactgtcaatagagttgagactcttctcaatttagacaccaaaccttactctgacaggatcattgctgaatacatttggatcggaggatctggaattgaccttagaagcaagtcaaggactatcgaaaagccggtggaggatccttctgagctacctaagtggaactatgatggttcgagtaccggtcaagcacctggtgaagatagtgaagtgattctatacccgcaagctatcttcagagatcctttccgtggaggcaataacatcttggttatctgtgatacttggacaccagctggtgagccaattccaacaaacaaacgtgctaaagctgctgagatcttcagtaacaagaaggtctctggcgaggttccatggttcggcattgaacaagagtacactttacttcagcaaaacgtcaaatggcctttaggttggcctgttggagcgttccctggtcctcagggtccttactactgtggagttggagctgacaagatttgggggcgtgacatttcagatgctcattacaaagcttgtttatatgctggaattaacattagtggtactaatggtgaagttatgcctggacagtgggagttccaagttggcccgagcgtaggaattgatgcaggtgatcatgtttggtgtgctagataccttcttgagagaatcacagaacaagctggtgttgtcctaacacttgatcccaaaccgatagagggtgactggaacggtgctggttgccacaccaattacagtaccaagagcatgagagaggaaggaggatttgaagtgatcaagaaggctatcttgaacctctcgcttcgccacaaggagcacatcagtgcctacggtgaaggaaacgagagaaggttgaccggaaagcacgagacagctagtattgaccagttctcatggggcgtggctaaccgtggatgctctattcgtgtgggacgtgacaccgaggcgaaaggaaaaggttacttagaagatcgccgtccagcatctaacatggacccatacattgtgacctcacttttggcagagaccacactcctgtgggagccaactcttgaggctgaagcccttgcagctcaaaagctttctttgaatgtttaa

SEQ ID NO: 64 - DNA, 1425 bp, Medicago truncatula
atggctaccgctaccgaaaccaatctcgccaatctcaaatccgctgttactggattggatcaaatcagcgagaatgagaaaaccggattcatcaacctcgtttctcgttacctcagtggtgaagcgcagcatgtagaatggagtaagatccagacgccaactgatgaagttgttgtgccttatgatactttggcgccaactcctgctggttcgtcggatataaagaatcttttggataagcttgtggtgttgaagcttaatggaggcttggggacaactatgggttgcactggtccaaaatccgtcattgaagttcgtgatgggttgacatttttagatttgattgtcgtccaaatcgagaatctcaattccaaatatggaagcaacgttcctttgcttttgatgaactcattcaacacccatgacgacactcaaaagattattgaaaagtaccaaaaccataatattgagatccatacatttaaccagagccagtatcctcgattggttgttgatgacttttcgccattgccttccaaagggaacaccggcaaggatgggtgtaattctttgcataggtaccctcctggccatggagacgtcttcccatcattatcgaacagtggaaaacttgatgcactattatcacagggtaaagagtacgtgtttgttgccaattcagataacttgggagctatagttgacttgaaaattttaaaccatctgatcgagcacaagaatgaatattgtatggaggttactcccaaaacattggctgatgttaagggcggcactttgatttcttatgaaggaagggttcagctcctggaaattgcccaagtcccagatgaacacgtcggcgaattcaagtcaatagagaaattcaaaattttcaacacaaataatttgtgggtgaacttgaaagcaatcaaaagacttgtcgaagctgatgctcttaagatggagattattcccaatccaaaggaagttgatggagtaaaagttcttcagctggaaactgcagctggtgcagcaataaggttctttgacaaggctattgggattaatgttcctcgatcccggttccttcctgtgaaggcaacttcagatttgcttcttgtccagtcagacctctacaccttggaagatggatctgtcatcagaaacacagctagggctaatcctgaaaacccttccattgaactggggccagaatttaagaaggttagcaacttcttgagccgcttcaagtcaattcctagtattgttgagcttgacagtctaaaagtggctggcgatgtgtcgtttggagctagtgtcatcctcaaggggaaagtcagtatcgtagcgaaatctgatgtaaagctggaaattcccgacggagccgtaattgaaaacaaggaaattaatggcccagaggacctg

SEQ ID NO: 65 - DNA, 492 bp, Medicago truncatula
atgattttggacaagaaaaacgttgaggagactcattacgaggttctcaatgtcaaggaggatgcaaattacgaagaaatccgtgctagttaccgaagtgctgcactcaatttacatcctgataagctattgaagacatctgatgcatcccgcagtaaccaaacaacttcagagagatttctcaaagttcacaaggcatgggaaattctaagcaattcaacctctcgtttaatttatgacaaggaactaaaaagttcgaggcgggaggatttcttggcttctgaagttgcagaagagttaaggttacaggatatgactaaaatggggtattccttgttgagagatggaaacagcatcagcatttctatacttattgttgatacttcaccaggatcagtgattcttccttgtggatcttgttcgttgaaagctcgtcttaaatatacatatgcagatttaagaacccaagaacgcttagatgagatgatataa

SEQ ID NO: 66 - DNA, 456 bp, Gossypium hirsutum
atggaccgggaaggaggatcccacggcggatcttgttactacactgttctcgggattcgcaaggacgcctccttctccgatatccgtgctgcttaccgtaagcttgctctgaaatggcacccggacagatacgtcacaaatccggcggtcgccggcgaagcgaaactcaggtttcagcaaatccaagaagcttattccgttctctcaaacgggtccaagagatcaatgtatgacgccagtctctacgatcccttggaagatgatgaccaagacttctgtgactttatgcaagagatgatctcgatgatgaacaatgtgaaagacgagggggttagtttggaggatctgcaaaagatgttcgccgatatggtcggcagcggagatggtatgagcttcaacgtcaacactgatctcacggagacgaagaaggcgcatttcacggcatctaagacttaa

SEQ ID NO: 67 - DNA, 1674 bp, Glycine max
atggagaagaaggagaacggaccgagcgagaaggcttccaatggcggaatagatggacccacaaaccctatggtcacgcctctgctcaatgatctctaccaattcaccatggcttacgcttactggaaagctggcaagcagcaagaacgtgctgtgttcgatttgtattttcggaagaatccgtttggtggggaatatactgtcttcgctggcttggaagagtgcataaggttcatagctaatttcaagctcactgaggaggagatcgattttgttaggcaatgtttatcttcctcttgtgaggatggattccttgactacctaagaggactcgactgctctgatgttgaggtgtatgctattcctgagggaacagttgtttttcccaaggttcccctgatgagagttgaaggcccagttgctgttgttcaattgctggaaacaccttttgtgaatctaattaattatgcatctttagtttctactaatgctgcaaggcatcgtaatgttgctggaaaatccaaaactctacttgagtttggattacgaagggctcaggggcctgatggtggagtaggagcatccaagtactgctatattggtggatttgatgcaacaagcaatgttgcagcaggaaagttattcgggataccccttcgtggtactcattcccatgcctttgttagttcatacatgagccttgatgagattacagacaggtcacttaacagaaaagatggttcaagtacgtgtgatgattttgtcagtctcgttcaaacatggttgaacaaaattcagttatcaaatggtgtttttggtgagaccaatcaaagtgagttggctgcattcacatcatatgctttggcatttcctgatggttttcttgccctcgtagatacatatgatgttatgagaagtggaatccctaatttctgtgcagttgcattagctctcagtgatttaggatacaaagcagttggcattagattggactctggtgaccttgcatacttgtcttgtgaggtcaggaagttcttttactctattgagaatgaatttggagtgcctggatttgggaagttgcaaatcactgctagtaatgatcttaatgaggaaacattagatgctttaaacaaacagggacatgaggttgatgcctttggaattggtacatatctagttacatgttatgctcaagctgctttaggtgttgtcttcaagctggttgaaataaataatcagcctcgtatcaaactttctgaagatgtatcaaaggtctctattccatgtaaaaagtgctgctatagattgtatgggaaagaaggttatcccctggtggacataatgactggagaaaatgagccctctccaaaggtgggagaaagaatcctgtgccgtcatcccttccaagaatccaagagagcatatgtggtgccacagcgtgttgaggagcttctgaggtgttactggtctgggagtacagatattaagaaagatactttaccagctctaagagatattagagagcgatgcatcaatcaacttgagcaaatgcgacctgaccacatgaggagacttaacccaactccatataaggttagtgttagtgcaaaattatacgacttcattcatttcctgtggctcaatgaggcaccagttggggagctacagtaa

SEQ ID NO: 68 - DNA, 975 bp, Zea mays
atgcccggaatggacccgggcggaggcggcagctcgcgctacttccaccagctgctccggccgcagcagcagcagtcctcgccgctgtcgcccaactcccacgtcaagatggagcaccacaggatgtctccagacaagagccccgtcggcgaggccgaggcgggcgggagcggcgccggcgccgaccagccgtcctcgtcggccatggtcccggtcgagggtggcggcagtggcagcgggacaggaggcacgcccacgcggcggccgcgcggccgcccgccgggctccaagaacaagcccaagccgcccatcatcgtgacgcgcgacagccccaacgcgctgcactcgcacgtgctcgaggtcgcggccggcgccgacgtcgtcgactgcgtcgcagagtacgcgcgccgccggggccgcggcgtgtgcgtgctcagcggcgggggcgccgtcgtcaacgtggcgctcaggcagcccggcgcgtcgccccccgggagcatggtggccacgctgaggggccggttcgagatcctctcactcaccggaacggtgctgccgccgcccgctccccccggcgccagcggcctcacggtgttcctctccggcgggcagggccaggtcatcggcgggagcgtggtgggccccctggtcgccgcggggcccgtcgtcctgatggctgcgtcgttcgcgaacgccgtgtacgagcggctcccgctggagggggaggaagaggagacagcagccgcggctgccgctggcgctgagccacaagatcaagtggcgcagtcggctggacccccgggtcagcagccgacggcgtcccagtcatctggtgtgaccggaggcgacgccgccggcggtggcggcatgtcgctctacaacctcgccgggaatgtaggggcctaccagctaccgggagacaacttcggaggctggagtggaggcggtggcggcggagtccggccaccgttttga

SEQ ID NO: 69 - DNA, 975 bp, Zea mays; identical to SEQ ID NO: 68

SEQ ID NO: 70 - DNA, 525 bp, Zea mays
atggagcacaaggaggctgggtgccaggcccccgagggacccatcctctgcatcaataactgtggcttcttcggcagcgcggcgaccatgaacatgtgctccaagtgccacaaggagatgataacgaagcaggatcaggccaagctggctgcctcctctatcgacagcatcgtgaacggcagcgacgccgtcatggagccggttgttgctggcagcaacacggtagtagctgttgcccaagttgagttgcaaacaatgaacgtgcagcagcccgctgatgttgccggacccagcgagggggtggcggcgatctccaaaggggggaaggtagggccgaaccggtgcagcgcctgcaggaagagggttggacttacgggattcaactgccggtgtgggaacttgtactgcgcactccaccgctactccgacaagcacgactgcaagttcgactaccggactgctgccagggacgccattgccaaggctaatccggtggtgaaggcagacaagctcgacaagatctag

SEQ ID NO: 71 - DNA, 3336 bp, Zea mays
  misc_feature (688)..(688): n is a, c, g, or t
atggcgtccaaggggatcctcaaaaacagcggctcccgccgcatgccgccgcagggcgccggcagcaggccgcccacggcgcccacgtcggcgcccacggtcgtcttcgggcgccggaccgactctgggcgcttcatcagctactctcgcgacgacctggactcggagatcagcagcgtcgacttccaggactaccacgtccacatccccatgacgcccgacaaccagcccatggacgaggacgacagcggcacagccagggccgaggaccagcgctacgtctccggctcgctcttcaccggcggcttcaacaccgtcacccgcgcgcatgtcatggacaagcccgacggcgacgccgccgggcgccgcggcggcggcggtgccaagggacccagcgcgtgcatggtcgaggggtgcgacgccagggccatgcgcgacgcccgcggcgatgacgtcctcccctgcgagtgcgatttcagggtctgcgtcgactgcttcaccgacgccgtcaaggccggcgccggcgtctgcccggggtgcaaggagccttacaagaacaccgagtgggagggccttggcgccggcgcggccgaggaggtcacgcgggcgctctcgctgccccgcgggcctgcgggcgccaacggccacaggatggagaggcgcctgtcgctggtcaagcaggccaacntcaaccagtccggcgagttcgatcataacctctggctcttccagaccaagggcacctatggctatggcaacgccatctggccccaggatgaagcagacgacgacaccgacggcggtgccccggctgggcatcccaaggagctcttaaccaaaccgtggcgcccgctcacccgcaagctcaggattccagcagccgtcatcagtccttacaggctcctcgtcctcatccgcttggtcgcactggccttcttcctcatgtggcgcatcaagcaccaaaacgaggacgccatctggctctggggaatgtccattgtctgcgagctctggttcgccttctcatgggtactggaccagctcccgaagctgtgccccatcaaccgcgcgacagacctctctgtgctcaaggagaagtttgagacgcccacgcctaacaatccaacaggcaagtcggatctccctggagtcgacatcttcgtgtcaaccgctgatccagagaaggagccggtcctggtcacagcgaacacaattctctccatcctcgcggcggactaccccgtcgagaagcttgcgtgctacctatcggacgatggaggggcgctgctcaccttcgaggcgatggctgaagcggcgagcttcgccaacctctgggtgccattctgcaggaagcatgacatcgaacccaggaacccggacagctacttcaacctgaggagagatcccttcaagaacaaggtgaagccagacttcgtcaaggacaggaggcgcgtcaagcgtgagtacgacgagttcaaggtccgtgtgaatggcttgccagatgccatccgccgccgctccgacgcgtaccacgcccgcgaagagatccaggccatgaatcttcagagggaaaaactgaagggcggcggtgacgagccgccgttcgaaccggtgaagattcccaaggcgacatggatagctgacggcactcactggcccggcacctggctccaaccttcgcaggatcatgctcgaggtgatcacgcaggaatcatacaggtcatgctgaaaccaccaagcgacatgcccaccaccatgtacgacgcggcttccaagacacctcttgacttggcaggagtggacactcggctcccaatgctggtgtacatgtcgagggagaagcgcccaggatacgaccacaacaagaaagcaggcgcgatgaacgcactggtccgcgcatcggcgatcatgtccaacggcccgttcatcctcaacctggactgcgaccactacatctacaactccaaggccttgagggagggcatgtgcttcatgatggaccgcggcggcgaccgcctctgctacgtgcagttcccgcagaggttcgaaggcatcgacccttccgatcgctatgccaaccacaacacggttttcttcgacgtcaacatgcgcgcgctcgatggtcttcaagggccggtgtacgttggcactgggtgcctcttccgtcgaatcgcgctctatggcttcgacccaccccgttccaaggaccacagcccagggttctgtagctgctgtctcccacgccgccgcaagccgtcagcagcttcccgcgaggagaccatggctcttcgcatgggcggttttgatggagacagcatggaccttgcgacgttcccaaagaagtttgggaactcaagctttctcatcgactccatcccggagaagacggagtgggggataagggtggggtggatctatggctccgtcaccgaggatgtcgtcacagggtaccgcatgcacaaccgtggatggaagtcggtgtactgtgtcacgcagcgtgatgccttccgcggcactgctccgatcaaccttaccgatcggcttcaccaggtgcttcgatgggccactggctcggttgagatcttcttctcccgcaacaatgcgttgtttgccagctccaagatgaaggtgctccaaaggatcgcataccttaatgttggtatctatcccttcacgtccatcttcctcattgtctactgcttccttccagcactctccctcttctcaggacagttcattgtgcaaacgctcaacgtcaccttcctgacatacctactcatcatcaccgtcaccctttgcctcctggccatgctggagatcaagtggtctggcattgctctcgaggagtggtggcggaacgagcagttctggctcatcggtggaaccagcgcccacctggctgctgtgctgcagggccttctaaaagtggttgcagggattgagatctcatttacgctcacttcaaaacaagtgggtgatgatgtagaggatgaatttgcggaactgtacatagtgaaatggacatcgctaatgataccgccgctcaccatcatcatgatcaaccttgtggccattgctgttggcttcagccggacgatctacagcacaatcccgcaatggagcaagctgcttgggggagtgttcttcagcttctgggtgcttgctcatctgtatccatttgccaaggggctcatgggaaggagaggaaggacgcccactattgtgtatgtctggtctggactcgtctccatcaccatatcactgctctggattgcaatcaagcctccatcacaagctgccaactcacaattcggtgggtcattttctttcccttga

SEQ ID NO: 72 - DNA, 1201 bp, Escherichia coli
ggtaaaaacattgatgaaggttaatactatgaaagcattacattttggcgcaggtaatatcggtcgtggctttatcggtaaactgctggcagacgcgggtatccaactgacgtttgccgatgtcaatcaggtggtacttgatgccctgaatgcccgtcatagctatcaggtacatgtggttggtgaaaccgagcaggtagataccgtttccggcgtcaatgctgtcagcagcattggtgatgatgtcgttgatctgattgctcaggttgatttagtcactacccgcgttggcccggttgtgctggaacgtattgcaccggcaatcgccaaagggcaggtgaaacgtaaagaacaaggtaatgaatccccgctgaacatcatcgcctgtgaaaacatggtacgcggtaccacgcagctgaaaggccatgtgatgaacgccctgccggaagacgccaaagcgtgggtagaagaacacgttggctttgtcgattccgccgttgaccgcatcgtaccgccttcggcttcggcaactaacgatccgctggaagtgacggtagaaaccttcagcgaatggattgtcgataaaacgcagttcaaaggcgcactgccgaacatcccaggcatggagttaaccgacaacctgatggcatttgtcgaacgtaaactcttcaccctgaacacgggtcatgctataaccgcgtacctcggaaaactggccggtcatcagaccattcgtgacgcgattctcgacgagaaaatccgcgcggtggtaaaaggtgcgatggaagaaagtggtgcagtattgatcaagcgctacggctttgacgctgacaagcatgcggcgtacatccagaaaattctcggccgttttgagaacccgtatctgaaagatgatgtagagcgcgtaggccgtcagccactgcgtaaactgagtgctggcgaccgtctgatcaagccactgctcggtacgctggaatatggtctgccacataaaaacctgattgaaggtattgccgctgcaatgcacttccgcagtgaagatgatccgcaggctcaggaactggcagcactgatcgctgacaaaggtccgcaggcggcgctggcacagatttccggtcttgatgccaacagcgaggttgtatccgaggcggtaaccgcttataaagcaatgcaataatgagtactctgcatggtacccatc

SEQ ID NO: 73 - DNA, 2801 bp, Nostoc punctiforme
tggttccgaatctccatctacctattcccatgagaatcctcaagatccagaccttacgcggcccaaactattggagcattcgacgccacaagctgatcgtcatgcgcctcgatttagaaacccttgccgagacgccctcgaatgaaatcccaggcttttatgaaggactagttgaggcgctgccgagtctggagggtcattattgttcgcctggctgtcgtggtggttttttgatgcgagtcaaagaaggcacgatgatcggccatatcgtagaacacgtagccttagaactccaggaattagctggtatgcacgtcggctttggtcgcacccgcgaaactgccacacccggaatttatcaagtagtaattgaataccagaatgaggaagcgggacgctacgccggacgagccgcagtgcggctgtgccagagtatcgtcgatcgaggccgttatcccaaggcagaactagagcaagatatccaagacctgaaagacttcacccgtgatgcttctttaggcccttctactgaagcaatcatcaaagaagcagaaaaaagaggtattccctggatgcctctggaagcccgctttttgattcagctaggctacggcgtgaaccagaagcggatgcaagccacaatgactgacaataccagcattctgggcgtagaactagcttgcgacaaagaagccacaaaacgtatcctggctgcggctggtgcgccagtacccagaggcacagtaatcaacttcttagacgatttggaacaagctattgaatacgttggcggctatcccatcgtcgtcaagcccctggatggcaatcatggacgtgggatcaccattgacatcagaacttgggaagaagcggaagctgcctatgaagccgctagacaggtttcccggtcaattatcgtcgaaagatattacgttgggcgtgaccacagggtactagtggtaaatggcaaagtagtcgcggtagctgaacgtgtcccagctcacgtcattggcaatggcagatcgaccatctccgaactgattgaggaaacaaacctcgatccaaatcgcggtgaaggacatgataacgtcctgaccaaaattgaactagatcgcaccagctatcaactattagaaaggcaaggctataccctaaatagcgttccacccaagggtactatttgttatctcagggcaacagccaacttaagtacaggtggtagcgccgtagatcgtaccgatgaaattcacccagaaaatctgtggttggcacaacgagtagtcaagattatcggtttagatatcgccggactcgatatcgtcaccacggatattagccgtcccctgcgggaagtcgatggcgtaattgttgaagttaacgccgctcccggcttccggatgcacgttgcgccaagcgtgggtattccccgcaacgtcgctggtgcagtgatggatatgctgttccctaacgaacaatctagccaaattcctatcctcagtgttactggtactaatggcaaaaccactactacccggctattagcacatatttataaacagactggtaaagtagtcggatatactacaaccgatggaacatacatcggcgattacttagtggaagctggcgataacacaggcccacaaagtgcccatgtcattctccaagatcccacagtagaagtagcagtactggaaaccgcccgcggtggcattctccgctctggattgggctttgaagccgcaaatgtaggagtggtattaaatgtagccgccgaccacttaggaataggcgatatagagactattgagcaattagctaacctcaagagtgtagtagcggaagccgtattccctgatggctacgcggtacttaacgccgacgatcatcgcgtcgccgctatgtcagaaaaaactaaggctaatattgcttacttcaccatgaatcccgactcggaattggtgcgaaagcacatccaaaagggtggagtagccgcagtctatgaaagcggctatttgtcaattgttaaaggtgattggacacatcggatagaaagagcagaaaatatacctttaacaatgggcggacgtgcgccgtttatgattgccaacgctttagctgcaagtttggcagcattcgtgcaaaacgtcacgattgagcagattcgctctggtttgaagactttccgagcttcagttagtcaaacgccgggacgaatgaatttatttaatttaggcaactaccacgctttagtagactatgctcacaacgcagctagttatgaagctgtaggttcctttgtacggaactggactacaggacaacggattggcgtaattggtggcccgggcgatcgccgcgacgaagattttgttactttgggcaaattagcagcacaaatttttgactacatcattgtcaaagaagacgatgatacacggggacgtttacggggttcagccgcccaattaattattcaaggcattacccaagtgaagcctgatagccgctatgaatcaattttggatgaaacccaagcgattaataaaggcttagacatggctcctgataacagcctggtggtgattctaccagaaagcgtgactagggctattaagttaattaagctgcgtggtttagccaaggaagagacacatcaacaaaatactggcacagcgatcgctgattctcaaaatgggattgcaccttcttctgtagtcaacacactactgtagtcaacagtcaagagtctcaagttcagcatttcaaagtttttcagccttgactcttgactattgact

SEQ ID NO: 74 - DNA, 2622 bp, Synechocystis sp
atgaaaattcttaaaacccttaccctccgcggccctaactactggagcattcgacgcaagaagttaattgtaatgcgcctcgacctggaggatttggcggagcgaccctccaacagtattcctggtttttatgaagggttgatcagggtgttgccttctcttgtagaacatttttgctccccaggacaccggggcggctttttggcaagggtgcgggagggaacctatatgggccatatagtcgagcatgtggccctggaattacaggagttggtggggatgacggcggggtttggtcgcaccagagaaacctccaccccaggcatttataacgttgtttatgaatacgtagatgaacaggcaggacgttacgctggccgagccgcggtgcgcttgtgtcgttccttggtggatacgggggattattccctgacagaattggaaaaggatctggaagatttacgggatttgggcgctaactcagccctggggcccagcacagaaaccattgtcactgaagccgatgcccgtaaaattccctggatgctgctcagtgccagggccatggtgcaattgggttatggggttcaccaacagagaattcaggccacccttagttcccattccggcattctgggggttgaactggcctgtgataaggaaggtacaaaaaccattctccaagatgcgggcattcccgttccccggggcaccactatccaatattttgatgatttggaagaagccatcaatgatgtcgggggttatccagtggtaattaaacccctggacggtaaccatggtcgggggatcaccatcaatgtgcgccattgggaagaggcgatcgccgcctatgatctggccgctgaggagtccaaaagtcgttccattattgtggagcgttactacgagggcagtgaccaccgggtcttggtagtcaatggcaagctagtggcggtggcggaaagaattccagcccatgtaaccggggatggcacttccaccatcactgaattaattgataaaactaatcaggatcccaatcgcggcgatggccatgccaacatcctcactaaaatcgtggtcaataaaacggcgatcgatgtgatggaacgccagggttataacctagacagtgttttacctaaggatgaagtggtttacctgcgggccaccgctaacctcagcacgggaggcatagccattgaccgcaccgatgatattcacccggaaaatatctggttgatggaaagggtagccaaggtcattggcttggacattgccggcattgacgtggtgacctccgacatcagcaagcccctacgggaaaccaacggagtaattgtggaagttaacgccgctccaggttttcgtatgcatgtggcccccagccagggtctgccccgtaacgtggccgcaccagtattggatatgctctttccctccggtacccccagccgcattcccattttggccgtgacggggactaatggtaaaaccaccaccacccgcctcttggctcacatttatcggcaaacgggcaaaacggtgggttacaccagcaccgatgccatttatatcaacgaatactgcgtggaaaaaggcgataatacggggccccagagtgccgcagtaattttgcgggatcctacggtggaggtggcagtgttagaaacggcccggggaggcattttacgggcaggtcttgcttttgatacctgtgacgtgggggtagtgctcaacgtggcggcggatcacctcggtttgggagacatcgacaccatcgaacaaatggccaaagttaagtccgtcattgcagaggtggtggaccccagtggttatgcggtgctcaatgcggatgatcctttagtagcggctatggcagacaaagtgaaagccaaagtggcctatttctccatgaaccccgataatcctgttatccaaaaccacatacggcggaatggcattgcggcggtgtatgagtctggttatgtgtccattttggaaggctcttggactctgcgggtggaagaggccacattgattcccatgaccatgggggggatggcaccgtttatgattgccaatgccctggcagcctgtctggcggcttttgttaatggcttagatgttgaagttattcgccaaggagtaaggactttcaccacctcagcggaacagacccctggaaggatgaatttgttcaatctgggtcggtaccatgcactggtggattacgcccataacccggcgggctatcgggccgtgggggattttgtcaaaaactggcacggtcaacgctttggtgtggtgggaggccctggcgatcgccgagatagtgatctaattgaactgggacaaattgcggcccaggtatttgaccggatcattgtcaaagaagatgatgataaacggggccggagtgggggagaaacagcggatttaattgttaaaggcattttgcaggagaatcccggcgcggcctatgaggtaattttggacgaaactgtagcgttgaataaggctttagatcaggtagaggaaaagggtttggtggtagtgttccccgaaagtgtgagcaaagccattgagttaattaaagcccgtaaacccattggttaa

SEQ ID NO: 75 - DNA, 816 bp, Synechocystis sp
atgcccctatcctcccaaccggccatcttaattattggtggtgcagaagataaagttcacggccgtgaaattttgcaaaccttttggtcgcgttccggtggcaacgacgccattattggcatcattccatctgcatctcgggagcccctactgattggggagagatatcaaaccatctttagcgacatgggggtcaaggagttaaaagtcttggacatccgtgaccgtgcccagggggatgacagtggctaccgattgtttgtggaacagtgtacaggtattttcatgaccgggggggatcaattgcgtctctgtggcctgttggcggacactcccctaatggaccgcattcgtcagcgggtacataacggggaaataagcttagcgggcaccagtgcgggggcggcagtaatggggcatcacatgatcgccgggggcagtagcggtgaatggcccaatcgagcgctggtggatatggcggtggggctgggcattgtgccggaaattgtggtggatcagcactttcacaatcgtaatcgcatggcccggctgttgagtgccatctctacccatcctgagctgctgggtttgggtattgatgaagatacctgcgccatgtttgagcgggacggttccgttaaggtaattggccaaggcacagtctcctttgtcgatgccagggacatgagctacactaacgccgctttggtgggggccaatgccccattgagtctccataatttgcggctcaatatccttgtccatggggaggtttatcatcaggtaaaacagcgggcctttccccgggtaacctag

SEQ ID NO: 76 - DNA, 2033 bp, Oryza sativa
ctcccggctttccggacgcgggattcctcaacctctacatctctctcctccaatcccctcctctctctctatctctcttcccggcctgtgcagagacggaggcaggataggccggcgagcaaaggtactaaagatcatatctcttcaaactggttaggaagcttacttaatgaagacacaattggattgattttagtggccaaacccaagccaacatacagactgtgcgcatatggctactcgcattcctggtactgtagcagctagcggggtgtactacaatgatcaatacagaatgccatgtaagctgaaaggaattcattgcatggcattgaattgtataccgcaaaaagcgaaggtaaggaagtgcatgaatggatatcaatcaacattcaggttttgtgtaaatgagaaaaatggacaaaccaccggacagtcaaatggttccttgatccaacaaggccagaatttccggtgtcattcttatggttctcataacagcagtgaaactaaagagtgcagccttgaagatggcactgattcatacagggattttgaagaacattcaagaggagcctcccaattttcagataatcaagttgcagcaaagaaaaaatcagtcaaatctagtcaagggttggctgaagcttgcaaatttgtttacaacgatgcaaaatttgtgaatgaaagagctcaaaatgatattctcttgctttcacgtggcataacaaggctgaacaaacgtgcgtgccaggatgttgctgttttagggtcaggatttctcaagcttgatgctcgtgcaaggaaggacactaaaaaaattgaccacagtgtgaaggaaagggcagcgcggcttacccattttgcgagaatattaaaggaacaggctcagtcagacttgaagaaagcagcagatcagcattggagcgatggtgctttggaggcagatctgcgacgagctgactcggttgttagacgacgtgccatggaagatgctttcatggctttaaagtttgttcgggatatccatgacatgatggcaaacagattacaagagcaattcgcaaaggatggttcctcttctcctgctaattcaagaagtttcatcacccttgagaaaaatggaaataccttcgagctgtttcctcatgaagtttcaacggaccagattaccgccatagagcaagcatactggagtatggcatctgcgttgtctgaggctgatggtatcgactacacagatcctgaggagcttgagttgttagtagcaactctcattgacctggacgccatggatgggaaaaagagtgtttccttacttgctgaatgttcaagctctccagatgttaataccaggaaagctttagctaatgcactggctgcagctccatccatgtggattcttggaaatgctgggatgggtgcattacagagattggctcaagattccaattatgctgtagccagggctgcaacaagagccatcaatgaactcacaaagcaatgggagcttgaagaaggtgacagcctgaggtttgtactgaatcaaaatatggtttctaaagagacagccgatgacagtgcagcagcagatgacaccaggtgatcatgtgcaaataagaaggaaaaaattacactaggattaacagaaacttatacaaacatcacgtttcagagcatatatatggataaggtgaatgtctatctctgtcacagtttcagagcataatgtgctgcttggtatcaaaccagatcaccagaatcatcagaatgacagaatgcatgtaactgacacatcttttcagtgccaaactgccaaagaaattaggaactggtgtaaagataaatgtattccttcagtaagacatagtcaatagtgttagaataattgggctaggcccaacttatcctattaaatctcaaaggcccataataagtgttaaggataataataccacatcaggatttaagcgaggaatatcttaacctaaatagggagttattggagcccccctgttaaaaaaaaaaaaaaa

SEQ ID NO: 77 - DNA, 1687 bp, Arabidopsis thaliana
tgtttctcaacaattttctggtctcttagagtgagaggagagagcgacagagttgtgttgggcgtggaacttggactagttccacatatcaggttatatagatcttctctttcaacttctgattcgtccagaagctttcctaatctgagatctgacatggaacaccaaggttggagttttgaggagaattatagtttgtccactaatagaagatctatcaggccacaagatgaactagtggagttattatggcgagatggacaagtggttctgcagagccaaactcatagagaacaaacccaaacccagaaacaagatcatcatgaagaagccctaagatccagcacctttcttgaagatcaagaaactgtctcttggatccaataccctccagatgaagacccattcgaacccgacgacttctcctcccacttcttctcaaccatggatcccctccagagaccaacctcagagacggttaagcctaagtccagtcctgaacctcctcaagtcatggttaagcctaaggcctgtcctgaccctcctcctcaagtcatgcctcctccaaaatttaggttaacaaattcatcatcggggattagggaaacagaaatggaacagtactcggtaacgaccgttggacctagccattgcggaagcaacccatcacagaacgatctcgatgtctcaatgagtcatgatcgaagcaaaaacatagaagaaaagcttaatccgaacgcaagttcctcatcaggtggctcctctggttgcagctttggcaaagatatcaaagaaatggctagtggaagatgcatcacaaccgaccgtaagagaaaacgtataaatcacactgacgaatctgtatctctatcagatgcaatcggtaacaagtcgaaccaacgatcaggatcaaaccgaaggagtcgagcagctgaagttcataatctctccgaaaggaggaggagagataggatcaatgagagaatgaaggctttgcaagaactaatacctcactgcagtaaaactgataaagcttcgattttagacgaagccatagattatttgaaatcacttcagttacagcttcaagtgatgtggatggggagtggaatggcggcggcggcggcttcggctccgatgatgttccccggagttcaacctcagcagttcatacgtcagatacagagcccggtacagttacctcgatttccggttatggatcagtctgcaattcagaacaatcccggtttagtttgccaaaacccggtacaaaaccagatcatctccgaccggtttgctagatacatcggtgggttcccacacatgcaggccgcgactcagatgcagccgatggagatgttgagatttagttcaccggcgggacagcaaagtcaacaaccgtcgtctgtgccgacgaagaccaccgacggttctcgtttggaccactaggttggtgagccactttgctacttccttatttttggtatgtttcttttttatatctatctttctgaacatacttaaaacgttcaaggatgtattattatagagtaaacgtgcaacttcattacgttattttctgtatatgtgagtttatgtatgtcaaaatgacatgatgagattttttgtaaacaacatcttaaaaacaggacatgtgatttttgtaatcgtaaaaaaaaaggtaaat

SEQ ID NO: 78 - DNA, 2505 bp, Saccharomyces cerevisiae
tgcatgaagatacgtcttgttcgccaagtatataaaatgaagcagtagtatagccgtagctttactattgttagcagtttcccttgtctagattcttaaattgggttcatccaagaaaaagtaataacataaatttgtcattgttatagtatgggagaatttaaacctccgctacctcaaggcgctgggtacgctattgtattgggcctaggggccgtatttgcaggaatgatggttttgaccacttatttactgaaacgttatcaaaaggaaatcatcacagcagaagaattcaccaccgccggtagatctgtaaaaacccggcttagtggctgcagcgtggtttctagttggatctggtgttctacattgttaacgtcgtcaacaaaggaatatgcagacggtatatttggcggttatgcgtacgctgctggcgcatgcttccaaattattgcattcgcaattttggcaattaaaaccaagcaaatggctcccaatgcgcacacatatttagaattagtgagaacaagatatggtaagatcggccatggttgctacttgttttatgccatcgcgacgaatattttagtcacttcaatgcttttaacttcaggttctgctgtctttagtgatttaaccgggatgaacactatcgcatcatgttttttactgcctgtgggtgttgttgtttatactctatttggtgggattaaagcaactttcttaacggactatatgcacacatgtgtcattatcatcattgtcctcgtatttgcctttaaagtttatgcgactagtgatgttttaggctcaccgggaaaagtttatgacttagttcgtgaagccgccaagaggcatccagtagacggtaactatcagggtgaatatatgaccatgacatccaaatccgctggtattttattaattattaacctgattggaaatttcggcaccgttttccttgataatggttattggaataaagcgatttctgctagtcccgcagcgagtttgaaagcatatgccatcggtgggttagcatggtttgcagtaccttctttgatttcattgaccatgggattagcatgtcttgcggtggaaacgtctccgaacttccccacctatcctgatccacttacttcgttccaggcaaattctgggttagtcttgccggcagctgcaattgctatcatgggtaaggggggtgctgtggcatcgctgctaatgattttcatggccgtcacatctgctatgtctgctgaactaattgccgtttcatctgttttcacttacgatatctatagagaatatattgatcctcgtgcaagcggtaagaaattgatttacacatcacacgttgcttgtatcttttttggtcttgccatgagtggattttcggttggtttatactatggtggtatttctatgggttatatctatgaaatgatgggtataattattagtagtgcagtattacctgtcgttttgaccttatgttccaaagacatgaatttggtggccgctgtagtgtcgcctattttgggcacaggactggctataatgtcatggcttgtctgtaccaaatccctttataaagaattgaccgtggatactacgttcatggattatccaatgttaacaggtaacttggtggctttgctatcaccagccatttttattcctattttaacgtatgtgtttaagccacaaaattttgactgggagaaaatgaaagatattactagagttgacgaaactgcagagttagttcaggctgaccctgatatccagctttacgatgctgaagctaacgataaggaacaagaagaagaaacaaattctctggtctcagatagtgaaaaaaacgatgttagagtaaataatgaaaaattgattgagcctaaccttggtgttgtaataagtaatgccatttttcaagaagatgacacacagttacaaaatgaattagacgaagaacaaagagaactagcacgtggtttaaaaattgcatacttcctatgtgtttttttcgctttggcatttttggtagtttggcccatgcccatgtatggttccaaatatatcttcagtaaaaaattctttaccggttgggttgttgtgatgatcatctggctttttttcagtgcgtttgccgtttgtatttatccactctgggaaggtaggcatggtatatataccactttgcgaggcctttactgggatctatctggtcaaacttataaattaagggaatggcaaaattcgaacccacaagatctgcatgtagtaacaagccaaattagtgcgagagcacatagacaatcatcacatttcggacaagttgatgaaataatttagctttcaaaatataatattctatccactcatcaacctcattaataatttttaaatagctctaattataaaatagtctttcattataggtacataaaagaaaagaaagtcaaggggaaaaaaaaaaaaaaaaggaaatttctaaattta

SEQ ID NO: 79 - DNA, 1995 bp, Schizosaccharomyces pombe
atggtccaacccgaattgacgcaaagtgttggctatggcatcgttgtgggccttggcttgggatttgccgcactcatgatatttgtttcatggagtttgaaaaagttcaataacgaaaatcaaacatcagagcattttaacactgcctcgcatagcgtaaggactggattggttgctagcgcagtagttagtagttggacgtgggcttctaccctgttgaccagtgctcaaaaaacttaccagtacggtgtatcaggtgcgttttggtatgcatcaggtgcatgcgtccaaattttgctgtttacagtactagcaattgaactcaagcgcaaagctcctaacgcccatacattccttgaggttgtcagagctcgatgtggccccatcgcacacggtgtatttctggtttttgcatatatcactaatatacttgttatggccatgttgttgtgtggtggatcggcaacaatttcttcggtgacgggcatgaacactgtagctgtttgctttttgctaccagttggtgttattatttatactatgtttggaggtattaaagccactttccttactgattatatccacaccgttattatcctggtcattttgatcatgtttagcttggccacttattctgctgataaaaaaatcggatctcctggaaagttatatgatatgttaaaggaagcaggtgatgctcatccagtagctggaaacgctcaaggtagttacttaactatgagaagccaagagggtgctatcttttttatcatcaatttggcaggaaactttggaacagttttcgtagataatggatattggcaaaaagctattgctgctaatcctgcatctgctttacctggctatatccttggtggtcttgcatggtttgcaattccctggcttgctgccacaaccatgggtctcgtggctctcggtttagaaaataaaccctatttccctacttatcccaacagaatgagtgacttggaagttagtgaaggattggttttgccttatgccgctatcgcattgatgggtcgagctggcgcaaacgctactttattgcttgttttcatggctgttacatctgcagcgtctgccgaattaatagccgtctcttcaatctttacctatgatatttacaagcaatacgttagacccagagccaccggcaaggaattgttatatacagggcatgcatctttgatagtttttggcttcgcaatgtcaggctttgccactggactttattatggacaagtatcaatgggatatctttatctattgatgggtgttttagtatgtccagctgttgttccagctacctgtgtaatgctttttagccgcgtgtctacaattgcagttaccgtttctccggttttaggaatcatttcgagtattattacttggcttgttgttgctcgtgctgagggaggcaaaacgctcactattgagacgactggtgcaaacaacccaatgcttgctggtaacgttgttggtttattgagtccagcattatatattttaattttgtcaataatttttccggaaaaatacgatttcaatcgtttgttggccacgtttgcaatgcatttctcatctgaagaagatgagattcaacaaacaaagaaattaaatcgtgcaagtgttatctctaaggttgcagcattaatcattactgcagcatttattattctttggccttggccaatgtatggaactggatatatattttccaaaagatttttcacaggatgggtagtcgttggattaatatggattttctttaccgtattcgctgttggaattttcccattgtgggaaggacgtaatgatatttatcaagttgtaagcaacatggcagcttcaatattcggaagaaaggttaatgatattgttgaagacgaaggcgttgtggtggaaaccatatcgattggctctggttcgaaggagaaagttaattttgaaaaaaaagacattgaaagtgtctaa

SEQ ID NO: 80 - DNA, 2234 bp, Zea mays
gttttctgcttctttctctctcccctccctcctctattctgttcccccctttccacctccctccctcctcgctaaccccacccaccggccaccgccccgcctccagcctcgccggtccccgccggaaccctagctccggagagtgccccggcctccccagccgccgatcggttccgggggcccggcgcccctccgcacgatcgcgcgagatccggggtcgccgccggccggggagcagaagccatatgtcgggggtcggcagcggcaggccgccggccgcccagaagatcctgcagtcgctgcgcccgccgctgtccttcgccacgccgtcgcggccgcccttcgccgcgcccgacgactaccaccgctttccgacaccggctgcggcgacggcccccgccgccacctcaggcggcgtcggtgcgggggctcctcctcgtgatactattgaggaggggctggtcatacggactccgctgaaaaggaaagctacaagtgaagaaaatgatgctgctgctgagccaagcgattgtatcattaccagtccaatgcccacttcggtctctggtaaaactgttaaagcttctaaggcaaaagctaagaacagtaaaactgggcctcagacacctacatcaaatgttggttcaccactcaatccaccaactcctgttggcacgtgccgctatgacagttcactaggacttctgacaaaaaagttcattaacttgctcaagcaagcgccagatggcattctcgatttgaacaatgctgcagaaacactagaggttcaaaagcgacgcatatatgacattactaatgtccttgaaggcattggactaatagagaagacacttaagaataggatccgttggaaggccctggatgattcaagtgttcaattagataatggtatttccgctttgcaggcagaagttgaaaatcttagtctgcaggagcaagcactagatgagcgtataagtgacatgcgtgaaaaactaagggggttaactgaagatgaaaataataaaaggtggctctatgtgactgaagacgacatcaagggattacccagctttcagaatgaaacactaattgcgattaaagcacctcatggtactacacttgaagtacccgatccagatgaggcgggtgattatctccaaaggagatatagaattgtattaagaagtacgatgggaccaatagatgtttacttagttagtcaatttgacgagaaatttgaggaactgggtggtgttgcgacacccgtcaagcattccaatgtgcccagacatcaacccgtggaagatttcaatacttatgctggacaaagtagcacaccaatggacgtggcgcatgatgtacagcatggccagaagattccccaggatcctagtgctttgcatgactttggagggatgacaaggattagtccttccgacgtccatacggattctgattactggctcctaacagagggggatgttagcatgactgatatgtggaaaacaggacaagaagtgcagtgggaccagatagatttcttgtcagaagatgttgtcacccctcgagcccataatcagcagccggtcacagttgacgggccacatatggaggttccaagcatggacccataatatcataatggcccaacaaaattgacatctggagcggtgagttttgaatgagggattctcgtgtgacagcaaatgcttattgcaacagaagggccagacggtttcatgagcgtatgtcatctggagtgtagtcagggcagagcagtccacaacttcagattggtgcacgcccggcacctctgttgtgaagactgacgagctcaactgactaagttaacagtctactgcctgattagtaagcgcagcactttagcttagcagacactgaggcgccagcttcttcgtgactttggtgctgtgcacttgctctcatattcaccaccgctccattcgcttaccaagctaacattatcataccagatcagtggacctccaccgaaaaatgctgcaaaatgtataaaacatcaggacaaaacagtgcacagtgcaaggggtgttggcgttacaggataagctatcgattgaaggcaggaaattctttgtacaattgtttgatgccccagaacagaacaaagcagagctgttcgcttgtagacaaatgtttctatgcatgtatttaaaaggagactcgattttttgacaaaaaaaaaaaaaaaa

SEQ ID NO: 81 - DNA, 1515 bp, Zea mays
agggaggcccgcgaccgaggcgaagcgcaggaccgccggcactgcagccgatcgaaaggcgctctcaaaagctctgcgctgcgctggcagctttgagctttctcgggccggagaaaagccgaaacaaacaaacggactggccgagtcgaggagagagagagagggtgagagggagaagagaaggcggagagagaaagcgagctgaggagcgcaggcgctgtcgctggcgaggacatgctcgcggcagcgcggtatgggctcaaaccataggcgtgtcaggaacggtggagagcggcgaccactactcgccttcgtctcggtcctcgcgcgctcctgggctgcctcttcgtgctagaaaccctcgcgtcgcgggagcttggttgcgactgcaagcgccaagctgctgtgccgtgggtggcggcggcgggagtggaagtggaaccgcagccgccagccggtgctgtgatggacgcgcagcagcagctggatttggtcatgcgtcaccagagcatggccaccgtctgcgagagcgaggtgcaggacgcgctggggtcgtcggagtcggatcccgcgaggccggcgcgcccgcgcggcaagaggagccgcgccgccgaggtgcacaacctctccgagaagaggaggaggagcaggatcaacgagaagatgaaggcgctgcagaccctcatacccaactcgagcaagacggacaaggcttccatgcttgatgatgccattgagtacctgaagcatcttcagctccaggtgcagatgttgtctatgaggaatggcctctatctgcccccaggaaacctgtctggagcacccgagactctggcacccttagaaatgtgcgcagcacttaaccaaagtggtgccaaggcatcaaattccggcgttgtcgttctacctggaaacaaaattcctgtagctcgtcttctacttgatccaccaaaccatgatcagcggcatgaaaacccgcttgtattacaaagtgttcctagtagttcgaccgctgtagagcctcggttccttcaacagccagcacagcccaacctccaatcctttcagctggctgtacctcccgagatgatcttcgacgaggcggacatgatgctaaagcatcgcctagcttcaggtcgagaaaccacatctctaccagtaggacatgaggccaagcctggtaggcaggaagcatgcatggtaaattctgatatttctaacagaggttcactcgggaaagaagtatttatgccctacttgcatagcttgcagagcggcgatacggagggaggtctgagggcaggatcaaactaactacacggtggttcaccctgcaagattttccccatcgggatggacagaggtgcctagctaggagtcgctagtcgatctgaaatgttagaagctagatcaggttgcagtctagtaaaccatcttgtaaaacagagagctacccatctatatgcacgcatgaaatgaatctcggccacactgacctggcggccttgttccagc

SEQ ID NO: 82 - DNA, 876 bp, Zea mays
accagcggtcgcagagttccatctgaatataaagttgctcattctcaaaccaagaggtgaaatatcgaactatgttctcgtgagaacctaaggctgccatagcttggacttctttcactgcttgcctcctttccatatcattatgcaattgcttgatgctccgtttaacagcatacaagcacccgtctatcctattcagaactttgaacacaacactgaagttgccataaccaattttctctatttcatggaaatcagttcgatagcgtgaaagaccattaccaccaattgaaggagagaatactgctgagttgcactgcctcccaccgtaaacagcagcatctatgcatggatcggtattgaggtatggattcttgacgcatggcggaggcatcacccggcaacgcagagccactgctgactgggagacataaccacccctcttttccagcgcaggctgcttcggctgctcttcttccgaatcatctcgagtcaagctgtcacggacgtcgttaacgctcgatccatgcatagatgctgctgtttacggtgggaggcagtgcaactcagcagtattctctccttcaattggtggtaatggtctttcacgctatcgaactgatttccatgaaatagagaaaattggttatggcaacttcagtgttgtgttcaaagttctgaataggatagacgggtgcttgtatgctgttaaacggagcatcaagcaattgcataatgatatggaaaggaggcaagcagtgaaagaagtccaagctatggcagccttaggttctcacgagaacatagttcgatatttcacctcttggtttgagaatgagcaactttatattcagatggaactctgcgaccgcttag

SEQ ID NO: 83 - DNA, 1632 bp, Gossypium hirsutum
atggtggctccgcagttagctgctgtctttactaagttgcagacactatctacttcagaccatgcgtctgtggtctccatgaacatatttgtagcgcttctttgtgcttgcattgtgattggtcatcttttggaggagaatagatggatgaacgaatcaattactgcccttatcattggtgtttttactggggtcattattttgttgacaagtgggggtaaaagctctcatcttttagtcttcagtgaagatctgttctttatctatcttctgccccctattatattcaatgctgggtttcaggtgaaaaagaagcaatttttccgtaactttatcaccatcatgctgtttggggctgttggtacactaatatcttgtacaattatctctttaggtgtaattaacttcttcaaggaaatggacattggctccttagacattggagattttctagcaattggtgcaatatttgctgcgacagattctgtttgcacactgcaggtgcttaatcaggatgagactccattactctacagtttggttttcggagagggtgttgtaaatgatgcaacatctgtggtgcttttcaatgcaatccagagttttgacctcgttaataccagtcctagaattcttctggagtttattggcagctttttgtatttatttttagcaagcactatgctgggagtgattgttgggttggttagtgcttacatcatcaaaaagttgtactttggaaggcactcaacagatcgtgaatttgctcttatgatgcttatggcatacctttcgtatatcatggctgaactgttctatttgagtggcattcttacagtattcttttgtgggattgtgatgtcacattatacctggcacaatgtaactgagagttcaagagtaactacaaagcatgcctttgctaccttgtcatttgttgctgagacttttctctttctttatgtcgggatggatgctttggacatggagaagtggagatttgtcagtgatagccctggaacgtcagttgctgttagtgctgtgctgatgggtcttgttatggttggaagagcggcttttgtgtttcccctgtcatttttatccaacttggcaaagaaatcaactagtgagaaaatcagcttcagggaacaaattataatatggtgggctgggctcatgagaggcgctgtatctatggcacttgcatataatcagtttacaagggggggccatactcagttgcgaggaaatgcaattatgattacaagcaccataaccattgttctattcagcactgtggtttttggtttaatgactaaacctctaataaggttcttgctgcctcatcccaaaccaacagccagcatgctctcagaccaatccactccaaaatcaatggaggcaccatttctcggaagcggccaggactcttttgatgatagtttaattggagttcatcgaccaaacagcattcgtgcacttcttacaactccagcacacactgttcattactattggcgaaagtttgataatgccttcatgcgccctatgtttggtggccggggttttgtgcccttcgttcctggctccccaacagaaaggagtgaacctaatctgcctcaatggcaatga

SEQ ID NO: 84 - DNA, 1362 bp, Saccharomyces cerevisiae
atggccaagagaagacaaaagaaaagaacacatgcacagcttacacctgagcaggaacaaggtatacctaagtcaatggtaatcagagtgggtcaaacttctttggccaaccattctctgaaccaattagtaaaggacttccgccaaatcatgcaaccacatacggctataaaattgaaagagcgcaagtccaataaactgaaggatttcgttgttatgtgtggcccattaggtgttacgcatctttttatgttcactcaatctgaaaaaacaggaaatgtctccctaaagatagctagaactccgcaaggtcctactgttacttttcaagtattggactattctctgggtagagatatcaaaaaatttttgaagagacctaaatcgttgaataatgatgatgtattaaatcctccattgctagtgctaaacgggttttccacatccaaaagatctggtgaagacgaccaggatgtaaacgtggagaaggtcattgtttctatgtttcagaatattttcccacctctgaatcctgcgagaacttctttgaattctatcaaacgtgtatttatgatcaataaagacagggaaacaggggaaatttctatgcgccactattttattgacattcgagaagtagagatctctagaaacctaaaaaggctttataaagccaaaaataatctaagtaaaacagtgccgaatttgcatcgaaaagaagatatttcttctttgatattagatcacgacttaggcgcctatacatcagaatctgaaattgaagatgacgctatcgtgagagtagttgataatcaggacgtgaaggcaaagcattctcaaagtttgaagtcccaaagaacaccggtcgaaaagaaggataataaagagcgtgaaaaagaaacagaagaagaagatgtggaaatggaggaacctaagccttcagaaaacttgcaaccaaccccacgtaagaaagctatcaaactaactgaattaggaccaagattaactttaaaactggtcaagatagaagaaggtatttgttcaggtaaagtgttacatcatgaatttgttcaaaaatcaagcgaagaaatcaaagctttagaaaagagacacgctgcaaaaatgaggctgaaggaacaaagaaagaaggaacaagaagaaaacattgctaaaaagaaggctgttaaagacgctaaaaagcaacgtaaattggaaagaagaaaagctagagcagcagaaggaggtgaaggtcaaggaaaagatgatgcgatgagcgatgatgagtcttcatcaagtgacagcgaacattatggtagcgtaccagaggatctagatagtgacttatttagtgaggtcgaataa

SEQ ID NO: 85 - DNA, 723 bp, Saccharomyces cerevisiae
atgtctacgttcatattccctggtgatagctttcctgtagaccctactacacctgttaaactgggccctggcatatattgtgaccccaatactcaagaaatacgacctgttaatacaggtgttttgcatgtttccgctaagggtaagagtggtgttcagaccgcatatatagactattctagtaagagatacattccatctgtaaacgattttgtaatcggtgtcattatagggacattttcagatagctataaggtttcgttgcaaaatttctcctccagtgtttcactatcgtatatggcttttcccaatgcttcaaagaaaaacaggccaactttgcaagtgggagatctagtgtatgcgagagtttgtaccgcagaaaaggaactagaagccgaaatagaatgttttgactcaactacaggacgcgatgctggtttcgggatattggaagatggtatgatcattgacgtgaatttcaatttcgcacgccagttgcttttcaataatgacttcccgttattaaaagtgttggctgcacataccaagtttgaagtcgccattggtctcaatgggaagatctgggttaagtgcgaggaattatctaacactttagcttgttatagaaccataatggagtgttgtcaaaaaaacgacacggcagcgttcaaggatatagcaaaaagacagtttaaagaaatacttacggtcaaggaggagtag

SEQ ID NO: 86 - DNA, 672 bp, Saccharomyces cerevisiae
atgagcgtccaagcagaaatagggatattagatcatgtagatggttcatctgaattcgtatcacaagacaccaaggttatttgttctgtaacaggccctattgaaccaaaagcaagacaagaactgcctacacaattagcattagaaattattgtacgtcccgcgaaaggggtggccacaacaagagagaaggtactcgaagataaattacgggcagttctgaccccactcatcactcgtcattgttacccaagacagctctgccagataacttgtcaaattctggaatctggtgaagatgaagccgaattctccctgagagagctaagttgttgtataaatgcggcatttttggctttagttgatgcaggaattgccttaaatagtatgtgcgcaagcatccctattgcaataatcaaagacactagtgatatcattgtcgatcccactgccgagcaattgaagatttcgctctctgtccacactttagctctggagttcgtcaatggcggtaaagtcgtgaaaaacgttttattgttagacagcaatggtgattttaatgaagatcaattgttcagtttactggagctgggtgagcaaaagtgtcaagaacttgtcacaaatataagaagaataatacaggacaatatatcacctcgtctagttgtatag

SEQ ID NO: 87 - DNA, 179 bp, Zea mays
gacggcgggggagggggcgagcctcacctcgctggccgccaagtactgcgatcgcgttaacgctgtgatgtgaaacttgaaattatttgtgtttttgattgtgattgtgagagtaacggtggcggccgcctgcaggagcggcggccagcgaggtgaggctcgccccctcccccgccgtc

SEQ ID NO: 88 - DNA, 2146 bp, Glycine max
ttttatccctccagttctacacacatctcgattctcccagacacaaattcactttcaacaattttattttttccatataaaaaaaggatcaaacttgagaagtctcttctgttcccaaccactcaaaatgtcctccatggcttcctccaccgctttcttcacacccctccatgatttcactcaagccagaacaaccccatcaccccctttgcctttcatcaaatcctcctttgcttcctccaagtcaaccttttttcaccctgccctttccctacaaacctcttccaactttcccaggctttttggaaagcctaagtttttctctgttcatgcaagggctgccacagaaaaaaccatttatgattttactgtcaaggatattgacagaaaggatgtttctcttagcaagtttaaggggaaggttctattgattgtcaatgttgcttcacgatgtggtttgacatcatcaaattactcggagctgtcacgcttgtatgaaaaatataagaatcaaggtttggagattttagctttcccctgcaatcaatttggtatgcaggaacctggatcaaatgaagatattaagcaatttgcttgcactcgatataaagcagaatttccaatttttgataaggttgatgtcaatggaccatttacaactccagtgtaccagtttctgaaatcgagtgctggaggctttttgggtgatcttataaagtggaattttgagaaattcttggttgacaaaaatggtaaagttattgaaagatacccaccaacaacgtctccttttcaaattgagaaggatatccagaagttacttgctgcctgagtgtaattcagaacacaaacgagagctgtatgtaagagcacgaaccgagtgatgtgtgcacaataagttaaaactgaagatgagcaataagtatagctatgcaatttactttggtgtctttactaaagaaattatcagtttagggaagaaaattatactgtattaccccaaaatgattgaatatagtatatgtttctctctttctttttttctttttgtggaagaattctctggccatttatattattattttttagttatcgtataagttttaggtattcttattaatatcagatctcatcgtcatcatctactcttgtgagtgagaaaaaacccatatcctctatacacatacataacctatttacaagatcagaacattccaagtttttttctccaaccgagtcatccgatcagactcggccaggtcaactcagatccgaacccgacccgaaaacagacccggttcactttctccggcgactactttaatctccaccgttcatcacgtgtggttcagccctgaccccagcaactaaagtacatcactttcctcagagagtcatcggcttggctcaccctattcttcgcgtcggagctccccgctgccgcgccagagacgtcaggtccaacgacgccggacagcggccggagatcagacagggctccgccggagaagaggcggctccggttgtggtggatggagttgagcgccgtcttgcacttgtggccgggatcggagaatttccaatttttgataaggttgatgtcaatggaccatttacaactccagtgtaccagtttctgaaatcgagtgctggaggctttttgggtgatcttataaagtggaattttgagaaatttcttggttgacaaaaatggtaaagttattgaatagatacccaccaacaacgtctccttttcaaattgagattgaagcctgaagaaggatatccagaagttacttgctgcctgagtgtaattcggaacacacacgcgggagctgtatgtaagagcacgaaccgagtgatgtgtgcacaataaagttaaaactgaagtatgtgggcaataagtatagcttatgcaatttactttggtgtctttactaaagaaattatcagtttagggaagaaaattatactgtattacccccaaatgattgaatatagtatatgtttctctctttttctttttttctttttgtggaagaattctctggccatttatattattattctctaagtaatatgctttcattgagaaaaaaaaaaattaaaaactcgcaaaaaaaaaaaaaaaaaaaaattaaaaaaa

SEQ ID NO: 89 - DNA, 1013 bp, Glycine max
gcggggaaagagaagagattttgtgccaacaagttgttgaatcagaatccagaatgagaacactataaatgcttcaactcctaaatttgcaagacaaacataaaacagacttgcctgtaaaccagcaaaagtggtaggaagagtcttgaacatcttgaagacagacagaaaatgggtgcttctcaatcaatctcagaaaaatcctttcatgaattcactgtcaaggatgccaggggcaaagatgtgaacctcaacgcctacagggggaaagttcttcttgtaattaatgtcgcttcaaaatgtggatttgcggatgccaattacacccagttaactcagctttactccacgtacaagagcaggggacttgagatattggcatttccatgtaaccaatttttgaagaaagagccagggacaagccaggaggcacaagactttgcttgtacaagatataaggctgagtatcccatttttgggaagatacgtgtgaatggatcagatactgcaccagtcttcaaattcctgaaaacgcagaaatctggagttatggggtcaagaatcaaatggaatttcacaaagtttttagtcgatgaggaaggccgtgtcatccaacgttatagcccaaccaccaagccattagccattgaaaatgatatcaagaaggcattgcgggtggcttgaaagacgactgcacaattatttcaagccattgttcgtgttgaagatatctgaaaccaaaaagaagtaaaagaaaagattatgtgattgatgtttattctattgattatttaacgcatatttatgtccatggttttatttgtgatgttgtatgaaatttattttcagcctctcgatatcaattatctgttaaagtggattccaaggaaattgattattcaattttttgtcaagttaacgtatgtcactatgggcatgttttgttggggaggtgctatctctaagtagttgcatgtcaacaaaaactcgtgaaataaaacagtgcttcattt

SEQ ID NO: 90 - DNA, 789 bp, Zea mays
gggtggtctaccaaaaacttcgtcacatcatacaccttgccgccgatgatgagccagcaatcctccttggagttgtgcttggcgaccgcgtcgagggtgaagaccttggacatggctgctgcctgctgtctgctttttttttttttttatttttttttttttaaatccaacaccggggaaagattaaatgaaacactgagatccagttacccattcaacaatttatataaggtacatgattctgctttatggttcagttccagattcaaggcccaccaaatgaacggaatgcagggcagtcttgtcacgtttaacattttagctgctacccaatcctagctggacgcatgtataacaagcaactctctatactggggattagatgtgggccggctctctcaagccaccccgccgctggttgccgtcctgatgatctgaaacaacgatgatccaatgacgacaaagatgaagaacccaagcactagagggccaacagggtagtcatttcccttcttgacagtggtttcaggcacagaacccctcctggtgatgttcttctggaactttgcggtcttcctgtcagcgaggcgccttgaagtagtcatgttcccgccggtgagcgagatcgccggaccgccgagcctgtggcggtggggtcggagcagcacgaatgctcgagcctcgaggagaaagagaggaagggatgtgtggtggccgtcccggccggcctcgaggaagcagagggtgctttataggagagtggcgtgcagagtgtgccgatggccggat

SEQ ID NO: 91 - DNA, 782 bp, Zea mays
cggacgcgtgggcagaaagcaagccaatagctagaggttccttcgctgtgctgctagtgctagacgacgacatatagaagaaatatatatagagaaagagagaaaagatgaggccggagagagttggatcaggtggtgtttgggtgaagctcatgggcggcgccggcgggcccccgccgagcccatggaggacgccgacaccctacatcttcctggcgctctccttcatgatgggcgtcgtcgcggtggcgctcgccgtgctcatctgcatgcgcaagaagctgccgtcgtcctcgccgcagggggccgacgagaaggcggcggccgaggcggcggcggcggcgcgggccctcgacccgctgcaccgcgagcccaaggtcgttgtgttcatgccaggcgaccacgacgcaccgtccttcgtcgccagcgccaagccgctcggcggcgacggcgcggcggcagtgtagcctggagggatcggaaacggcgactgacgacatcgaggggctaccccggcggtgacggcgcggcgcggtggtagtgtgtgtgtctgtgcgcgcgcgcgtcgcggacgccgagccggagacacgcggtcaattttatgaataggttttttttgtccccttcccacatgagaatctgagactatgaggggcggcgcgccttttgaaatcagcgaaaacgaatgtttggtttggtttggtttggtttggtttgtttcggcaaatgctcccagcttccggaaacgcgtgggacctttatttttggtttggctgcgcgtg

SEQ ID NO: 92 - DNA, 2223 bp, Arabidopsis thaliana
ttcttgtttgttgattaacccttaattaatccgggcgcgcctgatttatcacaagtttgtacaaaaaagcaggctcctgcaggaccatggttaccttatgtgccacgttactgatccttctctcaatctttcttgcaactccgtcgaatgttcgaggaaatgcagagctgaaggctttaatggagctgaaatcgtcgcttgaccctgaaaacaagcttctccgttcatggacgtttaacggcgatccatgcgacggatctttcgaaggaattgcatgtaaccagcatctaaaagtcgcaaacatatcattacaagggaaacgtttggtcggaaaattgtctccggcggttgcagagctcaaatgtttgtcaggtctttacttacattacaatagtctctctggagagatacctcaagagatcacaaatcttactgaattatcagatctttatctcaatgttaataacttctctggtgagattccggcagatatcggctccatggctggcttgcaagttatggatctttgttgcaacagtttaacagggaaaataccaaagaacattggatccttgaagaaacttaatgtgttgtctctgcaacacaacaaactaaccggagaggttccttggactttaggaaacttgagtatgttaagcaggcttgatttaagcttcaacaatctgttaggtttaatcccaaaaaccctagccaacattcctcagttggacactcttgacttgcgcaacaatactctctctggctttgttcctcctggtcttaagaagttgaatgggagcttccagtttgagaacaacaccgggttatgtggtatcgattttccttctttgagagcttgttctgctttcgataatgcgaataatatcgaacaatttaagcagcctcctggtgaaatagacactgataaatcagctcttcacaacattcccgagtctgtatatctccaaaagcattgcaaccaaacacattgcaagaaatcctcatcgaaactcccacaagttgctttgatttcaagcgtgattaccgtcactataacattgattggtgctggtatattgaccttctttcgctacagaagaaggaagcaaaagatcagtaacacacctgagttttccgagggaagactaagcacagatcaacaaaaagagttccgtgcatcgcctttagtgagtcttgcctacactaaagaatgggatccgctaggtgatagcagaaacggagctgagttttcacaagagcctcatctctttgttgtaaatagtagcttcaggtttaacttagaagacattgaatcagcaacccaatgcttctcagaagctaatctattgagcagaaacagcttcacctcagtgttcaaaggagtcctcagagatggttctccggtagctatcagaagcatcaacataagcagttgcaagaacgaagaagtcgaattcatgaacggtttaaagcttttatcttcgttgtcacacgaaaacttagtgaagctacgtggattctgctgttctagaggcagaggagagtgtttcctcatctatgattttgcttcaaaaggaaagctttcaaattttcttgacttacaagaacgcgaaactaatctggtccttgcttggtctgcaagaatctccatcatcaaagggattgcaaaaggtattgcttacttacatggaagtgatcaacagaagaagcctacaatagttcatcgaaacatctctgtcgaaaaaatcctacttgatgaacaatttaacccgttaatcgctgattcgggtcttcacaaccttctagcagacgatatggtcttctcagcactcaaaacaagtgcagcaatgggatatttagctccggaatacgtcacaaccggaaaattcaccgagaaaaccgatattttcgcctttggagtcatcattctccagatactctctggtaagctcatgcttacaagttcactgagaaatgcagctgaaaatggagaacataacgggttcatcgatgaagatcttcgtgaagagtttgataaaccagaggcgactgcaatggcgaggattgggataagctgtacacaggagataccaaacaataggcctaatatagagacattgcttgagaatataaactgtatgaagagtgaatgactcgagacccagctttcttgtacaaagtggtgataaattggagctctgcagagctttcgttcgtatcatc

SEQ ID NO: 93 - DNA, 591 bp, Zea mays
ttcttgtttgttgattaacccttaattaatccgggcgcgcctgatttatcacaagtttgtacaaaaaagcaggctcctgcaggaccatggctgagccgacgccgtcgcagtcgccagcgcagacgccgcccccgccgccgacgcagcagactcccgcggcgggtgggctcgaggacatgctggcgtgtgtggcggcgctggaggccgcgctgctgccgtgcctccccgcgcgcgagctccaggccgtcgaccgctccctccagtcctcccaccagattgatgttgagaggcacgcaagggatttcatggaggctgccaagaagctccagtcttatttcatcagcctgcagcgtgaggaaccgccatctgcagaagagatgcttcgaaaggagattacgacaatggaggaagagttgaagagcaagtctgagctcattgccaagcacaagaagttgattgaagggtggcaaaaggaactgaaggagcagctgagcaagcacatcacggagcttgaaagggtgtgactcgagacccagctttcttgtacaaagtggtgataaattggagctctgcagagctttcgttcgtatc

SEQ ID NO: 94 - DNA, 1651 bp, Pseudomonas syringae
catttatttgtcagctttcaaactctttgtttcttgtttgttgattaacccttaattaatccgggcgcgcctgatttatcacaagtttgtacaaaaaagcaggctcctgcaggaccatgcagcttaaagattccaccctgttccgccagcaagcctacatcaacggccagtggctggatgcggacggtggtcagtcgatcaaggtcaacaacccggcgaccaacgagatcctcggcactgtgccgaaaatgggcgcggccgagacgcgtcgggcgattgaggcggctgacaaggcgctgccggcctggcgtgcgctgaccgccaaagagcgcggtaacaagctgcgtcgctggttcgagctgatgatcgagaatcaggacgacctgggtctgctgatgaccctggagcagggcaagccgctggctgaggccaagggcgagatcacgtatgcagcgtcgtttatcgagtggttcgctgaagaagccaagcgcgtgtacggcgatgtgatccccggtcaccagccggacaagcgtctgattgtgctcaagcagccgattggtgtgacggcggcgattacgccgtggaatttcccggcagcgatgatcacccgcaaggccggccctgcgctggcggcgggttgcacgatggtgctcaagcctgcgtcgcaaacgccgttttctgcgttggcgctggctgaactggccgagcgtgcgggtattccggccggcgtgttcagcgtggtgacgggcagcgcgggcgatatcggcagcgagctgaccggtaacccgatcgtgcgtaaattgtccttcacgggttcgaccgagatcggtcgccagttgatggctgaatgcgccaaggacatcaagaaagtgtcgctggagctgggcggtaacgcgccttttatcgtgttcgacgacgccgacctcgacaaggccgtcgaaggcgcgatgatctccaagtaccgcaacaacggtcagacttgcgtctgcgccaaccgcatctatgtgcaggacggcgtgtatgacgcattcgccgagaagctcaaggtggcggtcggcaagctgaaaataggtaacggcctggaagacggcattaccactggcccgttgattgatgaaaaggccgtggccaaggtcaaggagcacattgccgacgctgtcagcaaaggtgcgaccgtgctgaccggtggcaacagcctggaaggctcgttcttcgagccgactattctggtcaatgtgtcgaaagatgccgccgttgcccgagaagagacgttcggtccgctggccccactgttccgtttcaaggacgaggctgaggcgattgcgctggccaacgataccgagttcggtctggcgtcgtacttttatgcgcagaacatgagccgcgtgttccgggtggccgaggcgctggaatatggcatggtgggtatcaacaccggcctgatctccaacgaactggcaccgttcggcgggatcaagtcgtccggcctgggccgtgaaggttccaagtacggcattgaagattatctggaaatcaaatacctctgcctgtcggtctgactcgagacccagctttcttgtacaaagtggtgataaattggagctctgcagagctttcgttcgtatcatcggtttcgacaacgttcgtcaag

SEQ ID NO: 95 - DNA, 802 bp, Zea mays
tgtttgttgattaacccttaattaatccgggcgcgcctgatttatcacaagtttgtacaaaaaagcaggctcctgcaggaccatggaaaatgatagaaggcaacttggtcagatcgatccaagaagagcccgctttccttgctgcgtagtatggactccaataccattcatcacttggttggtgccctttatcggtcacattggcatctgcagagaagacggtgtaattctggacttctctggtccacattttgtatcagttgacaattttgcattcggagctgttgcgcgctacattcaagtaaactgcgatgagtgctataagcttattgaacctgaaggagatgccacgtgggacggcgcgctgaagaaaggcacgcaggagttccaaaacaggaactacaacctgttcacctgcaactgccactcctttgtcgcaaacaatctgaacaggctgttttattccggccacgacgaatggaatgtggtcagcttggctgctgtgatgttcttacgaggccgctgggtgagcacggcatcggtggtgaagaccttattgccatttgcagttgtgctttccatcggtaccttccttggcggcacgaccttcctgaccggccttcttgctttcgccgctgcgatgactgtctggttccttgtgggcacctactgcatcaaaggtctcatagagttgtgattagagtatgttagactcgttgtagggggttcaagggtggcatatttttactcgagacccagctttcttgtacaaagtggtgataaattggagctctgcagagct

SEQ ID NO: 96 - DNA, 411 bp, Zea mays
atggcgcaagttagcagaatctgcaatggtgtgcagaacccatctcttatctccaatctctcgaaatccagtcaacgcaaatctcccttatcggtttctctgaagacgcagcagcatccacgagcttatccgatttcgtcgtcgtggggattgaagaagagtgggatgacgttaattggctctgagcttcgtcctcttaaggtcatgtcttctgtttccacggcgtgcatgccgcgggatatcacaagtttgtacaaaaaagcaggcttcgaaggagatatcagcagagtagccagcacgacaagcccgatcagcagacagcaggcatggcactcgcggaggccgacgacggcgcggtggtcttcggcgaggagcaggaggcgctggtgctcaagtcgtgggccgtcatga

SEQ ID NO: 97 - DNA, 1833 bp, Xenorhabdus nematophila
ttatttgtcagctttcaaactctttgtttcttgtttgttgattaacccttaattaaacaatggcttcctctatgctctcttccgctactatggttgcctctccggctcaggccactatggtcgctcctttcaacggacttaagtcctccgctgccttcccagccacccgcaaggctaacaacgacattacttccatcacaagcaacggcggaagagttaactgcatgcaggtgtggcctccgattggaaagaagaagtttgagactctctcttaccttcctgaccttaccgattccggtggtcgcgtcaactgcatgcaggccatggccgttgaacatgttttgtccatgattgaagaacatcaggtgaagtttattgacttacgttttactgataccaaaggtaaagaacaacatatcaccattcctgcccaccagattgatgaagacttcttcgaagatggcaaaatgtttgacggttcatctatcggtggctggaaagggatcaatgaatccgacatggtgttaatgccagatccaacgaccgcaatgcgggatcccttctttaatgatgccacactgatcctgcgctgtgacatcctggaacccggcactatgcagggttatagccgtgatccgcgttctattgccaaacgtgcggaagatttcctgcgtgcaagcgatattgctgatacggttctgtttgggccagagcctgagttttttctgttcgatgacattcgtttcggtagttccatttcgggtagttattaccatattgatgatgttgaagccgcatggaacagtggaacacgctatgaaggcggtaacaaaggccaccgtccgggcatcaaaggcggttattttccggttcctcccgtggactcctctcaggatctgcgttcagccatgtgtctgacaatggaaaaaatggggctggtggttgaagctcaccaccatgaagtggcgaccgcaggccagaatgaaatcgcgacccgctttaatactatgaccaaaaaagcggatgaaacccagatttacaaatatgtggtgcacaatgtggcccattcattcggtaagaccgcaacgtttatgccaaaaccgctggtaggcgataacggctctggtatgcactgccacatgtcgctgtccaaaaatggcaccaacctgttcgcaggtgataaatatggtggcctgtccgaactggcgctttactacatcggcggcgtaatcaaacatgcccgtgcattgaatgcctttaccaacccaaccaccaactcgtacaaacgtctggtaccgggttttgaagcaccagtgatgctggcttactcagcccgtaaccgctctgcttccatccgcattccggttgtggcaagcgccaaagcccgccgtattgaagtgcgtttccctgatccggccgcaaacccttatctgtccttctctgccctgctgatggcaggtcttgatggcatcatcaacaaaatccaccctggtgatgcgatggacaaaaatctctatgacctgccagcagaagaagctcaagagatcccaaccgtagcctcttctctggatgacgcgttagccgctctggatgcagaccgggaattcctgactcgtggaggtgttttcactgatgatgccattgatgcttatatcaaattactgcatggtgaaatcgaacgcgtacgcatgacgccacatccgctggagtttgaactgtattacagcgtgtaatgcttgatggcattacgactatccttttttgttgccgtgaaacttttgctcgagacccagctttcaaatacccagcaaattggagctctgcagagctttc

SEQ ID NO: 98 - DNA, 2434 bp, Arabidopsis thaliana
gagttaaatttcttcgtcttccatacaaagcgactacttcaccatcaccttcgggcacgcgacctatttaagcatcctaacttcttcttcaaagcttgaaaaccagaaaacaaaaggaagctctctgttcaaatcaaaaagagagatcgtacgcaaaagtttccgatatggctcgctcgttcggagcaaacagcactgttgtgcttgcgatcatcttcttcggatgtttatttgcgttttccactgcaaaagaagaggctacgaagttaggatcagttattgggatagatcttggtaccacttactcttgtgttggtgtttacaagaatggtcatgttgaaattattgccaatgaccaaggaaaccgtattacaccttcatgggttggttttactgactctgaaaggctcattggtgaggctgctaagaatcaggcggctgttaatcctgagaggactgtcttcgacgttaagagattgatcgggcgaaaatttgaggacaaggaggttcaaaaggacaggaaacttgtaccttatcagattgtgaacaaggatggtaagccatacattcaagtcaagatcaaggatggtgagactaaggttttcagtcctgaggagatcagtgccatgattctgactaagatgaaggagacagccgaagcctaccttggaaagaaaatcaaggacgctgttgtcactgttccagcttacttcaatgatgctcaaaggcaagctaccaaggatgccggtgttattgctgggctcaatgttgctagaatcatcaacgaacctactgctgctgctattgcctacggtcttgataagaagggtggtgagaagaacatccttgtatttgaccttggtggtggtacttttgatgtcagtgtcttgaccattgataacggagtgtttgaggttctctccacaaatggtgacactcacttgggaggtgaggactttgaccacaggatcatggagtacttcatcaagttaattaagaagaagcaccagaaggacatcagcaaggacaacaaggctcttggtaagctccgaagggaatgtgagagggcaaagagagctctaagcagtcagcaccaagtccgtgtagagattgagtcactctttgatggtgttgatttatctgagccactcaccagagctcgtttcgaggagcttaacaatgatttgttcaggaagaccatgggacctgtgaagaaggccatggatgatgccggtctacagaagagccagatcgatgagattgtccttgttggtggaagcaccaggatcccaaaggttcagcaactgttgaaggacttctttgaaggtaaagagccaaacaagggtgtgaaccccgacgaggctgttgcctatggtgctgctgttcagggtggtattttgagcggagaaggcggtgatgagaccaaagatatccttcttcttgatgttgcgccactcactttaggtatcgagactgtaggaggagtgatgacaaagttgatcccaagaaacacggttattccaaccaagaaatctcaggttttcacaacgtaccaagaccagcagaccaccgtctccattcaggtctttgaaggtgaaagaagtctcaccaaggactgcaggctactcgggaaattcgacctcactggagtcccaccggccccaagaggaacccctcaaatcgaggtcacatttgaagtggacgccaacggtattcttaatgtgaaagcagaggacaaggcgagtggtaaatcagagaagattacaatcacaaacgagaagggtcgtctgagccaagaagagattgaccggatggtgaaggaggcagaggagtttgcagaggaagacaagaaggtgaaggagaagatcgacgccaggaatgccctggagacatacgtgtacaacatgaagaaccaagtgagcgacaaggacaagcttgcagacaaattggaaggagatgagaaggagaagatagaagcagcgacgaaagaggccttggagtggctcgacgagaaccaaaactcagagaaagaagagtacgacgagaagctcaaggaggtagaggcagtgtgtaacccaatcatcacagcagtttaccagagatctggcggagcaccaggtgcaggaggagaatcatcgactgaggaggaagatgagtctcacgatgagctctagatgtcttctgttattgttaatttattaaaccatagagacaagttttgaggatgaaacgtcgtttttgttttttgtatttggtttcctttttcttatggatttttaggaaaggggagagattaagtagcgtcccttctttagtctccctggacgttctctttatgttcatctgataactttacttcttcataacaaatacctttttttctattcaacatcaaaaaaaaaaaaaaaagggcggccgatcagaggatcaagct

SEQ ID NO: 99 - DNA, 2180 bp, Oryza sativa
gctgttgctcttgttcacttgtgctcacagcacctggtaaccccacatacagtgatcacacaacaaacaatatctgttgtttgtgtataaatagccctaacatggcttcctaattcctataaacaacaagtgtgagaaaacccaagaacgaaacacataggagagaaatgagttctctggatgccactactcctagatatgacgagtttaaaaggatctaccaccttttccttttccatgcacacccattctggctccaactgctgtacttcctcttcatctccctcttgggtttcttgatgctgaaagctctgccgatgaagaccagcatggtgccgaggcccatggacttggacctgatcttcacgtcggtgtcggcgacgacggtgtcgagcatggtcgccgtcgagatggagtccttctccaactcccagctcctcctcatcaccctcctcatgctgcttggtggtgaggtcttcaccagcatccttggcctctacttcaccaacgccaagtactcctccaagatgatagcaaccttacctgatgatgacgaccatggtggcagtggcaaaccaccaccaccaacgacgtcaccttcgtctaccctagtggagctcgagctcgctcctcccatggacgtcgtcgtcgtcaaccctaccaccactgcgacgacgcacgacgaggtagagctagggttaggacgtcggaacaagcgcggctgcacctgcactactactcacacgtcgtcgtcatcatcggcatcgaagacgacgacgacgaggctactgatgttcgtggtgatggggtaccacgcggtggtgcacgtcgccgggtacacggccatcgtcgtgtacctcagcgccgtcggcggcgcgggggcggtggtcgccgggaaggggatcagcgcgcacacgttcgccatcttcaccgtcgtctcgacgttcgccaactgcgggttcgtgccgacgaacgaagggatggtgtcgttcaggtcgttcccggggctcctcctcctcgtcatgccgcacgtcctcctcgggaacacgctcttcccggtcttcctcaggctggccatcgccgcgctcgagagggtcaccgggtggccggagctcggcgagctcctgatccggcggcggaggggcggcggcgagggctaccaccagctgttgccgagctcgcgcacgcggttcctggccctcaccgtggccgtgctcgtggtggcgcagctggcgctcttctgcgccatggagtggggctccgacgggctgcgggggctcaccgcgggccagaagctcgtcggcgcgctcttcatggcggtcaactcgaggcactccggtgagatggtgctcgacctctccaccgtgtcgtcggccgtcgtcgtgctctacgtggtgatgatgtacctgccaccttacaccacttttgtacctgtccaagacaaacaccagcaaacgggagcacagtccgggcaggagggcagcagcagcagcagcatatggcagaagctgctcatgtcgccgctctcgtgcctagccatcttcatcgtcgtcatctgcatcacggagcggcggcaaatcgccgacgaccccatcaactacagcgtcctcaacatcgtcgtcgaggttatcagtgcgtatggcaatgtggggttcagcacggggtacagctgcgcgaggcaggtgaggcccgacggcagctgcagagacctgtgggttggcttctcagggaagtggagcaaacaagggaagctcactctcatggccgtcatgttctacggcaggctcaagaagttcagcctgcacggtggtcaggcatggaagatagaataacgcctaactgcaagcacccatgcatgcatgacaacttcgttactaattaatggggcatttcagccggccgccgtactagactacaagagatcgatcgataggtctcccctcctaaaactcctccttaatctgatctccacgagttcttgatcagggttacttatatattataaaggaatgatcagataaatatatgtctatatcaggatctggtcgatctctagatatctgtcttttttttttttgggtaatgcatgtaagcaagtagcaattgctagacatatatatgtgttagcttacgagagtatatactggcgcttgagtcgtgatgatgtgttttttcctcag

SEQ ID NO: 100 - DNA, 1737 bp, Arabidopsis thaliana
atggatcaagaagctcttctcgtcggaagaactcttctgaagcgcggtattccgaccattcctttcattctagcaagtcaggctttggagaaacttgcatattttggtttggtaccgaacatgatactcttcttgacggtggaatacggcatgggaacagcggaagcggccaacatccttttcctctggtctgccgccaccaatttcttccctcttgttggtgcttttatcgctgattcttacaccggtcggtttcctctgatcgggtttggatcctccatcagccttacgggaatggttttgttatggctgacaacaataattcgaccagaatgcgataaattaacaaacgtgtgccaacccaccacactgctcaaaagtgttcttctatattccttttttgccctcaccgccattggtgccggcggcgttagatcctcctgcttagccttcgctgccgaccagctccaacctaatcagacatcacgtgtcaccacatcatccctagaaacgctcttcaactggtactacttctccgtcatggtcgcatgctttctttctcagtctttgctcgtcttcgttcagacaacgtatggttggcagatcggttttggagtttctgtcgctgccatggctctatcggtcgctttgttcttcgcggcgtctccgtactatgtaaggtatttgaataaagcttgcgtcacaactaattcgaagcaagacctagccctaacagggaactcaaggaatccatggaagctatgtagggtgcaacaagtagaagatcttaaatctctcatcaatgtcataccaatttggtcaacagggatcatcttgtcacttgtcacggcttgccaagtctccttcatagtccttcaagctaagaccatggatcgccacaccttcattcagggtttcgagattcctccaggctcttacggcattttcttggtcatctcctttttgctcttccttggtctttacgatcttgttatcgtcccattactttcttgggctctaagagaaccctttcgattgggagttatggtgagaatgtgggctgggtatgtaatatcggttttgtgcatctccgctcttgcggctacggagtacgcgaggagaaaaacagcgagagacgagagtggtaccaagttgtcggcgatgtggctattaccgtacatgatattaggaggcattgcggaagcacttaatacaatagcacagaacgagttcttctactcagaacttcccaaaaccatgtcaagcgtcgccaccacactctccagtctcaacatggccgcagcaagcctcatctcctcctggatcatcaccatcgttgacgttaccacttacgggagctggatcacagagaatatagacgagggacacttggactattactactggctcttggtgggattatctttgctgaatgttttgtattttgtgtggtgtaagaaatcttatggtcccgtgaagaggaaaaaccttgggttcctacggtttggtttaagaatgctgttccaaaacatgctttcaccttttggattgctaatcttgataggcttcctgttaaatcaaggctccatgattggggaatgcaaatctctcctctttgtggagtttgtaacactgatgtggaatccagagatccctccttcttcactgcaactttgcagaggagatttggtattctatgatgagaagactaggtcaatctccataagaagaccttaa

SEQ ID NO: 101 - DNA, 528 bp, Gossypium hirsutum
atgggaggagggccaactagtccggcaggagggagccatgagagcggaggagagcacagcagtcctcagtcaactgtgagggaacaagatcgttacctcccaattgctaatataagtagaatcatgaagaaagccttgccttctaatgggaaaattgctaaggatgctaaagatactgttcaagaatgtgtttccgagttcatcagcttcatcactagcgaggcaagtgataaatgtcaaaaagagaaaaggaagacaattaatggagatgacttgttgtgggcaatggcaacattaggattcgaagactatatcgagccacttaaaatatatcttgccagatacagggagttggagggtgacaccaagggatcagcccgtggtggtgatggatcttttaaaagagacgcagctggagctcttcctgcccaaaatccacagttttcaatccaggggtcattgaactatattaattcccaagcacaaggacagcatatgatcattccctccatgcaaggcaatgagtaa

SEQ ID NO: 102 - DNA, 534 bp, Gossypium hirsutum
atggcggatggtatggcaagggggccaacgagtccagcaggagggagtcatgagagtggagagcagtgcagttctcactcaactgtgagggaacaagaccgttaccttccaattgccaatataagcagaatcatgaagagagcattgcctactaatggcaaaattgctaaggatgctaaagaaactgttcaagaatgtgtttctgagttcatcagcttcatcactagcgaggctagcgataaatgccagaaagagaagaggaagacaattaatggagatgatttgttgtgggcaatggcaacattaggctttgaagactatattgagccacttaaaatatatctggccaggtacagagagttggagggtgatgctaagggatcaatcaggggtgaagtgcctcttaaaagagatgcagttcgagttcttgctgtccccaacccacagtttcctatcgaaggatcattgaactatattaattcccaggcacaaggacatcatatgatcgtcccctccatgcaaggcaacgagtag

SEQ ID NO: 103 - DNA, 1318 bp, unknown
  Unknown Source
ccaacgggtcatacagaagcactccccactgtattgggatttgggattttagcgagtcgatagtagagggattattatgtctgcggaacatatcgttgggtcggcggccgatgcggcggcgaagaaacctgagattgagaatggggtatccgcctcacagcccgattctatttcctctgtaattcctggatggttttctgaaattagcccaatgtggcctggagaggcccattccttgaaggtggagaaggttttgtttcaagggaagtctgattaccagaacgttttggtatttcagtcatcaacttatgggaaggttctggttttggatggcgtgattcagcttacagagagagatgaatgtgcttaccaagagatgatcacccaccttccactttgctcaattccaaaccccaaaaaggttctcgttatcggtggaggagacggcggtgttttgcgagaggtggctcgccattcatctgttgagcagatagatatctgtgaaatcgacaagatggtagttgatgtttccaaagaatttttccctcgcgtagctgtcgggtttgaggatcctcgtgtcactcttcatattggtgatggcgtcgcatttctgaaggctgttcctgaaggcacttatgatgcagtgatagtggattcttctgatcctattggtcctgcacaagagctctttgagaagcctttttttgcttcagttgccaaagctcttcgaccaggaggcgttgtgtgtactcaagcagagagcatttggcttcacatgcatatcattgaagacattgtaacaaactgccgccaaatattcaaaggctctgtcaactatgcatggactacagttcctacatatccaagcggagtgattgggtttatgctctgctcaactgaggggcctcctcttgatttcaagcatccagtcaacccagtagaggtgaacggtatcgacaccgtgaagagtccgctcaagttttacaactcggagattcatacagcagctttctgtttgccttcttttgcgaagaagatcatcgattcaaaagcaaaatgaaaaggtttcccccacagcgttgaagaagcagaaattggcggtcttggagtgtgccaatgtaataagtggaggcttaaattagagtcgaaatggtcgctttatattgtgatcagcgtcataaagtttcttgagatgttatgagtagtagaaatagcttttgttttcctccccaaaattttccccgtcctttttcattgaaaagtgacatctggtgttctagcttctataaataaatatgctaaataaatatatttagcc

SEQ ID NO: 104 - DNA, 1803 bp, Gossypium hirsutum
atggcacgattatctgaagaaagtgacaatgtatgggcactaatccctgaacttaggaagaagttacatttccaccagaaacgggcctttgaattcctatggctaaatatcgcgggttctttgatacctgcactaatggaaccatcatcgaaaaaaacaggtggttgtgtagtttctcattcaccgggatctgggaaaacttttctcattattgcatttcttgctagctacttgaagttattcccaggaaagcggcctttggtccttgctccaaagacaactctatatacttggtacaaggaatttatcaagtgggaaatccctgtgcccgttcatttaattcatggccgtagaagttatagagtcttcaagaagaatgcagtgaagtttcatggagttccgagacctagtcaagatgttatgcacgttttggattgtctagataaaatacaaaagtggcatgctcaaccaagtgttcttgtcatgggctacacttcgttcttgacgttaatgcgagaagattcgaagtttgagcacagaaaatttatggctaaggttctgcgtgaaagtccggggctcctggtattggacgaagggcacaaccctcgaagtactaaatcgagattgagaaaggttttgatgaaagttgagacagatctgaggatattgctttcaggtacattgtttcagaacaacttctgtgaatattttaacaccctgtgccttgcaagaccgaaattcgtgtttgaagttttgcggcgattagaccctaaatacaagagaaagaagaggttcgacaaagctcgcaatttgttagaaaaccgagcaagaaaactcttcctagacaaaattgccaggaagatcgatgctagcgtcggagaagagaggatggaaggtcttaacatgttgaggaaaatcaccaacgggtttattgacgtgtacgaaggtgggaattttgactgcctccctggtttacaaatttacaccttaatgatgaactcaacagacatacaacatgagattttggtaaaactccacaaaataatgtctacatatactggctatccattggaattggagcttttgataacgctagcatcgatacatcctagtttggtccggacttcaaactgtagtgctaaatttttcagtacagaagagttgctggaacttgagaagatcaaattcgattttagaaaaggttccaaggtgatgtttgttttgaaccttgtttatcgaatcatcaagaatgaaaaggttctcatcttctgccacaatattgcccccatttatttgcttgcggaaatgtttgagagaatcttccgatggcgaaagggtagagaaatattggtccttacaggagacttggagctattcgagagaggaagagtgatggacaagtttgaggaaccaggtggtgcttcaagggtacttctcgcttcaattactgcatgtgctgaaggcattagtttgacagctgcatcccgggtgattttgttggattcggaatggaacccttccaagacaaagcaggctattgcacgggctttccggcctggtcagcaaaaggttgtttatgtgtatcagctgttggcaactggcacgctcgaagaggacaagtatcgtaggaccacatggaaagaatgggtatccagtatgatttttagcgaagcattcgtggaagatccgtctcagtggcaagcagaaaagatcgaagatgatgtattgagagagatagttgcagaggacaaagttaagtcatttcatatgataatgaaaaacgaaaaggcttctacaggttga

SEQ ID NO: 105 - DNA, 1809 bp, Glycine max
atgcctgtgtctcaagaaaatgataacgtttgggtgttaattcccgaacttaaagcaaagttgcacgcccaccagaagaaagcatttgagtttctttggcaaaacattgcagggtccatggacccgggattgatggaagcagcatccaaaagaagaggtggctgtgtggtatctcatactcctggagcgggaaaaacttttctcatcattgcttttcttgttagctacttgaagttattcccagggaagaggccattagtccttgctccaaagacaacactctatacttggtacaaggaatttatcaagtgggatattcctataccagtgtatctgattcatggtcgtagaacctaccgtgtattcaagcagaaatcctcgattgttattcctggagttcctaagcccactgatgatgtcaagcatgttttggattgccttgagaagatacaaaaatggcattcgcacccgagtgttctgatcatgggttatacttcatttttaacattgatgcgagaggattcaaagtttgcacataggaaatacatggctaaggtattgagggaaagccctggggtcatggtgctggatgaagggcacaatcctagaagcaccaaatctaggctgagaaaagttttgatgaaagtgcagacagaactgagaatactgctttctggcacattgtttcagaacaatttctgcgagtacttcaacactttgtgcttggcaaggccaaagtttattcatgaagtactgaaagcattggacccgaaatacaagaggaaaggaaaagtggcaaaaaaagcgagtcatttattagagtcgcgagctagaaaattcttcttagaccaaattgctaagaaaattgactcaagtaatggtagggagaggcggaagggtctaaagatgttgagaaatgtgacaaatggtttcattgatgtgtatgaaggtgggagttctgatggtctacctggtttgcaaatttatacattgctgatgaattcaactgatacacagcacgagattttgcatgaactgcacaagaaaatggccaaagtcaatggataccctctggagctagaacttttgataactctaggttcaatacatccttggttggtgaaatcagcagtatgtgctgagaaatttttcactcaagcgcaattgatggagctagagaaatgcaagtttgatctgagaatagggtccaaagtaaaatttgttttgagtcttatctacagggttgtcaagaaggagaaggttcttatattttgccacaacattgcacctgttaagttatttgtggaatattttgagaagtactttggatggacaaaaggtagggaagtgttggtgctaactggggaactagagctgtttgaaagggggagagtgatggacaagtttgaggagcctggtggagtagcaaagatactacttgcttcaatcactgcttgtgctgaaggcattagtttaacagctgcttcaagagtgatcatgttggactcagagtggaacccttcaaaaacaaagcaagccattgcccgtgcctttcgccccggtcagcagaaagttgtttatgtttatcagctcttggtgacaggttcattggaggaagataagtacaaaagaaccacttggaaagagtgggtttcaagcatgatcttcagtgaggcctttgtggaggacccttctcagtggcaagctgagaagattgaagatgatatactcagggaaatggttgcggaggaccggtctaaatcattccatatgatcatgaagaatgaaaaagcttctaccaacaaataa

SEQ ID NO: 106 - DNA, 1812 bp, Zea mays
cacacgggagccacgccgcccgtccctgtctccatctcgtccccgtgccgtcgctcccacgccgccgttccctccgcctgcctcgaccgcggaccgcctcgtgccgtgcgcgctaaggagggagggagggaaagggaagcaggagggtggaccactgcgcgcgtgcggcgccttcctcctcgaatcaccgccgacagcttctgcagctagcgttatcacccccaccaccccggggctcggattaggatctgagctgaagctgccaggccaggcgatcgagccgatgtacggctcgccggtgtccaaggacctcaacctcccggcgcagccgccgccgatggcctcgtccgggctgctacgctacagatcggcgcccagcgcggtgctcggcggcctctgcgaggaccagctccagctccctgccgccgctccgagcgccgccgacaacgtcttctcaaggttcctgcccgacgaccaccacatccgggacgacaagccgtcgcctgcccacttcccgagtgcggccgacatggcctcccaccaccagcaggagcaaatgatgttgcactcccagtcccagtcccagcaccagcaggagacgggtaggtccgggggcggcctctaccgcaccgtcagctctgccatggaagcgggcggcactggcgtcggcgccgccagcagcctgattcggcagagcagctcccccgccgggttcctggaccatttcggcatggacaacgggtacggggcgatgctgagggcgagcatgggcatggggttccaggaaggtgttgccagtgactccctcgcgggcggcggcggcggcggcggtagcggcaggctcgggggccagctgagcttctcgtcgcggcaggggtcgctcatgtcccagatctcggagatggacagccaggaggatgtcgtcggagcgagcagccccgacgctggcggcggcggggacgccgcctacatgccggggtacccgatgagctccggcgggtgggacgactcgtcgtcggcgctcttgccggacagcctgcccgcgacgaataaacgcccgcgggactcgttggagcacggcggcgggctggcgcaccagttcagcctccccaagacgtcgtcgtcggaggtggccgccatcgagaagttcctccagttccaggacgccgtgccctgcaaggtccgcgccaagcgcgggtgcgccacgcacccgcgcagcatcgccgagcgggtgaggaggacgaagatcagcgagcggatacggaagctgcaggagctcgtgcccaacatggaaaagcaaaccaacactgccgacatgctggatctggccgtggactacatcaaggatcttcagaagcaggtcaaggtactgaacgacggccgcgccagctgcacctgctccgccggcgagctgcagggccagttcacccgttaaaaaggagccgcgccacctttttctcaggggggccagttcagctcgcatagttgcgttacgttacatggtgaggactgatcgaggaggtatatattggaattgagacgatagtagctagtctgtacatgcaacaagttcattagcaggcagagtaggcctcgcatgttagtgatagctgcgtcagttaatgtacgtttagattgcacatgtattcatcttgatttacatgtgttagagtagtttagtgtggattttagtttaaatttcacattaatccacttcaacatacattaaccgatgtgggtatatatgaccatctaattagaatctttatatacacatgtatttactcaaaaaaaaaaaaaaaaaaaccttag

SEQ ID NO: 107 - DNA, 1353 bp, Arabidopsis thaliana
atgactcccattagtcaacgaatttcccaaaaatccccaaaactgagagaaactaaacaaattcaaatgaccaccaccgataaatccgccggaatcgtaactgactcggaagccggaccggagacttctcttctcctcaatcctcacgaaggatctaccaaaaaagctccttctgattcctaccacttcgcttacatcatctacttcaccctcggcgttggctttcttcttccatggaacgcattcatcaccgccgtcgattacttctcttacctctatccttccacggccgtcgatcggatcttcgccgttatctacatgctcgttgctcttgtttgtctattcgttatcgttgtcttctatgcacataagagcctcgctagctttagaatcaatctcggtcttttactcttcgtaatcgccttgcttgtggttcctgttttggatctggtttatgttaaaggacaggtcggattatacgccggattcgatgttacttccgccgccgttgccttatccggtctaggtgatgcacttatgcaaggaggtcttatcggtgttgccggtgaaatgccggagaggtatatgcaagctgttgtcgccggaactgctggctccggtgttcttgtgtcactattgagaattttgactaaagctgtgtatcctcaagatcctgatggtttgagaaaaagtgcgaatctatactttgctgtggggattgttgttatggtgatttgtgctgtgttctacaacgtagcgcataagcttccggtgatcaagttccatgaggagcgtaagaatgaagaactaatcagagagaagagcgaagagaaaggttctttaaccggtttagcgtggaggacaacactctgggatatcgtgacgaaagttaaatctcatggtttcgggattgttctcttatacatggtgacattgtcgatatttcctggatacattactgaggatgttcattcagagcttcttacagattggtaccctattctgcttattgcagcgtacaatgtgtttgacttggttggtaagtgtctgactgctgtattcatgctggaggatgagaaaatcgctgttggtggttccattgctaggctcttgttttaccctctcttctggggttgcttgcacggtccgatgtttctcaggactgagattcctgtaactatactgacatgcttattgggacttaccaacgggtacttgacaagcgtcttgatgattctggctccaaaatcggttccactgagacactcggagactgcaggaatcgtcactgtgatgttcttggttgttggtttggcctctggatctgtcattgcttggttctgggtcatttga

SEQ ID NO: 108 - DNA, 183 bp, Unknown
  Unknown Source
atgccgcgggatatcacctccctctacaagaaggctggtttcgaaggagatatcagcagagtagccagcacgacaagcccgatcagcagacagcaggcatggcactcgcggaggccgacgacggcgcggtggtcttcggcgaggagcaggaggcgctggtgctcaagtcgtgggccgtcatga

SEQ ID NO: 109 - DNA, 437 bp, Unknown
  Unknown Source
atgccgcgggatatcacctccctctacaagaaggctggtttcgaaggagatatcagcagagtagccagcacgacaagcccgatcagcagacagcaggcatggcactcgcggaggccgacgacggcgcggtggtcttcggcgaggagcaggaggcgctggtgctcaagtcgtgggccgtcatgaagaaggacgccgccaacctgggcctccgcttctttctcaaggtcttcgagatcgcgccgtcggcgaagcagatgttctcgttcctgcgcgactccgacgtgccgctggagaagaaccccaagctcaagacgcacgccatgtccgtcttcgtcatgacctgcgaggcggcggcgcagcttcgcaaggccgggaaggtcaccgtgagggagaccacgctcaagaggctgggcgccacgcacttgaggtacggcgtc

SEQ ID NO: 110 - DNA, 787 bp, Lycopersicon esculentum
aatggaacttctgtcctctaaactctgtgagctttgcaatgatcaagctgctctgttttgtccatctgattcagcttttctctgttttcactgtgatgctaaagttcatcaggctaatttccttgttgctcgccaccttcgtcttactctttgctctcactgtaactcccttacgaaaaaacgtttttccccttgttcaccgccgcctcctgctctttgtccttcctgttcccggaattcgtctggtgattccgatctccgttctgtttcaacgacgtcgtcgtcgtcttcgtcgacttgtgtttccagcacgcagtccagtgctattactcaaaaaattaacataatctcttcaaatcgaaagcaatttccggacagcgactctaacggtgaagtcaattctggcagatgtaatttagtacgatccagaagtgtgaaattgcgagatccaagagcggcgacttgtgtgttcatgcattggtgcacaaagcttcaaatgaaccgcgaggaacgtgtggtgcaaacggcttgtagtgtgttgggtatttgttttagtcggtttaggggtctgcctctacgggttgccctggcggcctgtttttggtttggtttgaaaactaccgaagacaaatcaaagacgtcgcaatctttgaagaaattagaggagatctcgggtgtgccggcgaagataatattagcaacagaattaaagcttcgaaaaataatgaaaaccaaccacggccaacctcaagcaatggaagaaagctgggctgaatcctcgccctaa

SEQ ID NO: 111 - DNA, 1041 bp, Arabidopsis thaliana
atggagcttgtgtttgagaatggccagattcttgcaaagggccaaagatccaacgtttctctgcataatcaacgtaccaaatcgatcatggatttgtatgaggcagagtataacgaggatttcatgaagagtatcatccatggtggtggtggtgccatcacaaatctcggggacacgcaggttgttccacaaagtcatgttgctgctgcccatgaaacaaacatgttggaaagcaataaacatgttgacgattctgagactttgaaagcttcttcatcaaagaggatgatggttgattatcataaccgaaagaagatcaagtttatacctcctgatgagcaatccgtggttgctgataggtcgttcaaattgggctttgacacttcctccgtaggtttcactgaagacagtgaaggatcgatgtatctaagcagtagtctagatgacgagtcagatgatgcgaggccacaagttcctgcaagaacaagaaaagctttggtcaaaagaaaacgaaatgcagaagcgtataattcacctgagagaaatcaaagaaatgatatcaacaagaaaatgcgtactttgcaaaatctactacctaactctcacaaggacgacaacgaatcgatgttggatgaagcaatcaattatatgacaaaccttcaacttcaagttcagatgatgacgatgggtaacagatttgttacaccatcaatgatgatgcctttggggccgaactactctcagatgggtctagcaatgggtgtgggaatgcaaatgggcgaacaacagtttctgcctgcacatgttctaggagctggcttgcctgggattaatgattcagcagatatgctaaggtttcttaaccatcctggactaatgccaatgcaaaactctgcacctttcattccaacggaaaattgttccccacaatctgtccctccatcgtgcgctgctttccctaaccaaataccaaatcccaactctttgtcaaatttagatggtgcaaccttacacaagaaatcaaggaaaactaacagatga

SEQ ID NO: 112 - DNA, 2172 bp, Arabidopsis thaliana
atgtcgaacaccgtcgaagatgacgacgacgacttccagatccctccttcctcacagctttcgattcgaaaacctcttcacccaaccaacgctaacaacatctctcaccgccctcctaacaaaaagcccagactctgccgttacccgggtaaagaaaatgtgactccgcctccttctccggatccggatctcttctgctcctcttctactcctcactgtatcttagattgtatcccatctagtgttgattgctctctaggagatttcaatggtccaatttcttctcttggtgaagaagataaagaggataaggacgactgtataaaggtgaatcgtgaaggttatttgtgtaattcgatggaggctaggttattgaaatcgagaatttgtctcgggtttgatagtggaatccatgaggatgatgaaggttttgttgagtctaactctgagcttgatgtgttgataaacctttgctctgagtctgagggtaggagtggagagtttagtttaggcaaggatgattcaattcaatgcccattgtgttccatggatatttcatctttgagtgaagagcagaggcaagttcatagcaatacttgtcttgataagtcatataatcagccttctgagcaagactccttgaggaaatgcgaaaatttgtcttctcttataaaagaatcgattgatgatccagttcagcttcctcagctagttaccgacttgtctccagtgctgaaatggcttaggagtctaggtttagctaaatatgaagatgtttttattcgtgaagagatcgactgggatacccttcagtcactcactgaggaggatcttctaagcataggtatcacgtcacttggtcccagaaagaagattgtgaatgcacttagcggagttagagatccctttgcatcttctgctgaagtgcaggcacagtctcattgtacaagtggccatgttacagagagacagagagataagtcaaccactcgtaaggcaagtgagcccaaaaaaccaactgcaaacaagttgattacagagtttttccctggtcaggctaccgagggcactaagatccggacagcccctaaacctgtcgcagaaaagagtccatcagattctagctctagacgtgctgtgagaagaaatggcaacaacggaaaatctaaagttattccacattggaattgcattccggggacaccttttcgagtggacgcattcaagtacctcacacgcgattgttgccactggtttcttacacactttcatctcgatcattatcaaggtttgacaaagtcatttagtcatgggaagatatactgttccttagttaccgcaaagttggtaaatatgaagattgggataccttgggagagactgcaagtcctggaccttggccagaaggttaatatttcaggcattgatgtgacatgctttgatgcaaaccactgtccgggatccatcatgatactctttgaaccagccaacggtaaggctgttctacatacgggggatttccgctatagtgaagagatgtcaaattggttgattggatcgcatatcagctctcttattcttgatactacatactgtaacccccagtatgactttccaaagcaagaggcggtaatacagtttgttgttgaggctattcaagcagaagcatttaatcccaagacccttttcttaattggaagctacaccatcggaaaggagaggctgttcttggaagttgcacgtgtgctacgggaaaagatatacatcaatcctgcgaaactaaaactcctcgagtgtttgggattctcaaaggatgatatacagtggtttacagtgaaggaagaggaaagccacattcacgttgtgcctttgtggacgcttgccagtttcaaacggctgaagcatgtagctaaccgatacacaaaccgttacagccttatcgttgcattttctcctactggttggacatctggtaagactaaaaagaagtccccaggaagaaggttgcaacagggtacaataataaggtacgaggttccttacagtgagcatagcagcttcacggagctaaaagagtttgtgcaaaaagtgtcacctgaagtcatcataccgagtgtaaacaatgatggacctgactctgcagctgcaatggtgtctttgttggttacgtag

SEQ ID NO: 113 - DNA, 495 bp, Arabidopsis thaliana
atggagagatcagcgtcggtgggtgttaacgacggccgttttggtggcaaccaattctattcgccatctttctcttcttcttcttcttcttcttccatgagacatgttaattacagttgtggatcttgtgggtatgaactaaacctgagctccacgaatcgaatcacatcgacaatcggatcaaagtacggtaaatccatgaagagtgggatcatatctttcttcaacatcgacgagggaagattcagtcaggtcgatgagttccaatgcatgcctcacttctctagatactcttggggtttgtttcgacacagaacgaagcttctatgtcgcaaatgtaataattatatcggcaatgcttctcaggagaaggctcctgagtatgcacttgttacacaaaactcggatccgacatcgcctaggattggtagtgttacgaagtacgatatcagaatccgctcgcttcaaccttcttctgcggtcgctttgctgtga

SEQ ID NO: 114 - DNA, 1608 bp, Arabidopsis thaliana
atggcgacgtgctcccgcccgctcttcgtctccaactcggcggcctccgcctcgccgtctcgggcgtcctttcgccgccttcacacggtcgcagtcgtatcgatttgggaacccctgccccacccaccactgcgggctgcagcctgccgtttcgctcgaacgaagcaatgctccaggagatccaccgagtgtttggcgagtggaccgtccgtttccagattgacgcggccaataaggagaatgctgtcccgttactcttcactgatggtcactttgcacggcaacctcagccggtgctacaaggccatgagcgcgctgcggccagatggggtatccaggcacttcatgtccgctggtggtttcgaacgcgtcgttttaggggtggtgctcgtcatgtccatctcgggagcttcttatacagcaccgtcatcatcggcgcttactgaagagaatcttctcttcctcgaggcttggagaacaattgatcgtgcttatattgataaaacctttaatggacaaagctggtttcgttacagagagactgctttacgaaatgagcctatgaacactcgagaagagacatacatggctatcaagaaaatggtggcaacactagatgatccttttactcgattcttggagcccggaaagttcaagagtttgcggtcggggactcaaggggcggttacgggtgttgggctgtcgataggttaccccactgcatcagatggaccaccagctgggcttgttgttatatcagctgctccaggaggtcctgcaaatagggcggggatattacctggcgatgttattcaaggaattgataatacaaccacagaaactcttaccatatacgatgctgcacagatgttgcagggacctgaaggaagtgcagtggagctagcgattcgcagtggacctgaaacgagactcttaactttgacgcgagagcgggtttctgtgaatccagtgaagtcaagattatgtgaacttcctggttctgggagtaactcccctaagattggctatatcaagctaacaacattcaatcaaaatgcttctagtgcggtaagggaagctattgaaaccttgagaggcaacaatgtaaacgcattcgtcttggaccttcgagacaatagtggaggttctttcccagaaggaattgagattgctaaattttggttagataaaggagtgattgtgtatatttgcgatagtcgaggtgttagagatatatatgatactgatggaagcaatgctatagcaacctctgagcctcttgccgttcttgttaacaaaggcaccgcgagtgccagcgagatattagcaggtgccttgaaagataataaacgtgctctggtttatggagaaccaacttacggaaaaggcaagatacagtcggtttttgagctttctgatggttcgggcttggcagtaacagttgctcgatatgaaacaccagctcacacagatatagacaaagtcggtgtaactcctgatcatccattgccaaagtcgtttccgaaagatgaagaggcgttctgtggatgccttaaggatcctacagctgcttgttatctcaatcaaggcctacttttttctagatga

SEQ ID NO: 115 - DNA, 516 bp, Zea mays
atggatgagcacggggaaaaggaagagaacaagtctcaagattcggctttggcggcggagcagcgcgaggagacggcggcggcggagggagaggacacgtctgaggaatccacggaccagcgcgaggacgggcacgggtataaagcggacgaatcggcgggcctgctgcccgaggacgacgtgggctctggagaagcctcggcggcgccacacttcgggcacccgtgctcgttgttgcgcgcctgcgccggattcctgggcctgcacggctgcggcggcgatcagaagccggcggcggctgccgttgctgcatctgcagctgaagccgccacggcggcggcggcgagctcgtcccaggatgaagaagacggcggcgtcgacatggcgaaggctaacggtttctacatgcatgaggtgatcacccgcgtatgggcggtcgcggtgaggaggccgcggccgcggccgccggatcacgcgagagaagggagcggtggcaatggaggcgtacaccactag

SEQ ID NO: 116 - DNA, 429 bp, Zea mays
atggatgagcgcggggagaaggaggaggagcacggagtagtggaggaggagacggcggcggttgtgctcaaggaggtggaggtggagatggagatggtcggcggctctgaagaagcctcggcggcgccgctcctcctcgcgcacccgtgctcgctgctgcagctcctgctccgcgcctgcgccggctgcctggtgcgcctgctgcacggccactgcagcgacggcgccaacgacgacccaaaagctgctgccgacgacgacgacgctgcgcctgaagctgctgctgctgcggcggcggcggcgggcgatggcggcgacaaggcagccacctacttgtacatgcaggaggtgtgggcagtgaggaggaggccgacgacgcccggccgtccgagagaaggttccggtggcaatggagggaaccaccactag

SEQ ID NO: 117 - DNA, 1035 bp, Arabidopsis thaliana
atgggtagagtgaagctaaagataaagaaactacagaacatgaatggacgtcaatgtacgtatacgaaaaggagacatgggattatgaaaaaggctaaggagttatcgatcttatgcgacatagatgttgtgcttctcatgttttctcccatgggaaaggcttcaatttgcataggcaaacacagcattggagaagtcattgctaagtttgctcaactctctcctcaagaaagagcaaagaggaagttggaaaaccttgaagccttgaggaaaactttcatgaaagctaaccacgatatagatatatcaaagtttctagacagaattagtacaccaacagttgaggtgcttagcgaaaaaatcaggtttctgcaaacacaattatcagatatacacacacgactaagctactggaccgatgtagataatatcgacagcgtagatgttttgcagcaactagaacattcactaagacaatctctggctcaaatctatggtcgtaaggcgagcatgccgcaacgtcagcagcaacaacttatgtcctcacaatgcaaaaaccagttgcagactgaaatagatatagatttcggaatggagatggagcaacaacttgagaatttctcatgggttcgtaccgatgaaaacatgaatgttcctatagaagaagaagaccctaatctgcagcttcatcacatgtacaaggacataacgtgttctgcaagttcagctcttggaaattactcaggactctttagtaaaagctcagatatcttacaaaaactagaaaccggtagcattcccgggacatcggctgatccgaaccaacaattcagcaatctcagtttcttaaatgatcaaaagcttaagcaactagctgagtggaatctattaggcagtcctgcggattactacgttagccagatcttggaagcttcttataagcctcagattggaggaaaaaacaacggcgcttcttctgaaacattaccttatgttgcggtcttcgatgatcctctatatttttggccaaactga

SEQ ID NO: 118 - DNA, 543 bp, Zea mays
  misc_feature (538)..(538): n is a, c, g, or t
ctcctcttctccagcgtccgatccccgtttcccacgaatcccactctactcctccatctgcggcctcctccattctcctgcccccttctctctcctccttgcttccccgcgcgcacgtttttacaagggtttcggcggaggcgaccggtcgccgacgatggcggacgacagcggcagccacgagggcggcggcggcggcggcgacgacgtccgggagcaggacatgttcttgcctattaccaacatcacccggatcatgaagaaggccgtcccggccaatgccaagatcactaaggacgctaaggagataatgcagtactgcgtctccgagttcatattctttgtgacgagcgaggcgagggagaaaagcaaaaaggaggagcgtaagagaatcaacgtggacgatttgctctggtcagtggatacggcaggattcgagtacgtggagcttctcaggatttgcctacaaaagtacagagagacggggaagtgcacggtgtacacgacgtgatcaggttattaacctgtaacaccttantgaga

SEQ ID NO: 119 - DNA, 1591 bp, Zea mays
ccgacacaggcctctccctcaacgacctcctcttccgccgcgccgacgtgtgcccctccgctctcgcgctggtcgactccgccaccggccagtgccgccgcctccaagcctcagggagccagcgtgacgctttactcagacctcgtttccggggcgcgggagacggagtaccgccgcccgccgacgaagcagagcgacacgaccgcgctgatgtactcgtccggcacgacgggggcgagcaagggcgtaatcctgacacaccgcaacttcatctcggcggcggccatgatgacagcggaccaggacgcgctcggagaggggcccaacgtcttcctctgcttcctgcccatgttccacatcttcggcttgtccgtcatcacgttcgcgcagatgcagcgtggcaattccgtcgtcgtgatgtcgcggtttgacatggactctgtgatggccgcggtgcagcggcaccgtgtcactcacctcttctgcgtgccgccggtcatgatagcgctcgccaagctcgggagcgttgggaaatatgacctcagctcgctcaggttcatcggctctggcgcagcaccgctcggcaaggacgtgatggagggagtggccaagaattttccagaagctgtgattgcccagggttacggaatgactgaaacttgtgggatcatatctttagagtacccagaaaaaggacaaattcgtcaatttggttcaactggagcacttgtctcaggagttgaagcaaaattgttgatgtagaaacattgatatgtctgccaccaaatcaactaggagaaatttgtgttcgaggaccgaacataatgcaagggtatttcaacaatgtgcaagctactgaatttacaatcaagcaagggtggttgcatactggtgatattggatactttgatgagggaggtcagcttttcgtagttgatagacttaaagaactgattaagtacaaaggttttcagattgcacctgccgagcttgaagggctacttctgtctcatccagaaattctggatgctgttgttatcccgttccccgatgctgaagctggtgaagttcctattgcttacgtcgtaaggtcctctgagagttctttgactgaagttgatgtccagaaatttattgaaaagcaggtcgcatactacaaaaaattgaggagggtgacctttgtggacagcgtaccaaaatctgcttcagggaagatcttgagaagagaactcatctctaaagtcagatcatccaagctatagcaagccggcttctgtgttcgtaatactgcttgcctcctatctactcccctcagtctaaattataagtcatagatcatagatgtatatcatatctaaatacatcgtatgcagagaagctagaacgacttccaatttgaaaatttgtcagattgagcgtaaaggtttacatgttactgagcggagcttatcaagcaatacattcagcttgacacagtttgtgggacatgtatacatggtggtgtcggatgacttgtatcgaatattgggcctgatttacattcactattcgaaaatagtacagatatgtaatatggctctaaaaaaaaaag

SEQ ID NO: 120 - DNA, 1564 bp, Glycine max
ggctcgagccaaaatctagggttttctgttcttctctggggatctgaagacatgcagtccaagtctgaaactgcaaatcggctgaggtcagatcctcattcctttcaacctggcggtgtttattctgagccttggtggcgtggtattgggtacaatcccatggcccaaacaatggctggggcaaatgcgtccaattcgtcgtctcttgaatgccctaatggtgattctgaatccaatgaagagggccagtctttgtccaatagcgggatgaatgaggaagatgatgatgccactaaggattcgaagcctgctgctcctaatgaaacaggaaattatgagcaagaacagcaagggatgcagcatactgcatcatctccaccatccatgcgtgaagaatgccttactcagacaccacagctggaacttgttggtcattcaattgcatgttctacaaatccttaccaggatccgtattatgggggcatgatggcagcttatggtcaccaacagttgggatatgctccttttataggaatgcctcatgccagaatgcctttgccccttgagatggctcaagaacctgtgtatgtgaatgccaaacagtaccaaggaattctgaggcgaagacaggctcgtgctaaagctgagcttgaaaggaagctcataaaatctagaaagccatatcttcatgaatctaggcatcagcatgctatgagaagggcaaggggtaccggaggacgatttgcaaagaaaactgacggtgagggctcaaaccacttaggcaaggaaaaggataatggtactgattctgtccaatcaattagttcatctggttctgaacctttgcattctgactctgccgaaacctggaattctcctaacatgcaacaagatgcaagagcatcaaaagtgcacaacagcaggttcgaagcacccagttaccaaaatggcagtggctcctaccataaccataatggattgcaatcttcagtgtaccattcatcctcaggtgaaagagtggaggaaagggactgttcaggtcagcagctgaaccacaattgatggggggttagaggccgaggttggtttgtatcctagtgacatttggtaaataccttggttatctgtaaacactcttggcaatatatgtgccaagcggcaaatcattcttggctttgttcttgtgtttgtggtgtgaatgatactaggggggggggggggggggaagaatgattgatgattggtgtctgtgatttctgttgaaatcagtcaatcaatccttcgttctttgctcatttttgcattttgtacagttttttagtggttaggcaacttcaaccaacatggaatggaaggatggtcagaggtcagaagattatggagtatggagaaacaaaaactcttggtgtaccaacactcgtttgactggtttatcttttgtgtagttcaaccggttgttaatgttaacgtaagacatcatagaataatgaaacatgctattacatcatttgttgccaaaaaaaaaaaaaaaaaaaaaaaaaaaaaaaaaaaaaaaaaaaaaagg

SEQ ID NO: 121 - DNA, 4184 bp, Zea mays
gcgtcggacagtcgcttccccaagcgctccccctccgcgcgacccgtggcgccgcgtcacgcgcaccaccaccactcgcagtcgtcaggcgggagcacgtcccgcgcaggcgcgggaggaggtggcgggggcgccgcggccacggagtcggtctccaaggccgtcgctcagtacaacatagacgcgcggctccacgcggtgttcgagcaatcgggcgcgtcgggccgcagcttcgactactcccagtcgctgcgcgcgccgccaacgccgtcctccgagcagcagatcgccgcctacctctcacgcatccagcgcggcggccacatccagcccttgggctgcacgctcgccgtcgccgacgactcctccttccgcctcctcgccttctctgagaacaccaccgacctgctcgacctgtcgccgcaccactccgttccctcgctcgactccgtggcgctgccccctgtttcccttggtgccgacgcacgcctctacttctccccctcgtccgcggtcttgctggagcgcgccttcgccgcgcgcgagatatcgctgctcaacccgctatggatccactccagggcctcctccaagtcgttctacgccatcctccaccgcatcgacgtcggcgtcgtcatcgacctcgagcccgcacgcaccgaggaccccgctctctccatcgccggcgcagtccagtcccagaaactcgcggtccgcgccatctcccgcctccaggcgctacccggcggggacgtcaagctcctatgcgacacagtcgtggagcatgttcgcgagctcactggttatgaccgtgtcatggtgtacaggttccatgaagacgagcacggggaagttgtcgccgagagccggcgcgacaaccttgagccttacctcggattgcattatcccgccacagatatcccccaggcgtcgcggttcctgttccagcagaaccgcgtgcgaatgatcgcagactgccatgccatcccggtgagagtcatacaagatcctgggctgtcgcagcagctgtgtttggtaggctccacgctacgcgctccgcacgggtgccatgcacagtacatggcgaacatggggtcaattgcgtcgcttgttatggcagtcatcattagcagtggtggtgacgacgagcgaacaggtcggggtgccatctcctcatcaatgaagttgtgggggttagtggtgtgccaccatacatcaccacggtgtatcccttttccattgaggtatgcttgcgagtttctcatgcaggcatttgggctgcagctcaacatggagttgcagcttgcgcaccagctgtcagagaagcacattttgcgaactcagacgctattgtgtgacatgctactgcgagattcaccagctggcatcatcacgcagagccccagcgtcatggaccttgtgaagtgcgatggggctgcactgtattatcgtgggaagtactacccattgggtgtcactcccaccgagtctcagattaaggatattatcgagtggttgacggtgtgccatggggactcaacagggctcagcacagatagccttgctgatgcaggctaccttggtgctgttgcattaggggatgctgtgtgcggaatggcggtggcttatattacaccaagtgattacttgttttggtttaggtcacacacagctaaagagatcaaatggggtggcgcaaaacatcaccctgaggataaggatgatggtcagaggatgcacccacggtcatcattcaaggcatttcttgaagtggttaaaagcagaagcctgtcatgggagaatgcagaaatggacgcaatacattccttgcagctcatattgcgtgactccttcagagatgctgcagagggcactagcaactcaaaagccattgtcaatggacaacgtcaacttggggagctagaattgcgggggataaatgagcttagctctgtagcaagagagatggttcgattgatagagacagcaacagtacccatatttgcagtagatactgatggatgcataaatgggtggaatgcaaagattgccgagttgacaggcctttcagttgaggaggcaatgggcaaatctctagtaaatgatcttatcttcaaggaatgtgatgatataggcgaaaagttactctcgcgagctttaagaggtattccattttcatttcttatatggatgctattgcttttatattatgttttttgagaagtgctgttgaggaaaatattatctgttcttagttgtatctcttaaggtatatgacataaacaaaaagtgtatggacacgatgtatacatgtttattacgccaagtattgaaatttgtggtatatatactcctggaaaatggatatttgaaggagttgagcctaggtcagttggttcattagtgcggatgtacgcctagacccacatcccccaagttcaagtccttgtggaggctaatttgtgcatgcatcttcttaatttaaaagccctcctatgtcagtcaagttttttttaaatagatatacccagtttcttagccgcacttctttttgtgcacaattatatagaaaatggagacaaactagcaactaccgtcaaatttactcaatcattttcacagtgtttttagaaactggtgcttataattagcagataggaatgctcatgtgtgaaaagtaagcatatgagacttataccagaggttgtgttagctactcacaggagtacattgtttatcccccaggctgtttgaactattttaacctacttatcaatgcatgtagctaagcgatgctagctttgatggatgttcaactggggagtgctaatttgtgaagttgcttcccgtacaggtgaggaagacaaaaatgtggagataaagctgaagacatttgggtcagagcaatctaagggtgcaatatttgttattgtcaatgcttgttccagtagagattacacacaaaatattgttggtgtctgttttgttggacaagatgttacaggacaaaaggtggtcatggataaatttatcaacatacaaggggactacaaagctattgtacacaatcctaatcctctgctacccccaatttttgcatcagatgagaacacttcctgttcagaatggaacacagccatggaaaaacttacaggatggtcaagagaggaagttgtcggtaagtttcttattggagaggtgtttggaaattgttgtcgactcaagggcccagatgcattgacaaaattcatggttattattcacaacgctataggagggcaggattatgagaagttccctttttcattttttgacaagaatggaaagtatgtgcaggccttattgaccgccaatacaaggagcaaaatggatggtaaatccattggagccttttgtttcctgcagattgcaagcgctgaaatacagcaagccattgagattcagagacaacaagaaaagaagtgttacgcaaggatgaaagaattggcctatatttgccaggagataaagaatcctcttagtggcatccgatttaccaactctctgttgcagatgactgatttaaatgatgaccagaggcagttccttgaaactagctctgcttgtgagaaacagatgtccaagattgttaaggacgccagtctccaaagtatcgaggacggctctttggtgcttgagcaaagtgagttttctcttggagacgttatgaatgctgttgtcagccaagcaatgttattgttgagagagagggatttacaacttattcgggacatccctgatgaaatcaaggatgcgtcagcgtatggtgatcaatgtagaattcaacaagttttggctgacttcttgctaagcatggtgcggtctgctccatccgagaatggttgggtagaaatacaagtcagaccaaatgtaaaacagaattctgatggaacaaatacagaacttttcatattcaggtttgcctgccctggtgagggcctccctgctgacgtcgtccaggatatgttcagcaattcccaatggtcaacacaagaaggcgtaggactaagcacatgcaggaagatcctcaaattgatgggtggcgaggtccaatacatcagagagtcagagcggagtttcttcctcatcgtcctcgagcagccccaacctcgtccagcagctggtagagaaatcgtctgatgaat

SEQ ID NO: 122 - protein, 431 aa, Glycine max
MGNKLGRRRQVVDEKYTRPQGLYNHKDVDHKKLRKLILESKLAPCYPGDEETAYDREECPICFLYYPSLNRSRCCTKSICTECFLQMKVPNSTRPTQCPFCKTANYAVEYRGVKSKEEKGLEQIEEQRVIEAKIRMRQQELQDEEERMHKRLEMSSSNVNVAVADVEYSSNAVSSSSVSVVENDEIVSSQDSCATSVVRANATTRTNRDDEFDVDLEDIMVMEAIWLSIQENGRRRNLSFVDATSGHYVADGRYVSSVSSVSSVMGPPTGSSSSPSGGLACAIAALAERQQMAGESSMSLTNENMPSFNTLPGSRRFYNRLGRDMANYPPGDNLNEEPLDEAVTMTRSHGEWDMDHGTQLTETATSYTNSVAAEDRGELSSLPRSDDNDGSLQSATEPIVPESFEEQMMLAMAVSLAEARAMSSGQSASWQ

SEQ ID NO: 123 - protein, 459 aa, Arabidopsis thaliana
MGGSSSKESPRGGGSGRRYERSVSGSSSYSSAWDQSSYYQTPNHPSASPVSSYNSGRQTPKNLERKYSRIADNYRSIDEVTAALSHAGLESSNLIVGIDVTKSNEWTGARSFGRKSLHFIGTTPNPYQQAISIIGKTLSVFDEDNLIPCYGFGDATTHDQDVFSFNPNDTYCNGFEEVLMCYREIVPQLRLSGPTSFAPIIERAMTIVEESGGQYHVLLIIADGQVTRSVDTDNGGFSPQEQQTIDAIVRASEYPLSIVLVGVGDGPWDTMRQFDDNIPARAFDNFQVIISTCFYNSVDRSLVFFLANVSISKFVNFTDIMSKNIDPARKEAEFALSALMEIPSQYKATLELGLLGQRTGHCPDRIALPPPTYATQSMRNSPRTSRSTSFQNKPYDNGVSSTPPSTTHNESQQQFCPVCLVSAKNMAFNCGHQTCAGCGEDLHVCPICRSSISVRIKLY

SEQ ID NO: 124 - protein, 254 aa, Triticum aestivum
MLLPSSSSSSYDPKGDSFGKSVDDHMRSTLTFGDKHSVFASQNTDYGHPMACISYPFNDSGSVWAAYGSRAMFQPLMAEGGASATARVPLPVELAADEPIFVNPKQYNGILRRRQLRAKLEAQNKLTKNRKPYLHESRHLHAMKRARGSGGRFLNSKQLKQQQQQSGSACTKAIADGANSLGSTHLRLGSGAAGDRSNSASKAMSSQENSKRVAAPAPAFTMIQAARKDDDFFHHHGHHLSFSDHFGQSSDRYT

SEQ ID NO: 125 - protein, 205 aa, Zea mays
MPDSDNDESGGPSNADFSSPREQDRFLPIANVSRIMKKALPANAKISKDGKETVQECVSEFISFITGEASDKCQREKRKTINGDDLLWAMTTLGFEDYVEPLKLYLHKFRELEGDKAAAGSQPPPPPSSTHNGAGVPVGYGMYGAGGGSGMIMMMGQPMYPPAASSGYSQQPPHHQMSMGGKGGAYGHCDGSSSSPSGLRRHDGL

SEQ ID NO: 126 - protein, 525 aa, Bacillus subtilis
METIIIALIAFIIGIIAIPIVLFAWIYIKDEKQQEHSILRNYPVIGRFRYILEKIGPELRQYLYSNDNEEQPFSRKEYEQTVISGKYKSRMMGFGSVRDFDKPGYYIRNAMFPKQREEMHVNQTPKIETQIYKMDADNLFKRKEHAEHIKADPYFLHPDDVQVIGEHTCEKPFYVKGLVGQSAMSYGSLGERAVTALSKGLHLAGGTWMNTGEGGLSEYHLKGGADIICQIGPGLFGVRKRNGEFSWEEFKRKSRIDQIKAFELKLAQGAKTRGGHVDGAKVSEEVADIRNVEPGKSIDSPNRFYEFSNPPEMLDFIEKLRDVGQKPVGIKLVAGHPEELHELFSHMQKSGKHPDFITIDGSEGGTGASFYELADTVGLPIMTALPIVDTLLKQYGLRSQLKIFASGKLLTPDKIAVALALGADFVNIARGMMFSVGCIRALVCHTNTCPAGVATTDPKLQKALSVEEKQHRVCNYVISLREGLFNLAAAAGINSPIHFSKEHVVYRKEDGSIINIDNLIHQFVS

SEQ ID NO: 127 - protein, 2464 aa, Zea mays
MKPSPHFPEIGKKPKDLIAKDHTFNIAAYISSGADVIAAALRKHVEEEARDLSGEAFLRFMDQLYEQISSLLQSNDVNENLLALRAIDALIDMPFGEGASKVSKFASFLRNVFEVKRDPEILVPASEVLGHLAKAGGAMTADEVERQIKTALGWLTGERVEYRRFAAVLILKEMAENASTVFNVHVPEFVDAIWVALRDPKQAVREKAVEALRACLHVIEKRETRWRVQWYYRMCEAAQVGLGRNASVHSIHGSLLAVGELLRNTGEFMMSRYREVADIVLDYLKHRDQLVRRSITSLLPRIAHFLRDRFVTNYLKICMDHILFVLRTPDERASGFVALGEMAGALGVELVPYLPAITSHLQDAIAPRRGRPSLEAISCVGSFAKAMGPAMEPHIRSGLLDAMFFAGLSDKLIDALESISTSIPSLLPTIQERLLDCISQALPKSSIRPGASVGRASRSNNLQQFVDSNSPVLVQLALWTLANFNFKGHELLEFARESVILYLEDEDSSTRKAASLCCCKLVAHSLSASSASQFGSNRTNRIGGAKRRRLVEEIVEKLLMAAVADADVGVRSSVFKALYRNPAFDDFLAQADILTSIFVALNDEEYDVRELAISVAGRLSEKNPAYVLPALRRYLIQLLTYLDQSMDSKCREESARLLGCLIRSCARLILPYIAPVHKALVTRLCEGTGPNANNALAAGVLATVGELAKVGGFAMRQYLPELMPVVVDSLLDGGAVSKREVAVSTLGQIIQSTGYVIAPYNEYPPLLGLLLKLLNGELEWSTRLEVLKVLGIMGALDPHAHKRNQHNLPGQHREVLRPTSKPHNILFPWKNLPTDYWPSFQHPRTTIQQLQLAPSCEFFEILLFQVITKWWLAPLSLFLSQWALAVFPYLPKVLPDLFRAVRMCEDGALKEFITWKLGTLISIVRQHIRKYLQDILSLISELWTSSFSLAAPNRTIQGPQGSPVLHLVEQLCLALNDEFRMYLLHILPSCIQVLGDAERCNDYYYVPDILHTLEVFGGNLDEHMHLVAPVLVRLFKVELVDIRRRAIVTLTNLIPKVQVGTHVSALVHHLKLVLDGNNDDLRKDAAEALCCLALGEDFTIFIPSIRKILVKHHLRYRKWDEIENRLLRRELLITENLSVQKYTQCPPDVISDPLDDCDGTPSEIADETQRQARSHQVNDVRLRSAGEASQRSTREDWAEWMRHFSIALLKESPSPALRTCARLAQLQPSVGRELFAAGFASCWAQMSESSQEQLVRSLKTAFSSQNIPPEILATLLNLAEFMEHDEKPLPIDTRLLGALAEKCRAFAKALHYKEMEFEAVCTKKMGANPVTVVESLIHINNQLQQHEAAIGILTYSQQNSEVQLKESWYEKLHRWDEALKAYTVKSSQTSGPLQNLDATLGRMRCLAALARWEDLSALCREQWTGAEPSARLEMAPMAANAAWHMGEWDHMADYVSRLDDADENKLRMLGNATASGDGSSNGAFFRAVLLVRYKKYDDARMYVERARRCLATELAALVLESYERAYNNMVRVQQLSELEEVIDYCTLPMESPIADGRRELIRNMWNERIKGTKRNVEVWQALLAVRELVLPPNEDRDTWIKFAELCWKNGRISQARSTLVKLLQFDPESSPELTLYHAHPQVALAYLKYQYAVGDELKRRDAFSKLQELSVQVATTMGNLPGTSANHGTMSNAGVPLIARVYLTLGSWKKALSPALDDDSIQEILISYHNATLSAKDWGKAWHIWALFNTEVMSRYTFRGRPDIAGKYVVAAVTGYFYSIACASTTKGVDDSLQDILRLLTLWFNHGDTSEVQTALQKGFSLVKIEMWLVVLPQIIARIHSNNRVVRELIQSLLVRIGKGHPQALMYPLLVACKSISILRQRAAQEVVDKIRQHSGGLVDQAQLVSKELIRVAILWHEMWHEALEEASRMYFGEHNIEGMLAVLEPLHAMLERGDETIKENAFIQAYGHELLEAHECCLKYRATGEDAELTKAWDLYYHVFRRIDKQLPSLTTLDLHSVSPELLKCRKLELAVPGTYAADSPLVTIEYFVPQLIVITSKQRPRKLTIHGSDGNDYAFLLKGHEDLRQDERVMQLFGLVNTLLENSRKTSEKDLSIQRYAVIPLSPNSGLIGWVPNCDTLHALIREYRDARKIFLNQEHRLMLAFAPDYDHLPLIAKVEVFQHALQNTEGNDLAKVLWLKSRTSEVWLERRTNYARSLAVMSMVGYLLGLGDRHPSNLMLDRYSGKILHIDFGDCFEASMNREKFPEKVPFRLTRMLVKAMEVSGIEGTFRTTCENVMQVLRTNRDSVMAMMEAFVHDPLINWRLFNFNEVPQVSNYGNVHAHTVVSSEEAVANRELMQPQRGARERELLQAVNQLGDANEVLNERAVAVMARMSDKLTGRDFSSGSALAGAGSSIQHGSEHLASGDARDAQPGLSVKVQVQKLILQATSHENLCQNYVGWCPFW

SEQ ID NO: 128 - protein, 433 aa, Zea mays
MMHQHHPHHLPRFHSPLSSSSEAVDMDPRVWGRLPQPLVDRVLACLPTPSFLRLRATCRRFCSLIYSSPFLHSHLLLSPHLPFFAFAVPSAGYLLLLDPTRQAPSWSRLPLPLPAPGAGQGFSPAAASAGLLAFLSDASGHKTLLLANPITRLLAPLPLCPTARLSPTVGLAAGPTSFIAVIAGDDLVSPFAVKNISADTFVADAASVPPSGFWAPSSILPRLSSLDPRAGMAFASGRFYCMSSSPFAVLVFDVAANVWSKVQPPMRRFLRSPALVEFGGGREREARVALVSAVEKSRLSVPRSVRMWTLRGGGHGVAGGSSGSGAWTEVARMPADVHAHFAAAEGGRGFECAAHGDFVVLAPRGPASPVLVFDSRRDEWRWAPPCPYNPYVGGIAAGGPGFRVFAYEPRLATPAIGLLDATAPAAFLHGMQG

SEQ ID NO: 129 - protein, 255 aa, Glycine max
MYGQSSSSSSSYESDLALLDSIRHHLLGESESIFGAPNFGSGRSSSFSSLDSCLSDNWGELPFKEDDTEDMVLYGVLRDAVNVGWVPSLDAGSPESVSSGFPAVKLEPDLMPALISPCPPPAAAAEEKKVVPAKGKHYRGVRQRPWGKFAAEIRDPAKNGARVWLGTFETAEDAALAYDRAAYRMRGSRALLNFPLRVNSGEPDPVRVKSKRSSSPESAAALPAKRKKVVVVGTVQEQVGSQVAECTRGEQLLVS

SEQ ID NO: 130 - protein, 904 aa, Saccharomyces cerevisiae
MINLEDYWEDETPGPDREPTNELRNEVEETITLMELLKVSELKDICRSVSFPVSGRKAVLQDLIRNFLQNALVVGKSDPYRVQAVKFLIERIRKNEPLPVYKDLWNALRKGTPLSAITVRSMEGPPTVQQQSPSVIRQSPTQRRKTSTTSSTSRAPPPTNPDASSSSSSFAVPTIHFKESPFYKIQRLIPELVMNVEVTGGRGMCSAKFKLSKADYNLLSNPNSKHRLYLFSGMINPLGSRGNEPIQFPFPNELRCNNVQIKDNIRGFKSKPGTAKPADLTPHLKPYTQQNNVELIYAFTTKEYKLFGYIVEMITPEQLLEKVLQHPKIIKQATLLYLKKTLREDEEMGLTTTSTIMSLQCPISYTRMKYPSKSINCKHLQCFDALWFLHSQLQIPTWQCPVCQIDIALENLAISEFVDDILQNCQKNVEQVELTSDGKWTAILEDDDDSDSDSNDGSRSPEKGTSVSDHHCSSSHPSEPIIINLDSDDDEPNGNNPHVTNNHDDSNRHSNDNNNNSIKNNDSHNKNNNNNNNNNNNNNDNNNSIENNDSNSNNKHDHGSRSNTPSHNHTKNLMNDNDDDDDDRLMAEITSNHLKSTNTDILTEKGSSAPSRTLDPKSYNIVASETTTPVTNRVIPEYLGNSSSYIGKQLPNILGKTPLNVTAVDNSSHLISPDVSVSSPTPRNTASNASSSALSTPPLIRMSSLDPRGSTVPDKTIRPPINSNSYTASISDSFVQPQESSVFPPREQNMDMSFPSTVNSRFNDPRLNTTRFPDSTLRGATILSNNGLDQRNNSLPTTEAITRNDVGRQNSTPVLPTLPQNVPIRTNSNKSGLPLINNENSVPNPPNTATIPLQKSRLIVNPFIPRRPYSNVLPQKRQLSNTSSTSPIMGTWKTQDYGKKYNSG

SEQ ID NO: 131 - protein, 230 aa, Oryza sativa
MKEREKVVRLAKLAEQAERYDDMVEFMKTLARMDVDMSAEERLLFSVGFKKTIGARRASWRILESLEQKVTAGDQPGVTINGYKKKVEDELRAVCNEVLSIIAIHCLPLANSGENVVFFYKMKGDYYRYLAEFSTGTEKKAATDQSLMAYQAWPCAQLFSLLEIMNSPERASQVAKQALDEATAEINSAGVEGYKDSMLMMQLLKENLALWTSELTGGETSKDDDVVMEG

SEQ ID NO: 132 - protein, 1551 aa, Leptolyngbya boryana
MNRINPPMSQASVPSPNESQSISNGYAGQRWLVEERDACGVGFIVDQQGRASHDLMSKALIALSCMEHRGGCSADQDSGDGAGVMAEIPWEILNQWASDRGVTLKPGYTGVGMVFLPQDSAIAAETKQVAEKIIAEEGLTLLGWRSVPVQPEVLGVQARDNQPLIEQLIVQSEVADEELERKLYVARKRIHRTLAVRPEAGFDELYVCSFSTRTIVYKGMVRSEILGKFYLDLQNPEYKTTFALYHRRFSTNTMPKWQLAQPMRLLGHNGEINTQLGNVNWMRAREADLAHEVWGDRIDLLKPTVNSNNSDSANLDNVMELLVRSGRSPVEALMMMVPEAYKNQPELADHPEITNFYEYNSGVQEAWDGPALLAFCDGKIVGATLDRNGLRPARYSITRDGYFVVGSEAGVVDLPESEIIEKGRLGPGQMIAFDLQSREVLKNWEIKQRIANAHPYGEWLKQNRKTLKSHAFLESTALDAKSLLTHQTAFGYTLEDLEMVIQDMAAQGKEPTFCMGDDIPLAVLSERPHLLYDYFKQRFAQVTNPPIDPLREKLVMSLTMQLGERGNLLKINSDGANLFLLDSPVLTEPELDQIRESGLATANLSTLFEVAAGPEGLKAAVARLCEQATEAVRSGSKILVLSDRLDQSGNPTQLNADYSYIPPMLAVGAVHHHLIQKGLRMRASLVVDTAQAWSTHHFACLIGYGASAVCPYLALESVRQWWSDSKTQALMERGKIKSASIAAVQANFRKAIEDGLLKILSKMGISLLSSYQGAQIFEAIGIGGDLLNTGFFGTASRLGGLTLAELAQEILSFHSKAFPELTTKKLENFGFVQYRPGGEYHMNSPEMAKHLHQAVRTKNPDHYDLYQKHLAGRPLTALRDLLDFKSDRAAISIDEVEPAIDIVKRFCTGGMSLGALSREAHEVLAIAMNRIGGKSNSGEGGEDPVRYKILNEVENGTSPLLPHLKGLQTGDTANSAIKQVASGRFGVTPEYLMSAKQIEIKMAQGAKPGEGGQLPGPKVSPYIALLRRSKPGVTLISPPPHHDIYSIEDLAQLIFDLHQINPLAQVSVKLVAEVGIGTIAAGVAKANADIIQISGHDGGTGASPLSSIKHAGSPWELGLTEVHRVLMENQLRDRVILRVDGGIKTGWDVVMGALMGAEEYGFGSIAMIAEGCIMARICHTNSCPVGVASQKEELRKRFPGTPEHVVNFFLFIAEEVRSLLARLGYKSLDEIIGRADLLKPREAVNLTKTQLLNLDCLTQLPDTRSDRTWLNHETVHSNGAVLDDQLLSDPDLQAAIQNQGDVTKSVEVVNTDRTVGTRISGAIAKQYGNSGFSGQVTLNFTGAVGQSFGAFNLPCMTLNLVGEANDYVGKGMHGGEIAIKPSPEATYDPSQNVIIGNTCLYGATGGRLFANGQAGERFAVRNSLAEAVVEGVGDHCCEYMTGGVVVVLGRAGRNVGAGMTGGLAYFLDEDGSFQEKVNPEIVKVQRVVAPAGEQQLKELLEAHVEHTGSPKAKAVLANWSEYLPKFWQVVPPSEKDTPEANPDVEKVAVSA

SEQ ID NO: 133 - protein, 260 aa, Glycine max
MTATSRPQHPNGSLAPASDGGESFAKFFECWILEQSRDLAALRAAATARPDDADLRRLVDRVLGHYEHYYRAKSAAASADVLPMFAPSWISATESLYLWCGGWRPTSAIQLLYSKSGLQLEAQLPAFLDGGSLGDGDLGGLSAEQLQAADQLQRRTIRREREIEEAAAGAQESLATTKMVELAGKGGMDAAEGMELEMDAKAEAMKRVLEMADGLRLETLRGVVGLLRPAQAVHFLVAAAELHLAVHKFGRRKDGAAAAE

SEQ ID NO: 134 - protein, 893 aa, Saccharomyces cerevisiae
MTTDNAKAQLTSSSGGNIIVVSNRLPVTITKNSSTGQYEYAMSSGGLVTALEGLKKTYTFKWFGWPGLEIPDDEKDQVRKDLLEKFNAVPIFLSDEIADLHYNGFSNSILWPLFHYHPGEINFDENAWLAYNEANQTFTNEIAKTMNHNDLIWVHDYHLMLVPEMLRVKIHEKQLQNVKVGWFLHTPFPSSEIYRILPVRQEILKGVLSCDLVGFHTYDYARHFLSSVQRVLNVNTLPNGVEYQGRFVNVGAFPIGIDVDKFTDGLKKESVQKRIQQLKETFKGCKIIVGVDRLDYIKGVPQKLHAMEVFLNEHPEWRGKVVLVQVAVPSRGDVEEYQYLRSVVNELVGRINGQFGTVEFVPIHFMHKSIPFEELISLYAVSDVCLVSSTRDGMNLVSYEYIACQEEKKGSLILSEFTGAAQSLNGAIIVNPWNTDDLSDAINEALTLPDVKKEVNWEKLYKYISKYTSAFWGENFVHELYSTSSSSTSSSATGSVAKSINMALKLDKEEKSNLESKLWKEVPTIQDWTNKFLSSLKEQASSNDDMERKMTPALNRPVLLENYKQAKRRLFLFDYDGTLTPIVKDPAAAIPSARLYTILQKLCADPHNQIWIISGRDQKFLNKWLGGKLPQLGLSAEHGCFMKDVSCQDWVNLTEKVDMSWQVRVNEVMEEFTTRTPGSFIERKKVALTWHYRRTVPELGEFHAKELKEKLLSFTDDFDLEVMDGKANIEVRPRFVNKGEIVKRLVWHQHGKPQDMLKGISEKLPKDEMPDFVLCLGDDFTDEDMFRQLNTIETCWKEKYPDQKNQWGNYGFYPVTVGSASKKTVAKAHLTDPQQVLETLGLLVGDVSLFQSAGTVDLDSRGHVKNSESSLKSKLASKAYVMKRSASYTGAKV

SEQ ID NO: 135 - protein, 394 aa, Zea mays
MGTQIVREQTSGSLTAIVVDENLCHARAASCMLANLQCKVIVYASPVDALKFLKDHQRDTDFALVEVNMKEMHGFQFLDMSRKLHKSLQVIMMSADTTWPTMKRSVELGARFLIKKPLDANTMNNLWQHLDLKFQRTDKIKALFPGWSYWKTGNAFEEGTKQRGTHLMWTPFLQRKFLQAVELLGEDASPKKIQLLMNVNSVSRKQISAHLQKHRKKVEKELRNSNANNSSHGIGGASNSRPSRIFEISHGSTFQYNRPDVQPEHRSDESVSVEQTETIEETQSNRLYEAMRRALQLGSVFEEPQLPNIDPPAGKDAREVEEVEMTMRDGNYRDAGTDAFGDKNEASGTHSSDDNNAKVKSKDDSADKLVSCHDELRPVVTLVTYSDSEDGETL

SEQ ID NO: 136 - protein, 71 aa, Zea mays
MNGFMVFLGGADLRVPASNGLQYARSLIERGGDVKIMMFPEDIHEINLPRSDFESFLNIGVWFKKHLNAVA

SEQ ID NO: 137 - protein, 681 aa, Zea mays
MEGTVIRIASESKRGNEQTDSLTEVPRAIGTLVTHNREVENLIVLEDDTELTPYEGMEFESEDAARDFYSTYARSAGFRIRISRYTRSRRDNSVISRRIVCSKEGFHETRACDGLHPEQKQQERAGTRVGCKAMILIKKFSPGKWVVTKFIKNHNHGPVPPRKLDSRLVDQDCDPMEKPHSIEVDPVEEPFEGMEFESEEAAKLFYVNYARLNGFRARISRYCRSRRDNSIISRQIVCSKEGFREVRTKKVLTDEGKTKRPRMITRVGCKAMIVVKKMNSGKWMVSKFEKEHNHSLSYSKMVPSTSNITSGEIVDLAAKGAHPSEVKNEGYSAGTQCNPADSLTILYNNLCQEAIKFAKEGSVTEEIYHVAVSALKEAAEKVAEVKRSRPTLSHCGFVRESKHDVLQEKSMSALQCSNQVELTRTSPGSRPLQDSASNLLLIPTDILTDSRLYSGVDTAPLTGGFPTNESESTHASESSFMHFKNTKKTSSEKSQHFLVFHFGPEDAYLLLEPQNTCFNQLIHGKEQGIHGSSKDTMVAIPAIPLALCMPVTQSLPGSSTGPFGGVLSELKNQGTVPKSIVHATALACGARAVPLEDAASLISAIESKIRSGGAIIAKLPSNNLAPLVPPAIAMSSSSEDDEEHDHSEPAMIDVDRNVNHQSSNAMKLQRELSEFETEAGN

SEQ ID NO: 138 - protein, 214 aa, Zea mays
MALRMPCDDGGSQPPYGRKRTALLQRVGRAGKDGTALAQGRSLPPAWTLVTPYCKRTRPGRGANTKAAGSTLPRLSPSGCFSPLRVPPRADPSGLGHAVTIYSSVQGPPGANGHLWCQIQQLGAPDRGIGLSGDPTGLSASSSPPMADWGPVVIATVLFVLLTPGLLFQLPAHGRIVGFGTMHTSGVAILVHAVLYFALITIFLIAIGVHIYAG

SEQ ID NO: 139 - protein, 326 aa, Zea mays
MVRLQLLRGVVSWSTVVNSDIHLYCTFVLTLHAFKLVSWNFLDTATFFQTYARFLDKAAVILWNECDGPRNSWRLCTVTQVEELKILLRMFPIWATGIVFFTVCAQNSSMFIEQGMTLDNQIGPFKIPAATLSSLDVISVVVWVPIYERLVVPIARRFSGKERGFSELQRMGIGLFVSTVAVAVAALVEINRLQVAVAEDLVHQKVPVPMSILWQAPQYLLVGVGEVFTSIGQAEFFYNQSPDAMRSLCSAFALVTVSLGSYLSSFILSLVSYFTTRNGQLGWIPDNLNEGHLDRFFWLIAGLSSLNFLVFIYYAQQYKCKIASVA

SEQ ID NO: 140 - protein, 581 aa, Zea mays
MATVWSGCSTSCGSFGQELPPRGKRGGGEGTRFLPRRRGRIRGDARQTQALSAAMVTVGACVCRAAPCLLDSVVDGTEDVSVGFGGIDGEPLADGYDGGKRRGPRRRPTRPTVFQKEVGARTAPPAMASEPDSKSEHGVSRLHFLEERDEETLSRRLIKLSQNNKVRSATELFDSMRASGLQPSAHACNSLLACYVRRSPLADAMRMFEFMKAKGMATGHTYTMILKAVASNQGYVSALEMFDKIEEEEGSKKIIDVIVYNTMISVCGRAKEWMLVERLWRRLEQHSLNGTLLTYDLLVSIFVQCGQSELAIAAYQEMLQKGLDPSEDIMKAIIASCTKEGKWEFAMSTFSRMLRAGMKPSLILFNSIINSLGKAGQDELAFRMYHLLEKSGLKPDQYTWSALLLALYRSGRCWDCLKLFHGIKGKHPTLLNDHLYNTALMSCEKLGQWEHGLQLLWLMEKRGLKLSVVSYNHVIGACEVASKPKVALKVYQRMINQRCSPDTFTHLSVIRACIWGSLWTEVEDILEEVAPDSSIYNAVIHGLCLRGKTGLANKVYAKMRSMGLVPDGKTRAFMLQHIATD

SEQ ID NO: 141 - protein, 160 aa, Zea mays
  misc_feature (80)..(80): Xaa can be any naturally occurring amino acid
  misc_feature (111)..(111): Xaa can be any naturally occurring amino acid
  misc_feature (122)..(122): Xaa can be any naturally occurring amino acid
  misc_feature (144)..(144): Xaa can be any naturally occurring amino acid
MVNDIHNRDGIVLGTSRDTNQIYISKAMAFRKVIDKSFGFHAAVEEAQRALNAAHVEAESVDNGIGVVKLMGHNCCFTAXASLASRYVDCCLIPESPFYLEGKRRLLEFIXRRREDKGHVVXIVLAEGADQDLIVRSMNFMDTXDASGDKLLLDGCLWLF

SEQ ID NO: 142 - protein, 200 aa, Zea mays
  misc_feature (59)..(59): Xaa can be any naturally occurring amino acid
ARGFLPVPSPSRNQPHHHRALLLRPVAGAMTGAAAPAAPAGNRAGCEPVRKAGPMTMEXLLALHETEAEREARIRDMFAFFDTAGSGQLDYAQIEAGLAALQVPAECKYARELLRACDRDHDGRVGYDDFRRYMDDKELELYRIFQAIDVEHNGCMLPEELWDALIKAGMCFPCRTTLLASLIPSICAAAPVILATSVLC

SEQ ID NO: 143 - protein, 179 aa, Zea mays
  misc_feature (49)..(49): Xaa can be any naturally occurring amino acid
  misc_feature (99)..(99): Xaa can be any naturally occurring amino acid
  misc_feature (130)..(130): Xaa can be any naturally occurring amino acid
  misc_feature (141)..(141): Xaa can be any naturally occurring amino acid
  misc_feature (163)..(163): Xaa can be any naturally occurring amino acid
MQRFMVNDIHNRDGFVLGTSRGGHDTAKIIDCLQDRDTNQIYIIEGDGXRKVIDKSFGFHAAVEEAQRALNAAHVEAESVDNGIGVVKLMGHNCCFTAXASLASRYVDCCLIPESPFYLEGKRRLLEFIXRRREDKGHVVXIVLAEGADQDLIVRSMNFMDTXDASGDKLLLDGCLWLF

SEQ ID NO: 144 - protein, 170 aa, Zea mays
RRMNENRKACREQSRCSVSTQPNSRTRDGSSRILSAPPIESFRYERNKDAPFRDQNRSDIESFRYRRDINTLLRDQSPSNEVRKYGKGRGGTKAQSHRVRKDFKAQPSINHEKSIMPSIEPTWTPLDKRARQKLTFATYGNEKQSKLVWRHQSSPGVGCGFPKKYHEEGT

SEQ ID NO: 145 - protein, 242 aa, Gossypium hirsutum
  misc_feature (179)..(179): Xaa can be any naturally occurring amino acid
MSPTESSREENVYMAKLAERAERYEEMVEFMENVAKTVDVGELTVEERNLPSVAYKNVIGARRASWRIISSIEQKEESRGNEDHVATIKKYRSKIEAELSKICDGILSLLESHLIPSASSAESKVFFLKMKGDYHRYLAEFKTAAERKEAAESTLLAYKSAQDIALGDLAPTHPIRLGXLSRPLPDEAISELDTLGEESYKDSTLIMQLLRDNLTLWTSDITDEAGDEIKEASKPESGEGQQ

SEQ ID NO: 146 - protein, 337 aa, Medicago truncatula
MKMNSLSLKTALISTAILSTAMALKLTVPMVSHFILNEAPTIWNFILSCFTPPYLYLLLNLIILTIVITSKFHNHHHHSPPETPFDGIPSPVPVPVQIPVPETLQISETATLTNYNGFVSEASEGYRYELKTDETVAVSNESNDSVAYVADEITPVKTTVVGVEDSVHVSNLQKKVPLQFAFNDENEKPPISARSSHRKTVRSSPEGTVNALRVAKTKKQETLESTWKTITEGRAMPLNRHLKKSETFESQPRRNGVPLADLNGGVGGGSGPVMKKSDTFSGMEKSTSPVRKEPSLSQDELNRRVEAFINKFNAEMRLQRQESLRQYREMVNGGRTC

SEQ ID NO: 147 - protein, 885 aa, Arabidopsis thaliana
MDLEANCKEKLSYFRIKELKDVLTQLGLSKQGKKQELVDRILTLLSDEQAARLLSKKNTVAKEAVAKLVDDTYRKMQVSGASDLASKGQVSSDTSNLKVKGEPEDPFQPEIKVRCVCGNSLETDSMIQCEDPRCHVWQHVGCVILPDKPMDGNPPLPESFYCEICRLTRADPFWVTVAHPLSPVRLTATTIPNDGASTMQSVERTFQITRADKDLLAKPEYDVQAWCMLLNDKVLFRMQWPQYADLQVNGVPVRAINRPGGQLLGVNGRDDGPIITSCIRDGVNRISLSGGDVRIFCFGVRLVKRRTLQQVLNLIPEEGKGETFEDALARVRRCIGGGGGDDNADSDSDIEVVADFFGVNLRCPMSGSRIKVAGRFLPCVHMGCFDLDVFVELNQRSRKWQCPICLKNYSVEHVIVDPYFNRITSKMKHCDEEVTEIEVKPDGSWRVKFKRESERRELGELSQWHAPDGSLCPSAVDIKRKMEMLPVKQEGYSDGPAPLKLGIRKNRNGIWEVSKPNTNGLSSSNRQEKVGYQEKNIIPMSSSATGSGRDGDDASVNQDAIGTFDFVANGMELDSISMNVDSGYNFPDRNQSGEGGNNEVIVLSDSDDENDLVITPGPAYSGCQTDGGLTFPLNPPGIINSYNEDPHSIAGGSSGLGLFNDDDEFDTPLWSFPSETPEAPGFQLFRSDADVSGGLVGLHHHSPLNCSPEINGGYTMAPETSMASVPVVPGSTGRSEANDGLVDNPLAFGRDDPSLQIFLPTKPDASAQSGFKNQADMSNGLRSEDWISLRLGDSASGNHGDPATTNGINSSHQMSTREGSMDTTTETASLLLGMNDSRQDKAKKQRSDNPFSFPRQKRSVRPRMYLSIDSDSETMNRIIRQDTGV

SEQ ID NO: 148 - protein, 230 aa, Gossypium hirsutum
MASTVSCSFSPLVLNKANLPCSTNAIKPFTVSFLSKNSCNSRLSVVRAEATRDHNRDTSVDVHVSKDNKGQERAVEKRPKRLAMDVSPFGLLDPMSPMRSMRQMMDTMDRIFEDAMTFPGTNRTRGDVRAPWDIKDGEHDIKMRFDMPGLGKDEVKVSVEDDILVIKGEHKKEETQDDWTNRSYSSYNTSLQLPDNCDKDNIKAELKNGVLFISIPKTKVERKVIDVDIR

SEQ ID NO: 149 - protein, 1361 aa, Arabidopsis thaliana
MGSLKKDGEIGDEFTEALLYVNGVRRVLPDGLAHMTLLEYLRDLGLTGTKLGCGEGGCGACTVMVSSYDRKSKTSVHYAVNACLAPLYSVEGMHVISIEGLGHRKLGLHPVQESLASSHGSQCGFCTPGFIMSMYSLLRSSKNSPSEEEIEECLAGNLCRCTGYRPIVDAFRVFAKSDDALYCGVSSLSLQDGSTICPSTGKPCSCGSKTTNEVASCNEDRFQSISYSDIDGAKYTDKELIFPPELLLRKLTPLKLRGNGGITWYRPVCLQNLLELKANYPDAKLLVGNTEVGIEMRLKRLQYQVLISVAQVPELNALNVNDNGIEVGSALRLSELLRLFRKIVKERPAHETSACKAFIEQLKWFAGTQIRNVACIGGNICTASPISDLNPLWMASRAEFRITNCNGDVRSIPAKDFFLGYRKVDMGSNEILLSVFLPWTRPLEYVKEFKQAHRRDDDIAIVNGGMRVFLEDKGQQLFVSDASIAYGGVAPLSLCARKTEEFLIGKNWNKDLLQDALKVIQSDVVIKEDAPGGMVEFRKSLTLSFFFKFFLWVSHNVNNANSAIETFPPSHMSAVQPVPRLSRIGKQDYETVKQGTSVGSSEVHLSARMQVTGEAEYTDDTPVPPNTLHAAFVLSKVPHARILSIDDSAAKSSSGFVGLFLAKDIPGDNMIGPIVPDEELFATDVVTCVGQVIGVVVADTHENAKTAAGKVDVRYEELPAILSIKEAINAKSFHPNTEKRLRKGDVELCFQSGQCDRVIEGEVQMGGQEHFYLEPNGSLVWTVDGGSEVHMISSTQAPQKHQKYVSHVLGLPMSKVVCKTKRIGGGFGGKETRSAFIAAAASVPSYLLNRPVKLILDRDVDMMITGHRHSFLGKYKVGFTNEGKILALDLEIYNNGGNSLDLSLSVLERAMFHSDNVYEIPHVRIVGNVCFTNFPSNTAFRGFGGPQGMLITENWIQRIAAELNKSPEEIKEMNFQVEGSVTHYCQTLQHCTLHQLWKELKVSCNFLKARREADEFNSHNRWKKRGVAMVPTKFGISFTTKFMNQAGALVHVYTDGTVLVTHGGVEMGQGLHTKVAQVAASAFNIPLSSVFVSETSTDKVPNASPTAASASSDMYGAAVLDACEQIIARMEPVASKHNFNTFTELVSACYFQRIDLSAHGFHIVPDLGFDWISGKGNAFRYYTYGAAFAEVEIDTLTGDFHTRAADIMLDLGYSLNPAIDVGQIEGAFVQGLGWVALEELKWGDAAHKWIKPGSLLTCGPGNYKIPSINDMPFNLNVSLLKGNPNTKAIHSSKAVGEPPFFLASSVFFAIKEAIKAARTEVGLTDWFPLESPATPERIRMACFDEFSAPFVNSDFYPNLSV

SEQ ID NO: 150 - protein, 1353 aa, Arabidopsis thaliana
MEQNEFMEAIMYVNGVRRVLPDGLAHMTLLEYLRDLGLTGTKLGCGEGGCGSCTVMVSSYDRESKTCVHYAVNACLAPLYSVEGMHVISIEGVGHRKLGLHPLQESLASSHGSQCGFCTPGFVMSMYALLRSSKNSPSEEEIEECLAGNLCRCTGYRPIIDAFRVFAKSDDALYSGLSSLSLQDGSNICPSTGKPCSCGSKTTSEAATCNEDRFQSISYSDIDGAKYTDKELIFPPELLLRKLAPLKLGGNEGITWYRPVSLQNLLELKANFPDAKLLVGNTEVGIEMRLKRLQYPVLISAAQVPELNALNVNDNGIEVGSALRLSELLRLFRKVVKERPAHETSACKAFIEQLKWFAGTQIRNVACIGGNICTASPISDLNPLWMASRAEFRIINCNGDARSIPAKDFFLGYRKVDMGSNEILLSVFLPWTRPLEYVKEFKQAHRRDDDIAIVNGGMRVFLEEKGQQLFVSDASIVYGGVAPLSLRARNTEELLIGKNWNKCLLQDALKVIQSDVLIKEGAPGGMVEFRKSLTLSFFFKFFLWVTHHVNNVNPTIETFPPSHMSAVQLVPRFSRIGKQDYETVKQGTSVGLPEVHLSARMQVTGEAEYTDDTPLPPCTLHAALVLSKVPHARILSVDDSAAKSSSGFVGLFLAKDVPGNNMIGPIVADEELFATDVVTCVGQVIGVLVADTHENAKTAARKVDVRYQELPAILSIKEAINAKSFHPNTERRLRKGDVELCFQSGQCDRIIEGEVQMGGQEHFYLEPNGSLVWTIDGGNEVHMISSTQAPQQHQKYVSHVLGLPMSKVVCKTKRLGGGFGGKETRSAFIAAAASVPSYLLNRPVKLILDRDVDMMITGHRHSFVGKYKVGFTNEGKILALDLEIYNNGGNSMDLSLSNLERAMFHSDNVYEIPHVRIVGNVCFTNFPSNTAFRGFGGPQGMLITENWIQRIAAELDKIPEEIKEMNFQVEGSITHYFQSLQHCTLHQLWKELKVSSNFLKTRREADEFNSHNRWKKRGVAMVPTKFGISFTTKFMNQAGALVHVYTDGTVLVTHGGVEMGQGLHTKVAQVAATAFNILLSSVFVSETSTDKVPNASPTAASASSDMYGAAVLDACEQIIARMEPVASKHNFNTFSELASACYFQRIDLSAHGFHIVPELEFDWVSGKGNAYRYYTYGAAFAEVEIDTLTGDFHTRKADIMLDLGYSLNPTIDIGQIEGAFVQGLGWVALEELKWGDAAHKWIKPGSLLTCGPGSYKIPSINDMPFQLNVSLLKGNPNAKAIHSSKAVGEPPFFLAASAFFAIKEAIKAARSEVGLTNWFPLETPATPERIRMACFDEFSAPFANSDFCPKLSV

SEQ ID NO: 151 - protein, 333 aa, Zea mays
MVVLTKGELEQIALPAVQRASPPPPAAVPEVDLAAGDAAAAARAVAKACEDHGFFKVTGHGVPPHLLARLEAAAAAFFALPQREKDRAAGCPFGYASKRIGANGDLGWVEYLLLAVTAAGAAAAPGSACEGAEPSCFRAVLDEYVAAVRRMTCTVLQLMAQGLGLDDRDVFSRLVLDRDSDSMLRVNHYPPAAETRRLTGFGEHTDPQIISVLRSNDASGLEITLRDGTWVSVPSDTESFFVNVGDALQVLTNGRFRSVRHRVMVSSARPRVSVIFFGGPPPRERLAPLPGLVDREGGRRRYREFTWREYKNSAYRTKLADNRLCSFETMATS

SEQ ID NO: 152 - protein, 333 aa, Zea mays; identical to SEQ ID NO: 151

SEQ ID NO: 153 - protein, 462 aa, Zea mays
MDDIRLGRAVCLRSVDQANGVRGGDDEPTYMDVQTKRRGHARLSEYAVGHTSCTVEEDEETGVVEAVVDDVRVDRRMDGYCCYIHPIIEKRLQGKTAMEVCKAQSSDTLKLSPDDEIEGEIVYLQSRLLDGVVSMKQRYEDLILKVVQNISYELDSFNKRKWDHIIVNQFLRDLREAKKRGNSERRHKEALAILAATAPSVTPTSRNTTVRKETENNVTPAKRENMPRSITGSSRIGQLSSSPQAKDLSFSNSDVSDETNFGIFNLAKFSKKSALPCDICMRCDTILNRIFVCSSCKATVHLDCYQSLVYPTGPWKCELCHEMPSDSVTSGEQSDQNGPKACLVQCGLCHGTSGAFRKTVKGQWVHAFCAECCTLDCQITFHPSCARDAGLYMNTKRLGNMLQHKAYCCRHSIEQRKAYSQQYGPDEIKGMKQMRVELELLRFLCERIVKREKVKVFEIELK

SEQ ID NO: 154 - protein, 845 aa, Zea mays
MQEQRAYGNACIGLGLGGWSGRPGGGAIRSQPLARESFYFYGKNRGAARGRQPVPTQRRGVVKSEATCPGSDLPRHNASRIASSPPRHTRPPSLPRRPGPLARGASELPRPVVGLPELSTHAGGSSEAWLCAFLRASSGQIHGTQPPAARIVLHLCTSHQRIARTAHLLLLVSLAIFRASGLEDMAAAMDAPNPGAAAGPGMPSDALYQELWHACAGPLVTVPRQGERVYYFPQGHMEQLEASAHHQQLDQYLPMFDLPPKILCRVVNVELRAEADSDEVYAQIMLQPEADQNELTSLDAEPQEREKCTAHSFCKTLTASDTSTHGGFSVLRRHAEECLPQLDMSQNPPCQELVAKDLHGTEWHFRHIFRGQPKRHLLTTGWSVFVSSKRLVSGDAFIFMRGENGELRVGVRRLMRQVNSMPSSVISSHSMHLGVLATASHAISTGTLFSVFYKPRTSRSDFIVSVNKYLEAKKQKISVGMRFKMRFEGDDAPERRFSGTIIGIGSLPAMSKSLWADSDWRSLKVQWDEPSSILRPDRISPWEVEPLDAANPQSPQPPLRAKRPRPPASPCMVSELPSGFGLWKSPIESSCTLSFSEPQRARELFPSIPTSTLSSSSNVSFNSKNEPSMLTSQFYWSARHTRADSCAASTNTVVIEKKQEPSSGGCRLFGINICSAEEEVLPEVTAPGVGYEQTAASVELNSDKLSQPSDVNNSDALAASSERSPLESQSRQVRSCTKVIMQGMAVGRAVDLTKLSGYSDLCQKLEEMFDIQGELGSTLKKWRVIFTDDEDDMMLVGDDPWDEFCRMVKRIYIYTYEEAKKLTSKSKLPVSSDSSKLSAANSLSE

SEQ ID NO: 155 - protein, 97 aa, Zea mays
MGYLWRVRLSSFAAGAATASAAGFFLLYKDHLLARAAIISQKYYNLMMNFPFMSLFSLIRPVEDIKETSEKHYAALNKRISALESRREPGTIKEASD

SEQ ID NO: 156 - protein, 990 aa, Zea mays
  misc_feature (354)..(354): Xaa can be any naturally occurring amino acid
MGVPAFYRWLADRYPLTVSDAEEEEPVELEPGAFVPVDLRRPNPNGLEFDNLYLDMNGIIHPCFHPEGRPAPTTYDEVFKSIFDYIDHLFGLIRPRKLLYMAIDGVAPRAKMNQQRSRRFRAAKDAADAAAEEERLRKEFEAEGRTLAQKEKSEAIDSNVITPGTEFMFVLSTALQYYIQLRLNHTLGWQSVKIILSDSNVPGEGEHKIMSYIRLQRNLPGFDPNTRHCLYGLDADLIMLALATHEVHFSILREVISMPGQHEKCFLCGQVGHLAAECRGPSQPDNSVELPPIHKKKYQFLNIWVLREYLAKDLEIIDAPFKINFERLIDDFVFMCFFVGNDFLPHMPTLEILXGAINLLMSIYRSEFTSMGGYLTDVGEVILDRVEHFIQSVAVNEEQIFQKRARIQQARENNEEKHKMQRENSEEDQYVDKVKLGEPGYRERYYADKFKEEAESKPIVQVRRDVVQKYVEGLCWVMRYYYQGVCSWQWFYPYHYAPFASDLKGLAELEITFFLGQPFKPFDQLMGTLPAASSNALPKYYGDLMSDPDSPLKSFYPKDFEIDMNGKRFAWQGVAKLPFIDERRLLAETRKLEDTLTEEEKFRNRTMLDIIYVRDTHPLITQIIFLYQNYYHLSRTDPYVIPIEPAASGGMNGFLCLSERNWYSVTVTSPVKGFNGIAQNRVLNAAYLNPQYHKHIPEPPAGVIIPAKILKPSDFKPFPVLWHQDNSRRQVRERPQVSGALSGSLLGEAAHRLVKNSLQIRSGNAAGLLYMPYRGAPYGPGNRPRPAGPLGYERGFVDNPYHAHMSRSVPNPHAQFFGDSQANRQPMRILERPDSRSHDAGIRASMSKLTIQEGPRPHQNNRMQNSGYWPNQPHPTHFTGPPAQRPMQNISFTPQRPFQTGGFPQQRPVNGAPPPLPPSNWIGKQPSGCHMSVSPAKLDPRTAPDRQPKQDNPRSQQDKRQQATKVYRVKTQATNVNGLSEPGKQEEPEG

SEQ ID NO: 157 - protein, 352 aa, Zea mays
MDGEEVGRRGIPTLLKPSSSSSDGSAGEQEHIASDVTQLIGWTPLVELKRIASEAGIDARIVGKMEAYQPLCSIKDRSALRMIEDAEERGLISPGVTTLVEPTSGNMGLGLVLFAIQRGYRLIAVMPAKYSLDKQILLRFMGAELYLTDPALGFPGMFDKVEQLRKQLPNVHVLNQVTNKANSEAHFRLTAVAGPEIWKDTAGKVDVFVAGSGTGGTVSGVGKYLKMQKPGVKIICVEPAESPVISGGAPGKHKIQGVGPGFLPEVLDTSVIDETVTVSTEEAMANARRLAREEGLLVGISSGANLAACLKVASRQENKGKMIVTVFPSGGERYINSDLFADVREECIAMTF

SEQ ID NO: 158 - protein, 633 aa, Zea mays
MVTRCIREAVALAWVVLWALSTRAGTLLLCGRLSLGAGFPYVRRFADMAPERREAALRRWNRVRWLFPLRIAFAIVKILCHYVFYAMVNENSENPYWKAIGYSVDEPREDRARTATPSPSRPLDVGVVETRLLDDNKLLRSLVGRGLTVKPASSDANHHTVQCDAVIVGSGCGGGVAAAVLASAGYKVVVVEKGDYFTAEDYSSIEGPSMERLFERGGIFCTSNVTTMIFTGATVGGGSAVNWSASIRTPEEVTQEWAREHGLPVFASPGYAQAMDAVCARLGVTDGCQEEGFQNKVVRRGCEALGLCADAVPRNSSDAHFCGSCNFGCPTGDKRGTDTTWLVDAVARGAVILTGCKAEYFVLEKNHSSGSGSGRGKKCVGLVATCASNGVTKKLRIEAKVSIAACGALMTPPLLRRSGLKNRHIGSNLHLHPVSMAWGYFPENKQDPPLSGKKRMRRYSRTAHAYALVRDRGVGFVDGEGRVRFTPSREDVDELRNGLRRVLRILVAAGAAEVGTHRSDGLRLRCKGLRDEDLEGFLDEVTIEKGPMHSRVDKWALHCSAHQMGSCRMGSSPKDGAVDGRGESWEAEGLYVCDGSLLPTAVGVNPMITIQSIAFCLSKGIAETMAQGQGKGQ

SEQ ID NO: 159 - protein, 467 aa, Zea mays
MATTMNVRALCLAVATVFCVLSRQSLAAGEGSKEADRIAALPGQPPDAAVQQYSGYVSLDDKAGKSLFYYFVEATADPATKPLLLWLNGGPGCSSFGIGAFQEIGPFRVDTDGKTLCNFKYAWNTVANVLYLESPVGVGFSYAANTGVYKVMGDNMTADDSLQFLLKWLDRFPEYKGRDFFIAGESYAGHYVPELAASILAANNARPKDMASVNLKGIAIGNAILEFAAEQSALYEYLWQHAFLSDTAHTLIGQRCKNAEDNSPLCSGTKDAAYNQLGNIDAYNIYATTCHDKKVKPRGSNCMDLADPCAQYYVEAYLNQPEVMKTIRANTGLKYRWTRCRGTFYNLLKFGDSPSKSMLPYVKAVAAAGVRVWVFSGDLDAMVPVIATKRSMEKLGLGVVEDWRPWSIDAKDQEVAGYVIEYKGVVFATVRGSGHMVPIDQPGRGFALFSSFIKGQPLPKAAPMVDG

SEQ ID NO: 160 - protein, 510 aa, Arabidopsis thaliana
MTTLSSINLSIPPHLLPSTTNTCSSSSATSCSPPRSSSFVLHSPLSFGHRRLPISKKSKLRFCGVITKEAVSGSNDMTITQVREDDESEIDAPLLDPESLSKPRRIALFVEPSPFAYVSGYKNRFQNFIRYLREMGDEVIVVTTHEGVPEEFYGARVIGSRSFPCPYYQKVPLSLALSPRIISEIARFKPDIIHASSPGVMVFGALAIAKMLSVPIVMSYHTHVPVYIPRYTFSWLVKPMWSIIRFLHRAADLTLVPSAAIGKDLIAAGATAANQLRLWNKGVDSESFNPRFRSQEMRIRLSNGEPEKPLVIHVGRIGVEKSLELLKSVMDKLPEARIAFIGDGPYKEDLEKLFTGMPAVFTGTLQGDELSQAYASGDVFVMPSESETLGLVVLEAMSSGLPVVAARAGGIPDIIPEDQEGKTGFLFNPGDVEDCVTKLRTLLHDRETREIIGKAAREETEKYDWRAATTKIRNEQYSAAIWFWRKKKVHVLGPINWLIKRLFPVPEGNV

SEQ ID NO: 161 - protein, 268 aa, Artificial sequence
  2-cys peroxiredoxin CTP fused to soy 2-cys peroxiredoxin enzyme domain
MASVASSTTLISSSASVLPATKSSLLPSPSLSFLPTLSSPSPSASLRLARPSPLTSIRSHSRRSFVVKASSSELPLVGNTAPDFEAEAVFDQEFINVKLSDYIGKKYVVLFFYPLDFTFVCPTEITAFSDRHAEFEALNTEILGVSVDSVFSHLAWIQTDRKSGGLGDLNYPLISDVTKSISKSYGVLIPDQGIALRGLFIIDKEGVIQHSTINNLAIGRSVDETKRTLQALQYVQENPDEVCPAGWKPGEKSMKPDPKLSKDYFAAV

SEQ ID NO: 162 - protein, 1131 aa, Zea mays
MSSSRPAHSSSSSSRTRQSSRARILAQTTLDAELNAEYEESGDSFDYSKLVEAQRSTPPEQQGRSGKVIAYLQHIQRGKLIQPFGCLLALDEKSFRVIAFSENAPEMLTTVSHAVPNVDDPPKLGIGTNVRSLFTDPGATALQKALGFADVSLLNPILVQCKTSGKPFYAIVHRATGCLVVDFEPVKPTEFPATAAGALQSYKLAAKAISKIQSLLGGSMEALCNTVVKEVFDLTGYDRVMAYKFHEDEHGEVFAEITKPGIEPYIGLHYPATDIPQAARFLFMKNKVRMICDCRARSVKIIEDEALSRDISLCGSTLRAPHSCHLKYMENMNSIASLVMAVVVNENEEDDEPEPEQPPQQQKKKRLWGLIVCHHESPRYVPFPLRAACEALAQVFAVHVNKEFELEKQIREKNILRMQTMLSDMLFKESSPLSIVSGSPNIMDLVKCDGAALLYGDKVWRLQTAPTESQIRDIAFWLSEVHGDSTGLSTDSLQDAGYPGAASLGDMICGMAVAKITSKDILFWFRSHTAAEIKWGGAKHDPSDKDDNRRMHPRLSFKAFLEVVKTKSLPWSDYEMDAIHSLQLILRGTLNDASKPAQASGLDNQIGDLKLDGLAELQAVTSEMVRLMETATVPILAVDGNGLVNGWNQKVAELSGLRVDEAIGRHILTLVEDSSVSLVQRMLYLALQGREEKEVRFELKTHGSKRDDGPVILVVNACASRDLHDHVVGVCFVAQDMTVHKLVMDKFTRVEGDYKAIIHNPNPLIPPIFGADQFGWCSEWNAAMTKLTGWHRDEVVDKMLLGEVFNSSNASCLLKSKDAFVRLCIVINSALAGEEAEKASFGFFDRNEKYVECLLSVNRKVNADGVVTGVFCFIHVPSDDLQHALHVQQASEQTAQRKLKAFSYMRHAINKPLSGMLYSRETLKSTGLNEEQMRQVRVGDNCHRQLNKILADLDQDNITDKSSCLDLDMAEFVLQDVVVSAVSQVLIGCQAKGIRVACNLPERSMKQKVYGDGIRLQQIVSDFLFVSVKFSPAGGSVDISSKLTKNSIGENLHLIDFELRIKHRGAGVPAEILSQMYEEDNKEQSEEGFSLAVSRNLLRLMNGDIRHLREAGMSTFILTAELAAAPSAVGR

SEQ ID NO: 163 - protein, 1131 aa, Zea mays
MSSSRPAHSSSSSSRTRQSSRARILAQTTLDAELNAEYEESGDSFDYSKLVEAQRSTPPEQQGRSGKVIAYLQHIQRGKLIQPFGCLLALDEKSFRVIAFSENAPEMLTTVSHAVPNVDDPPKLGIGTNVRSLFTDPGATALQKALGFADVSLLNPILVQCKTSGKPFYAIVHRATGCLVVDFEPVKPTEFPATAAGALQSYKLAAKAISKIQSLLGGSMEALCNTVVKEVFDLTGYDRVMAYKFHEDEHGEVFAEITKPGIEPYIGLHYPATDIPQAARFLFMKNKVRMICDCRARSVKIIEDEALSRDISLCGSTLRAPHSCHLKYMENMNSIASLVMAVVVNENEEDDEPEPEQPPQQQKKKRLWGLIVAHHESPRYVPFPLRYACEFLAQVFAVHVNKEFELEKQIREKNILRMQTMLSDMLFKESSPLSIVSGSPNIMDLVKCDGAALLYGDKVWRLQTAPTESQIRDIAFWLSEVHGDSTGLSTDSLQDAGYPGAASLGDMICGMAVAKITSKDILFWFRSHTAAEIKWGGAKHDPSDKDDNRRMHPRLSFKAFLEVVKTKSLPWSDYEMDAIHSLQLILRGTLNDASKPAQASGLDNQIGDLKLDGLAELQAVTSEMVRLMETATVPILAVDGNGLVNGWNQKVAELSGLRVDEAIGRHILTLVEDSSVSLVQRMLYLALQGREEKEVRFELKTHGSKRDDGPVILVVNACASRDLHDHVVGVCFVAQDMTVHKLVMDKFTRVEGDYKAIIHNPNPLIPPIFGADQFGWCSEWNAAMTKLTGWHRDEVVDKMLLGEVFNSSNASCLLKSKDAFVRLCIVINSALAGEEAEKASFGFFDRNEKYVECLLSVNRKVNADGVVTGVFCFIHVPSDDLQHALHVQQASEQTAQRKLKAFSYMRHAINKPLSGMLYSRETLKSTGLNEEQMRQVRVGDNCHRQLNKILADLDQDNITDKSSCLDLDMAEFVLQDVVVSAVSQVLIGCQAKGIRVACNLPERSMKQKVYGDGIRLQQIVSDFLFVSVKFSPAGGSVDISSKLTKNSIGENLHLIDFELRIKHRGAGVPAEILSQMYEEDNKEQSEEGFSLAVSRNLLRLMNGDIRHLREAGMSTFILTAELAAAPSAVGR

SEQ ID NO: 164 - protein, 1131 aa, Zea mays
MSSSRPAHSSSSSSRTRQSSRARILAQTTLDAELNAEYEESGDSFDYSKLVEAQRSTPPEQQGRSGKVIAYLQHIQRGKLIQPFGCLLALDEKSFRVIAFSENAPEMLTTVSHAVPNVDDPPKLGIGTNVRSLFTDPGATALQKALGFADVSLLNPILVQCKTSGKPFYAIVHRATGCLVVDFEPVKPTEFPATAAGALQSYKLAAKAISKIQSLLGGSMEALCNTVVKEVFDLTGYDRVMAYKFHEDEHGEVFAEITKPGIEPYIGLHYPATDIPQAARFLFMKNKVRMICDCRARSVKIIEDEALSIDISLCGSTLRAPHSCHLKYMENMNSIASLVMAVVVNENEEDDEPEPEQPPQQQKKKRLWGLIVCHHESPRYVPFPLRYACEALAQVFAVHVNKEFELEKQIREKNILRMQTMLSDMLFKESSPLSIVSGSPNIMDLVKCDGAALLYGDKVWRLQTAPTESQIRDIAFWLSEVHGDSTGLSTDSLQDAGYPGAASLGDMICGMAVAKITSKDILFWFRSHTAAEIKWGGAKHDPSDKDDNRRMHPRLSFKAFLEVVKTKSLPWSDYEMDAIHSLQLILRGTLNDASKPAQASGLDNQIGDLKLDGLAELQAVTSEMVRLMETATVPILAVDGNGLVNGWNQKVAELSGLRVDEAIGRHILTLVEDSSVSLVQRMLYLALQGREEKEVRFELKTHGSKRDDGPVILVVNACASRDLHDHVVGVCFVAQDMTVHKLVMDKFTRVEGDYKAIIHNPNPLIPPIFGADQFGWCSEWNAAMTKLTGWHRDEVVDKMLLGEVFNSSNASCLLKSKDAFVRLCIVINSALAGEEAEKASFGFFDRNEKYVECLLSVNRKVNADGVVTGVFCFIHVPSDDLQHALHVQQASEQTAQRKLKAFSYMRHAINKPLSGMLYSRETLKSTGLNEEQMRQVRVGDNCHRQLNKILADLDQDNITDKSSCLDLDMAEFVLQDVVVSAVSQVLIGCQAKGIRVACNLPERSMKQKVYGDGIRLQQIVSDFLFVSVKFSPAGGSVDISSKLTKNSIGENLHLIDFELRIKHRGAGVPAEILSQMYEEDNKEQSEEGFSLAVSRNLLRLMNGDIRHLREAGMSTFILTAELAAAPSAVGR

SEQ ID NO: 165 - protein, 1157 aa, Zea mays
MASGSRATPTRSPSSARPEAPRHAHHHHHSQSSGGSTSRAGGGAAATESVSKAVAQYTLDARLHAVFEQSGASGRSFDYSQSLRAPPTPSSEQQIAAYLSRIQRGGHIQPFGCTLAVADDSSFRLLAFSENSPDLLDLSPHHSVPSLDSSAPPHVSLGADARLLFSPSSAVLLERAFAAREISLLNPIWIHSRVSSKPFYAILHRIDVGVVIDLEPARTEDPALSIAGAVQSQKLAVRTISRLQALPGGDVKLLCDTVVEHVRELTGYDRVMVYRFHEDEHGEVVAESRRDNLEPYLGLHYPATDIPQASRFLFRQNRVRMIADCHATPVRVIQDPGLSRPLCLVGSTLRAPHGCHAQYMANMGSIASLVMAVIISSGGDDEQTGRGGISSAMKLWGLVVCHHTSPRCIPFPLRAACEALMQVFGLQLNMELQLAHQLSEKHILRTQTLLCDMLLRDSPTGIVTQSPSIMDLVKCDGAALYYHGKYYPLGVTPTESQIKDIIEWLTVFHGDSTGLSTDSLADAGYLGAAALGEAVCGMAVAYITPSDYLFWFRSHTAKEIKWGGAKHHPEDKDDGQRMHPRSSFKAFLEVVKSRSLPWENAEMDAIHSLQLILRDSFRDAAEGTNNSKAIVNGQVQLRELELRGINELSSVAREMVRLIETATVPIFAVDTDGCINGWNAKIAELTGLSVEEAMGKSLVNDLIFKESEATVEKLLSRALRGEEDKNVEIKLKTFGSEQSKGPIFVVVNACSSRDYTQNIVGVCFVGQDVTGQKVVMDKFVNIQGDYKAIVHNPNPLIPPIFASDENTSCSEWNTAMEKLTGWSRGEVVGKFLIGEVFGNCCRLKGPDALTKFMVIIHNAIGGQDYEKFPFSFFDKNGKYVQALLTANTRSKMDGKSIGAFCFLQIASAEIQQAIEIQRQQEKKCYARMKELAYICQEIKNPLSGIRFTNSLLQMTDLNDDQRQFLETSSACEKQMSKIVKDASLQSIEDGSLVLEQSEFSLGDVMNAVVSQAMLLLRERDLQLIRDIPDEIKDASAYGDQCRIQQVLADFLLSMVRSAPSENGWVEIQVRPNVKQNSDGTNTELFIFRFACPGEGLPADVVQDMFSNSQWSTQEGVGLSTCRKILKLMGGEVQYIRESERSFFLIVLEQPQPRPAAG

SEQ ID NO: 166 - protein, 1157 aa, Zea mays
MASGSRATPTRSPSSARPEAPRHAHHHHHSQSSGGSTSRAGGGAAATESVSKAVAQYTLDARLHAVFEQSGASGRSFDYSQSLRAPPTPSSEQQIAAYLSRIQRGGHIQPFGCTLAVADDSSFRLLAFSENSPDLLDLSPHHSVPSLDSSAPPHVSLGADARLLFSPSSAVLLERAFAAREISLLNPIWIHSRVSSKPFYAILHRIDVGVVIDLEPARTEDPALSIAGAVQSQKLAVRTISRLQALPGGDVKLLCDTVVEHVRELTGYDRVMVYRFHEDEHGEVVAESRRDNLEPYLGLHYPATDIPQASRFLFRQNRVRMIADCHATPVRVIQDPGLSRPLCLVGSTLRAPHGCHAQYMANMGSIASLVMAVIISSGGDDEQTGRGGISSAMKLWGLVVAHHTSPRCIPFPLRYACEFLMQVFGLQLNMELQLAHQLSEKHILRTQTLLCDMLLRDSPTGIVTQSPSIMDLVKCDGAALYYHGKYYPLGVTPTESQIKDIIEWLTVFHGDSTGLSTDSLADAGYLGAAALGEAVCGMAVAYITPSDYLFWFRSHTAKEIKWGGAKHHPEDKDDGQRMHPRSSFKAFLEVVKSRSLPWENAEMDAIHSLQLILRDSFRDAAEGTNNSKAIVNGQVQLRELELRGINELSSVAREMVRLIETATVPIFAVDTDGCINGWNAKIAELTGLSVEEAMGKSLVNDLIFKESEATVEKLLSRALRGEEDKNVEIKLKTFGSEQSKGPIFVVVNACSSRDYTQNIVGVCFVGQDVTGQKVVMDKFVNIQGDYKAIVHNPNPLIPPIFASDENTSCSEWNTAMEKLTGWSRGEVVGKFLIGEVFGNCCRLKGPDALTKFMVIIHNAIGGQDYEKFPFSFFDKNGKYVQALLTANTRSKMDGKSIGAFCFLQIASAEIQQAIEIQRQQEKKCYARMKELAYICQEIKNPLSGIRFTNSLLQMTDLNDDQRQFLETSSACEKQMSKIVKDASLQSIEDGSLVLEQSEFSLGDVMNAVVSQAMLLLRERDLQLIRDIPDEIKDASAYGDQCRIQQVLADFLLSMVRSAPSENGWVEIQVRPNVKQNSDGTNTELFIFRFACPGEGLPADVVQDMFSNSQWSTQEGVGLSTCRKILKLMGGEVQYIRESERSFFLIVLEQPQPRPAAG

SEQ ID NO: 167 - protein, 1157 aa, Zea mays
MASGSRATPTRSPSSARPEAPRHAHHHHHSQSSGGSTSRAGGGAAATESVSKAVAQYTLDARLHAVFEQSGASGRSFDYSQSLRAPPTPSSEQQIAAYLSRIQRGGHIQPFGCTLAVADDSSFRLLAFSENSPDLLDLSPHHSVPSLDSSAPPHVSLGADARLLFSPSSAVLLERAFAAREISLLNPIWIHSRVSSKPFYAILHRIDVGVVIDLEPARTEDPALSIAGAVQSQKLAVRTISRLQALPGGDVKLLCDTVVEHVRELTGYDRVMVYRFHEDEHGEVVAESRRDNLEPYLGLHYPATDIPQASRFLFRQNRVRMIADCHATPVRVIQDPGLSQPLCLVGSTLRAPHGCHAQYMANMGSIASLVMAVIISSGGDDEQTGRGGISSAMKLWGLVVCHHTSPRCIPFPLRYACEALMQVFGLQLNMELQLAHQLSEKHILRTQTLLCDMLLRDSPTGIVTQSPSIMDLVKCDGAALYYHGKYYPLGVTPTESQIKDIIEWLTVFHGDSTGLSTDSLADAGYLGAAALGEAVCGMAVAYITPSDYLFWFRSHTAKEIKWGGAKHHPEDKDDGQRMHPRSSFKAFLEVVKSRSLPWENAEMDAIHSLQLILRDSFRDAAEGTNNSKAIVNGQVQLRELELRGINELSSVAREMVRLIETATVPIFAVDTDGCINGWNAKIAELTGLSVEEAMGKSLVNDLIFKESEATVEKLLSRALRGEEDKNVEIKLKTFGSEQSKGPIFVVVNACSSRDYTQNIVGVCFVGQDVTGQKVVMDKFVNIQGDYKAIVHNPNPLIPPIFASDENTSCSEWNTAMEKLTGWSRGEVVGKFLIGEVFGNCCRLKGPDALTKFMVIIHNAIGGQDYEKFPFSFFDKNGKYVQALLTANTRSKMDGKSIGAFCFLQIASAEIQQAIEIQRQQEKKCYARMKELAYICQEIKNPLSGIRFTNSLLQMTDLNDDQRQFLETSSACEKQMSKIVKDASLQSIEDGSLVLEQSEFSLGDVMNAVVSQAMLLLRERDLQLIRDIPDEIKDASAYGDQCRIQQVLADFLLSMVRSAPSENGWVEIQVRPNVKQNSDGTNTELFIFRFACPGEGLPADVVQDMFSNSQWSTQEGVGLSTCRKILKLMGGEVQYIRESERSFFLIVLEQPQPRPAAG

SEQ ID NO: 168 - protein, 1131 aa, Zea mays
MSSSRPAHSSSSSSRTRQSSRARILAQTTLDAELNAEYEESGDSFDYSKLVEAQRSTPPEQQGRSGKVIAYLQHIQRGKLIQPFGCLLALDEKSFRVIAFSENAPEMLTTVSHAVPNVDDPPKLGIGTNVRSLFTDPGATALQKALGFADVSLLNPILVQCKTSGKPFYAIVHRATGCLVVDFEPVKPTEFPATAAGALQSYKLAAKAISKIQSLLGGSMEALCNTVVKEVFDLTGYDRVMAHKFHEDEHGEVFAEITKPGIEPYIGLHYPATDIPQAARFLFMKNKVRMICDCRARSVKIIEDEALSIDISLCGSTLRAPHSCHLKYMENMNSIASLVMAVVVNENEEDDEPEPEQPPQQQKKKRLWGLIVAHHESPRYVPFPLRYACEFLAQVFAVHVNKEFELEKQIREKNILRMQTMLSDMLFKESSPLSIVSGSPNIMDLVKCDGAALLYGDKVWRLQTAPTESQIRDIAFWLSEVHGDSTGLSTDSLQDAGYPGAASLGDMICGMAVAKITSKDILFWFRSHTAAEIKWGGAKHDPSDKDDNRRMHPRLSFKAFLEVVKTKSLPWSDYEMDAIHSLQLILRGTLNDASKPAQASGLDNQIGDLKLDGLAELQAVTSEMVRLMETATVPILAVDGNGLVNGWNQKVAELSGLRVDEAIGRHILTLVEDSSVSLVQRMLYLALQGREEKEVRFELKTHGSKRDDGPVILVVNACASRDLHDHVVGVCFVAQDMTVHKLVMDKFTRVEGDYKAIIHNPNPLIPPIFGADQFGWCSEWNAAMTKLTGWHRDEVVDKMLLGEVFNSSNASCLLKSKDAFVRLCIVINSALAGEEAEKASFGFFDRNEKYVECLLSVNRKVNADGVVTGVFCFIHVPSDDLQHALHVQQASEQTAQRKLKAFSYMRHAINKPLSGMLYSRETLKSTGLNEEQMRQVRVGDNCHRQLNKILADLDQDNITDKSSCLDLDMAEFVLQDVVVSAVSQVLIGCQAKGIRVACNLPERSMKQKVYGDGIRLQQIVSDFLFVSVKFSPAGGSVDISSKLTKNSIGENLHLIDFELRIKHRGAGVPAEILSQMYEEDNKEQSEEGFSLAVSRNLLRLMNGDIRHLREAGMSTFILTAELAAAPSAVGR

SEQ ID NO: 169 - protein, 1157 aa, Zea mays
MASGSRATPTRSPSSARPEAPRHAHHHHHSQSSGGSTSRAGGGAAATESVSKAVAQYTLDARLHAVFEQSGASGRSFDYSQSLRAPPTPSSEQQIAAYLSRIQRGGHIQPFGCTLAVADDSSFRLLAFSENSPDLLDLSPHHSVPSLDSSAPPHVSLGADARLLFSPSSAVLLERAFAAREISLLNPIWIHSRVSSKPFYAILHRIDVGVVIDLEPARTEDPALSIAGAVQSQKLAVRTISRLQALPGGDVKLLCDTVVEHVRELTGYDRVMVHRFHEDEHGEVVAESRRDNLEPYLGLHYPATDIPQASRFLFRQNRVRMIADCHATPVRVIQDPGLSQPLCLVGSTLRAPHGCHAQYMANMGSIASLVMAVIISSGGDDEQTGRGGISSAMKLWGLVVCHHTSPRCIPFPLRYACEFLMQVFGLQLNMELQLAHQLSEKHILRTQTLLCDMLLRDSPTGIVTQSPSIMDLVKCDGAALYYHGKYYPLGVTPTESQIKDIIEWLTVFHGDSTGLSTDSLADAGYLGAAALGEAVCGMAVAYITPSDYLFWFRSHTAKEIKWGGAKHHPEDKDDGQRMHPRSSFKAFLEVVKSRSLPWENAEMDAIHSLQLILRDSFRDAAEGTNNSKAIVNGQVQLRELELRGINELSSVAREMVRLIETATVPIFAVDTDGCINGWNAKIAELTGLSVEEAMGKSLVNDLIFKESEATVEKLLSRALRGEEDKNVEIKLKTFGSEQSKGPIFVVVNACSSRDYTQNIVGVCFVGQDVTGQKVVMDKFVNIQGDYKAIVHNPNPLIPPIFASDENTSCSEWNTAMEKLTGWSRGEVVGKFLIGEVFGNCCRLKGPDALTKFMVIIHNAIGGQDYEKFPFSFFDKNGKYVQALLTANTRSKMDGKSIGAFCFLQIASAEIQQAIEIQRQQEKKCYARMKELAYICQEIKNPLSGIRFTNSLLQMTDLNDDQRQFLETSSACEKQMSKIVKDASLQSIEDGSLVLEQSEFSLGDVMNAVVSQAMLLLRERDLQLIRDIPDEIKDASAYGDQCRIQQVLADFLLSMVRSAPSENGWVEIQVRPNVKQNSDGTNTELFIFRFACPGEGLPADVVQDMFSNSQWSTQEGVGLSTCRKILKLMGGEVQYIRESERSFFLIVLEQPQPRPAAG

SEQ ID NO: 170 - protein, 1161 aa, Zea mays
MASGSRATPTRSPSSARPEAPRHAHHHHHSQSSGGSTSRAGGGAAATESVSKAVAQYTLDARLHAVFEQSGASGRSFDYSQSLRAPPTPSSEQQIAAYLSRIQRGGHIQPFGCTLAVADDSSFRLLAFSENSPDLLDLSPHHSVPSLDSSAPPHVSLGADARLLFSPSSAVLLERAFAAREISLLNPIWIHSRVSSKPFYAILHRIDVGVVIDLEPARTEDPALSIAGAVQSQKLAVRTISRLQALPGGDVKLLCDTVVEHVRELTGYDRVMVYRFHEDEHGEVVAESRRDNLEPYLGLHYPATDIPQASRFLFRQNRVRMIADCHATPVRVIQDPGLSQPLCLVGSTLRAPHGCHAQYMANMGSIASLVMAVIISSGGDDEQTGRGGISSAMKLWGLVVCHHTSPRCIPFPLRYACEFLMQVFGLQLNMELQLAHQLSEKHILRTQTLLCDMLLRDSPTGIVTQSPSIMDLVKCDGAALYYHGKYYPLGVTPTESQIKDIIEWLTVFHGDSTGLSTDSLADAGYLGAAALGEAVCGMAVAYITPSDYLFWFRSHTAKEIKWGGAKHHPEDKDDGQRMHPRSSFKAFLEVVKSRSLPWENAEMDAIHSLQLILRDSFRDAAEGTNNSKAIVNGQVQLRELELRGINELSSVAREMVRLIETATVPIFAVDTDGCINGWNAKIAELTGLSVEEAMGKSLVNDLIFKESEATVEKLLSRALRGEEDKNVEIKLKTFGSEQSKGPIFVVVNACSSRDYTQNIVGVCFVGQDVTGQKVVMDKFVNIQGDYKAIVHNPNPLIPPIFASDENTSCSEWNTAMEKLTGWSRGEVVGKFLIGEVFGNCCRLKGPDALTKFMVIIHNAIGGQDYEKFPFSFFDKNGKYVQALLTANTRSKMDGKSIGAFCFLQIASAEIQQAIEIQRQQEKKCYARMKELAYICQEIKNPLSGIRFTNSLLQMTDLNDDQRQFLETSSACEKQMSKIVKDASLQSIEDGSLVLEQSEFSLGDVMNAVVSQAMLLLRERDLQLIRDIPDEIKDASAYGDQCRIQQVLADFLLSMVRSAPSENGWVEIQVRPNVKQNSDGTNTELFIFRFACPGEGLPADVVQDMFSNSQWSTQEGVGLSTCRKILKLMGGEVQYIRESERSFFLIVLEQPQPRPAAGREIV

SEQ ID NO: 171 - protein, 1131 aa, Zea mays
MSSSRPAHSSSSSSRTRQSSRARILAQTTLDAELNAEYEESGDSFDYSKLVEAQRSTPPEQQGRSGKVIAYLQHIQRGKLIQPFGCLLALDEKSFRVIAFSENAPEMLTTVSHAVPNVDDPPKLGIGTNVRSLFTDPGATALQKALGFADVSLLNPILVQCKTSGKPFYAIVHRATGCLVVDFEPVKPTEFPATAAGALQSYKLAAKAISKIQSLLGGSMEALCNTVVKEVFDLTGYDRVMAYKFHEDEHGEVFAEITKPGIEPYIGLHYPATDIPQAARFLFMKNKVRMICDCRARSVKIIEDEALSIDISLCGSTLRAPHSCHLKYMENMNSIASLVMAVVVNENEEDDEPEPEQPPQQQKKKRLWGLIVCHHESPRYVPFPLRYACEFLAQVFAVHVNKEFELEKQIREKNILRMQTMLSDMLFKESSPLSIVSGSPNIMDLVKCDGAALLYGDKVWRLQTAPTESQIRDIAFWLSEVHGDSTGLSTDSLQDAGYPGAASLGDMICGMAVAKITSKDILFWFRSHTAAEIKWGGAKHDPSDKDDNRRMHPRLSFKAFLEVVKTKSLPWSDYEMDAIHSLQLILRGTLNDASKPAQASGLDNQIGDLKLDGLAELQAVTSEMVRLMETATVPILAVDGNGLVNGWNQKVAELSGLRVDEAIGRHILTLVEDSSVSLVQRMLYLALQGREEKEVRFELKTHGSKRDDGPVILVVNACASRDLHDHVVGVCFVAQDMTVHKLVMDKFTRVEGDYKAIIHNPNPLIPPIFGADQFGWCSEWNAAMTKLTGWHRDEVVDKMLLGEVFNSSNASCLLKSKDAFVRLCIVINSALAGEEAEKASFGFFDRNEKYVECLLSVNRKVNADGVVTGVFCFIHVPSDDLQHALHVQQASEQTAQRKLKAFSYMRHAINKPLSGMLYSRETLKSTGLNEEQMRQVRVGDNCHRQLNKILADLDQDNITDKSSCLDLDMAEFVLQDVVVSAVSQVLIGCQAKGIRVACNLPERSMKQKVYGDGIRLQQIVSDFLFVSVKFSPAGGSVDISSKLTKNSIGENLHLIDFELRIKHRGAGVPAEILSQMYEEDNKEQSEEGFSLAVSRNLLRLMNGDIRHLREAGMSTFILTAELAAAPSAVGR

SEQ ID NO: 172 - protein, 232 aa, Zea mays
MTGFGSPCGACKFLRRRCARGCVFAPYFCDEQGAAHFAAIHKVFGASNASKLLAHLPLADRPEAAATISYEAQARLRDPTYGCVAHIFALQQQVMALQTQLASLTVTAQGQQRVHDVDDAKGYVGTAAAGQLGCSSNGSVAPATYGNVGHESLTALLRSESDYLQQSPCHAFEHAGADDKDDDGRQGNTFDFEAAADSSSFGAEESGWRSLSGYRDCEDLQSVAYAYLNHLS

SEQ ID NO: 173 - protein, 519 aa, Chlamydomonas reinhardtii
MALQNAWQNTKERARETWAQLTWSEVSGSLGDLGTFLPLLIGLVQKVHLDLGTTLTITGLYNIISGWQFRIPMCVQPMKTIAAVALAGGAAGLDLPQLLHAGLFVAGCVGLLGASQAIDLFNWLVPPPVIRGVQLAVGVKLAMKGVDMALRLHGGPSSGWRPWLGTEGLVVGAVALAAMIATTLPPRAARRGTLEAADEGGLGPRPTDTAFEPLLRRLPACCGGGDRAPQVEGAAVSAERAGLLAHAEGGERSGNLDDGTEAGVGAAAGGGGCGGGGGGGRIPSALIAVVVGLAMAVLHRPGLVWELRLGPTLPRLLRPSWPDFKTGALRGGLPQLPLTTLNSVIAVTQLANALFGDKPEAERRRWRPSAVALSVALLNGAGVWLGAMPCCHGAGGLAAQYKFGARTGHAPILLGCIKAALGLLFGGSLVVLLEAFPQPLLGALLTVSGIELASVVRHTRSPRGYTFALLTAVAILALDNTGTGFLVGLVGVAAVAAYEGAVAAAAARWPRVFARGGRA

SEQ ID NO: 174 - protein, 428 aa, Zea mays
MGNRIGGRRKSGVEERFTRPQGLYDHKDIDQKKLRKLILEAKLAPCYPGADDAAPGGGDLEECPICFLYYPSLNRSKCCSKGICTECFLQMKPTHTARPTQCPFCKTPNYAVEYRGVKTKEERSIEQFEEQKVIEAQLRMRQKELQDEEAKMRRKQGRCSSSRTVTPTTEVEYRDICSTSFSVPSYQCTEQGNECCSSEPSCSSQANRRPFHSRHNRDDNVDMNLENMMVMEAIWRSIQQEQGHLVNPVCGSYFPVIEPPSRERQAFLPAAPLEMPHPGGYSCVAALAEHQPPSMDFSYMAGSSTYPVFDMIRRPCNMSSGSLCSVENSSLDTWSGMAPNCSRGVVREEGECSTDHWSEGAEAGTSYAGSDIMVDAGAMQPLPFAENFTMAPSHFRPESIEEQMMFSMAVSLAEGHHGRTQAQGLAWL

SEQ ID NO: 175 - protein, 555 aa, Zea mays
MQQRRKSVFASAPFAMKQAALGAGVAARKNGAPLSLAAVVFALFVFATFLYNEDIKSITDFQFSSGAIRAKSPDLHLLQEAEAAAHAAVNTLAKRGEEVIVRVLEVEAPPVVNTSSVLAAAAKASAKANAVDVGQEKERDVTLPTVTGGRGGADEARRRADEEVAEKAASAKAAAATAALRGVVSVPQTCDLYRGSWVYDEVSAPVYKEGECEFLTEQVTCMRNGRRDDSYQKWRWQPAGCDLPRFDARLLLERLRNKRLMFVGDSLNRNQWESMVCLVQSVIPDRGQKTLTKFVNGGSSNVFYAHEYNATVEFYWAPFLVESNSDNPKVHSVPDRVIQWHAIAKHARNWIGVDYLVFNTYIWWLNTLDIKVLKQGSSFDDQGSTDYVEVDRPVAYKEVLTTWAKWVDRNIDPNRTTVFFMGMSPNHITPEAWGNKGGIKCAMETLPIASNRSAALDVGTDWRLYAGAREVLPTLRRVPVHFVDITALSELRKDAHTSVHTLRQGKLLTPEQQADPKTYADCIHWCLPGLPDTWNQFLYARIASSPWPNDAQAQQ

SEQ ID NO: 176 - protein, 321 aa, Trichoderma harzianum
MPSLTALASLLALVPSALAGWNVNSKQNIAVYWGQNSANSQSTQQRLSFYCNDANINVIDIAFLNGITPPMTNFANAGDRCTPFSDNPWLLQCPEIEADIKTCQANGKTILLSLGGDSYTQGGWSSTGAAQSAADQVWAMFGPVQSGSSVHRPFGSAVVDGFDFDFEATTNNLAAFGAQLKSRTNAAGGKKYYFSAAPQCFFPDAAVGALINAVPMDWIQIQFYNNPCGVSGFTPGTSTQNNYNYQTWENWAKTSPNPNVKLLVGIPAGPGAGRGYVSGSQLTSVFQYSKGFSTFAGAMMWDMSQLYQNTGFETQVVNALR

SEQ ID NO: 177 - protein, 238 aa, Zea mays
MVKLTMIARVTDGLPLSEGLDDSRDLKDADFYKQQAKLLFKNLSRGQHEASRMSIETGPYLFHYIIEGRVCYLTLCDRSYPKKLAFQYLEDLKNEFEKVNGSQIETAARPYAFIKFDAFIQKTKKLYLDTRTQRNLAKLNDELYEVHQIMTRNVQEVLGVGEKLDQVSEMSSRLTSDTRIYAEKAKDLNRQALIRKWTSKSMRKGERSNRQALIRKYAPVAIVIGIVVMLFWVKNKIW

SEQ ID NO: 178 - protein, 1161 aa, Zea mays
MASGSRATPTRSPSSARPEAPRHAHHHHHSQSSGGSTSRAGGGAAATESVSKAVAQYTLDARLHAVFEQSGASGRSFDYSQSLRAPPTPSSEQQIAAYLSRIQRGGHIQPFGCTLAVADDSSFRLLAFSENSPDLLDLSPHHSVPSLDSSAPPHVSLGADARLLFSPSSAVLLERAFAAREISLLNPIWIHSRVSSKPFYAILHRIDVGVVIDLEPARTEDPALSIAGAVQSQKLAVRTISRLQALPGGDVKLLCDTVVEHVRELTGYDRVMVYRFHEDEHGEVVAESRRDNLEPYLGLHYPATDIPQASRFLFRQNRVRMIADCHATPVRVIQDPGLSQPLCLVGSTLRAPHGCHAQYMANMGSIASLVMAVIISSGGDDEQTGRGGISSAMKLWGLVVCHHTSPRCIPFPLRYACEFLMQVFGLQLNMELQLAHQLSEKHILRTQTLLCDMLLRDSPTGIVTQSPSIMDLVKCDGAALYYHGKYYPLGVTPTESQIKDIIEWLTVFHGDSTELSTDSLADAGYLGAAALGEAVCGMAVAYITPSDYLFWFRSHTAKEIKWGSAKHHPEDKDDGQRMHPRSSFKAFLEVVKSRSLPWENAEMDAIHSLQLILRDSFRDAAEGTNNSKAIVNGQVQLRELELRGINELSSVAREMVRLIETATVPIFAVDTDGCINGWNAKIAELTGLSVEEAMGKSLVNDLIFKESEATVEKLLSRALRGEEDKNVEIKLKTFGSEQSKGPIFVVVNACSSRDYTQNIVGVCFVGQDVTGQKVVMDKFVNIQGDYKAIVHNPNPLIPPIFASDENTSCSEWNTAMEKLTGWSRGEVVGKFLIGEVFGNCCRLKGPDALTKFMVIIHNAIGGQDYEKFPFSFFDKNGKYVQALLTANTRSKMDGKSIGAFCFLQIASAEIQQAIEIQRQQEKKCYARMKELAYICQEIKNPLSGIRFTNSLLQMTDLNDDQRQFLETSSACEKQMSKIVKDASLQSIEDGSLVLEQSEFSLGDVMNAVVSQAMLLLRERDLQLIRDIPDEIKDASAYGDQCRIQQVLADFLLSMVRSAPSENGWVEIQVRPNVKQNSDGTNTELFIFRFACPGEGLPADVVQDMFSNSQWSTQEGVGLSTCRKILKLMGGEVQYIRESERSFFLIVLEQPQPRPAAGREIV

SEQ ID NO: 179 - protein, 911 aa, Zea mays
MAFKGLPRDSRGSLEVFNPDAPVSDRATTSPFLLPPAVASHPSLLAAGDGGDADVGRATQRAAEWGLVLQTDEHTGRPQGVVARPSGSNRTSESGNSIDERAAAAGAGRALPRVSEELRAALSAFQQTFVVSDATRPDHPILYASAGFFNMTGYSSNEVVGRNCRFLQGSGTDPVEISKIRQALAAGSNYCGRILNYKKDGTPFWNLLTVAPIKDEDGRVLKFIGMQVEVSKYTEGNKDTALRPNGLPESLIKYDARQKDHARSSVSELLLALKDPRSLSESRNNTLKRKSQESAGSALVPGKRSSETGSRRNSHSGMRNSLQKISEVPEGGNKTRKSGLRSFMGLIGMGHGNVEKNILKPREDPLLDSDDERPDSFDDDFRKKEMRKGIDLATTLERIEKNFVITDPRLPDNPIIFASDSFLRLTEYCREEILGRNCRFLQGPETDRGTVKKIRDAIDNQTEVTVQLINYTKSGKKFWNLFHLQPMRDQKGDVQYFIGVQLDGTERVREAAAKDGAILEKKTEDNEDEAAKELPDANLRPEDLWANHSKPVLPKPHMKDTASWRAIQKVLENGESIDLKHFRPVRPLGSGDTGSVHLVELLGTGEYFAMKAMDKSVMLNRNKVHRATAERQILDMLDHPFLPTLYASFQTKTHICLIVDYCAGGELFMLLDRQPMKVLKEDAVRFYAAEVVTALEYLHCQGIIYRDLKPENILLHRDGHISLTDFDLSCLTSCRPQVFLPHDIDKKKKRRKSRSNPIFFAEPMRASNSFVGTEEYIAPEIITGAGHTSAVDWWALGILLYEMLYGYTPFRGKTRQRTFANILHKDIRFPASIQVSLAARQLIYRLLHRDPANRLGSYEGAMEIKQHPFFRGINWALVRAATPPELEAPLQDTLEATLPPPAADAAHTDMF

SEQ ID NO: 180 - protein, 381 aa, Oryza sativa
MAGREKRRRVAALDGEERRRRQEEAATLLHRIRGLVRWVVAEVAAGRSPTVALHRYQNYCSSASAAAASPCACSYDVPVGTDVLSLLHRGSHASRLNVLLRVLLVVQQLLQQNKHCSKRDIYYMYPSIFQEQAVVDRAINDICVLFKCSRHNLNVVPVAKGLVMGWIRFLEGEKEVYCVTNVNAAFSIPVSIEAIKDVVSVADYILIVEKETVFQRLANDKFCERNRCIVITGRGYPDIPTRRFLRYLVEQLHLPVYCLVDADPYGFDILATYKFGSLQLAYDANFLRVPDIRWLGVFTSDFEDYRLPDCCLLHLSSEDRRKAEGILSRCYLHREAPQWRLELEAMLQKGVKFEIEALSACSISFLSEEYIPKKIKQGRHI

SEQ ID NO: 181 - protein, 394 aa, Zea mays; identical to SEQ ID NO: 135

SEQ ID NO: 182 - protein, 71 aa, Zea mays; identical to SEQ ID NO: 136

SEQ ID NO: 183 - protein, 467 aa, Zea mays; identical to SEQ ID NO: 159

SEQ ID NO: 184 - protein, 386 aa, Arabidopsis thaliana
MGFRVLALQSDNSTVNRVETLLNLDTKPYSDRIIAEYIWIGGSGIDLRSKSRTIEKPVEDPSELPKWNYDGSSTGQAPGEDSEVILYPQAIFRDPFRGGNNILVICDTWTPAGEPIPTNKRAKAAEIFSNKKVSGEVPWFGIEQEYTLLQQNVKWPLGWPVGAFPGPQGPYYCGVGADKIWGRDISDAHYKACLYAGINISGTNGEVMPGQWEFQVGPSVGIDAGDHVWCARYLLERITEQAGVVLTLDPKPIEGDWNGAGCHTNYSTKSMREEGGFEVIKKAILNLSLRHKEHISAYGEGNERRLTGKHETASIDQFSWGVANRGCSIRVGRDTEAKGKGYLEDRRPASNMDPYIVTSLLAETTLLWEPTLEAEALAAQKLSLNV

SEQ ID NO: 185 - protein, 475 aa, Medicago truncatula
MATATETNLANLKSAVTGLDQISENEKTGFINLVSRYLSGEAQHVEWSKIQTPTDEVVVPYDTLAPTPAGSSDIKNLLDKLVVLKLNGGLGTTMGCTGPKSVIEVRDGLTFLDLIVVQIENLNSKYGSNVPLLLMNSFNTHDDTQKIIEKYQNHNIEIHTFNQSQYPRLVVDDFSPLPSKGNTGKDGCNSLHRYPPGHGDVFPSLSNSGKLDALLSQGKEYVFVANSDNLGAIVDLKILNHLIEHKNEYCMEVTPKTLADVKGGTLISYEGRVQLLEIAQVPDEHVGEFKSIEKFKIFNTNNLWVNLKAIKRLVEADALKMEIIPNPKEVDGVKVLQLETAAGAAIRFFDKAIGINVPRSRFLPVKATSDLLLVQSDLYTLEDGSVIRNTARANPENPSIELGPEFKKVSNFLSRFKSIPSIVELDSLKVAGDVSFGASVILKGKVSIVAKSDVKLEIPDGAVIENKEINGPEDL

SEQ ID NO: 186 - protein, 163 aa, Medicago truncatula
MILDKKNVEETHYEVLNVKEDANYEEIRASYRSAALNLHPDKLLKTSDASRSNQTTSERFLKVHKAWEILSNSTSRLIYDKELKSSRREDFLASEVAEELRLQDMTKMGYSLLRDGNSISISILIVDTSPGSVILPCGSCSLKARLKYTYADLRTQERLDEMI

SEQ ID NO: 187 - protein, 151 aa, Gossypium hirsutum
MDREGGSHGGSCYYTVLGIRKDASFSDIRAAYRKLALKWHPDRYVTNPAVAGEAKLRFQQIQEAYSVLSNGSKRSMYDASLYDPLEDDDQDFCDFMQEMISMMNNVKDEGVSLEDLQKMFADMVGSGDGMSFNVNTDLTETKKAHFTASKT

SEQ ID NO: 188 - protein, 557 aa, Glycine max
MEKKENGPSEKASNGGIDGPTNPMVTPLLNDLYQFTMAYAYWKAGKQQERAVFDLYFRKNPFGGEYTVFAGLEECIRFIANFKLTEEEIDFVRQCLSSSCEDGFLDYLRGLDCSDVEVYAIPEGTVVFPKVPLMRVEGPVAVVQLLETPFVNLINYASLVSTNAARHRNVAGKSKTLLEFGLRRAQGPDGGVGASKYCYIGGFDATSNVAAGKLFGIPLRGTHSHAFVSSYMSLDEITDRSLNRKDGSSTCDDFVSLVQTWLNKIQLSNGVFGETNQSELAAFTSYALAFPDGFLALVDTYDVMRSGIPNFCAVALALSDLGYKAVGIRLDSGDLAYLSCEVRKFFYSIENEFGVPGFGKLQITASNDLNEETLDALNKQGHEVDAFGIGTYLVTCYAQAALGVVFKLVEINNQPRIKLSEDVSKVSIPCKKCCYRLYGKEGYPLVDIMTGENEPSPKVGERILCRHPFQESKRAYVVPQRVEELLRCYWSGSTDIKKDTLPALRDIRERCINQLEQMRPDHMRRLNPTPYKVSVSAKLYDFIHFLWLNEAPVGELQ

SEQ ID NO: 189 - protein, 324 aa, Zea mays
MPGMDPGGGGSSRYFHQLLRPQQQQSSPLSPNSHVKMEHHRMSPDKSPVGEAEAGGSGAGADQPSSSAMVPVEGGGSGSGTGGTPTRRPRGRPPGSKNKPKPPIIVTRDSPNALHSHVLEVAAGADVVDCVAEYARRRGRGVCVLSGGGAVVNVALRQPGASPPGSMVATLRGRFEILSLTGTVLPPPAPPGASGLTVFLSGGQGQVIGGSVVGPLVAAGPVVLMAASFANAVYERLPLEGEEEETAAAAAAGAEPQDQVAQSAGPPGQQPTASQSSGVTGGDAAGGGGMSLYNLAGNVGAYQLPGDNFGGWSGGGGGGVRPPF

SEQ ID NO: 190 - protein, 324 aa, Zea mays; identical to SEQ ID NO: 189

SEQ ID NO: 191 - protein, 174 aa, Zea mays
MEHKEAGCQAPEGPILCINNCGFFGSAATMNMCSKCHKEMITKQDQAKLAASSIDSIVNGSDAVMEPVVAGSNTVVAVAQVELQTMNVQQPADVAGPSEGVAAISKGGKVGPNRCSACRKRVGLTGFNCRCGNLYCALHRYSDKHDCKFDYRTAARDAIAKANPVVKADKLDKI

SEQ ID NO: 192 - protein, 1111 aa, Zea mays
  misc_feature (230)..(230): Xaa can be any naturally occurring amino acid
MASKGILKNSGSRRMPPQGAGSRPPTAPTSAPTVVFGRRTDSGRFISYSRDDLDSEISSVDFQDYHVHIPMTPDNQPMDEDDSGTARAEDQRYVSGSLFTGGFNTVTRAHVMDKPDGDAAGRRGGGGAKGPSACMVEGCDARAMRDARGDDVLPCECDFRVCVDCFTDAVKAGAGVCPGCKEPYKNTEWEGLGAGAAEEVTRALSLPRGPAGANGHRMERRLSLVKQANXNQSGEFDHNLWLFQTKGTYGYGNAIWPQDEADDDTDGGAPAGHPKELLTKPWRPLTRKLRIPAAVISPYRLLVLIRLVALAFFLMWRIKHQNEDAIWLWGMSIVCELWFAFSWVLDQLPKLCPINRATDLSVLKEKFETPTPNNPTGKSDLPGVDIFVSTADPEKEPVLVTANTILSILAADYPVEKLACYLSDDGGALLTFEAMAEAASFANLWVPFCRKHDIEPRNPDSYFNLRRDPFKNKVKPDFVKDRRRVKREYDEFKVRVNGLPDAIRRRSDAYHAREEIQAMNLQREKLKGGGDEPPFEPVKIPKATWIADGTHWPGTWLQPSQDHARGDHAGIIQVMLKPPSDMPTTMYDAASKTPLDLAGVDTRLPMLVYMSREKRPGYDHNKKAGAMNALVRASAIMSNGPFILNLDCDHYIYNSKALREGMCFMMDRGGDRLCYVQFPQRFEGIDPSDRYANHNTVFFDVNMRALDGLQGPVYVGTGCLFRRIALYGFDPPRSKDHSPGFCSCCLPRRRKPSAASREETMALRMGGFDGDSMDLATFPKKFGNSSFLIDSIPEKTEWGIRVGWIYGSVTEDVVTGYRMHNRGWKSVYCVTQRDAFRGTAPINLTDRLHQVLRWATGSVEIFFSRNNALFASSKMKVLQRIAYLNVGIYPFTSIFLIVYCFLPALSLFSGQFIVQTLNVTFLTYLLIITVTLCLLAMLEIKWSGIALEEWWRNEQFWLIGGTSAHLAAVLQGLLKVVAGIEISFTLTSKQVGDDVEDEFAELYIVKWTSLMIPPLTIIMINLVAIAVGFSRTIYSTIPQWSKLLGGVFFSFWVLAHLYPFAKGLMGRRGRTPTIVYVWSGLVSITISLLWIAIKPPSQAANSQFGGSFSFP

SEQ ID NO: 193 - protein, 391 aa, Escherichia coli
VKTLMKVNTMKALHFGAGNIGRGFIGKLLADAGIQLTFADVNQVVLDALNARHSYQVHVVGETEQVDTVSGVNAVSSIGDDVVDLIAQVDLVTTRVGPVVLERIAPAIAKGQVKRKEQGNESPLNIIACENMVRGTTQLKGHVMNALPEDAKAWVEEHVGFVDSAVDRIVPPSASATNDPLEVTVETFSEWIVDKTQFKGALPNIPGMELTDNLMAFVERKLFTLNTGHAITAYLGKLAGHQTIRDAILDEKIRAVVKGAMEESGAVLIKRYGFDADKHAAYIQKILGRFENPYLKDDVERVGRQPLRKLSAGDRLIKPLLGTLEYGLPHKNLIEGIAAAMHFRSEDDPQAQELAALIADKGPQAALAQISGLDANSEVVSEAVTAYKAMQ

SEQ ID NO: 194 - protein, 910 aa, Nostoc punctiforme
VPNLHLPIPMRILKIQTLRGPNYWSIRRHKLIVMRLDLETLAETPSNEIPGFYEGLVEALPSLEGHYCSPGCRGGFLMRVKEGTMIGHIVEHVALELQELAGMHVGFGRTRETATPGIYQVVIEYQNEEAGRYAGRAAVRLCQSIVDRGRYPKAELEQDIQDLKDFTRDASLGPSTEAIIKEAEKRGIPWMPLEARFLIQLGYGVNQKRMQATMTDNTSILGVELACDKEATKRILAAAGAPVPRGTVINFLDDLEQAIEYVGGYPIVVKPLDGNHGRGITIDIRTWEEAEAAYEAARQVSRSIIVERYYVGRDHRVLVVNGKVVAVAERVPAHVIGNGRSTISELIEETNLDPNRGEGHDNVLTKIELDRTSYQLLERQGYTLNSVPPKGTICYLRATANLSTGGSAVDRTDEIHPENLWLAQRVVKIIGLDIAGLDIVTTDISRPLREVDGVIVEVNAAPGFRMHVAPSVGIPRNVAGAVMDMLFPNEQSSQIPILSVTGTNGKTTTTRLLAHIYKQTGKVVGYTTTDGTYIGDYLVEAGDNTGPQSAHVILQDPTVEVAVLETARGGILRSGLGFEAANVGVVLNVAADHLGIGDIETIEQLANLKSVVAEAVFPDGYAVLNADDHRVAAMSEKTKANIAYFTMNPDSELVRKHIQKGGVAAVYESGYLSIVKGDWTHRIERAENIPLTMGGRAPFMIANALAASLAAFVQNVTIEQIRSGLKTFRASVSQTPGRMNLFNLGNYHALVDYAHNAASYEAVGSFVRNWTTGQRIGVIGGPGDRRDEDFVTLGKLAAQIFDYIIVKEDDDTRGRLRGSAAQLIIQGITQVKPDSRYESILDETQAINKGLDMAPDNSLVVILPESVTRAIKLIKLRGLAKEETHQQNTGTAIADSQNGIAPSSVVNTLL

SEQ ID NO: 195 - protein, 873 aa, Synechocystis sp
MKILKTLTLRGPNYWSIRRKKLIVMRLDLEDLAERPSNSIPGFYEGLIRVLPSLVEHFCSPGHRGGFLARVREGTYMGHIVEHVALELQELVGMTAGFGRTRETSTPGIYNVVYEYVDEQAGRYAGRAAVRLCRSLVDTGDYSLTELEKDLEDLRDLGANSALGPSTETIVTEADARKIPWMLLSARAMVQLGYGVHQQRIQATLSSHSGILGVELACDKEGTKTILQDAGIPVPRGTTIQYFDDLEEAINDVGGYPVVIKPLDGNHGRGITINVRHWEEAIAAYDLAAEESKSRSIIVERYYEGSDHRVLVVNGKLVAVAERIPAHVTGDGTSTITELIDKTNQDPNRGDGHANILTKIVVNKTAIDVMERQGYNLDSVLPKDEVVYLRATANLSTGGIAIDRTDDIHPENIWLMERVAKVIGLDIAGIDVVTSDISKPLRETNGVIVEVNAAPGFRMHVAPSQGLPRNVAAPVLDMLFPSGTPSRIPILAVTGTNGKTTTTRLLAHIYRQTGKTVGYTSTDAIYINEYCVEKGDNTGPQSAAVILRDPTVEVAVLETARGGILRAGLAFDTCDVGVVLNVAADHLGLGDIDTIEQMAKVKSVIAEVVDPSGYAVLNADDPLVAAMADKVKAKVAYFSMNPDNPVIQNHIRRNGIAAVYESGYVSILEGSWTLRVEEATLIPMTMGGMAPFMIANALAACLAAFVNGLDVEVIRQGVRTFTTSAEQTPGRMNLFNLGRYHALVDYAHNPAGYRAVGDFVKNWHGQRFGVVGGPGDRRDSDLIELGQIAAQVFDRIIVKEDDDKRGRSGGETADLIVKGILQENPGAAYEVILDETVALNKALDQVEEKGLVVVFPESVSKAIELIKARKPIG

SEQ ID NO: 196 - protein, 271 aa, Synechocystis sp
MPLSSQPAILIIGGAEDKVHGREILQTFWSRSGGNDAIIGIIPSASREPLLIGERYQTIFSDMGVKELKVLDIRDRAQGDDSGYRLFVEQCTGIFMTGGDQLRLCGLLADTPLMDRIRQRVHNGEISLAGTSAGAAVMGHHMIAGGSSGEWPNRALVDMAVGLGIVPEIVVDQHFHNRNRMARLLSAISTHPELLGLGIDEDTCAMFERDGSVKVIGQGTVSFVDARDMSYTNAALVGANAPLSLHNLRLNILVHGEVYHQVKQRAFPRVT

SEQ ID NO: 197 - protein, 469 aa, Oryza sativa
WPNPSQHTDCAHMATRIPGTVAASGVYYNDQYRMPCKLKGIHCMALNCIPQKAKVRKCMNGYQSTFRFCVNEKNGQTTGQSNGSLIQQGQNFRCHSYGSHNSSETKECSLEDGTDSYRDFEEHSRGASQFSDNQVAAKKKSVKSSQGLAEACKFVYNDAKFVNERAQNDILLLSRGITRLNKRACQDVAVLGSGFLKLDARARKDTKKIDHSVKERAARLTHFARILKEQAQSDLKKAADQHWSDGALEADLRRADSVVRRRAMEDAFMALKFVRDIHDMMANRLQEQFAKDGSSSPANSRSFITLEKNGNTFELFPHEVSTDQITAIEQAYWSMASALSEADGIDYTDPEELELLVATLIDLDAMDGKKSVSLLAECSSSPDVNTRKALANALAAAPSMWILGNAGMGALQRLAQDSNYAVARAATRAINELTKQWELEEGDSLRFVLNQNMVSKETADDSAAADDTR

SEQ ID NO: 198 - protein, 482 aa, Arabidopsis thaliana
CFSTIFWSLRVRGESDRVVLGVELGLVPHIRLYRSSLSTSDSSRSFPNLRSDMEHQGWSFEENYSLSTNRRSIRPQDELVELLWRDGQVVLQSQTHREQTQTQKQDHHEEALRSSTFLEDQETVSWIQYPPDEDPFEPDDFSSHFFSTMDPLQRPTSETVKPKSSPEPPQVMVKPKACPDPPPQVMPPPKFRLTNSSSGIRETEMEQYSVTTVGPSHCGSNPSQNDLDVSMSHDRSKNIEEKLNPNASSSSGGSSGCSFGKDIKEMASGRCITTDRKRKRINHTDESVSLSDAIGNKSNQRSGSNRRSRAAEVHNLSERRRRDRINERMKALQELIPHCSKTDKASILDEAIDYLKSLQLQLQVMWMGSGMAAAAASAPMMFPGVQPQQFIRQIQSPVQLPRFPVMDQSAIQNNPGLVCQNPVQNQIISDRFARYIGGFPHMQAATQMQPMEMLRFSSPAGQQSQQPSSVPTKTTDGSRLDH

SEQ ID NO: 199 - protein, 741 aa, Saccharomyces cerevisiae
ICHCYSMGEFKPPLPQGAGYAIVLGLGAVFAGMMVLTTYLLKRYQKEIITAEEFTTAGRSVKTRLSGCSVVSSWIWCSTLLTSSTKEYADGIFGGYAYAAGACFQIIAFAILAIKTKQMAPNAHTYLELVRTRYGKIGHGCYLFYAIATNILVTSMLLTSGSAVFSDLTGMNTIASCFLLPVGVVVYTLFGGIKATFLTDYMHTCVIIIIVLVFAFKVYATSDVLGSPGKVYDLVREAAKRHPVDGNYQGEYMTMTSKSAGILLIINLIGNFGTVFLDNGYWNKAISASPAASLKAYAIGGLAWFAVPSLISLTMGLACLAVETSPNFPTYPDPLTSFQANSGLVLPAAAIAIMGKGGAVASLLMIFMAVTSAMSAELIAVSSVFTYDIYREYIDPRASGKKLIYTSHVACIFFGLAMSGFSVGLYYGGISMGYIYEMMGIIISSAVLPVVLTLCSKDMNLVAAVVSPILGTGLAIMSWLVCTKSLYKELTVDTTFMDYPMLTGNLVALLSPAIFIPILTYVFKPQNFDWEKMKDITRVDETAELVQADPDIQLYDAEANDKEQEEETNSLVSDSEKNDVRVNNEKLIEPNLGVVISNAIFQEDDTQLQNELDEEQRELARGLKIAYFLCVFFALAFLVVWPMPMYGSKYIFSKKFFTGWVVVMIIWLFFSAFAVCIYPLWEGRHGIYTTLRGLYWDLSGQTYKLREWQNSNPQDLHVVTSQISARAHRQSSHFGQVDEII

SEQ ID NO: 200 - protein, 664 aa, Schizosaccharomyces pombe
MVQPELTQSVGYGIVVGLGLGFAALMIFVSWSLKKFNNENQTSEHFNTASHSVRTGLVASAVVSSWTWASTLLTSAQKTYQYGVSGAFWYASGACVQILLFTVLAIELKRKAPNAHTFLEVVRARCGPIAHGVFLVFAYITNILVMAMLLCGGSATISSVTGMNTVAVCFLLPVGVIIYTMFGGIKATFLTDYIHTVIILVILIMFSLATYSADKKIGSPGKLYDMLKEAGDAHPVAGNAQGSYLTMRSQEGAIFFIINLAGNFGTVFVDNGYWQKAIAANPASALPGYILGGLAWFAIPWLAATTMGLVALGLENKPYFPTYPNRMSDLEVSEGLVLPYAAIALMGRAGANATLLLVFMAVTSAASAELIAVSSIFTYDIYKQYVRPRATGKELLYTGHASLIVFGFAMSGFATGLYYGQVSMGYLYLLMGVLVCPAVVPATCVMLFSRVSTIAVTVSPVLGIISSIITWLVVARAEGGKTLTIETTGANNPMLAGNVVGLLSPALYILILSIIFPEKYDFNRLLATFAMHFSSEEDEIQQTKKLNRASVISKVAALIITAAFIILWPWPMYGTGYIFSKRFFTGWVVVGLIWIFFTVFAVGIFPLWEGRNDIYQVVSNMAASIFGRKVNDIVEDEGVVVETISIGSGSKEKVNFEKKDIESV

SEQ ID NO: 201 - protein, 544 aa, Zea mays
FLLLSLSPPSSILFPPFHLPPSSLTPPTGHRPASSLAGPRRNPSSGECPGLPSRRSVPGARRPSARSREIRGRRRPGSRSHMSGVGSGRPPAAQKILQSLRPPLSFATPSRPPFAAPDDYHRFPTPAAATAPAATSGGVGAGAPPRDTIEEGLVIRTPLKRKATSEENDAAAEPSDCIITSPMPTSVSGKTVKASKAKAKNSKTGPQTPTSNVGSPLNPPTPVGTCRYDSSLGLLTKKFINLLKQAPDGILDLNNAAETLEVQKRRIYDITNVLEGIGLIEKTLKNRIRWKALDDSSVQLDNGISALQAEVENLSLQEQALDERISDMREKLRGLTEDENNKRWLYVTEDDIKGLPSFQNETLIAIKAPHGTTLEVPDPDEAGDYLQRRYRIVLRSTMGPIDVYLVSQFDEKFEELGGVATPVKHSNVPRHQPVEDFNTYAGQSSTPMDVAHDVQHGQKIPQDPSALHDFGGMTRISPSDVHTDSDYWLLTEGDVSMTDMWKTGQEVQWDQIDFLSEDVVTPRAHNQQPVTVDGPHMEVPSMDP

SEQ ID NO: 202 - protein, 347 aa, Zea mays
ACQERWRAATTTRLRLGPRALLGCLFVLETLASRELGCDCKRQAAVPWVAAAGVEVEPQPPAGAVMDAQQQLDLVMRHQSMATVCESEVQDALGSSESDPARPARPRGKRSRAAEVHNLSEKRRRSRINEKMKALQTLIPNSSKTDKASMLDDAIEYLKHLQLQVQMLSMRNGLYLPPGNLSGAPETLAPLEMCAALNQSGAKASNSGVVVLPGNKIPVARLLLDPPNHDQRHENPLVLQSVPSSSTAVEPRFLQQPAQPNLQSFQLAVPPEMIFDEADMMLKHRLASGRETTSLPVGHEAKPGRQEACMVNSDISNRGSLGKEVFMPYLHSLQSGDTEGGLRAGSN

SEQ ID NO: 203 - protein, 181 aa, Zea mays
TAASMHGSSVNDVRDSLTRDDSEEEQPKQPALEKRGGYVSQSAVALRCRVMPPPCVKNPYLNTDPCIDAAVYGGRQCNSAVFSPSIGGNGLSRYRTDFHEIEKIGYGNFSVVFKVLNRIDGCLYAVKRSIKQLHNDMERRQAVKEVQAMAALGSHENIVRYFTSWFENEQLYIQMELCDRW

SEQ ID NO: 204 - protein, 543 aa, Gossypium hirsutum
MVAPQLAAVFTKLQTLSTSDHASVVSMNIFVALLCACIVIGHLLEENRWMNESITALIIGVFTGVIILLTSGGKSSHLLVFSEDLFFIYLLPPIIFNAGFQVKKKQFFRNFITIMLFGAVGTLISCTIISLGVINFFKEMDIGSLDIGDFLAIGAIFAATDSVCTLQVLNQDETPLLYSLVFGEGVVNDATSVVLFNAIQSFDLVNTSPRILLEFIGSFLYLFLASTMLGVIVGLVSAYIIKKLYFGRHSTDREFALMMLMAYLSYIMAELFYLSGILTVFFCGIVMSHYTWHNVTESSRVTTKHAFATLSFVAETFLFLYVGMDALDMEKWRFVSDSPGTSVAVSAVLMGLVMVGRAAFVFPLSFLSNLAKKSTSEKISFREQIIIWWAGLMRGAVSMALAYNQFTRGGHTQLRGNAIMITSTITIVLFSTVVFGLMTKPLIRFLLPHPKPTASMLSDQSTPKSMEAPFLGSGQDSFDDSLIGVHRPNSIRALLTTPAHTVHYYWRKFDNAFMRPMFGGRGFVPFVPGSPTERSEPNLPQWQ

SEQ ID NO: 205 - protein, 453 aa, Saccharomyces cerevisiae
MAKRRQKKRTHAQLTPEQEQGIPKSMVIRVGQTSLANHSLNQLVKDFRQIMQPHTAIKLKERKSNKLKDFVVMCGPLGVTHLFMFTQSEKTGNVSLKIARTPQGPTVTFQVLDYSLGRDIKKFLKRPKSLNNDDVLNPPLLVLNGFSTSKRSGEDDQDVNVEKVIVSMFQNIFPPLNPARTSLNSIKRVFMINKDRETGEISMRHYFIDIREVEISRNLKRLYKAKNNLSKTVPNLHRKEDISSLILDHDLGAYTSESEIEDDAIVRVVDNQDVKAKHSQSLKSQRTPVEKKDNKEREKETEEEDVEMEEPKPSENLQPTPRKKAIKLTELGPRLTLKLVKIEEGICSGKVLHHEFVQKSSEEIKALEKRHAAKMRLKEQRKKEQEENIAKKKAVKDAKKQRKLERRKARAAEGGEGQGKDDAMSDDESSSSDSEHYGSVPEDLDSDLFSEVE

SEQ ID NO: 206 - protein, 240 aa, Saccharomyces cerevisiae
MSTFIFPGDSFPVDPTTPVKLGPGIYCDPNTQEIRPVNTGVLHVSAKGKSGVQTAYIDYSSKRYIPSVNDFVIGVIIGTFSDSYKVSLQNFSSSVSLSYMAFPNASKKNRPTLQVGDLVYARVCTAEKELEAEIECFDSTTGRDAGFGILEDGMIIDVNFNFARQLLFNNDFPLLKVLAAHTKFEVAIGLNGKIWVKCEELSNTLACYRTIMECCQKNDTAAFKDIAKRQFKEILTVKEE

SEQ ID NO: 207 - protein, 223 aa, Saccharomyces cerevisiae
MSVQAEIGILDHVDGSSEFVSQDTKVICSVTGPIEPKARQELPTQLALEIIVRPAKGVATTREKVLEDKLRAVLTPLITRHCYPRQLCQITCQILESGEDEAEFSLRELSCCINAAFLALVDAGIALNSMCASIPIAIIKDTSDIIVDPTAEQLKISLSVHTLALEFVNGGKVVKNVLLLDSNGDFNEDQLFSLLELGEQKCQELVTNIRRIIQDNISPRLVV

SEQ ID NO: 208 - protein, 59 aa, Zea mays
RRGRGRASPRWPPLLQAAATVTLTITIKNTNNFKFHITALTRSQYLAASEVRLAPSPAV

SEQ ID NO: 209 - protein, 276 aa, Glycine max
FIPPVLHTSRFSQTQIHFQQFYFFHIKKGSNLRSLFCSQPLKMSSMASSTAFFTPLHDFTQARTTPSPPLPFIKSSFASSKSTFFHPALSLQTSSNFPRLFGKPKFFSVHARAATEKTIYDFTVKDIDRKDVSLSKFKGKVLLIVNVASRCGLTSSNYSELSRLYEKYKNQGLEILAFPCNQFGMQEPGSNEDIKQFACTRYKAEFPIFDKVDVNGPFTTPVYQFLKSSAGGFLGDLIKWNFEKFLVDKNGKVIERYPPTTSPFQIEKDIQKLLAA

SEQ ID NO: 210 - protein, 187 aa, Glycine max
TSKSGRKSLEHLEDRQKMGASQSISEKSFHEFTVKDARGKDVNLNAYRGKVLLVINVASKCGFADANYTQLTQLYSTYKSRGLEILAFPCNQFLKKEPGTSQEAQDFACTRYKAEYPIFGKIRVNGSDTAPVFKFLKTQKSGVMGSRIKWNFTKFLVDEEGRVIQRYSPTTKPLAIENDIKKALRVA

SEQ ID NO: 211 - protein, 116 aa, Zea mays
STLCFLEAGRDGHHTSLPLFLLEARAFVLLRPHRHRLGGPAISLTGGNMTTSRRLADRKTAKFQKNITRRGSVPETTVKKGNDYPVGPLVLGFFIFVVIGSSLFQIIRTATSGGVA

SEQ ID NO: 212 - protein, 192 aa, Zea mays
TRSQTKNKGPTRFRKLGAFAETNQTKPNQTKHSFSLISKGAPPLIVSDSHVGRGQKKPIHKIDRVSPARRPRRARAQTHTLPPRRAVTAGVAPRCRQSPFPIPPGYTAAAPSPPSGLALATKDGASWSPGMNTTTLGSRCSGSRARAAAAASAAAFSSAPCGEDDGSFLRMQMSTASATATTPIMKESARKM

SEQ ID NO: 213 - protein, 702 aa, Arabidopsis thaliana
FITSLYKKAGSCRTMVTLCATLLILLSIFLATPSNVRGNAELKALMELKSSLDPENKLLRSWTFNGDPCDGSFEGIACNQHLKVANISLQGKRLVGKLSPAVAELKCLSGLYLHYNSLSGEIPQEITNLTELSDLYLNVNNFSGEIPADIGSMAGLQVMDLCCNSLTGKIPKNIGSLKKLNVLSLQHNKLTGEVPWTLGNLSMLSRLDLSFNNLLGLIPKTLANIPQLDTLDLRNNTLSGFVPPGLKKLNGSFQFENNTGLCGIDFPSLRACSAFDNANNIEQFKQPPGEIDTDKSALHNIPESVYLQKHCNQTHCKKSSSKLPQVALISSVITVTITLIGAGILTFFRYRRRKQKISNTPEFSEGRLSTDQQKEFRASPLVSLAYTKEWDPLGDSRNGAEFSQEPHLFVVNSSFRFNLEDIESATQCFSEANLLSRNSFTSVFKGVLRDGSPVAIRSINISSCKNEEVEFMNGLKLLSSLSHENLVKLRGFCCSRGRGECFLIYDFASKGKLSNFLDLQERETNLVLAWSARISIIKGIAKGIAYLHGSDQQKKPTIVHRNISVEKILLDEQFNPLIADSGLHNLLADDMVFSALKTSAAMGYLAPEYVTTGKFTEKTDIFAFGVIILQILSGKLMLTSSLRNAAENGEHNGFIDEDLREEFDKPEATAMARIGISCTQEIPNNRPNIETLLENINCMKSE

SEQ ID NO: 214 - protein, 191 aa, Zea mays
IRTKALQSSNLSPLCTRKLGLESHPFKLRDVLAQLLLQFLLPPFNQLLVLGNELRLALQLFLHCRNLLSKHLFCRWRFLTLQADEIRLELLGSLHEIPCVPLNINLVGGLEGAVDGLELARGEARQQRGLQRRHTRQHVLEPTRRGSLLRRRRGRRLRWRLRRRRLSHGPAGACFFVQTCDKSGAPGLIKG

SEQ ID NO: 215 - protein, 533 aa, Pseudomonas syringae
RTLSKPMIRTKALQSSNLSPLCTRKLGLESDRQAEVFDFQIIFNAVLGTFTAQAGRLDPAERCQFVGDQAGVDTHHAIFQRLGHPEHAAHVLRIKVRRQTELGIVGQRNRLSLVLETEQWGQRTERLFSGNGGIFRHIDQNSRLEERAFQAVATGQHGRTFADSVGNVLLDLGHGLFINQRASGNAVFQAVTYFQLADRHLELLGECVIHAVLHIDAVGADASLTVVAVLGDHRAFDGLVEVGVVEHDKRRVTAQLQRHFLDVLGAFSHQLATDLGRTREGQFTHDRVTGQLAADIARAARHHAEHAGRNTRTLGQFSQRQRRKRRLRRRLEHHRATRRQRRAGLAGDHRCREIPRRNRRRHTNRLLEHNQTLVRLVTGDHIAVHALGFFSEPLDKRRCIRDLALGLSQRLALLQGHQQTQVVLILDHQLEPATQLVTALFGGQRTPGRQRLVSRLNRPTRLGRAHFRHSAEDLVGRRVVDLDRLTTVRIQPLAVDVGLLAEQGGIFKLHGPAGACFFVQTCDKSGAPGLIKG

SEQ ID NO: 216 - protein, 218 aa, Zea mays
FITSLYKKAGSCRTMENDRRQLGQIDPRRARFPCCVVWTPIPFITWLVPFIGHIGICREDGVILDFSGPHFVSVDNFAFGAVARYIQVNCDECYKLIEPEGDATWDGALKKGTQEFQNRNYNLFTCNCHSFVANNLNRLFYSGHDEWNVVSLAAVMFLRGRWVSTASVVKTLLPFAVVLSIGTFLGGTTFLTGLLAFAAAMTVWFLVGTYCIKGLIEL

SEQ ID NO: 217 - protein, 136 aa, Zea mays
MAQVSRICNGVQNPSLISNLSKSSQRKSPLSVSLKTQQHPRAYPISSSWGLKKSGMTLIGSELRPLKVMSSVSTACMPRDITSLYKKAGFEGDISRVASTTSPISRQQAWHSRRPTTARWSSARSRRRWCSSRGPS

SEQ ID NO: 218 - protein, 558 aa, Xenorhabdus nematophila
TMASSMLSSATMVASPAQATMVAPFNGLKSSAAFPATRKANNDITSITSNGGRVNCMQVWPPIGKKKFETLSYLPDLTDSGGRVNCMQAMAVEHVLSMIEEHQVKFIDLRFTDTKGKEQHITIPAHQIDEDFFEDGKMFDGSSIGGWKGINESDMVLMPDPTTAMRDPFFNDATLILRCDILEPGTMQGYSRDPRSIAKRAEDFLRASDIADTVLFGPEPEFFLFDDIRFGSSISGSYYHIDDVEAAWNSGTRYEGGNKGHRPGIKGGYFPVPPVDSSQDLRSAMCLTMEKMGLVVEAHHHEVATAGQNEIATRFNTMTKKADETQIYKYVVHNVAHSFGKTATFMPKPLVGDNGSGMHCHMSLSKNGTNLFAGDKYGGLSELALYYIGGVIKHARALNAFTNPTTNSYKRLVPGFEAPVMLAYSARNRSASIRIPVVASAKARRIEVRFPDPAANPYLSFSALLMAGLDGIINKIHPGDAMDKNLYDLPAEEAQEIPTVASSLDDALAALDADREFLTRGGVFTDDAIDAYIKLLHGEIERVRMTPHPLEFELYYSV

SEQ ID NO: 219 - protein, 697 aa, Arabidopsis thaliana
LLLQSLKTRKQKEALCSNQKERSYAKVSDMARSFGANSTVVLAIIFFGCLFAFSTAKEEATKLGSVIGIDLGTTYSCVGVYKNGHVEIIANDQGNRITPSWVGFTDSERLIGEAAKNQAAVNPERTVFDVKRLIGRKFEDKEVQKDRKLVPYQIVNKDGKPYIQVKIKDGETKVFSPEEISAMILTKMKETAEAYLGKKIKDAVVTVPAYFNDAQRQATKDAGVIAGLNVARIINEPTAAAIAYGLDKKGGEKNILVFDLGGGTFDVSVLTIDNGVFEVLSTNGDTHLGGEDFDHRIMEYFIKLIKKKHQKDISKDNKALGKLRRECERAKRALSSQHQVRVEIESLFDGVDLSEPLTRARFEELNNDLFRKTMGPVKKAMDDAGLQKSQIDEIVLVGGSTRIPKVQQLLKDFFEGKEPNKGVNPDEAVAYGAAVQGGILSGEGGDETKDILLLDVAPLTLGIETVGGVMTKLIPRNTVIPTKKSQVFTTYQDQQTTVSIQVFEGERSLTKDCRLLGKFDLTGVPPAPRGTPQIEVTFEVDANGILNVKAEDKASGKSEKITITNEKGRLSQEEIDRMVKEAEEFAEEDKKVKEKIDARNALETYVYNMKNQVSDKDKLADKLEGDEKEKIEAATKEALEWLDENQNSEKEEYDEKLKEVEAVCNPIITAVYQRSGGAPGAGGESSTEEEDESHDEL

SEQ ID NO: 220 - protein, 569 aa, Oryza sativa
TTSVRKPKNETHRREMSSLDATTPRYDEFKRIYHLFLFHAHPFWLQLLYFLFISLLGFLMLKALPMKTSMVPRPMDLDLIFTSVSATTVSSMVAVEMESFSNSQLLLITLLMLLGGEVFTSILGLYFTNAKYSSKMIATLPDDDDHGGSGKPPPPTTSPSSTLVELELAPPMDVVVVNPTTTATTHDEVELGLGRRNKRGCTCTTTHTSSSSSASKTTTTRLLMFVVMGYHAVVHVAGYTAIVVYLSAVGGAGAVVAGKGISAHTFAIFTVVSTFANCGFVPTNEGMVSFRSFPGLLLLVMPHVLLGNTLFPVFLRLAIAALERVTGWPELGELLIRRRRGGGEGYHQLLPSSRTRFLALTVAVLVVAQLALFCAMEWGSDGLRGLTAGQKLVGALFMAVNSRHSGEMVLDLSTVSSAVVVLYVVMMYLPPYTTFVPVQDKHQQTGAQSGQEGSSSSSIWQKLLMSPLSCLAIFIVVICITERRQIADDPINYSVLNIVVEVISAYGNVGFSTGYSCARQVRPDGSCRDLWVGFSGKWSKQGKLTLMAVMFYGRLKKFSLHGGQAWKIE

SEQ ID NO: 221 - protein, 578 aa, Arabidopsis thaliana
MDQEALLVGRTLLKRGIPTIPFILASQALEKLAYFGLVPNMILFLTVEYGMGTAEAANILFLWSAATNFFPLVGAFIADSYTGRFPLIGFGSSISLTGMVLLWLTTIIRPECDKLTNVCQPTTLLKSVLLYSFFALTAIGAGGVRSSCLAFAADQLQPNQTSRVTTSSLETLFNWYYFSVMVACFLSQSLLVFVQTTYGWQIGFGVSVAAMALSVALFFAASPYYVRYLNKACVTTNSKQDLALTGNSRNPWKLCRVQQVEDLKSLINVIPIWSTGIILSLVTACQVSFIVLQAKTMDRHTFIQGFEIPPGSYGIFLVISFLLFLGLYDLVIVPLLSWALREPFRLGVMVRMWAGYVISVLCISALAATEYARRKTARDESGTKLSAMWLLPYMILGGIAEALNTIAQNEFFYSELPKTMSSVATTLSSLNMAAASLISSWIITIVDVTTYGSWITENIDEGHLDYYYWLLVGLSLLNVLYFVWCKKSYGPVKRKNLGFLRFGLRMLFQNMLSPFGLLILIGFLLNQGSMIGECKSLLFVEFVTLMWNPEIPPSSLQLCRGDLVFYDEKTRSISIRRP

SEQ ID NO: 222 - protein, 175 aa, Gossypium hirsutum
MGGGPTSPAGGSHESGGEHSSPQSTVREQDRYLPIANISRIMKKALPSNGKIAKDAKDTVQECVSEFISFITSEASDKCQKEKRKTINGDDLLWAMATLGFEDYIEPLKIYLARYRELEGDTKGSARGGDGSFKRDAAGALPAQNPQFSIQGSLNYINSQAQGQHMIIPSMQGNE

SEQ ID NO: 223 - protein, 177 aa, Gossypium hirsutum
MADGMARGPTSPAGGSHESGEQCSSHSTVREQDRYLPIANISRIMKRALPTNGKIAKDAKETVQECVSEFISFITSEASDKCQKEKRKTINGDDLLWAMATLGFEDYIEPLKIYLARYRELEGDAKGSIRGEVPLKRDAVRVLAVPNPQFPIEGSLNYINSQAQGHHMIVPSMQGNE

SEQ ID NO: 224 - protein, 335 aa, Unknown
  Unknown source
RVDSRGIIMSAEHIVGSAADAAAKKPEIENGVSASQPDSISSVIPGWFSEISPMWPGEAHSLKVEKVLFQGKSDYQNVLVFQSSTYGKVLVLDGVIQLTERDECAYQEMITHLPLCSIPNPKKVLVIGGGDGGVLREVARHSSVEQIDICEIDKMVVDVSKEFFPRVAVGFEDPRVTLHIGDGVAFLKAVPEGTYDAVIVDSSDPIGPAQELFEKPFFASVAKALRPGGVVCTQAESIWLHMHIIEDIVTNCRQIFKGSVNYAWTTVPTYPSGVIGFMLCSTEGPPLDFKHPVNPVEVNGIDTVKSPLKFYNSEIHTAAFCLPSFAKKIIDSKAK

SEQ ID NO: 225 - protein, 600 aa, Gossypium hirsutum
MARLSEESDNVWALIPELRKKLHFHQKRAFEFLWLNIAGSLIPALMEPSSKKTGGCVVSHSPGSGKTFLIIAFLASYLKLFPGKRPLVLAPKTTLYTWYKEFIKWEIPVPVHLIHGRRSYRVFKKNAVKFHGVPRPSQDVMHVLDCLDKIQKWHAQPSVLVMGYTSFLTLMREDSKFEHRKFMAKVLRESPGLLVLDEGHNPRSTKSRLRKVLMKVETDLRILLSGTLFQNNFCEYFNTLCLARPKFVFEVLRRLDPKYKRKKRFDKARNLLENRARKLFLDKIARKIDASVGEERMEGLNMLRKITNGFIDVYEGGNFDCLPGLQIYTLMMNSTDIQHEILVKLHKIMSTYTGYPLELELLITLASIHPSLVRTSNCSAKFFSTEELLELEKIKFDFRKGSKVMFVLNLVYRIIKNEKVLIFCHNIAPIYLLAEMFERIFRWRKGREILVLTGDLELFERGRVMDKFEEPGGASRVLLASITACAEGISLTAASRVILLDSEWNPSKTKQAIARAFRPGQQKVVYVYQLLATGTLEEDKYRRTTWKEWVSSMIFSEAFVEDPSQWQAEKIEDDVLREIVAEDKVKSFHMIMKNEKASTG

SEQ ID NO: 226 - protein, 602 aa, Glycine max
MPVSQENDNVWVLIPELKAKLHAHQKKAFEFLWQNIAGSMDPGLMEAASKRRGGCVVSHTPGAGKTFLIIAFLVSYLKLFPGKRPLVLAPKTTLYTWYKEFIKWDIPIPVYLIHGRRTYRVFKQKSSIVIPGVPKPTDDVKHVLDCLEKIQKWHSHPSVLIMGYTSFLTLMREDSKFAHRKYMAKVLRESPGVMVLDEGHNPRSTKSRLRKVLMKVQTELRILLSGTLFQNNFCEYFNTLCLARPKFIHEVLKALDPKYKRKGKVAKKASHLLESRARKFFLDQIAKKIDSSNGRERRKGLKMLRNVTNGFIDVYEGGSSDGLPGLQIYTLLMNSTDTQHEILHELHKKMAKVNGYPLELELLITLGSIHPWLVKSAVCAEKFFTQAQLMELEKCKFDLRIGSKVKFVLSLIYRVVKKEKVLIFCHNIAPVKLFVEYFEKYFGWTKGREVLVLTGELELFERGRVMDKFEEPGGVAKILLASITACAEGISLTAASRVIMLDSEWNPSKTKQAIARAFRPGQQKVVYVYQLLVTGSLEEDKYKRTTWKEWVSSMIFSEAFVEDPSQWQAEKIEDDILREMVAEDRSKSFHMIMKNEKASTNK

SEQ ID NO: 227 - protein, 477 aa, Zea mays
TREPRRPSLSPSRPRAVAPTPPFPPPASTADRLVPCALRREGGKGKQEGGPLRACGAFLLESPPTASAASVITPTTPGLGLGSELKLPGQAIEPMYGSPVSKDLNLPAQPPPMASSGLLRYRSAPSAVLGGLCEDQLQLPAAAPSAADNVFSRFLPDDHHIRDDKPSPAHFPSAADMASHHQQEQMMLHSQSQSQHQQETGRSGGGLYRTVSSAMEAGGTGVGAASSLIRQSSSPAGFLDHFGMDNGYGAMLRASMGMGFQEGVASDSLAGGGGGGGSGRLGGQLSFSSRQGSLMSQISEMDSQEDVVGASSPDAGGGGDAAYMPGYPMSSGGWDDSSSALLPDSLPATNKRPRDSLEHGGGLAHQFSLPKTSSSEVAAIEKFLQFQDAVPCKVRAKRGCATHPRSIAERVRRTKISERIRKLQELVPNMEKQTNTADMLDLAVDYIKDLQKQVKVLNDGRASCTCSAGELQGQFTR

SEQ ID NO: 228 - protein, 450 aa, Arabidopsis thaliana
MTPISQRISQKSPKLRETKQIQMTTTDKSAGIVTDSEAGPETSLLLNPHEGSTKKAPSDSYHFAYIIYFTLGVGFLLPWNAFITAVDYFSYLYPSTAVDRIFAVIYMLVALVCLFVIVVFYAHKSLASFRINLGLLLFVIALLVVPVLDLVYVKGQVGLYAGFDVTSAAVALSGLGDALMQGGLIGVAGEMPERYMQAVVAGTAGSGVLVSLLRILTKAVYPQDPDGLRKSANLYFAVGIVVMVICAVFYNVAHKLPVIKFHEERKNEELIREKSEEKGSLTGLAWRTTLWDIVTKVKSHGFGIVLLYMVTLSIFPGYITEDVHSELLTDWYPILLIAAYNVFDLVGKCLTAVFMLEDEKIAVGGSIARLLFYPLFWGCLHGPMFLRTEIPVTILTCLLGLTNGYLTSVLMILAPKSVPLRHSETAGIVTVMFLVVGLASGSVIAWFWVI

SEQ ID NO: 229 - protein, 60 aa, Unknown
  Unknown source
MPRDITSLYKKAGFEGDISRVASTTSPISRQQAWHSRRPTTARWSSARSRRRWCSSRGPS

SEQ ID NO: 230 - protein, 145 aa, Unknown
  Unknown source
AAGYHLPLQEGWFRRRYQQSSQHDKPDQQTAGMALAEADDGAVVFGEEQEALVLKSWAVMKKDAANLGLRFFLKVFEIAPSAKQMFSFLRDSDVPLEKNPKLKTHAMSVFVMTCEAAAQLRKAGKVTVRETTLKRLGATHLRYGV

SEQ ID NO: 231 - protein, 261 aa, Lycopersicon esculentum
MELLSSKLCELCNDQAALFCPSDSAFLCFHCDAKVHQANFLVARHLRLTLCSHCNSLTKKRFSPCSPPPPALCPSCSRNSSGDSDLRSVSTTSSSSSSTCVSSTQSSAITQKINIISSNRKQFPDSDSNGEVNSGRCNLVRSRSVKLRDPRAATCVFMHWCTKLQMNREERVVQTACSVLGICFSRFRGLPLRVALAACFWFGLKTTEDKSKTSQSLKKLEEISGVPAKIILATELKLRKIMKTNHGQPQAMEESWAESSP

SEQ ID NO: 232 - protein, 346 aa, Arabidopsis thaliana
MELVFENGQILAKGQRSNVSLHNQRTKSIMDLYEAEYNEDFMKSIIHGGGGAITNLGDTQVVPQSHVAAAHETNMLESNKHVDDSETLKASSSKRMMVDYHNRKKIKFIPPDEQSVVADRSFKLGFDTSSVGFTEDSEGSMYLSSSLDDESDDARPQVPARTRKALVKRKRNAEAYNSPERNQRNDINKKMRTLQNLLPNSHKDDNESMLDEAINYMTNLQLQVQMMTMGNRFVTPSMMMPLGPNYSQMGLAMGVGMQMGEQQFLPAHVLGAGLPGINDSADMLRFLNHPGLMPMQNSAPFIPTENCSPQSVPPSCAAFPNQIPNPNSLSNLDGATLHKKSRKTNR

SEQ ID NO: 233 - protein, 723 aa, Arabidopsis thaliana
MSNTVEDDDDDFQIPPSSQLSIRKPLHPTNANNISHRPPNKKPRLCRYPGKENVTPPPSPDPDLFCSSSTPHCILDCIPSSVDCSLGDFNGPISSLGEEDKEDKDDCIKVNREGYLCNSMEARLLKSRICLGFDSGIHEDDEGFVESNSELDVLINLCSESEGRSGEFSLGKDDSIQCPLCSMDISSLSEEQRQVHSNTCLDKSYNQPSEQDSLRKCENLSSLIKESIDDPVQLPQLVTDLSPVLKWLRSLGLAKYEDVFIREEIDWDTLQSLTEEDLLSIGITSLGPRKKIVNALSGVRDPFASSAEVQAQSHCTSGHVTERQRDKSTTRKASEPKKPTANKLITEFFPGQATEGTKIRTAPKPVAEKSPSDSSSRRAVRRNGNNGKSKVIPHWNCIPGTPFRVDAFKYLTRDCCHWFLTHFHLDHYQGLTKSFSHGKIYCSLVTAKLVNMKIGIPWERLQVLDLGQKVNISGIDVTCFDANHCPGSIMILFEPANGKAVLHTGDFRYSEEMSNWLIGSHISSLILDTTYCNPQYDFPKQEAVIQFVVEAIQAEAFNPKTLFLIGSYTIGKERLFLEVARVLREKIYINPAKLKLLECLGFSKDDIQWFTVKEEESHIHVVPLWTLASFKRLKHVANRYTNRYSLIVAFSPTGWTSGKTKKKSPGRRLQQGTIIRYEVPYSEHSSFTELKEFVQKVSPEVIIPSVNNDGPDSAAAMVSLLVT

SEQ ID NO: 234 - protein, 164 aa, Arabidopsis thaliana
MERSASVGVNDGRFGGNQFYSPSFSSSSSSSSMRHVNYSCGSCGYELNLSSTNRITSTIGSKYGKSMKSGIISFFNIDEGRFSQVDEFQCMPHFSRYSWGLFRHRTKLLCRKCNNYIGNASQEKAPEYALVTQNSDPTSPRIGSVTKYDIRIRSLQPSSAVALL

SEQ ID NO: 235 - protein, 535 aa, Arabidopsis thaliana
MATCSRPLFVSNSAASASPSRASFRRLHTVAVVSIWEPLPHPPLRAAACRFARTKQCSRRSTECLASGPSVSRLTRPIRRMLSRYSSLMVTLHGNLSRCYKAMSALRPDGVSRHFMSAGGFERVVLGVVLVMSISGASYTAPSSSALTEENLLFLEAWRTIDRAYIDKTFNGQSWFRYRETALRNEPMNTREETYMAIKKMVATLDDPFTRFLEPGKFKSLRSGTQGAVTGVGLSIGYPTASDGPPAGLVVISAAPGGPANRAGILPGDVIQGIDNTTTETLTIYDAAQMLQGPEGSAVELAIRSGPETRLLTLTRERVSVNPVKSRLCELPGSGSNSPKIGYIKLTTFNQNASSAVREAIETLRGNNVNAFVLDLRDNSGGSFPEGIEIAKFWLDKGVIVYICDSRGVRDIYDTDGSNAIATSEPLAVLVNKGTASASEILAGALKDNKRALVYGEPTYGKGKIQSVFELSDGSGLAVTVARYETPAHTDIDKVGVTPDHPLPKSFPKDEEAFCGCLKDPTAACYLNQGLLFSR

SEQ ID NO: 236 - protein, 171 aa, Zea mays
MDEHGEKEENKSQDSALAAEQREETAAAEGEDTSEESTDQREDGHGYKADESAGLLPEDDVGSGEASAAPHFGHPCSLLRACAGFLGLHGCGGDQKPAAAAVAASAAEAATAAAASSSQDEEDGGVDMAKANGFYMHEVITRVWAVAVRRPRPRPPDHAREGSGGNGGVHH

SEQ ID NO: 237 - protein, 142 aa, Zea mays
MDERGEKEEEHGVVEEETAAVVLKEVEVEMEMVGGSEEASAAPLLLAHPCSLLQLLLRACAGCLVRLLHGHCSDGANDDPKAAADDDDAAPEAAAAAAAAAGDGGDKAATYLYMQEVWAVRRRPTTPGRPREGSGGNGGNHH

SEQ ID NO: 238 - protein, 344 aa, Arabidopsis thaliana
MGRVKLKIKKLQNMNGRQCTYTKRRHGIMKKAKELSILCDIDVVLLMFSPMGKASICIGKHSIGEVIAKFAQLSPQERAKRKLENLEALRKTFMKANHDIDISKFLDRISTPTVEVLSEKIRFLQTQLSDIHTRLSYWTDVDNIDSVDVLQQLEHSLRQSLAQIYGRKASMPQRQQQQLMSSQCKNQLQTEIDIDFGMEMEQQLENFSWVRTDENMNVPIEEEDPNLQLHHMYKDITCSASSALGNYSGLFSKSSDILQKLETGSIPGTSADPNQQFSNLSFLNDQKLKQLAEWNLLGSPADYYVSQILEASYKPQIGGKNNGASSETLPYVAVFDDPLYFWPN

SEQ ID NO: 239 - protein, 169 aa, Zea mays
SSSPASDPRFPRIPLYSSICGLLHSPAPFSLLLASPRARFYKGFGGGDRSPTMADDSGSHEGGGGGGDDVREQDMFLPITNITRIMKKAVPANAKITKDAKEIMQYCVSEFIFFVTSEAREKSKKEERKRINVDDLLWSVDTAGFEYVELLRICLQKYRETGKCTVYTT

SEQ ID NO: 240 - protein, 253 aa, Zea mays
PTQASPSTTSSSAAPTCAPPLSRWSTPPPASAAASKPQGASVTLYSDLVSGARETEYRRPPTKQSDTTALMYSSGTTGASKGVILTHRNFISAAAMMTADQDALGEGPNVFLCFLPMFHIFGLSVITFAQMQRGNSVVVMSRFDMDSVMAAVQRHRVTHLFCVPPVMIALAKLGSVGKYDLSSLRFIGSGAAPLGKDVMEGVAKNFPEAVIAQGYGMTETCGIISLEYPEKGQIRQFGSTGALVSGVEAKLLM

SEQ ID NO: 241 - protein, 353 aa, Glycine max
GSSQNLGFSVLLWGSEDMQSKSETANRLRSDPHSFQPGGVYSEPWWRGIGYNPMAQTMAGANASNSSSLECPNGDSESNEEGQSLSNSGMNEEDDDATKDSKPAAPNETGNYEQEQQGMQHTASSPPSMREECLTQTPQLELVGHSIACSTNPYQDPYYGGMMAAYGHQQLGYAPFIGMPHARMPLPLEMAQEPVYVNAKQYQGILRRRQARAKAELERKLIKSRKPYLHESRHQHAMRRARGTGGRFAKKTDGEGSNHLGKEKDNGTDSVQSISSSGSEPLHSDSAETWNSPNMQQDARASKVHNSRFEAPSYQNGSGSYHNHNGLQSSVYHSSSGERVEERDCSGQQLNHN

SEQ ID NO: 242 - protein, 739 aa, Zea mays
ASDSRFPKRSPSARPVAPRHAHHHHSQSSGGSTSRAGAGGGGGGAAATESVSKAVAQYNIDARLHAVFEQSGASGRSFDYSQSLRAPPTPSSEQQIAAYLSRIQRGGHIQPLGCTLAVADDSSFRLLAFSENTTDLLDLSPHHSVPSLDSVALPPVSLGADARLYFSPSSAVLLERAFAAREISLLNPLWIHSRASSKSFYAILHRIDVGVVIDLEPARTEDPALSIAGAVQSQKLAVRAISRLQALPGGDVKLLCDTVVEHVRELTGYDRVMVYRFHEDEHGEVVAESRRDNLEPYLGLHYPATDIPQASRFLFQQNRVRMIADCHAIPVRVIQDPGLSQQLCLVGSTLRAPHGCHAQYMANMGSIASLVMAVIISSGGDDERTGRGAISSSMKLWGLVVCHHTSPRCIPFPLRYACEFLMQAFGLQLNMELQLAHQLSEKHILRTQTLLCDMLLRDSPAGIITQSPSVMDLVKCDGAALYYRGKYYPLGVTPTESQIKDIIEWLTVCHGDSTGLSTDSLADAGYLGAVALGDAVCGMAVAYITPSDYLFWFRSHTAKEIKWGGAKHHPEDKDDGQRMHPRSSFKAFLEVVKSRSLSWENAEMDAIHSLQLILRDSFRDAAEGTSNSKAIVNGQRQLGELELRGINELSSVAREMVRLIETATVPIFAVDTDGCINGWNAKIAELTGLSVEEAMGKSLVNDLIFKECDDIGEKLLSRALRGIPFSFLIWMLLLLYYVF

SEQ ID NO: 243 - protein, 1530 aa, Oceanobacillus iheyensis HTE831
MSKHGYPDQQGLYHPDFEHEACGIGMIANINGKKTHNIVQNAINILCNLEHRGGQSADTSTGDGAGIMTQIPDRFFQLQCVKENIHLPREGDYGVGMIFLPRDRQLRMTCRKMIEQIVEDEGQTFLGWRPVPTNESFIGKVASKSAPSVRQFFIQRSDSIKDQMEFERRLFVIRKCIENIVAGQPEYEDVYICSLSTRTIVYKGMLVPEQLDAYYIDLNHPDFKSALALVHSRFSTNTFPSWKRSHPNRYTIHNGEFNTLRGNVNWMQAREQLCVSDHFSEEDLQKILPVMDTDGSDSSIFDNTFEFLHLSGRSLAHTAMMMVPEPWSNDDNIKDEKRDFYEYHSTLMEPWDGPAALVFTNGNQIGACLDRNGLRPARYYVTKDGMVVLGSEVGALDIFADDILYKDRLAPGKMLLIDLEKGVIVPDETIKMQISSEKPYKEWLKNKIDLQDLPQTTSDFPVNHGDKLLEQQLAFGYTQEELNKIMKPLVSDGKDPVGSMGYDSPLAVLSKRPQLLYNYFKQLFAQVTNPPLDAIREKIITMVETTIGAEGNLTKPTADNCRHIRLETPVLRNEELEAIRRQRLDKLSVETLSTLFDTENEGNMKEALNSLFAQADAAMEKGVSLLILSDRGVNDKQAAIPALLAVSGLHHHLIRKGVRTKVSLLVESGEPREVHHFATLLGYGAEAINPYLAFDTYFNLFQADEINVSSVDEAYTRYITAITDGIIKILSKMGISTIQSYRGAQIFEAVGIHEEVIDYYFTGTASRLGGIKLDIIEKEAMMRHKLAFADARGGKRHLTPGDEFQYRVNGEDHQYNPHTIQTLQHSVRSNNYELFKKYSNMLTDDALNLQSLRGLVDFKDRAPVPIEEVEPVENIVKRFKTGAMSFGSISKEAHEALAIAMNRLGGRSNTGEGGESIDRFTPDENGDLRRSAVKQVASGRFGVTSNYLVNADEIQIKVAQGAKPGEGGQLPGKKVYPWVAEVRGSTPGVELISPPPHHDIYSIEDLAELIYNLKNANPNARISVKLVAAVGVGTIAAGVAKGRADHVVISGYDGGTGAAPRTSLKHTGLPWEIGLAETHQTLLLNGLRDRITVETDGKMMTGRDVVVAALLGAEEYGFSTAPLVALGCVMMRVCHLDTCPVGIATQNPSLREKFSGDPDHVVNFMKFIAQEAREIMAKLGFRTINEMIGRSDVLEEKKLDHWKAKDIDLSALLYRPELPFKIDQYATKQQDHGIDKTLDYQELLPICESAIEDGTPVEFSVAIRNINRVTGALLGHAITERYGEHGLPEDTIKLNFNGSAGQSFGAFIPKGMSLKLIGDANDFVGKGLSGGKIIVRPSSTVTFEPEKNIIIGNVAFYGASAGEAYIRGIAGERFAVRNSGASIVVEGIGDHGCEYMTGGQVIVLGKTGRNFAAGMSGGVAYVFDEEDEFKNMVNNSLVQVERVTDANELEELYASIEKHVEYTDSGHAARILAYWEKYSISFSRVIPKAYLAMRERISTLMNTGLTKYEAELQAFEETNQIKVQKDKVNV

SEQ ID NO: 244 - protein, 155 aa, Physcomitrella patens subsp. patens
MGNKVTRRCSTVDERYTRLQGLYPQRGVDQKKLRRLILDSKLAPCFPGEEEANADFEECPICFLSYPSLNRSKCCSKGVCTECFLQMKSPRTARSIQCPFCKSYNYGVEYRGVKSLEEKGIEAAEEQKVIEAKIRMRKREILDDEHREQRKEEGC

SEQ ID NO: 245 - protein, 388 aa, Cyanidium caldarium
YSIEGLSQLIFDLHQINPKAKVSVKLVASVGIGTIAAGVAKANADIIQISGHDGGTGASPLSSIKHAGVPWELGLTEVHKTLLSNNLRNRVLLRVDGGLKTGLDIIIASLMGAEEYGFGTVAMIATGCIMATICHTNNCPVGVASQREDLRARYPGVPESLVNFCMFVAEEVRSILAYMGYKSLNDIIGRYDLLSTNYINTLSKTKNLNLYDLLNMPIDYINNRSWLEHEDVHSNGPVLDDILVKSSDIEDTIKSQRNIDKHLKISNINRSVGGRLSGYIAKQYGNNNFKGKINLHFYGSAGQSFGLFNIEGLNLRLIGEANDYVGKGMNGGEIVVIPNNQFDNSNYLTNNVIIGNTCLYGATGGYLFVKGQAGERFAVRNSQAQAVV

SEQ ID NO: 246 - protein, 528 aa, Francisella tularensis subsp. holarctica
MHISERRKWYIGFAVFVMVILLSLSLLHASIWFSIGFVAVLAVIAIYDVSQTKHSILRNFPIVGHMRYILEFLRPEIQQYFIADNESEKPFGRELRSTIYRRAKGINDTVAFGTEKDIYRVGYEWVTHSLMPKHLDEIETRVKIGGSDCKQPYMASHLNISAMSFGALSANAVMALNKGAKLGGFYQCTGEGGLTKYHLQGGDLVFQIGTGYFGCRTDDGKFSAEKFVEKANLDRVKMIEIKLSQGAKPSHGGVLPAAKITPEIAEIRGVSMGKDVLSPPAHSAFSTPIEFCYFIKQLRDLSNGKPIGFKLCIGSHVEFLAICKAMLETGIRPDFITVDGADGGTGAAPLEFSNHIGMPLEDSLIFVHNALVGCGLRDEIRIIASSKVATGFDMVRLFAMGADTCNSARAMMLAIGCIQSRQCNNNTCPVGVATQNPRLEKALVVEDKMYRVYNFHKVTIQSCLEIIGAMGLISTDDVEPENLKKRISVNEIKSYADLYDFIPERCLVDGNIPASFARSWEKARADSF

SEQ ID NO: 247 - protein, 1556 aa, Synechocystis sp. PCC 6803
MSFQYPLLAPMTNSSVATNSNQPFLGQPWLVEERDACGVGFIANLRGKPDHTLVEQALKALGCMEHRGGCSADNDSGDGAGVMTAIPRELLAQWFNTRNLPMPDGDRLGVGMVFLPQEPSAREVARAYVEEVVRLEKLTVLGWREVPVNSDVLGIQAKNNQPHIEQILVTCPEGCAGDELDRRLYIARSIIGKKLAEDFYVCSFSCRTIVYKGMVRSIILGEFYLDLKNPGYTSNFAVYHRRFSTNTMPKWPLAQPMRLLGHNGEINTLLGNINWMAAREKELEVSGWTKAELEALTPIVNQANSDSYNLDSALELLVRTGRSPLEAAMILVPEAYKNQPALKDYPEISDFHDYYSGLQEPWDGPALLVFSDGKIVGAGLDRNGLRPARYCITKDDYIVLGSEAGVVDLPEVDIVEKGRLAPGQMIAVDLAEQKILKNYQIKQQAAQKYPYGEWIKIQRQTVASDSFAEKTLFNDAQTVLQQQAAFGYTAEDVEMVVVPMASQGKEPTFCMGDDTPLAVLSHKPRLLYDYFKQRFAQVTNPPIDPLRENLVMSLAMFLGKRGNLLEPKAESARTIKLRSPLVNEVELQAIKTGQLQVAEVSTLYDLDGVNSLETALDNLVKTAIATVQAGAEILVLTDRPNGAILTENQSFIPPLLAVGAVHHHLIRAGLRLKASLIVDTAQCWSTHHFACLVGYGASAICPYLALESVRQWWLDEKTQKLMENGRLDRIDLPTALKNYRQSVEAGLFKILSKMGISLLASYHGAQIFEAIGLGAELVEYAFAGTTSRVGGLTIADVAGEVMVFHGMAFPEMAKKLENFGFVNYRPGGEYHMNSPEMSKSLHKAVAAYKVGGNGNNGEAYDHYELYRQYLKDRPVTALRDLLDFNADQPAISLEEVESVESIVKRFCTGGMSLGALSREAHETLAIAMNRLGAKSNSGEGGEDVVRYLTLDDVDSEGNSPTLPHLHGLQNGDTANSAIKQIASGRFGVTPEYLMSGKQLEIKMAQGAKPGEGGQLPGKKVSEYIAMLRRSKPGVTLISPPPHHDIYSIEDLAQLIYDLHQINPEAQVSVKLVAEIGIGTIAAGVAKANADIIQISGHDGGTGASPLSSIKHAGSPWELGVTEVHRVLMENQLRDRVLLRADGGLKTGWDVVMAALMGAEEYGFGSIAMIAEGCIMARVCHTNNCPVGVATQQERLRQRFKGVPGQVVNFFYFIAEEVRSLLAHLGYRSLDDIIGRTDLLKVRSDVQLSKTQNLTLDCLLNLPDTKQNRQWLNHEPVHSNGPVLDDDILADPDIQEAINHQTTATKTYRLVNTDRTVGTRLSGAIAKKYGNNGFEGNITLNFQGAAGQSFGAFNLDGMTLHLQGEANDYVGKGMNGGEIVIVPHPQASFAPEDNVIIGNTCLYGATGGNLYANGRAGERFAVRNSVGKAVIEGAGDHCCEYMTGGVIVVLGPVGRNVGAGMTGGLAYFLDEVGDLPEKINPEIITLQRITASKGEEQLKSLITAHVEHTGSPKGKAILANWSDYLGKFWQAVPPSEKDSPEANGDVSLTGEKTLTSV

SEQ ID NO: 248 - protein, 1486 aa, Salmonella typhimurium LT2
MLYDKSLEKDNCGFGLIAHIEGEPSHKVVRTAIHALARMQHRGAILADGKTGDGCGLLLQKPDRFFRIVAEERGWRLAKNYAVGMIFLNKDPELAAASRHIVEEELQQETLSIVGWRDVPTNEGVLGEIALSSLPRIEQIFVNAPAGWRPRDMERRLFIARRRIEKRLQDDKDFYVCSLSNLVNIYKGLCMPADLPRFYLDLADLRLESAICLFHQRFSTNTVPRWPLAQPFRYLAHNGEINTITGNRQWARARTYKFQTPLIPDLQSAAPFVNETGSDSSSLDNMLELLLAGGMDIIRAMRLLVPPAWQNNPDMDQDLRAFFDFNSMHMEPWDGPAGIVMSDGRFAACNLDRNGLRPARYVITKDKLITCASEVGIWDYQPDEVVEKGRVGPGELMVIDTRGGRILHSAETDDDLKSRHPYKEWMEKNVRRLVPFEELPDEEVGSRELDDDLLASYQKQFNYSAEELDSVIRVLGENGQEAVGSMGDDTPFAVLSSQPRIIYDYFRQQFAQVTNPPIDPLREAHVMSLATSIGREMNVFCEAEGQAHRLSFKSPILLYSDFKQLTTMKEEHYRADRLDITFDVTETTLNATVKALCDKAEQMVRNGTVLLVLSDRNIGKNRLPVPAPMAVGAVQTRLVEQSLRCDANIIVETGSARDPHHFAVLLGFGATAIYPYLAYETLGRLIDTQAIAKNYRTVMQNYRNGINKGLYKIMSKMGISTIASYRCSKLFEAVGLHDDVVNLCFQGVVSRIGGASFDDFQQDLLNLSKRAWLARKPISPGGLLKYVHGGEYHAYNPDVVRTLQQAVQSGEYSDYQEYAKLVNERPASTLRDLLAIHPDGEAVTIDEVEPASELFKRFDTAAMSIGALSPEAHEALAEAMNSLGGNSNSGEGGEDPARYGTNKVSRIKQVASGRFGVTPAYLVNADVIQIKVAQGAKPGEGGQLPGDKVTPYIAKLRYSVPGVTLISPPPHHDIYSIEDLAQLIFDLKQVNPKAMISVKLVSEPGVGTIATGVAKAYADLITIAGYDGGTGASPLSSVKYAGCPWELGLVETQQALVANGLRHKIRLQVDGGLKTGVDIIKAAILGAESFGFGTGPMVALGCKYLRICHLNNCATGVATQDDKLRKNHYHGLPFKVTNYFEFIAREVRELMASLGVTRLVDLIGRTDLLKELEGFTAKQQKLALSRLLETAEPHPGKALYCTENNPPFDNGVLNAQLLQQAKPFVDARQSKTFWFDIRNTDRSVGASLSGYIAQTHGDQGLASDPIKAHFSGTAGQSFGVWNAGGVELYLTGDANDYVGKGMAGGLIAIRPPVGSAFLSHKASIIGNTCLYGATGGRLYAAGRAGERFGVRNSGAITVVEGIGDNGCEYMTGGIVCVLGKTGVNFGAGMTGGFAYVLDEDGEFRKRVNPELVEVLDVDSLAIHEEHLRGLITEHVQHTGSQRGEEILSRWSSFSTQFALVKPKSSDVKALLGHRSRSAAELRVQAQ

SEQ ID NO: 249 - protein, 293 aa, Candida albicans SC5314
MKKALPEHAKLSKESKECIQECVSEFISFITSQAADRCLVEKRKTLNGEDILWAMYTLGFENYSETLKIYLAKYRQYEQEQLSLKPPRKKIRKRKTKSSLSQTQSKEQVDQDQDFQQIEQQYDDGEEEEEESENEEGDMSNIESNLILQNLPEYSDDYFDDEDEEEDRQQQREENSDNEPQQHHGDDSQPINLQPQLPSSAVPSLPTQQQQQFSDINPTTESNQQESFFTTQYYPNQTQYVNAAPLPTNPQPRQYQNQNQPNNYQNDQRQNDKQRIIPDLLNITNSYSEDEFI

SEQ ID NO: 250 - protein, 1549 aa, Cyanidium caldarium
MISISKRTSIARINLSEFHTISKIDRYPWLNKEKDACGVGFIAHLDNKFGHKLMMNALEALATMEHRGACSADEESGDGAGILFSIPWKFFVEWSLRYKQFKINISQAAVAMLFLPCLSSDIQVSKNIVEEIFQDEDFIVIGWREVPYVKEVLGPLALRNMPQIYQIVVQSKRYQGRSLDFHLYRVRRKIEKEITVRAYSWAKDFYFCSCSNHTIVYKGMVKSTSLGQFYQDLYNPDFEISFAVFHRRFSTNTMPRWPLAQPMRILGHNGEINTLLGNLKWMEARESSLNHPTLNEVASIGPVVNVSNSDSANLDSVVELFLHVGHSCPEALMFLIPEAYENNPKLKYHQNLISFYEYCAGFQEAWDGPALIVFSDGHTVGASLDRNGLRPARYCVTEDNVLILASEGGVLNLDPSLIRLKGRLGPGEMIVLDLQEKLLMSNLEIKNKIASLRPYSDWIKQNRQVLIPTSFLTSTTLPLQEVFKRQTCFGYTSEDIELVIENMAIQGKEPTFCMGDDTPLAVLSGKSHVLYDYFKQRFAQVTNPPIDSLRESLVMSISSYLGSKTNSFEESSEKILKIKTPILSENDLVLIKNSELLTETLVTTFEAHFDSPQANGQSLFSTINQLCKQAKNLIQAGTKIIILSDKVCFESRTESYIPPLLVVGSLHQYLIKQGVRQKVSLIVETGQCWSTHHFACLLGYGASAVCPYLALETVRHWWMSERTQNLMSKGKMPNLTLIEVQNNYCKSVERGLLKILSKMGISLLTSYIGAQIFEILGLGKEVVDLAFEGTVSRIGGLSFADLAMETIDLCSAGFSKLNKKKLDNHGFVQYRPGGEYHLNNPEMSKALHKAVRENNYTLYEAYKQLLANRPPTNIRDLLEFNFRSCSVPLEKVENIFEITKRFCTGGMSLGALSREAHETLSIAMNRIGGKSNSGEGGEDSLRFTVLTDVDETGNSPSFPHLKGLKNGDSLSSAIKQIASGRFGVTPEYLVNAKQLEIKISQGAKPGEGGQLPGKKVSPYIATLRACKPGVTLISPPPHHDIYSIEDLAQLIFDLHQVNPECKVSVKLVSEIGVGTIAVGVAKAGAEIIQISGHDGGTGASPLSSIKHAGVPWELGLHEVHCLLVENNLREKVILRVDGGLRTGQDVVMAALLGADEYGFGTIAMIAGGCIMARVCHTNSCPVGVATQKEELRMRYPGVPENVVNYFIFLAEEIRVILSKLGFETLSQIIGRKDLINHNFDKKLCKTHCIDTSIFFNIKTNEYNFLEIPGGHSKKLKTSLLDYELLNSSDILYAIDNHKTLEKHIKISNSDRSVGAKLAGRLAKQYKNEGFRGSLILNFYGTAGQSFGSFNIKGVTLRLIGEANDYVGKSMSGGEIVIVPPSEVAFDASEQVILGNTCLYGATGGFLFAYGAAGERFAVRNSNAFSVLEGVGDHACEYMTGGRVVVLGKAGRNIAAGMTGGIAYFLDEYSNLPEKVNLDIVRIQRVVTNEARKQLIQLIEKHVLKTGSKKAVLILQQWEIFIHYFWQIVPPSESETSETNYFVENKVLAN

SEQ ID NO: 251 - protein, 1831 aa, Beta vulgaris
MQNANNRHMFLDKIVTAVAATEDPQTVQTLLESAAEIMVAVDINCQLFLSSLILLVDKLDNPHLTVRVTTARLINQSCYFHLQGGFELVLSKVAHIQNEIYEYLCLRLVSRPKLVREFAEAVLGIETNQLVDKMIPVVLPKFIVSLKNDDQLVALLNELAKVLNTDMLKMIVNSVHKVLAYAFQQSDRNELLSVLEFYRARTETNEQELFAAVFPALLEDWVCFVDGDDLDEISKRTLCMHAMLVRVPQMIKEVAKILTGSEDLPGFLKNHFVHLLNSIDKKMLRAKDVFWQKQAIKRIEMLIKLMGPHLSTYVPQLMVLLMQAIEKESLRSEGLSALHFFIKQLAMLSPSSAKHVIFQVFAALIPFLEKEKDKPSMHLEKIVDILEELVCENKAVLKQHIREFPLLPSIPALVKVNQVIQEARGSMTLKDQLRDAADGLNHENLNVRYMVACELSKLLKLKKEDVAAAIATELGLDFTVLSSLITSLLRGCAEESRTSVGQRLKLVCADCLGALGAVDPAKVKAASCQRFKIQCSDDDLIFELIHKHLARAFRAAPDTSIQDSAALAIQELLEIAGCAPGSEGSNHCQVMSGRGQRLWDRFSNYVKEIIAPCLTSKLKLPNASDSTSPGAIYSPSLSFRSWIFLWIKKLILDATGSRANIFNACRGIVRHDMQTAIYLLPYIVLDVVCHGSEAARSGITEEILSVLNAAAAENSGAAVHAIGGGQGEVCIQAEIALSHSLSSVSSRQASKLGNVSSNSTTDMDQLRAQCKYVSELLDAIPKVTLARASFRCHAYARSLMYFESHVRGKSGSFNPAAERSGNFEDEDISFLMEIYSGMDEPDGLSGLASLKKSVSLQDQLLINKKAGNWAEVLTSCEQALQMEPTSVQRHSDVLNCLLNMCHLQTMVTHVDGLISRNSQYRKTWCMQGVQAAWRLGKWELMDEYLNGADKEGLQCSISDSNASFDMDVAKILQAIMEKDQFTVDERIGKSKQALIAPLAAAGMDSYARAYPFVVKLHLLKELEDFHGLLVGHSFLEKRFHLGDPEFFKVIENWDNRLRFTQPSLWAREPLLAFRRLVFGASDLGAQVGECWLQYAKLCRSAGHYETANRAILEANSSGAPNVHIEKAKLLWSMKRSEGAIAELQQSLLSMPMEVVGSAAISSITSLALIPLNPQSLHADTQASNENPSIAKTLLLYSRWIHYTGQKQKDDVMSLYSRVRELQPKWEKGYFYVAKYCDEVLVDARKRQVEDVDTNVRISSAAAIIGNNLNAEKPWWVYLPEALLFYAKGLHRGHKNLFQALPRLLTLWFDFGSVYQQIGPSNKDLKNVHGKVMSIMRGCLKDLPAYQWLTVLPQLVSRICHQNEEIVRLVKHIITSVLRQYPHQALWLMAAVSKSAVPSRRQAAAEILQAARKGTSPNSNRSDLFSQFTSLIDHLIRLCFHGGQSKARTINILTEFSALKRMMPLGIIMPIQQSLTVNLPAFDTILTDSSNIFSDTDIPTIAGIADEAEILSSLQRPKKVVLVGSDGIERAFLCKPKDDLRKDARMMEFNAMINRLLSKCAESRRRKLYIRTFAVIPLTEDCGMVEWVPHTRGLRHILQDIYITCGNFDRQKTNPQIKRMYDQCQGKMQEDEMLKTKILPMFPPVFHKWFLKTFAEPAAWFRARIAYAHTTAVWSMVGHIVGLGDRHGENILFDSTTGDCVHVDFSCLFDKGLLLEKPELVPFRLTQNMIDGLGITGYEGVFLKVCEITLSVLRSHRETLMSVLETFIHDPLVEWTKSHKSSGVEVQNPHAQVWLSLLHTQSFAWFREVFVGRRPTAQGHHKFASIATPEID

SEQ ID NO: 252 - protein, 1578 aa, Bradyrhizobium sp. ORS278
MSGSKVEHGKLGGAVLAVDSHEKPAEITRELHTWRPEAEGLYDPSQEKDSCGVGFIANIKGQKSHQIVSDALNILCNLEHRGAVGADPRFGDGAGILVQIPHAFFSRKAGELGFTLPAPGEYAIGALFMPRDDSWRNVIKSIIADQIEDEGLVLLGWRDVPTDNSSLGVTVKPTEPRSMQVFIGRNGAAKTEDEFERKLYILRKSISQAIYQRRDRGMSGYYPCSMSCRTVIYKGMFLADQLGKYYADLHEPDFESALALVHQRFSTNTFPTWSLAHPYRMIAHNGEINTLRGNVNWMAARQASVSSELFGKDISRLWPISYEGQSDTACFDNALEFLVQGGYSLPHAVMMMIPEAWAGNPLMSEERRSFYEYHAALMEPWDGPAAIAFTDGRQIGATLDRNGLRPARYLVTKDDRIVMASEMGVLKIPEDQIVTKWRLQPGKMLLVDLEEGRLIPDDEIKAQLAASHPYQEWLTRTQIQVEKLPDAPTKGARTNLPLLDRQQAFGYTAEDINILMTPMAATGEEATGSMGNDAPISALSDKPKLLFTYFKQNFAQVTNPPIDPIREELVMSLVSIIGPRPNLFDLEGVASTKRLEVHQPILTDADLEKIRSISEVSDSHFVSRTLDTTFDASLGAAGFEQVLEDLCGRAEAAVREGVNIIILSDRMVSNDRIPIPSLLACAAVHHHLIRTGLRTSVGLVVESGEPREVHHFACLAGYGAEAINPYLAFETIIALKDKLPGALSDYEVVKRYIKSIGKGLLKVMSKMGISTYQSYCGAQIFDAVGLKAEFVQKFFYGTHTRVEGVGLAEIAEETTRRHRDAFGDALVYKSALDVGGEYAYRTRGEDHAWTAESVATLQHAVRGNSKDRYQAFAKLLNEQSERLLTLRGLFRIKSAEDDKRKPVPIDEVEPAKEIVKRFATGAMSFGSISREAHTTLAIAMNRIGGKSNTGEGGEEADRFKPLPNGDSMRSAIKQVASGRFGVTTEYLVNSDMMQIKMAQGAKPGEGGQLPGHKVDATIAKVRHSTPGVGLISPPPHHDIYSIEDLAQLIYDLKNVNPDGQVSVKLVSEVGVGTVAAGVAKARADHVTIAGFEGGTGASPLTSIKHAGSPWEIGLAETHQTLVRERLRSRIVVQVDGGFRTGRDVVIGALLGADEFGFATAPLIAAGCIMMRKCHLNTCPVGVATQDPVLRKRFTGQPEHVINYFFFVAEEVREIMASLGYRSFNEMVGQVQMLDQSKLVAHWKAKGLDFSKLFVKQKEAPGQKIFHSEKQDHHLDAVLDRRLIEQARPALDRGAPVKIEAEINNTDRSAGAMLSGAVAKIYGHAGLPQDTIHVSLKGTAGQAFGAWLANGVTFELEGEGNDYVGKGLSGGRIIVKPPRNSGIVPEESIIVGNTVMYGAISGECFFRGIAGERFAVRNSGAVAVVEGAGDHCCEYMTGGIVVVLGKTGRNFAAGMSGGIAYVLDEAGDFDKHCNMAMVELEPVLSEEMIAEDTYHQMGDLEAHGRVDVFKNLLASDVERLHVLISRHAKATGSKRAADILANWKDFAPKFRKVMPVEYRRALKEMAANADAEPKIAIGA

SEQ ID NO: 253 - protein, 1523 aa, Clavibacter michiganensis subsp. sepedonicus
MAFSSTSPPGGSFPATQGLYDPAFEKDACGLAMVATLRGTPGHDIIVNALDALRNLEHRGAIGSDAGTGDGAGIMTQIPDEFLRGVVGFDLPPMGEYAVGMAFLPTDDAEREELEAGIERIAGDERLHVLGWREVPVDPSHLGNLARKAMPAFRQLFLTSDSAQPSDRPSGLALDRLAFRLRKRAERELGAYFISLSSRTLVYKGMVTTLQLEPFYPDLSDERFASKLAIVHSRYSTNTFPSWPLAQPLRMMAHNGEINTVAGNRNWMRARQSQLESELLGDLAPLMPIVTPGASDSASFDEVLELLSLSGRSLPHAMMMMVPEAWEKQTDIDPVRRDFYEYHSMVMEPWDGPAALTFTDGTLVGATLDRNGLRPGRYLVTHDGLVVLGSEIGVLEIDPARIMRKGRLRPGKMFLVDTEAGRIIEDDEIKSQLAASAPWGEWLENRIHLADLPEREHVVHTPASVVRRQRTFGYTEEEVRMLVMPMAKVGAEPLGAMGSDTPIAVLSQRPRLLFDYFTQQFAQVTNPPLDSIREEVVTSLRLGLGPQRNLLDAGPEHTKQVVLDFPVIDNDELAKVIHIDHRPGSRTTTIVSGLYRVDDGPLAMQKRIDAMCDEVDRAIAHGAQFVVLSDRDSNRDLAPIPSLLMIAAVHHHLIRKQTRMKVGIVVEAGDVREVHHIALLIGYGASAINPYLAMESCEDLVRSGMLTGVTPEKATRNLIKGLGKGVLKIMSKMGISTVSSYAGAQCFEAVGLSQGLVDQYFSGTTTRLGGVGIDVIAAENAARHRSAYPQDGAVLSHERLQTGGEYQWRRDGSPHLFNPDTIFRLQHATRTRRYDIFREYTSMVDAQSKDLMTLRGMFRLKTGTRPPVPLDEVEPISDIVKRFSTGAMSYGSISEEAHETLAIAMNRLGAKSNTGEGGENVERLLDPERRSSIKQVASGRFGVTSMYLTHADDIQIKLAQGAKPGEGGQLPPGKVYPWVARTRHATAGVGLISPPPHHDIYSIEDLKQLIFDLKRANPSARIHTKLVSQSGIGAVAAGVAKALSDVILVSGHDGGTGASPVNSLKHAGTPWELGLAETQQTLRLNGMRDRVVVQVDGQMKSGRDVIVGALLGAEEFGFATAPLVVSGCIMMRVCHLDTCPVGVATQNPELRKRFPGKADHVVNFFEFIAQEVREHLAALGYRALDEIVGRNDLLGVEDAVDHWKASGLDLTPILAGPTFADDEPMKHSRSQDHELDDHFDNELIRLSRDVLDHGGRVEIDLPVRNTARAVGTMLGHLVTKGHGEDGLPTGSIDVTLRGSAGQSFGAFMPSGITLRLVGDSNDYLGKGLSGGDIVVRPDERAGFPAEENVIAGNVIGYGATQGTMFIRGMVGERFLVRNSGATAVVEAVGDHALEYMTGGLALVLGGTGRNIGAGMSGGTAYVIDLDRDRINTDALASGELELHPLGSADAEIVLDLLRRHLAETGSTVAERLLAEPETSMERFTKILPRDYAAVLATRQTAVDEGLDPDGDVAWNRILEVTGG

SEQ ID NO: 254 - protein, 1468 aa, Prochlorococcus marinus str. MIT 9312
MEHRGGCGGDSDSGDGAGILCSIPWKYLEEKMNLQNKKDFVRGLGMVFMPNKKEKIEECKTICEEEAKKLKVKNTFWRTVPVHNEILGPLAKANAPFISQWILYIDKKDNQDIERLLFQLRKRIEKKIRVTFKNHVGDCEFYFASLSSQTVVYKGMVRSEILSEFYQDLKEDSFKVSFSVYHRRFSTNTLPKWPLAQPMRFLGHNGEINTLLGNINWAKASEKHIDDFWGELSNEIKPIVDVNKSDSSNLDATLEINIRSGQPITDSLLKLVPEAFRGQPELEQREEIKAFYEYSASLQEAWDGPALLVFADGNFVGATLDRNGLRPARYSITNDGFVIMGSETGVVDLEEEKVIEKGRLGPGQMLAVDFHQNRILRNWEVKSEAAQRHHYKKLLNKRTIKIDNHEWLKDCKLKDLELLQQQTAYGFSAEDNDLILDSMASLAKEPTYCMGDDIPLAVLSSKPHILYDYFKQRFAQVTNPPIDPLREKLVMSLEMHLGERCTPFEIKDPKPFVHLKSPILNEEELISIKNSKIKSQTISSLFDIEEGVQGLENQLKAICKQSELSIEEGCSLIIISDKGINPKKTFIPPLLAVGSIHHYLLKKEIRLKASLIVETGQCWSTHHLACLIGYGASAVCPWLTFEAGRHWLKHPKTQKLIDSKKINTLSIIDVQENIKKALEDGLRKILSKIGISLLSSYHGAQIFEAVGLGSDIIKIAFDGTTSRIAGITLKELTNETLSIHTKAYPEIDLKKLEFLGFVQFRNNGEYHSNNPEMSKVLHSAVKQGPGYDHFETYKQLISNRPTTSLRDLLTISSKRKSIPLEKVETVESICKRFCTGGMSLGALSREAHEVLAVAMNRIGGKSNSGEGGEDPARFNVLNDINANTQSATLPFIKGLRNGDTACSAIKQIASGRFGVTPEYLRSGKQLEIKMAQGAKPGEGGQLPGPKVDSYIAKLRNSKPGVALISPPPHHDIYSIEDLAQLIHDLHQVHPKAKVSVKLVSEIGIGTIAAGVSKANADVIQISGHDGGTGASPLSSIKHAGLPWELGVAEVHKSLLDNNLRERVILRTDGGLKTGWDVVIAALLGAEEYGFGSVAMIAEGCIMARVCHTNKCPVGVATQKEELRKRFKGIPENVVNFFLYIAEEVRQIMSSIGVANMEELIGNQEFLSTRNIGLPKTSNIDLSSLVNNECSNNDRSWLKHSKNAHNNGSVLEDEFLSDAEFIDSIKNHEKLTKEIKIKNTDRSVCAKISGEIAELHGNTGFNGELSLNFKGYAGQSFGAFLLKGMNIQLIGEANDYVCKGMNGGILTIIPPKIDKSSSEQVILGNTCLYGATGGKLFALGKSGERFAVRNSGATAVTEGAGDHCCEYMTGGKVIILGSAGRNIGAGMTGGIAFILDENNDLSNKVNKEIVSIHKITSSKQEEILLEIIREYLAKTNSLKAAKIIENWSFFKSAFKLIVPPSEEEMLGIK

SEQ ID NO: 255 - protein, 1560 aa, Synechococcus sp. CC9311
MGESLGSEIAQPATECERRCCCTSRLQVMTQLTGSDWPYCDSSAPAAVAGEKDACGVGFLAQLQGERSYWVLQQALRGLGCMEHRGGCGGDGDSGDGAGVLCEIPWDYLRAIWPEAANGNGLGMMFLPKDPSLRAEVQRFCDQEAQSLGLMSIGWREVPIDSAVLGPLARETAPVIQQWLVQRDVDADALESLLLRLRRRVGARVRKEFGAEGAREFYVASLSGRTVVYKGMVRSEVLAQYYADLRDPRFAVSFAVYHRRFSTNTLPRWPLAQPMRLLGHNGEINTLLGNLNWAKASEAGLEDVWGDAAADLIPVVNPDFSDSANLDATLELMVRSGRSITDSLITLVPEAFRNQPDLESRPDVTAMYEFNAGIQEPWDGPALLVFADGKRVGATLDRNGLRPARWCTTADGFVIMGSETGVVDLSGKTVVEKGRLGPGQMVAVDLERGELLTNWAVKEDAAQRFPYGDWLKQHRRSVSAQPWTQDCQISELDLLRLQTAMGFTAEDLDLVIEDMAGLGKEPTYCMGDDIPLAVLSDKPHLLYDYFKQRFAQVTNPPIDPLREKLVMSLEMHLGQRRPAVKPQAAAAALIHLDTPVLNEAELSALSDQGLAVRSLSTQVAVEACAGGLQSAVDALCLKAEDAVRKGAQVLVLSDRVNAEEQPAELMATTVAMPALLAVGAVHHHLLRQKLRLHCSLVSETAQCWSTHHMACLIGYGASAVCPWLTWETTRHWLAHPKTQKRIEQGKLQPLDANKAQANVRLSLENGLRKILSKIGISLLASYHGAQIFEAIGLGADVIQKAFAGTTSRVAGMTLLELANETLSLHAKAFPELNRSKLEFMGFVQYRTGGEYHLNSPEMSKALHSAVKAGPGYDHFSTYKTLLENRPVTALRDLLEFKLAATPLPLDQVESAESLCTRFCTGGMSLGALSREAHEVLAVAMNRIGGKSNSGEGGEDPIRFQILKDVDGDGRSSSFPSIGGLRNGDTACSAIKQIASGRFGVTAEYLRSGKQLEIKVAQGAKPGEGGQLPGPKVDEYIAGLRNSKAGVALISPPPHHDIYSIEDLAQLIHDLHQVHPKAPVSVKLVAEIGIGTIAAGVAKANADVIQISGHDGGTGASPLSSIKHAGSPWELGLTEVHRSLLENGLRDRVLLRADGGLKTGWDVVVAALLGAEEYGFGSVAMIAEGCIMARVCHTNNCPVGVATQKAALRKRFTGVPEHVVNFFWYVAEEVRQLMSVLGVARLEDLIGRSDLLQPRSVELEKTKCVDLSSLLAPVGDANDRSWLKHSSEAHGNGPILEDHLLADADFMDAVENHGSLSRTIEIVNTDRSVGARFAGEIAQRHGNRGFKGQLNLNFRGAAGQSFAAFLVQGMTMRLEGEANDYVGKGMNSGRISLVPDDGVANPGDQVILGNTCLYGATGGELFANGRAGERFGVRNSGARAVVEGAGDHCCEYMTGGVIVVLGGTGRNVGAGMTGGVAFLLDEAGGVKARVNPEIVEVVGITTPQQESLLKSLLEAHVSTTSSEKAKALLADWTNAKSSFKLLVPPSERAAMGLEAREVVAA

SEQ ID NO: 256 - protein, 2119 aa, Yarrowia lipolytica CLIB122
MDHEEQQEYNPISYNENNGSWAGALPTKQGLYDPEYEKDACGVGFACNIKGQQSHKIISDAKNLLCNMTHRGAVGSDARDGDGAGVMTSIPHKFIKKEFKRLYDFELPPMGQYACGNLFFKNDQDVLAKSKDTFESIAKSLGLEVLGWRFVPRDSSILGPAALSREPLILQPVVVLSEAFKSGPHTEDEWDSKFEKLFELQLYVLRKQSTHTIGLHNWFYICSLSNKNMVYKGQLAPVQVYNYYYDLLNVDYEGHFALVHSRFSTNTFPSWDRAQPLRWAAHNGEINTLRGNKNWMRAREGMMKSGLFGDELERLYPIVEEGGSDSAAFDNVLELLVINGVLSMPEAVMMMIPEAWQNNTTMDSKKRAFYEWAACLMEPWDGPALFTFADGRYCGANLDRNGLRPCRYYITDDDRMICASEVGVILIESEKVIQKGRLRPGRMLLVDTKEGRVVDDRELKKKIAGRVDFKSWIHANVITMEDMRQKVESKMPSILEVKIDELSVQSDPRLPAFGYTAEQLSLLLAPMAATAKEALGSMGNDGPLACLAKQPKVLFDYFRQLFAQVTNPPIDPIREAIVMSLECYVGPQGNVLEMNPSQCNRLLLPSPILTIQETAMLHEMHRHYPKWTTDTIDITFDKSEGPAGYLKALDRICEEASNSIHAKHQIIILSDKKTSADRVPVSSVVACGAVHHHLVQQKQRSRVALIVETAEAREVHHFCVLLGYGADAINPYLAIETLAKMNREGLIKEPLSDDQIVANYKTAVDGGILKVMSKMGISTLASYKGAQIFEILGIDNSVVDKCFAGTASRIKGITFDFIAEDAIALHERGFPSRETVKTKSLPESGEYHYRDGGDPHVNTPVAISNIQDAVRNKNEKAYEAYSKAEYEAIKDCTLRGLLDFDFDAATPVPIDQVEPWTEIVRRFVTGAMSYGSISMESHSTLAVAMNRLGGKSNTGEGGEDPERSAVAENGDTMRSAIKQIASGRFGVTSYYLSDADELQIKMAQGAKPGEGGELPGHKVSEQIGKTRHSTPGVGLISPPPHHDIYSIEDLKQLIYDLKCSNPRSRVSVKLVSEVGVGIIASGVAKAKADHILISGHDGGTGASRWTGIKYAGLPWELGLAETHQTLVLNDLRGRVTVQTDGQIRTGRDVAIACLLGAEEWGFATTPLIAMGCIMMRKCHLNTCPVGIATQDPELRQKFKGTPEHVINFFYYIANELRGIMAQLGFRTIDEMVGHAEMLRVRDDLRNHKTKNLDLTPILTPAHTLRPGVATRKVRKQDHRLHVRLDNKLIDEAEVTLDKGLPVTIDCDIINTDRSLGSTLSYRISKRFGEAGLPDDTVHVNVKGSAGQSFGAFLAPGITLELEGDCNDYVGKGLSGGRIVVYPPKNSVFKAEENIIVGNTCLYGATSGTCFFRGVGAERFGVRNSGATAVVEGCGDHGCEYMTGGRVVVLGSTGRNFAAGMSGGIAYVLDMGQEFVNNVNSETVELGPVSDPQEIAFLRGLIEDHRHYTGSELADRVLTDFNRILPRFVKVLPTDYARVLEEQAAKVAEAKKREVSGYMHAIKEDPDADITNGELKRAATPKPCATPRSRKEPPVQDLEDAILDHNATKAKASKLVKLDKTRGFMKYTRRAEKYRDAKNRTKDWDEMNTRLTKEELKYQTARCMDCGVPFCQSDTGCPISNVIPKWNELVFQDRWQDALDRLLMTNNFPEFTGRICPAPCEGACVLGINEDPVGIKSIECAIIDHGFEQGWIKPKPPATRTGKTIAIIGSGPAGLAAADQLNKAGHSVTVYERADRIGGLLMYGIPNMKLDKRVVERRVQLMRDEGVTFITNTEVGEDKEVSVSGLRADNDAVVLCVGSTIPRDLPIKNRSLNNINFAMQLLRWNTKSLLDGDMDEVRESLKDKHVVVIGGGDTGNDCLGTSTRHGAKSVTNFELLPRPTPARPKDNPWPQWPRIFRVDYGHTEVAAHYGKDPREYGILSKEFVDDGEGNVKGIKTVRVEWKQSESGAWQMSEIPGSEEFFPADVVLLSMGFVGPEAQELAAERDGRGNIKTQTGDVKDLGLYKVQDNLFTAGDCRRGQSLVVWGIQEGRQCARAVDHFLMGCTRLPGNGSIEQRDLKLK

SEQ ID NO: 257 - protein, 1523 aa, Prochlorococcus marinus str. MIT 9301
MGESIKRIVSPYQDSYSPNGIIGEKDACGVGFIANIKGVESNWILKQSLKGLNCMEHRGGCGGDSDSGDGAGILCSIPWGYLEEKINLENTQEFNRGLGMVFMPNKKEKIEICKSICDEEAEKLKVNKTYWRTVPVNNEILGPLAKANAPFICQWILYIDKKNHQDVERLLFQLRKRIEKKIRETFKNDVGDCEFYFASLSSQTVVYKGMVRSEILSEFYQDLKEESFKVSFSVYHRRFSTNTLPKWPLAQPMRFLGHNGEINTLLGNINWAKASETHIDDFWGDLSNEIKPIVDVNKSDSSNLDATLEINIRSGQPITDSLLKLVPEAFRDQPELEQREDIKAFYEYSASLQEAWDGPALLVFADGNFVGATLDRNGLRPARYSITNDGFVIMGSETGVVDLEEERVIEKGRLGPGQMLAVDFHQNRILRNWEVKSEAAQRHDYKNLLSSRTIKIENNKWVKDCKLKDLELLQQQTAYGFSAEDNDLILDSMASLAKEPTYCMGDDIPLAVLSSKPHILYDYFKQRFAQVTNPPIDPLREKLVMSLEMHLGERCTPFEIKDAKPFVHLQSPILNEEELISIKKSTIKSQTISSLFDLEEGTQGLENQLNAICKQSELSIKEGCSLIIISDKGINPKKTFIPPLLAVGAIHHYLLKKEIRLKASLIIETGQCWSTHHLACLIGYGASAVCPWLTFEAGRHWLKHPKTQKLIDSKKINPLSIVDVQENIKKALEDGLRKILSKIGISLLSSYHGAQIFEAVGLGSDLIKIAFDGTTSRIAGITLKELTNETLSIHTKAYPEIDLKKLEFLGFVQFRNNGEYHSNNPEMSKVLHSAVKQGPGYDHFETYKKLISNRPTTSLRDLLTINSKRKSIPLEEVESVESICKRFCTGGMSLGALSREAHEVLAVAMNRIGGKSNSGEGGEDPARFNVLNDIDENTQSATLPFIKGLENGDTACSAIKQIASGRFGVTPEYLRSGKQLEIKMAQGAKPGEGGQLPGPKVDSYIAKLRNSKPGVALISPPPHHDIYSIEDLAQLIHDLHQVHPKAKVSVKLVSEIGIGTIAAGVSKANADVIQISGHDGGTGASPLSSIKHAGLPWELGVAEVHKSLLENNLRERVILRTDGGLKTGWDVVIAALLGAEEYGFGSVAMIAEGCIMARVCHTNKCPVGVATQKEELRKRFKGIPENVVNFFLYIAEEVRQVMSSIGVSNMKELIGNQEFLSTRNIDLPKTSNIDLSSLVNDHSTPDRSWLKHSKTAHSNGSVLEDEFLSDTEFIDSIKNHEILTKEIEIKNTDRSVCAKISGEIAELHGNTGFNGELNLNFKGYAGQSFGAFLLKGMNVQLIGEANDYVCKGMNGGILTIIPPKINEISSEQVILGNTCLYGATGGKLFALGKSGERFAVRNSGATAVTEGAGDHCCEYMTGGKVVILGSTGRNIGAGMTGGIAFIIDENNDLSSKVNKEIVSIHQITSSKQENILLEIIREYQAKTNSLKAAKIIENWSHFKSTFKLIVPPSEEEMLGIKKM

SEQ ID NO: 258 - protein, 190 aa, Arabidopsis thaliana
MGDSDRDSGGGQNGNNQNGQSSLSPREQDRFLPIANVSRIMKKALPANAKISKDAKETMQECVSEFISFVTGEASDKCQKEKRKTINGDDLLWAMTTLGFEDYVEPLKVYLQRFREIEGERTGLGRPQTGGEVGEHQRDAVGDGGGFYGGGGGMQYHQHHQFLHQQNHMYGATGGGSDSGGGAASGRTRT

SEQ ID NO: 259 - protein, 526 aa, Burkholderia mallei ATCC 23344
MLAARHTISWLWIVPVAALVALGLYDLNQDRHAILRNYPLWGHLRFLFEFIRPEIRQYFVEDDTDEKPFSRAQRSVVYQRAKNVADNRPYGTELDVKAVAHEWISHSLAPTKLDGHDFRIRVGATRKQPYDISIFNISAMSFGALSANAIRALNLGAKQGGFAHDTGEGSLSKYHREHGGDIIWEIGSGYFGCRRDDGTFDPEKFAKQAREPQVKMIEVKLSQGAKPGHGGVLPAAKITPEIAEMRGVPMGKDCVSPAAHSAFSTPRGLLEFVDRLRELSGGKPTGFKLCVGHPWEFFGIAKAMLETGIVPDFIVVDGAEGGTGAAPLEFTDHVGVPLQEGLLLVHNTLVGIGLREQVKLGASGKIITAFDIARTLAIGADWVNSARGFMFAVGCIQAQHCHTDRCPTGVATQDPVRQRALVVPDKADRVYNFHRNTLHALQELVQAAGLSHPSELRAHHIVQRVAPHEVRLMSQLLKYLEPGALLNGGHCGFSLYETWWPLARGDSFSPGEGAYARVGTGAPARP

SEQ ID NO: 260 - protein, 1478 aa, Bacillus cereus ATCC 10987
MLNKTNTWTPSLFRDYKNAEHDACGIVSVMEKRKIPTKENIDLCIQSLVKMNHRAGFINGEGDGIGIHIDVPKALWNEKLKSSGYNPTIVDHPHFIVGHFFLNKNENIVNLKNHIRTQLNNENFAILFESDDVINSDALGPLGKQEEPLFWQVALIAENEVTNIEQTLFTVTIKIEENEAIHVASLSRDHVVYKVLGAGDTLVAYYNDLQHPLIASTMTLGHNRYSTNTLSNFFRVQPFSILGHNGEINTIAKLRDQAEMIHVPLTAGGSDSQDLNRTLETLLVQYNYSLFEAMDILFPPIINEIKLYEPHLQDLYTYIREAWGHFAQGPAGIISRYKDEAVFSVDSLGLRPVWKVETESSYIFSSEPGVVSPTEYVAEPKPLAPGEKVGLKWNEQDELVLYAYDKYQAQVYDRFKKRVDTKDYHLNLSTPETKEIQGLCDSMQVETKQYVAFGWDREHIQLLEQMATKGVEPIRSLGHDSPLAALDTDRRNIADFIKESVAVVTNPAIDRDREVEHFSTRTILGKRPSLLAGAKQPFVVEMLSPIILEGSVAQSIVEELHTITYEQLIQLFNTHSSIATISATFSQAETLQCALSRISSEAITAVNDGASLLLIDDADAHLNGRLWIDPHLVTAKVHQVLSENKLRRNCSLVIRSGALRSLHDIVTLYGLGADSINPYLLFATVNDGTKTPITNLYHALNKGLEKVISTIGIHELRGYGRLYSSIGLHEEIANILQITNFLGSNDLAFSLESLAEDAQMRANDYNNPKVRMRKSFHIFPRIWKAIGDVAKGNSYDDYREKLSELEENNPIAIRHLVQTKETKHVVPAEEVSISIQNHDLPFIISSMSFGSQNEIAFRAYAEAADQLNMISLNGEGGEIKDMIGKYPHTRGQQIASGRFGVNAELLNSSNLIEIKIGQGAKPGEGGHLPGSKVTAKIAEARNATIGSDLISPSNNHDIYSIEDLAQMITEIKTANQLAKVAVKVPVVPNIGTIAVGIAKAGADFINISGFDGGTGAARIHALQHVGLPVEIGVKAAHNALLEANMRHKVEIWADGGIRSVNDALKIMLLGANRIGFGTLSMIAIGCTTCRGCHLDTCHVGIATQIESEAQAKEHGLRRFVPRELESAVAGLLHLFTTFGEELKRLTGNLGYTNLQEIVGRSDLLKQVRGKNLLNLCNLLQTIEHPSSTKTEHVLEKQFETIHSPHSKELVGVGVEQRVMGGLESCYRVRSKLYEDTKLEPLTLKYTNGSIPGNGLGAYNSENLFIHVNGGAQDGIGKTSFGGGIYITKAKGKDGLYYNGSVGKGFGYGAQKGALYVQGNADARAGIRLSGADMIIGGRMIKPLREKEQGNIGAYSNIKGFAFEYMTNGRALVLGDPGPWICAGMTGGVVYLRHDSSLGLTEQALKRRIAKGANVTLQPLSKNGVQDVTELLLDYIRVLNEHEQYEEVALLTPLLDDMPQQFFEIIPKKEQADPSISTE

SEQ ID NO: 261 - protein, 1481 aa, Pseudomonas putida KT2440
MKTGLYHPEEFKDNCGFGLIAHMTGEPSHHLLQTAMQALTCMTHRGGINADGKTGDGCGLLMQKPDQFLRAMAQEHFAVELPKQYAVGMVFFNQDPVKAEAARANMDREILAAGLKLVGWRKVPIDTSVLGRLALERLPQIEQVFIGGEGLSDQEFAIKLFSARRRSSVANAHDADHYICSFSHKTIIYKGLMMPRDLAAFYPDLGDERLQTAICVFHQRFSTNTLPKWPLAQPFRFLAHNGEINTITGNRNWAVARRTKFANDQIPDLEELGPLVNRVGSDSSSMDNMLELMVTGGIDLFRGVRMLVPPAWQNVETMDADLRAFYEYNSMHMEPWDGPAGIVMTEGRHAVCLLDRNGLRPARWVTTTNGYITIASEIGVWGYQPEEVLAKGRVGPGQILAVDTETGQILDTDAIDNRLKSRHPYKRWLRQHATRIQATLTDDQGVASYDADQLKQYMKMFQVTFEERDQVLRPLGEQGQEAVGSMGDDTPMAVLSQRVRSPYDFFRQQFAQVTNPPIDPLREAIVMSLEICLGAERNIFQESPEHASRVILSSPVISPAKWRSLMNLEREGFDRQLIDLNYEQSVGLEAAIRNIADQAEEAVRGGKTQLVLSDRYIAPGKLPVHASLAVGAVHHRLTEQGLRCDSNILVETATARDPHHFAVLLGFGASAVYPYLAYEVLADLIRTGEVLGDLDEVFKYYRKGISKGLLKILSKMGISTIASYRGAQLFEAIGLAEEVVGLSFKGVSSRIKGARFEDLENDQKLLAAEAWSARKPIQQGGLLKFVHGGEYHAYNPDVVNTLQAAVQQGDYAKFKEYTTLVDQRPVSMIRDLLKVKVADQPLALEQVEPLEAILKRFDSAGISLGALSPEAHEALAEAMNRLGARSNSGEGGEDPSRYGTIKSSKIKQVATGRFGVTPEYLVNAEVLQIKVAQGAKPGEGGQLPGGKVNGLIAKLRYAVPGVTLISPPPHHDIYSIEDLAQLIYDLKQVNPQALVSVKLVAEAGVGTIAAGVAKAYADLITISGYDGGTGASPLTSIKYAGAPWELGLAETHQTLRGNDLRGKVRVQTDGGLKTGLDVIKAAILGAESFGFGTAPMIALGCKYLRICHLNNCATGVATQNDKLRKDHYIGTVDMVINFFTFVAEETREWLAKLGVRSLGELIGRTDLLEVLPGDTERQQYLDLSPLLGSSHIPADKPQFCEVDKNPPFDLGELAEKMVDMAMPAIRDQAGGEFSLDICNCDRSIGARVSGEIARLHGNQGMAAAPITFRFKGTAGQSFGVWNAGGLNLHLEGDANDYVGKGMTGGKVTIVPPAGSPFETQHSAIVGNTCLYGATGGKLFAAGTAGERFAVRNSGAHAVVEGTGDHCCEYMTGGFVCVLGKTGYNFGSGMTGGFAYVLDMDNSFVDKLNHELVEIQRISGEAMEAYRSHLARVLAEYVDETGSEWGRELSENLDDYVRRFWLVKPKAANLKQLLSSTRANPQ

SEQ ID NO: 262 - protein, 1523 aa, Bifidobacterium longum NCC2705
MTFKAPLDLTVHAPDGMYDPANEHDACGVGMVTTLNKRPERKIVTDAIEVLVNLDHRGAVGAEENTGDGAGILMSMPDEFMRATVPAELPEAGHYAAGIAFLDRDIETSGQQEQAIAKIVREEGLEVLAWRVVPTNPDGLGLQALAAMPGFKTLVVASPDGALAGVDLDRKTFRIRKRVEHEVGVYFASLSARTITYKGMLTTMQLTHFFEDLNDERMKATIAIVHSRFSTNTFPSWPLAQPFRLLAHNGEINTIQGNRNWLSAREGRLSSELLGEFEPLLPITTPGYSDSGTFDECLELLHLAGRSLPHAICMMLPPAWEKNPDLDPDVRAFYEYNNTLIEPWDGPADIVFTDGTQVGALLDRNGFRPGRWQLTDDGYIVLASEAGVLPEIAQEHIVSKGRLEPGEMFLVDTAEGRIIPDEEVKRNLAAQHPYRKWVEGNSVEMSDLPRREHVSHSGQSVQRRQRAFGYTEEDLKLLLTPMANTGKEPLGSMGNDAPMPALSSRSRMLFDYFTQKFAQVTNPPLDWEREEIVTSLESAIGPEPNLLADSELHAKKILIPLPVVNSDEMAQLKRLDKARILGGYYRPYVVKGLYQVAGGGKALEERLDEIFAEIDEAIANGKNFIVLSDRESNHTWGPIPSLLLTSAVQHHLLRRHTRTQISVAVEAGDVREIHHVALLIAYGAACVNPYLAFESVEDLARNGYLKVDADTAVKNLTKALSTGVLKIMSKMGVSTIMSYRGAQLFEAVGLSQEVIDEYFTGTTSRVGGVGLEEIAEEVAIRHRVAYPNQWSASPHRNLRTGGDYKWRRTGEDHLNDPEAIFLLQQSTQRGDYQMFKKYSHHINDTSNRLMTLRGLMKFNTNRKPIDIAEVEPASEIVKRFSTGAMSYGSISQEAHETLAIAMNSIGARSNSGEGGESDDRINDPQRYSRIKQIASARFGVTSDYLVHATDLQIKLAQGAKPGEGGHLPGAKVPPWIAKVRHATPGVELISPPPHHDIYSIEDLKQLINDAKMANPKARIHVKLVSEFGVGTIAAGVAKCHADVVLISGYDGGTGAAPLNAIKHAGTPWEIGLSETQQTLILNGLRSRIVVQCDGELKTGRDVVIAALLGAEEFGFATAALIVEGCVMMRACQKNTCPQGIATQDPELRARFKGKPEYVVNFFMFIAEEVREILAQLGFRTLEEAIGHVECLDQDEAIKRWKSSGIDLSNVLKQAGPVPGTILHQTIEQNHELEKALDNKLIELAQPALEHKEPVRIEMPIRNVNRTVGTMVGYEITRRYGEEGLPDDTIDMTLHGSGGQSIGAFIPRGETMRIYGEVNDYAGKGLSGGRMIVRPEDNVTFDKHSNVIAGNVTGFGATSGQMFVAGRAGERFGVRNGGATFVVEGVGDHGCEYMTGGTVVVLGPTGRNFGAGFSGGNTYVLDLDMKKVNPGAIKSGALLFKSLDAETSKLVYALVKQHAEETGSQFAAALLEDWNETVKRFTHVVPKQFVAMTKAMEEAKANNVDFNAPGAWEKVYEQVMEGAR

SEQ ID NO: 263 - protein, 190 aa, Arabidopsis thaliana; identical to SEQ ID NO: 258

SEQ ID NO: 264 - protein, 510 aa, Methanococcus maripaludis S2
MIPSTVPPKYKVFVDPERCMLCERCTTECSWGVYRRQGNKILTYPNRCGACLRCVSLCPRDAITVTLNQSCGREHPVWTPEVKQDVVTQAKSGCILLSGMGNAKEYPIYFDKIVLDACQVTNPSIDPLREPMELRTYVGKKPEKLEFDYVEDEIDGKKVKKAKLKTKIAPNLKLDTPIMIGHMSYGALSLNAHKAMAKAVKECGTFMGTGEGGLHRDLYGYSDNVITQVASGRFGVNSEYLNKGAAIEIKIGQGAKPGIGGHLPGEKVSAEVSMTRMIPQGSDAISPAPHHDIYSIEDLAQLIRSLKEATRWKMPVFVKISAVHNVSAIANGIATSDADAVVIDGFKGGTGAAPKVFRDNVGIPIEVAIAAVDDRLREQGNRHKISIIASGGIRNSADVFKSIALGADAVYIGTAAMVAMGCTVCGRCYTGQCAWGIATQKPELVKRLEVDDAARRVANLIHAWTHEIQELLGAAGINSIESLRGNRDRLRGVGLSEIELNTLGIKQAGM

SEQ ID NO: 265 - protein, 1536 aa, Kineococcus radiotolerans SRS30216
MSHSPASHPTTTTVNPAVRPLPFTSFPPSAGLYDRAHEHDACGVAFVATMRGEPGHDIVDHALTALRNLDHRGAVGAETNTGDGAGILTQVPDEFLRAVMAEQGVELPAKGAYAVGNAFLPVDEAERAAAVARIEEIAAAEGLDVLGWRDVPVTADLVGQQARAAMPFFAQLFVATAAGVAPAPETGIALDRRVYPLRKLAERELAVYFPSLSSRTMVYKGMLTTGQLEPFFPDLSDRRFTSELGLVHSRFSTNTFPSWPLAHPFRTIAHNGEINTVKGNRNWTAARESTMSTPLIPGDLQRLGPICATEGSDSASFDEVLELLHLAGRSLPHAVLMMIPEPWENNTEMDPARRAFYEFHSMFSEPWDGPANLTFTDGTVIGGVLDRNGLRPSRYWVTDDGLVVLASETGVLELDPSSIVARGRVAPGKMFLVDTARGRIVDDEEIKAELAAAQPYAEWLKNVVHLGDLPPREHVVHSHASVTRRQQTFGYTEEELRLILAPMARAGAEPIGSMGSDTPLAVLSERPRLLFDYFAQLFAQVTNPPLDAIREELVTSLITTAGPQQNALAESAAHCHQLVLPFPVIDNDELAKIVHIDKDRRNPGRTTHTVKGLYRVAGGGAELARRIEEIRAEVSRAIADGAVFVVLSDRDSNAEYAPIPSLLLTSAVHHHLVRQKLRTQVGLVVEAGDVREVHHVALLIGYGAAAINPYLAMETVEDLVRRGVITDVDATKAVRNLIKALGKGVLKVMSKMGISTVASYRGAQVFEALGLSQTLVDEYFTATTSRLGGVGLDVLAEEVARRHRLAYPVEGQERAHRDLETGGEYQWRREGEPHLFDPETVFQLQHSTRQRNEALFRRYTARVDEQSDRLMTLRGLLQLKKGVREPVPLDEVEPVSEIVKRFNTGAMSYGSISQEAHEVLAVAMNRLGGRSNSGEGGEEVDRLYDPERTSKVKQIASGRFGVTSNYLSSATDLQIKVAQGAKPGEGGQLPGHKVYPNIARTRHSTPGVGLISPPPHHDIYSIEDIAQLIHDLKNANPAARVHVKLVSEVGVGTVATGVSKAKADVVLISGADGGTGAAPLTSLKHAGGPWELGLAETQQTLVVNGLRDRITVQVDGQFKTGRDVVVAALLGAEEFGFATAPLVVSGCIMMRVCQLDTCPVGVATQNPELRERFTGKAEYIVNFFEFIAAEVREMLASLGFRSIEEAVGHVEVLDTRRAVAHWKASGLDLSPILHAPVPPEGSTLHRSQTQDHGLEKALDHVLIERAAGALTDGTPVRVELPVRNVNRTVGTLLGHELTRKWGEEGLPEGTIDVTLTGSAGQSLGAFLPRGITLRLFGDANDYVGKGLSGGTVVVRPDRSSGSRERDIVAGNVIGYGATSGSLFLRGEVGERFCVRNSGATAVVEGVGDHALEYMTGGEVVVLGRVGRNVAAGMSGGFAHVLDLKESRVNRDMVDVVPLDDEAAARVHDLLVAHRDHTDSTTAAKLLSDWGAARQRFSTIVPRDYRRVLEVRAKAVSDGLAPDSEAVLTRIMEASHG

SEQ ID NO: 266 - protein, 2110 aa, Candida albicans SC5314
MFTIMTKFQKTNHGLLLCQWLKVYINPELEKDACGVGFTCHLKGVPSHKIVSDAKSLLCNMTHRGGELNPQDGDGAGLLSSIPHKFLKREFQYYCNVELPAKGQYGVGNVFFKKDDAVFEKSKKTFESIADSLGLKVLGWREVPHDSSILGAAALSREPYILQPAVVYKEIWGQEVSDDEFDSKYRKDFEKRLFILRKQASHTIGLHNWFYICSLSNKTIVYKGQLAPKQVYSYYHDLVNAEYESHFALVHSRFSTNTFPSWDRAQPLRLAAHNGEINTLRGNKNWMRAKEGVMKSKLFGDEMDKLFPIIEEGGSDSAAFDNVLELLVINGVVSLPEAVMMMIPEAWQNDENIDPKKKAFYEWAACLMEPWDGPALFTFADDRYCGANLDRNGLRPCRYYVIDDDRMICASEVGVIEIQPEKVIQKGRLQPGRMLLVDTKEGRIVDDRELKSKVASRYDFKSWVLANMISLQDLNEKLASRKIDINAKPIDVNVNVQSDPRLIAAGYSHEQILFVLAPMAEGNEALGSMGNDNALACISEQPKLLYEYFRQLFAQVTNPPIDPIREKIVMSLECYVGPQGNLLEMKPDQLNRLLLKSPILTSSELLAIKNIQTVYPSWSVANIDITFEKSEGIQGYINTIDRICQAASQAIADDNQIIILSDVATSAERLPISALIAVGAVHHHLVRQKQRSKVALIIETQEAKEVHHACCLVGYGADAINPYLAMETLVRMKHQGLLKNESLTEEKIIQNYKGSIDAGILKVMSKMGISTLASYKGAQIFEALGIDNSVIDRCFAGTASRIKGVTFEYIAQDAFTLHERGYPTRDTIKPIGLPETGEYHWRDGGDAHINDPAAIASLQDAVRNKNERAYEAYAKKENEAVRNCTLRGLLDFEFESSTEVPIDQVEPWTEIVRRFFTGAMSYGSISMESHSTLAVAMNRLGGKSNTGEGGEDAARSQVLENGDTMRSAIKQVASGRFGVTSYYLADADELQIKMAQGAKPGEGGELPGHKVSAEIGKTRHSTPGVGLISPPPHHDIYSIEDLKQLLYDLKCANPRARTSVKLVSEVGVGIVAAGVAKAGSENILVSGGDGGTGAAKLTSIKYAGLPWELGLAESHQTLVLNDLRGRVILQTDGQIRTGRDIAIACLLGAEEWGFATSPLIAMGCIYMRKCHLGTCPVGIATQDPELRKKFEGTPEHVINFFYYLANDLRKFMAKLGFRTINEMVGRTEKLKVRDDLRNTKNANIDLSPILTPAHTIRPGVATHCVRKQDHKLHIRVDNKLIDESELTLAKGLPVTIDCEVVNTDRSLGTTLSYRVSKTFGEQGLPHDTIHVNVTGSAGQSFGAFLASGVTLELEGDANDYIGKGLSGGRIIVYPPRESKFKAEDQIIAGNTAFFGATSGSAFIRGIAAERFAVRNSGAIIVTEGTGDHGCEYMSGGRVVVLGATGRNFASGMCGGIAYVLDMAQDFSEKVNRAQVELSQVTETEEIAFLRNLIEDHRHYTGSEVADNILNDFNRYLPRFVKVLPNDYKKVLEKEKKLAEEAKKKELSSFLKSIKEDPESDVTNGEAYKIKKGHVHHPNKGKNEPKVADVEDTIFNTEFEKKAPVKLDKLRGFMKYKRRNEKYRDAKARTKDWNEMTSRLTKEELKYETARCMDCGVPFCTSDTGCPISNVIPKWNELVFNDRWYDALQRLMMTNNFPEFTGRICPAPCNGACVLGINEDPVNIKSVECAIIDHGFEQGWIKPTPPAHRTGKTVAVIGSGPAGLAAADQLNKAGHLVTVYERSDRPGGLLMYGIPNMKLDKGIVKRRTDLLAAEGIEFICNTTVGEDITVSELKSQFDAVVFAVGSTIPRDLRIPGRELKNINFAMQLLHSNTKALLDDQLEDIRKNLAGKNVVVIGGGDTGNDCLGTSTRHGAKSVTNFELLPNPPNARPKDNPWPQWPRIFRVDYGHTEVATHYGKDPREYSILSKEFVGDEEGNVKGIKTVRVEWKRSDSGAWQMAEVPGSEEFFPAEVVLLSMGFLGPEADNLEVQKTKRGTITTVDPNVYKVDKDDNVFAAGDCRRGQSLVVWGIQEGRQCAREVDEYLMGSTRLPGNGSVEQRNYKLLEELAEKV

SEQ ID NO: 267 - protein, 1524 aa, Bacillus clausii KSM-K16
MSMRNVGFPQKQGLYDPEFEHDNCGIGFLAQMKGRKSHKLVEDALLMLENLEHRGGQGDEINTGDGAGILVQLPDRFFRKVLPFEIPTAGTYAVGMLFLPRAEAARKACKQKVEAVFAKESLVLLGWRNVPTDPSMLGKAAHDSMPVIEQVFVKSAKPLDQLAFERKLYVARKVAEHEIEPTILPEESFYFASFSSRTIVYKGMLTTAQVSMFYLDLLDEAFESALALVHSRFSTNTFPSWERAHPNRYMIHNGEINTIKGNVNWMHAREAKFAGAAFGSDLEKIHPVIDKNGSDSSMFDNTLEFLALSGRSLAHCAMMMVPEPWQNNKQMDEKKRAFYEYHSTLMEPWDGPTAIVFTDGEKIGATLDRNGLRPSRYYVTKDDYIVMSSEVGVLDFPPESIVKKDRLHPGQLLLVDLKEGRIIPDVEAKQAIVEEKPYGKWVKDHLIHLDDVLETADVFDTEFERIHERQLVYGYTYEELTKMLMPLIKDENDPVGSMGYDSPLAVLSKKPQLLYNYFKQQFAQVTNPPIDAIREKAVTAVGTTIGAERNLLEPEPLSCRHIYLPSPILNNEELAKLRSNKMDGFKAETLDMVFEAQKGGQGLEAALDTLFANADQAISNGATLLILSDRNISAEKAPIPALLAVSSLHHHLIRSGTRTEVSLLVESAEPREVHHHALLIGYGAEAINPYFVFDTIDDWIQKQLLTDFHYVEACRRYVNGTTNGIMKVLSKMGISTIQSYRGAQIFEAIGIDPELIDRHFTWTASRIGGIGFSTIANEVLARHERAYSPREGDDGELEPGDDLQWRRNGEEHQYNPHTIHMLQHACRTNNYELYKQYTQAINEQTEKQTTLRGLFRFKKGNAIPLDEVEPAESIVKRFRTGAMSYGSISKEAHETLAIAMNRLGGKSNTGEGGEDPRRFTPDENGDLRRSAIKQVASGRFGVTSHYLVNADEIQIKVAQGAKPGEGGQLPGEKVYPWVAEVRGSTAGVGLISPPPHHDIYSIEDLAELIHDLKNANPSAKVSVKLVAGTGVGTIAAGVAKGSADGIIISGYDGGTGAAARTSIKHTGLPWEIGLAETHQTLLLNNLRDRVTLETDGKLMTGKDVVVAALLGAEEYAFSTAPLVVLGCVIMRVCHLDTCPVGIATQNPELRRKYTGEADYIVRFMTFIAEDMRELMAELGVRTVDELVGRTDLLEVNEHINNDKAKQLDLSNLLFKPESSGTKACIKTKAQDHKLEQSLDARELLEAAKPALDNRTKITYATTIRNTDRVVGTIVGSEVSKKYGATGLPENTISFSFKGSAGQSFGAFIPQGITLRLEGDANDYIGKGLSGGKIAVSPAENAAFAAKDNVIVGNTSFYGATSGKAFIAGQAGERFCVRNSGAQVVVEGMGDHGLEYMTGGIVVTLGEVGKNFAAGMSGGLAFVYDANGTFTDKCNQGMVLIENVLAEDERLLHALLTEHVAETRSEQAQEILNNWEQVKTNFVKVIPKDYKNMITAIERLKQQGMTEEEAAMAAFDESKRDRSKV

SEQ ID NO: 268 - protein, 1548 aa, Frankia sp. EAN1pec
MPTAQGLYDPTFEHDACGVGFVVDVHGRRSHELVDQGLTVLRNLDHRGASGSDPDTGDGAGILVQVPDGFFRDVVEFALPAPGRYAVGTVFLPQVAGERDDAVRTISRIVRQEGLRVLGWREVPTVSHIVGHAAREVEPWMRQIFLALPGTPTRPRVAPVTADGAEIAGAAGAADGVGTAVLAVDPSASAPGPDGFDAMELERRAFCVRKRVRRETGVYMPSLSSRTIVYKGMLTTHQLSAYFPDLDDPRFASAIALVHSRFSTNTFPSWPLAHPYRLIAHNGEINTVRGNRNWMRAREALLASDLIPGDLSRLFPICADGASDSASFDEVLELLHLGGRSLPHAVLMMIPEAWENHEEMDAARRAFYRFHSALMEPWDGPASIAFTDGTVIGAVLDRNGLRPSRYWVTDDGLVVMASEVGVLDIPPHRVVRKGRLQPGRMFLVDTAQGRIVSDDEIKSELASAAPYEEWLHAGLISLDDLPEREHVLYGHSSVMRRQQVFGYSQEELRIIIGPMARTGAEPIGSMGTDTPVAVLSSRPRLLFDYFTQLFAQVTNPPLDAIREELVTSLGRTLGPEGNLLAPSPASARMVHLPFPVISNTQLARIIGINDDGDMPGFASVTVRGLYDVAGGGAALAARLAEICSGVSEAIADGARIVVLSDRDSDERKAPIPSLLLTAAVHHHLIREKTRTKVGLIVECGDAREVHHIALLTGYGAAAVNPYLAFESIDDLLARGELTGIEREQAEKNLIKGLGKGLLKVMSKMGISTVASYTGAQVFEAIGLAQELVDQYFVGTPSRLDGVGIDVIAEEVAARHRRAYPTVPSELAHRTLEVGGEYQWRREGELHLFNPETVFLLQHSTRSRQYDLFRQYTAKVDGLSRENATLRGLFELRTRGRAPIPIDQVEPVSEIVKRFATGAMSYGSISAEAHETLAIAMNRLGGKSNTGEGGEDARRFLPDENGDLRRSAVKQVASGRFGVTSEYLANADDIQIKMAQGAKPGEGGQLPGHKVYPWIAKTRHSTPGVGLISPPPHHDIYSIEDLAQLIHDLKNANPKARVHVKLVAEVGVGTVAAGVSKAHADVVLISGHDGGTGASPLTSLKHAGAPWELGLAETQQTLLLNGLRDRIVVQVDGQMKTGRDVVVGALLGAEEFGFATAPLVVAGCVMMRVCHLDTCPVGVATQNPELRARFTGRPEFVEAFFTFIAEEVREHLAALGLRSIAEAVGRVDLLDARAAIDHWKASGLDITPLLHTPERPFGGSLHCTASQDHGLDKALDNSLIQLCEGAIEDGRPVWLEMPIRNVNRTVGTMLGYEVTKRYGAAGLPDDTISLRFTGSAGQSFGAFVPRGMTLTLEGDVNDYTGKGLSGGRIIVFPPKESPLRAEENTVAGNVLLYGATAGEAFFRGIVGERFCVRNSGATAVVEGVGDHGCEYMTGGTVVVLGPIGRNFAAGMSGGVAYLYKPVSQRINTEMVDVDPLDDDDRSALRGIVEKHYRETGSAIASRLIANWAGAQEDFVKVMPKDYKRVLAAMRSAEEQGLSVEDAIMAAARV

SEQ ID NO: 269 - protein, 266 aa, Saccharomyces cerevisiae YJM789
MSADETDAKFHPLETDLQSDTAAATSTAAASRSPSLREKPIEMPLDMGKAPSPRGEDQRVTNEEDLFLFNRLRASQNRVMDSLEPQQQSQYTSSSVSTMEPSADFASFSAVTTLPPPPHQQQQQQRQQQQQQQQLVVQAQYTQNQPNLQSDVLGTAIAEQPFYVNAKQYYRILKRRYARAKLEEKLRISRERKPYLHESRHKHAMRRPRGEGGRFLTAAEIKAMKSKKSGASDDPDDSHEDKKITTKIIQEQPHATSTAAAADNKT

SEQ ID NO: 270 - protein, 420 aa, Oryza sativa
MGNQVGGRRRRRPAVEERYTRPQGLYPHPDIDLKKLRRLIVEAKLAPCFPGSDDPRADLEECPICFLFYPSLNRSKCCAKGICTGEFVLLAAHVVFFFVGCGGLGWCPYCKMASYAVEYRGVKTKEEKGTEQIEEQRVIEAQIRMRQQELQDDAERMKKKQAAALTDVVTTAQVEHCDTGGASTTVKSSGQGSDMLSSQVQHAELLLKTSERLKQMRNNNFDMDPDEVMLVEALWLSLQDQEASGNPTCGNTVSSVHPPRSFEGSMTIPAEAASSSSAFACAVAALAEQQQMYGEASSTATCHTSRCDILSRSDRSFTEDLSINGSGSSGARSEEPSSNKMHQTREGMEYSNERWSEMAEASSSFTGSDLTTEAGAANSGGSDTGAGSIPDSFEEQMMLAMALSLADARAKASSPGLTWR

SEQ ID NO: 271 - protein, 220 aa, Picea sitchensis
MATTRHQRSPDSSPRSEDESGAHTYSNQDGSVKEQDRFLPIANVSRIMKKALPANAKISKDAKETVQECVSEFISFITGEASDKCQREKRKTINGDDLLWAMGTLGFENYVEPLKVYLQKYRELEGEKTSMAKQSGDQSPSKDASSGSTVNGSSAGNPSISPGSSAKYSGGYYPQAYGGQAAQMYGQHQMLTPYQMHINTGKAGGAGAANSGDHHPRGQW

SEQ ID NO: 272 - protein, 538 aa, Oryza sativa Indica Group
MTSGPTPPSPPDASAASSGGLHLAGGGMSGFLAVVGKVGTFLLWLLFLVLQTATKIVGSLLAAGPPPADAQEAAAAAAARRRSPPASPHSGGGATDPYQPPQLWDPPPPSSPYSAGHAADEYSSSSSYRRRGASAPPAEDVVVSSSYSRPAAAVASAPQARTVSSAPPLRAVETRSPAPSRAAAAVGGKRPKLERKYSKIVDQYRSLDEVIEALAQAGLESSNLIIGIDFTKSNEWTGKRSFNGMSLHHIGDSPNPYEQAITIIGQTLSAFDEDNLIPCYGFGDVLFPLSNRAASTHDQDVFAFYPDERPCNGFQEALARYREIVPHLRLSGPTSFSPIIEMATTIVEQSGGQYHVLVIIADGQVTRSVDTEFGQLSTQEQMTVDAIVQASEFPLSIILVGVGDGPWDMMKEFDDNIPARSFDNFQFVNFTSIMSKKISQSKKETEFALSALMEIPLQYKATLELGILGRRFAKSPERVPLPPPFASYNTISRAAPSRANSFRSMPSHPRDEAPVDSAITASVTSPPSVDARAAEPQV

SEQ ID NO: 273 - protein, 1524 aa, Microcystis aeruginosa PCC 7806
MNNNQTPRKQGLYDPQFEHDACGVGFIVHKTGKKSHDIVEQALTILLNLDHRGACGAEKNTGDGAGILCQIPDLFFRKVTSNLGFTLPAAGQYGVGMLYTAPDAEIRGKSRQEFEKIAAEEGLKVLGWRDVPTDNSSLGNSARSTEPFIEQVFIERDANLSDDLAFERKLYVIRKRSHLNRQSFNRYWYPCSISSRTIVYKGQLMPVQVGDYFPDLHDPDFQSALGLVHSRFSTNTFPSWERAHPYRYIAHNGEINTLRGNINWMHARQSMFASPLFGEDIKKIQPVINIEGSDSLIFDNALELMVLSGRSLPHAVMMMIPEPWAAHESMSDEKKAFYEYHSCLMEPWDGPASIAFTDGTMMGAVLDRNGLRPSRYYVTKDDLVIMASEAGVLPIEPERVAFKGRLQPGRMFLVDMKEGRIVADEEIKEAIAKAHPYRQWLTENLVNLDDLPAVETAPTETPVSLIQQQTAFGYTFEELRLLLAPMGRDGVEAVGSMGSDTPLAVLSDRPKLLYDYFQQLFAQVTNPPIDSIREEIITSPITTIGAERNLLDPQPESCHLIKLNSPILTNAQLARLQGNSEFNTVTIPILFDPTSGVEGMRSTIEAICQEVDEAILAGASIIILSDRGIDKNHAPIPSLLAVAGLHHHLIRQGTRTRVGLVLESGEPREVHHYALLLGYGCGAINPYLAFATLGSMIEEGLLVGVDHQTACKNYIKAATKGVIKVASKIGISTLQSYRGAQIFEAIGLNRSVVDRYFTWTASRIEGADLEIIAKESLLRHGHAFPDRDVNVHTLDIGGEYQWRKDGEAHLFSPETIHTLQQAVKLGKYDLFKKYSQLVNQQNQKFFTLRGLLTFKNRESIPIEEVEPIEAIMKRFKTGAMSYGSISKEAHESLAIAMNRIGGKSNTGEGGEDSERYTWTNERGDSKNSAIKQVASGRFGVTSLYLSQARELQIKMAQGAKPGEGGQLPGKKVYPWIAKVRHSTPGVGLISPPPHHDIYSIEDLAELIHDLKNANRAARVSVKLVSEVGVGTIAAGVAKAHADVVLISGFDGGTGASPQTSIKHAGLPWELGLAETHQTLVLNNLRSRIAVETDGQMKTGRDVVVATLLGAEEFGFSTAPLVTLGCIMMRVCHLNTCPAGVATQDPLLRQNFIGDPEYTVNFMKFIAQEVREIMAELGFRSLNEMVGRTDVLEPKQAVEHWKAKGIDLTPILYQPEVDPEVGRYCQIPQDHGLDKCLDITVLLDLCKDAIEKGEKVKATLPIKNINRVVGTILGNEITKRHWEGLPEDTVHLHFQGSAGQSFGAFVPKGVTLELEGDANDYVGKGLSGGKIIVYPPKGSTFVAEENIIIGNVALYGATSGEVYISGVAGERFGVRNSGVTTVVESVGDHACEYMTGGKVVVLGPTGRNFAAGMSGGVAYVLDESGDFATRCNTQMVALEALEGEEIDDLRELIQRHADYTQSQKAALVLANWSEMLPKFVKVMPKDYKRMLQCIKEALDSGLTGDSALDAAFEANARDVARIGGS

SEQ ID NO: 274 - protein, 2208 aa, Arabidopsis thaliana
MSAASSSSVLHLRTNQQLLSLRSLKNSTSVASQLAVTSGVSRRRSCTARCSVKKPVIPESPFLGTRVRRSGSETLQFWRSDGPGRSAKLRTVVKSSFSAVPEKPLGLYDPSYDKDSCGVGFVAELSGETTRKTVTDSLEMLIRMTHRGACGCESNTGDGAGILVGLPHDFYAEAATELGFVLPSAGNYAVGMFFLPTVESRREESKNVFTKVAESLGHSVLGWRLVPTDNSGLGNSALQTEPIIAQVFLTPTTKSKADFEQQMYILRRVSMVAIRAALNLQHGAMKDFYICSLSSRTIVYKGQLKPDQLKDYYYADLGSERFTSYMALVHSRFSTNTFPSWDRAQPMRVLGHNGEINTLRGNVNWMRAREGLLKCNELGLSKKELKKLLPIVDVSSSDSGAFDGVLELLVRAGRSLPEAVMMMIPEAWQNDKNIDPSRKEFYEYLSALMEPWDGPALISFTDGRYLGATLDRNGLRPGRFYITHSGRVIMASEVGVVDVPPEDVMRKGRLNPGMMLLVDFEKHIVVDDDALKQQYSLARPYGEWLKRQKIELKDIIESVPEAERIAPSISGVVPASNDDDSMESMGIHGLLSPLKAFGYTVEALEMLLLPMAKDGSEALGSMGNDTPLAVMSNREKLCFEYFKQMFAQVTNPPIDPIREKIVTSMECMIGPEGDLTETTEEQCHRLSLKGPLLKIEEMEAIKKMNYRGWRTKVLDITYAKERGTKGLEETLDRICDEANEAIKEGYTLLVLSDRAFSATRVAVSSLMAVGAVHHHLVKTLARTQVGLVVESAEPREVHHFCTLVGFGADAICPYLAVEAVYRLQVDGKIPPKSNGEFHSKEELVKKYYKASNYGMMKVLAKMGISTLASYKGAQIFEALGLSSEVIQKCFAGTPSRVEGATFEMLARDGLQLHELAFPTRGYAPGSAEASALTNPGNYHWRKNGEIHLNDPLAIAKLQEAARTNSVAAYKEYSKRINELNKQSNLRGLMKFKDADVKIPLDEVEPASEIVKRFCTGAMSYGSISLEAHTTLAMAMNKLGGKSNTGEGGELPSRMEPLADGSRNPKRSSIKQIASGRFGVSSYYLTNADELQIKMAQGAKPGEGGELPGHKVIGDIAITRNSTAGVGLISPPPHHDIYSIEDLAQLIHDLKNANPGARISVKLVSEAGVGVIASGVVKGHADHVLIAGHDGGTGASRWTGIKNAGLPWELGLAETHQTLVANDLRGRTVLQTDGQLKTGRDVAVAALLGAEEFGFSTAPLITLGCIMMRKCHKNTCPVGIATQDPVLREKFAGEPEHVINFFFMLAEEVREIMSGLGFRTVTEMIGRADMLELDREVVKNNDKLENIDLSLLLRPAAEIRPGAAQYCVQKQDHGLDMALDQELIALSKSALEKSLPVYIETPICNVNRAVGTMLSHEVTKRYHLTGLPKDTIHIKFTGSAGQSLGAFLCPGIMLELEGDSNDYVGKGLSGGKVVVYPPKGSSFDPKENIVIGNVALYGATSGEAYFNGMAAERFSVRNSGAKAVVEGLGDHGCEYMTGGTVVVLGKTGRNFAAGMSGGIAYVLDVDGKFNTRCNLELVDLDKVEDEEDKMTLKMMIQQHQRHTNSQLAQEVLADFENLLPKFIKVFPRDYKRVLSAMKHEEVSKQAIERASEEADETEEKELEEKDAFAELKNMAAASSKEEMSGNGVAAEARPSKVDNAVKNGGFIAYEREGVKYRDPNVRLNDWNEVMEESKPGPLLTTQSARCMDCGTPFCHQENSGCPLGNKIPEFNELVYQNRWQEALNRLLETNNFPEFTGRVCPAPCEGSCVLGIIENPVSIKSIECAIIDKAFEEGWMVPRPPLKRTGKKVAIIGSGPAGLAAADQLNKMGHLVTVYERSDRIGGLMMYGVPNMKTDKIDVVQRRVDLMTKEGINFVVNANIGKDPSYSLDGLKEENDAIVLAVGSTKPRDLPVPGRDLSGVHFAMEFLHANTKSLLDSNHEDGNYISAKGKKVVVIGGGDTGTDCIGTSIRHGCTNIVNLELLPQPPSTRAPGNPWPQWPRVFRIDYGHQEATTKFGKDPRTYEVLTKRFIGDDNGNVKGLELVRVSWEKDETGRFQFKEIEGSEEIIEADLVFLAMGFLGPEPTLAEKLGLECDNRSNFKAEYGRFSTTVEGVFAAGDCRRGQSLVVWAISEGRQAADQVDKFLTKTDDDEDAKLQQDLNQMKHNTITN

SEQ ID NO: 275 - protein, 2316 aa, Yarrowia lipolytica CLIB122
MSDASVLNSIFQQLRTARTLTEKTHAAEELRDHLTSVTHELNTEPLSRYNNDINLRISELIHNGDPVIRLGGIMAIDRLIDVDVGEENAIKVTRFTNYLKTTIPGDTESMRIAVDALGRLAATGGNLSATVVESEVNRALEWLQSDRGEGSRRHAAVMVIKSMAQHCATLLYGYMSQILDLIWVGLRDPKVQIRVDSAEALQYCLNIVHSRDQTLKKQWFNRIMEEAKVSLNMGGVDTIHGALLTYKEVLRGGMFENSRYDEVCEVVLANRDSRDVLIRKTVLNIIPDLAQYNPWQFTKRYLHKCMLYLLSQLKKDKDRNLVFLSIGQISFSVRSAMAPYLDAILENIREGLSLKSRYRKEQESAIFSCIGMLAVAVGQALAKHLNQKILDLIMACGLSEHLHNCLSELVHNIPPLGPSIQQRLLNIISFTLSGHPFKLPGSPAATSSAEYMSVTRAREYRETEDDKDDAAVVALALHILGTFNFKGLSLTEFVRFCAITYVDHDSPEVRKAAALSSCTIYLNDPIVFQFSAHALSAVSEVVEKLLTVAVVDPDPDIRIGILTTFDPRIDPHLSQAENVRLLFTALNDEVFAIRQLSIGIIGRLTKINPAYVVPHLRKTLIHLLTELEYAKFGRTKEESARLLAQLIGSTHGLIKPYVKPIIKVLLARARDTSSNVASAVITAIGELAATGREGMIEYIPEIMPIFLETFSDQNAQKKLAGLKSLGQLSSSSGYVIQPLLDYPQLLTLLTNTLKSDNVDTRRETVRLMGILGALDPYKHREVERSTQDDSAEYDSIPTDVALLIQGMSPSSDEYNHTVVITTLMAILKDQSLVSHHNAVVQAIVIIFKSLGLKCVPFLNQIIPGWLQVLRSSTPSMAEFFVQQLALLVLIVKQHIRSYLDDIFAVVQELFAIPSMQPVVLTLVENIARSLSGEFKLHVPTLLPLLLGVLENDKSTTKLTSIKVLQTFVVLGANIEDYIHLIIPIIVRMFEYSTHQLKKRAIQTIGQLSRTVDLTDMSSRIVHPLLRVLAACPVTEEPNSHHDELRRTVMETLSSLCFQLGSDYTIFIPLVNKAMLKAGVNSPSYDQLVNRLLSGEPLPASMDPDSRIQELNNTPPDTTSLNKLPVNQQHLKTAWDTAQCSTKEDWQEWMRRLSTAFLRESSSHALRACGVIANNYQPLAKDLFNPSFYSCWSELYDQYKDDLVNHIETALMAPNMPPETLQILLNLAEYMEHDDKPLPIDMRTLAAYAHRCHAYAKALHYKELEFMREPTTPIIENLIAINNSLQQSDAAIGILKHVQQHHQWQLKESWYEKLQRWDDALEAYDKLDDNSMEVTMGKMRCLHALGEWESLAEIAQEKWTSSGPEVRRVVAPLAAAASWGLSQWERMDTYISVMKVDSADKSFFNAVVSIHRNNFDEAHTHITRARDLLATELTALISESYNRAYGVVVRFQMLAELEEIIVYKGLGRNSEEQAAMRATWMKRLKGCQRNVEDWQRMLKVRSLVVKPKQDMEMWIKFANLCRKSGRLSLAEKSLNALLDPDDPDSQTSRAPPPVVYAQLKYMWATGNWEDALNHLVDFTNRMSLDLGLDPEDLITQKLPSEGAAVPKKIQDYTRLLARCFLKQGEWQISLQDDWKEKNPDSILGSFLLATHFDAKWYKAWHNWALANFQVVSLRYSEKEELALEDVSQYVVPAIKGFFHSISLSNGSSLQDTLRLLTLWFRYGHVSDASQALYDGFQMLSIDTWLDVIPQLISQIHQRSQVVSKALQGLLIELGKNHPQALLYLLNVAVKSDSLSRQQAAMNVIDKMRTHNPILVEQAELVSKELIRVAVLWHEQWHEGLEDASRFFFGERNIEKMFQTLEPLHAMLERGPETLREVSFQTAFGRDLHDANEWVWSFKRTNDPAHLNQAWDIYYNVFRRIAKQLPQLISLDLQYVSPKLLAAENLELAVPGSYAPGKEIVRIMKFDPIFTVISSKQRPRRLSCKGSDGKDYVYALKGHEDIRQDNLVMQLFGLVNTLLSQDSECFKRHLNITKYPAIPLSPKSGLLGWVPHSDTLHTLIKEYRDGRILINVEHRFMLQMAPDYDPLTHLQKIEVFTYALDNTKGQDLYRVLWLKSRSSEAWLERRSQYTRSLATMSMVGYILGLGDRHPSNLMLDRYTGKVIHIDFGDCFEAAILREKYPETVPFRLTRMLTYAMEVSGIEGSYRITSEHVMRVIRDNKESLLAILEAFAYDPLINWGFELPRGEDLPVKRFDEDEKVNVRMARAHLVLKRIQDKLSGNDIKNRKNVDVPAQVDYLIQQATSIENLCQHFIGWCSFW

SEQ ID NO: 276 - protein, 2126 aa, Magnaporthe grisea 70-15
MGLTADFDDRQTHIEAESNEYHPYEYQTENNSSWAGALPVKQGLYDPDLEKDACGVGFACHIKGKPSHKIVSDARNLLCNMTHRGAVGSDARDGDGAGVMTSIPHKFFIKNFEREVDIKLPPLGQYAVGNLFFKPDQETLHESKRQLEDIAESLGLRVLGWREPPVDSTLLGPAAKSREPIIMQPFVVLTSAYGAGNAPETTDPEKFDERLFERQLYVLRKRATHTIGLQNWFYLCSLSNKNIVYKGQLAPVQVYEYYHDLVNADYEAHFALVHSRFSTNTFPSWDRAQPLRWAAHNGEINTLRGNKNWMRAREGVMQSDIFGDELELLYPIVEDGGSDSAAFDNVLELLTINGVLSLPEAVMLMVPEAWQGNDHMDPKKAAFYEWAACQMEAWDGPALFTFADGRFCGANLDRNGLRPCRFYVMDDDRIICASEVGTIPVDPERVIQKGRLQPGKMLLVDTVAGRIIDDSELKAAVSSRQDFRSWLDKELISLPTLVESVAQDKTVQLEAKPDATALQEDPLLHAFGYTFEQVSLLLAPMAQDEKEALGSMGNDSPLACLSQAPHLLYEYFRQLFAQVTNPPIDPIRESVVMSLECYVGPQGNLLEMDASQCGRLLLPSPILSIPEFNAIKNMPKLHPEWTVKVIDITFPKKEGVEGYMRHLDYICNETTDAIEKRNRVIVLSDRNTSADRVAVSALLASGMVHHHLVSNKWRSMAALVVETAEAREVHHMCVLLGYGADAVNPYLAMECILKLNREKLIKKQLTDDMLIYNYKHSCDGGILKVMSKMGISTLASYKGAQIFEALGVDDSVVERCFRGTASRIKGVTFETIAEDAFRFHERGFPSRHTVAVPGLPESGEYHWRDGGEPHINDPTSIANIQDAVRTKNDKSYEAYSRSEYEQIKACTLRGMLDFSFEEATPVPIDQVEPWTEIVRRFCTGAMSYGSISMESHSTLAVAMNRLGGKSNTGEGGEDPERSQRMPNGDTMRSAIKQVASGRFGVTSAYLADSDELQIKMAQGAKPGEGGELPGHKVSKSIARTRHSTPGVGLISPPPHHDIYSIEDLKQLIYDLKCSSPRSRVSVKLVSETGVGIVASGVAKAKADHILISGHDGGTGASRWTGIKYAGLPWELGLAETHQTLVLNDLRGRVVVQTDGQLRTGRDVAIACLLGAEEWGFATTPLIAMGCIMMRKCHLNTCPVGIATQDPELRKKFKGTPEHVINFFYYIANELRAIMAKLGFRTINEMVGHAEMLKVRDDLRTNKTENIDLSLILTPAHKLRPGVATFNVRKQDHRLYVRMDNKLISEAELTLDKGLPSRIECDVVNTDRALGTSLSYQISKKYGEAGLPMDTVHVNIKGSAGQSFGAFLAPGVTLELEGDANDYVGKGLSGGRLVIYPPRSAVFKAEENVLIGNTCLYGATSGSCFFRGVAAERFAVRNSGATAVVEGVGDHGCEYMTGGRVVVLGSTGRNFAAGMSGGIAYILDIHHDFMSKLNMEMVEASGLEDPEEIAYVRGLIEDHHHYTGSELAARILVDFNRALPRFIKVLPVDYKRVLQEEAAKAAEAKRAEYSLPVLPSHQHKKEEKAAKLQDIEETIGDAAADKKKALKLDKTKGFMKYHRQNEKYRSSKTRTKDWAEISNRLDEDQLKYQTARCMDCGVPFCQSDSGCPISNIIPKWNELVFSGQWRDALNRLLMTNNFPEFTGRVCPAPCEGACVLGINEDAVGIKSIECAIIDRGFEKGWMVPQPPKVRTGKTVAIIGSGPAGLAAADQLNKAGHLVTVYERSDRLGGLLMYGIPNMKLDKRIVERRTNFMAAEGIQFKTGVDVGNGDVTLSSLKATHDAVVICTGATVARDLPIKGRNLEGVHFAMEFLHKNTKSLLDSELADGSYISAKDKNVVVIGGGDTGNDCIGTSVRHGAKSVINFELLPQPPPERANDNPWPQWPRIYRVDYGHSEVRQHMGKDPREYCIMSEEFVDDGSGKVKGINTVRVEWTKSASGGWDMKKVEGSQQFFPADLVLLSMGFLGPEARVLGDDIEKDARKNVKTAPGKYATNMEGVFAAGDCRRGQSLIVWGINEGRQAAREIDLYLEKYTSLPVTGGIVKRTAQEIFSAVKPVAPVAALNVYLEKI

SEQ ID NO: 277 - protein, 689 aa, Pyrobaculum aerophilum str. IM2
MIGRSVVVKSYIEVARHVVPEFWEPSRVLAIRKMAQSSMPVIDRFEPERYGRLLDRMAFKDLRRRDLEEAYAKADKIDIDIGIKLGGAELQMPIYVGDMSFGALSGNPNIAIAKAVTEAGAVAGIGEGGLHPEVAKYRNIVVQWASARFGMDMNLLTAGIAVNIKIGQGAKPGIGGHLPGRKVVDIIAKLRKIPVGSEAISPAPHHDIYSIEDLAQRVKALRDLTKKPILVKVAAVNKIHYVSVGVARSTANGIIIDGAGAGTGATPIVARDHLGIPIDIAVPVVDQWIRKDGTRDGFLMIAGGMLYSPLDVAKIIALGADMANLGTAALLAMGCIMCHACHTGGCPTALTNMIGSGKELDIEWGSALLRNYLLAVSRGLKAVLYALGMSSIKELVGRRDFLQIRHVDEELASVIGVELAEPGETAWLDKNRRVIFPREYYEGVHIPIIGMGGVVPGYTTPARRLLDVLRIEAVQVTRPSVDPYREDVDVSVKFGRLVLDTPVVVPAIDEAAEDAAYIMGAAVLGDNCKYEEYCLGSFKPAITPPGEIDIDSGVIIIDERMGGEKPLEAAVARLHRKLMETGRRRETLIVAVGDLYNGADIYKLAALGADLVAPLSAFQQVVQRVKDLPKGERRRRYENLIANLTAELKVLMGAGGVTSYMHTLVGNLDLLRSLDGRVGEILGVEIAGR

SEQ ID NO: 278 - protein, 1518 aa, Clostridium saccharobutylicum
  misc_feature (40)..(40): Xaa can be any naturally occurring amino acid
  misc_feature (252)..(252): Xaa can be any naturally occurring amino acid
  misc_feature (371)..(371): Xaa can be any naturally occurring amino acid
  misc_feature (417)..(417): Xaa can be any naturally occurring amino acid
  misc_feature (466)..(466): Xaa can be any naturally occurring amino acid
  misc_feature (473)..(473): Xaa can be any naturally occurring amino acid
  misc_feature (475)..(475): Xaa can be any naturally occurring amino acid
  misc_feature (479)..(479): Xaa can be any naturally occurring amino acid
  misc_feature (485)..(485): Xaa can be any naturally occurring amino acid
  misc_feature (544)..(544): Xaa can be any naturally occurring amino acid
MENNIPNAQGLYDPSFEHDACGIGTIVNIDGENHMKFYQXCLTILEKLEHRGGTGADENTGDGAGILFNIPHKFFKEELQSKGITLEEEGDYAVAMMFLPQDEKARKEAVSLFEDISKEEGLELIGWREVQTNPSILGKASLEAMPYIMQAFVKRPNGTKKEKDFERKLYIVRRNIEKRAAWISKFLNETFYIASFSSKTIVYKGMLLSTQLRVFYKDLEDERVETSLALVHSRYSTNTFPSWERAHPNRFXIHNGEINTLRGNVNKVSRVLGKDVIRVLPIINKEGSDSAIFDNNLEFLYMNGMDLPRAVMMAIPEPWYKSKTMSKEKRDFYEYNATLMEPWDGPAAIVFTDGERVGAVLDRNGLRPSRXYITKDRRLILSSEVGALDVPAEIVEKKDRLMPGRMLLVDTVKKEVXSDEELKDTYAKENPYGEWLEQNLVTLDKMKESKKFKIEYDKETRKRLEXTFGYTYXGXKTTXLPMAKXGAEPLAAMGVDTPVAVLSKQSQPLFNYFKQLFAZVTNPPIECDYRRNSYKRLNVLSWAXEGIFLEISLQNCELIKLDSPIINNEELAKIKEYNKENLKPKVIDIVFDKGGSLEDALHEVFEKAQEAYEKGYTILILSDRNVCEAKVPIPSLLAVSALHQYLVQKGTRTSVAIILESGEPREVHHFATLIGFGASAVNPYMAYEALRGLREEGLLELDYDKAVYNYNKAVLKGIIKILSKMGISTIQSYQGAQIFEAIGIGKEVIEKYFTNTVSRIGGIGLKEIQREAEINHEKGFNDKTYAADFTLDSPGYEKLRSGENGAEEHLYNPLTIHKLQESTKTGNYELFKEYTSLIDKEEAEINLRGLLEFNYNSKEIPIEEVESVSEIVKRFKTGAMSYGSISKEAHEALAIAMNRIGGKSNTGEGGEDKERWTLDANGDSRRSSIKQIASGRFGVTSEYLVNADELQIKLAQGAKPGEGGQLPATKVYPWIAKTRHSTTGVGLISPPPHHDIYSIEDLAQLIYDLKNANTGARVSVKLVSECGVGTVAAGVAKGGAEVILISGYDGGTGASPKNSIKNAGLPWELGLAEAHQTLLLNDLRERVRVEVDGKLMSGRDVAVAALLGAEEFGFATAPLVTLGCVMMRVCNLDTCPVGVATQNEELRKRFKGNQNMLLTLCIYSTRIREIMAKLGFRKLDEMIGRVDKLKQKENIHGWKAKNVDLSAVLYTPDKYKGKVVKFDETKKYDFKLNKVIDEKIFLDKFKDAIENKIKTNFEIDVTNTDRALGTILGSEITRVNGTDGLPEDTISIKCNGAAGQSFGAFIPKGLTFEVEGDANDYFGKGLSGGKLIVYPPKKSTFIAEDNILIGNVALYGATSGKVFINGIAGERFCVRNSGATAVVEGVGAHGLEYMTGGKVVVLGKTGINFAAGMSGGVAYIYEEDPNFRINLNEEMILLEELNIDDEEELKALIEEHVKVTGSPKANKILYNFETEKVKFHKIIPKDYKKVLETVEKYKNLGSDEEEALIKTFQEIKGI

SEQ ID NO: 279 - protein, 1521 aa, Prochlorococcus marinus subsp. pastoris str. CCMP1986
MRGSIKRSNESYQDSYSPNGIIGEKDACGVGFIANIDGKESNWILKQSLKGLNCMEHRGGCGGDSDSGDGAGILCSIPWEFLDRELNLNTESYEKRGLGMIFMPNNELKVKESKLICDEEAKELNFKQSFWRNVPIKNETLGILAKANAPFINQWIVCLEKDDSRDIEMLLFQLRKRIEKRIRDNTKNAIGECEFYFASLSSKTVVYKGMVRSEVLSEFYEDLKKEDFKVSFSVYHRRFSTNTLPKWPLAQPMRFLGHNGEINTLLGNINWAKASEIHIDDYWGELSRDIKPIVDKNKSDSSNLDATLEINIRSGKPITDSLLKLVPEAFRDQPELESREDIKAFYEYSATLQEAWDGPALLVFADGNYVGATLDRNGLRPARYSITNDGFVIMGSETGVVDIEENRVIEKGRLGPGQMLAVDLSQNKILRNWEVKAEAAKRKNYKKLIQKRTIKLKNNEWSNTCNLKDFELLQQQTAFGFSSEDNDLILDSMASLSKEPTYCMGDDIPLAVLSSKPHILYDYFKQRFAQVTNPPIDPLREKLVMSLEMHLGERCSPFEFNGIKPFIHLKSPIINEKELISLKESEIKSKTISSLFDIEERIKGFEAKLDDICKVSEKAIKEGCSLIIISDKGVSSKQSFIPPLLAVGAIHHYLLKKEIRLKASLIIETGQCWSTHHLACLIGYGVSAVCPWLTLESGRHWLQHPKTQKLIATKKINPLSIDDVQENIKKALEDGLRKILSKIGISLLSSYHGAQIFEAVGLGSDLIKIAFDGTTSRIAGITLKELANESLLIHTKAFPEIDLKKLEFLGFVQFRNNGEYHSNNPEMSKVLHSALKQGPGYDHFETYKTLIRNRPVTSLRDLLSINSTRKSIPIDEVESVESICKRFCTGGMSLGALSREAHEVLAVAMNRIGGKSNSGEGGEDPARFNVLNDIDENTQSAILPSIKGLENGDTACSAIKQIASGRFGVTPEYLRSGKQLEIKMAQGAKPGEGGQLPGPKVDSYIAKLRNSKPGVALISPPPHHDIYSIEDLAQLIHDLHQVHPRAKVSVKLVSEIGIGTIAAGVSKANADVIQISGHDGGTGASPLSSIKHAGLPWELGVAEVHKSLMENNLRGRVLLRTDGGLKTGWDVVIAAILGAEEFGFGSVAMIAEGCIMARVCHTNKCPVGVATQKEELRKRFKGLPENVVNFFLYIAEEIRQIMSSIGVSNMEELIGNQEFLTARDIKLPKTANIDLSSLIKKGTQYKDRSWLKHSKTAHTNGYVLEDQFLSDNEFMNSIKNHGKVIKEIEIKNTDRSVCAKISGEIAGLYGNNGFNGELNLNFKGYAGQSFGAFLLKGMHIQLIGEANDYVCKGMNGGVLTIVPPQVDEKSSEQVILGNTCLYGATGGKLFALGKSGERFAVRNSGATAVTEGSGDHCCEYMTGGKIVILGSTGRNIGAGMTGGIAYILDENNDLENKVNKEIVSIHKITSLKQEEILLGILGEYLEKTKSLKASKIINNWSNFKGIFKIVVPPSEEETLGI

SEQ ID NO: 280 - protein, 555 aa, Pseudomonas putida KT2440
MKHSLPSRYACLVLCLVFTFASLPLLAQHAWLWPVTLITALLSLVGLNDLRQSHHAVRRNYPILGNIRYLIETIRPEIRQYLIEGDDDKLPFSRSQRSLVYARAKNESAEKAFGTLNDAYKPGFEFISHSMLPVATPDPASFRIAIGGPQCRMPYSASIFNISAMSFGALSANAIAALNRGARMGRFAHDTGEGSISPYHREHGGDLIWEIGSGYFGCRTEDGRFDPQRFAEQARSAQVKMIEIKLSQGAKPGHGGILPGHKVSPEIAETRGVRAGEDCISPAAHSAFRTPVELLQFVAGLRELSGGKPVGFKFCLGHPWEFMGIAKAMLATGITPDFIVVDGKEGGTGAAPREFSDNMGVPMREGLMFVHNTLVGLNLRSSIRIGAAGKIVSAFDIASVLAIGADWVNSARGFMFAIGCIQSQSCHTNKCPTGVATQDPLRQRALVVPDKAERVASFHRNTLHALAEMLAAAGLEHPSELKPKHLARRVSPSEIGLFSDLHTFLKPGELLSGSIESEFYARMWRMARSDSFAPETVSPAPAQTVTVRRKETAPA

SEQ ID NO: 281 - protein, 1263 aa, Oryza sativa Japonica Group
MRHFSIALLKESPSPALRTCARLAQLQPSVGRELFAAGFASCWAQMNETSQEQLVRSLKTAFSSQNIPPEILATLLNLAEFMEHDEKPLPIDTRLLGALAEKCRAFAKALHYKEMEFEAVCSKKMGANPVTVVESLIHINNQLHQHEAAIGILTYSQQHLEVQLKESWYEKLHRWDEALKAYKAKSSQASGPLQNLDATLGRMRCLAALARWEDLSALCREQWTGSEPSARLEMAPMAANAAWHMGEWDHMAEYVSRLDDGDENKLRILGNTTASGDGSSNGAFFRAVLSVRCKKYEEARVYVERARRCLATELAALVLESYERAYNNMVRVQQLSELEEVIDYCTLPMESPIADSRRELIRNMWNERIKGTKRNVEVWQALLAVRELVLPPNEDRDTWIKFAKLCWKSGRISQAKSTLVKLLQFDPESSPELTLYHGHPQVVLAYLKYQYAVGDELKRRDAFCRLQDLSVQLATATNSYSGTLASQVATSNAGVPLIARVYLTLASWKRALSPGLDDDSIQEILVSYKNATLNAKDWGKAWHLWALFNTEVMSRYTLRGRPDIAGKYVVAAVTGYFYSIACASTTKGVDDSLQDILRLLTLWFNHGATSEVQMALQKGFSLVNIEMWLVVLPQIIARIHSNNKIVRELIQSLLVRIGKDHPQALMYPLLVACKSISILRQRAAQEVVDKIRQHSGGLVDQAQLVSKELIRVAILWHEMWHEALEEASRMYFGEHNIEGMLAVLEPLHAMLERGPETIKENTFIQAYGHELLEAHECCLKYRATGEDAELTKAWDLYYHVFRRIDKQLPSLTTLDLHSVSPELLECRKLELAVPGTYSADAPLVTIEYFVPQLIVITSKQRPRKLTIHGSDGNDYAFLLKGHEDLRQDERVMQLFGLVNTLLENSRKTSEKDLSIQRYAVIPLSPNSGLIGWVPNCDTLHALIREYRDARKIFLNQEHRCMLSFAPDYDHLPLIAKVEVFQHALENSEGNDLAKVLWLKSRTSEVWLERRTNYTRSLAVMSMVGYLLGLGDRHPSNLMLDRYSGKILHIDFGDCFEASMNREKFPEKVPFRLTRMLVKAMEVSGIEGTFRTTCENVMQVLRTNKDSVMAMMEAFVHDPLINWRLFNFNEVPQVTNYGNAHSHTVVNSEEAANRELMQPPRGARERELLQAVNQLGDANEVLNERAVAVMARMSHKLTGRDFSSGSSLSGAGSSTQHGNEHLASGDTREVEPGLSVKVQVQRLILQATSHENLCQNYVGWCPFW

SEQ ID NO: 282 - protein, 1475 aa, Prochlorococcus marinus str. NATL1A
MEHRGGCGGDSDSGDGAGILCEIPWSYLRQVWDTAKKCEPQSSGIGMMFMPKDLKNREIAKKICEQEAESLGLTSKGWRDVPVHEEVLGKLARENEPFITQWIVDIKDKEINLEALLFRLRQRISNRANIELKEDELGLYICSLSSKTIVYKGMVRSEILAPFYNDLKDDRFEVSYAVYHRRFSTNTLPKWPLAQPMRLLGHNGEINTLLGNINWAKATETDISSVWKENANDLKPIVNNLYSDSANLDLNLELLVRSGRPITDSLLTLIPEAFRDQPELINKPEITAFYEYAAGTQEPWDGPALIVFTDGTNIGATLDRNGLRPARYCITKNGYVVMGSETGVVELEEDVIQEKGRLGPGQMLAVDLESKRILRNWDVKEESANRYPYLDWLKANRINLNNQSWEINNKFDKQKLLQYQIAFGFSAEDFDYIINSMAANAKEPTYCMGDDIPLAILSNKSHILYDYFKQRFAQVTNPPIDPLREKLVTSLEMNLGVRKAPLRPKEESARLIHLKSPILNEKELTSIIKSELSCKQISILIPINNDKINLEEGLKNLCKEAEDSVINGRDILILSDRDINRENSYIPPLLAVGAVHHHLLRKGLRLKTSIIIDTAQCWSTHHIACLIGFGASAICPWLTWETTRHWWQLPKTQKLISDGKLSNLSIEIAQDNVKKAMEDGLRKILSKIGISVLASYHGAQIFEAIGIGADLIDLAFKGTTSRIAGLTLSELSIETCSFHKKAFPELEQKKLDFNGFVQYRSSGEFHLNNPEMSKILHAAVKAGPRYDHFKTYQQLLESRPATTLRDLLTFKTATQPLPLDQIESVESICQRFCTGGMSLGALSREAHEVLAIAMNRIGGKSNSGEGGEDPARFNVLDDVDENNQSKILPNLKGLVNGDTACSAIKQIASGRFGVTPEYLTSGKQLEIKVAQGAKPGEGGQLPGPKVDEYIAKLRNSKPGVALISPPPHHDIYSIEDLAQLIHDLHQINPTAKVSVKLVAEIGIGTIAGGVAKANADVIQISGHDGGTGASPLSSIKHAGLPWELGLTEVHRSLLENGLRQRVLLRADGGLKTGWDVLIAALLGAEEYGFGTVAMIAEGCIMARICHTNKCPVGVATQQEGLRKRFPGLPEHVVNFFIFVAEEVRQLMSQVGVAKVEDLIGRTDLLIPRNIDLTKTKEVDLSSLLKPIDNPTDRSWLSHEIEAHSNGEVLENALLKDKEVSNAIQTQGSITKEIPIVNTDRSVCARISGEIAKKYGNKGFNGNLNLIFKGSAGQSFGAFILKGMNISLIGEANDYVGKGINGGSITIVPEIINDTSNTQVILGNTCLYGATGGKLFALGIAGERFGVRNSGAHAVIEGAGDHCCEYMTGGVVVVLGKTGRNIGAGMTGGIAFILDKKNELDLRMNKEIVEVHPLTATNHEQFLNDLIYEYHQKTKSPLAQKILADWSSWKELFKAVVPPSEKSKLGIEEVLEKATI

SEQ ID NO: 283 - protein, 88 aa, Brassica rapa subsp. pekinensis
FPSIGLSVTPTSIDVTVAGDDLISPYAVKNLSSESFHVDAGGFFSLWAMSSSLPRLCSLESGKMVYVQGKFYCMNYSPFSVLSYEVTG

SEQ ID NO: 284 - protein, 2135 aa, Cryptococcus neoformans var. neoformans JEC21
MCGVGFICHIKGHAAHKIVSDARNILCNMTHRGATGADARDGDGAGVMTGIPHDFFVREASFCFDAKLPGEGHYAVGNVFFSTDDYAQQQGTFESIAKSLGLRVLGWREVPTDNSILGPASKSKEPKILQPFVVLEEHYGPGQDSQDGNFDERKFERELYILRKQATHKIGLKNGFYVCSLTTSNIVYKGQLSPIQVYNYYHDLNHALYASHFALVHSRFSTNTFPSWDRAQPMRWAAHNGEINTVRGNKNWMRAREGNLRSDRFGDDLELLYPIVESGGSDSAAFDNVLELLVVNGVMTLPEAVMMLIPEAWQNNDLMEPEKKAFYAWAGSLMEPWDGPALFTFSDGRYCGANLDRNGLRPCRFVVTSDDIMVCASEVGTITIEPEKIIQKGRLKPGRMLLVDTKEGRIVDDRELKLTTAKRQPFAAWVESQVLRLPEVVRRVQRFENIDVSLDEVPLSTDPKLLAFGYTIEQLNMLMLPMVHEGHEALGSMGNDAALACMSTTPRTVYDYFRQLFAQVTNPPIDPIRESIVMSLETMVGNEGNLLEIKPSQLHRLHLKSPILTIQEMNSVKHMKLANSGWPSITIDITFDKREGLPGYRNALDRVRQEVINAVDAGFKSVILSDRATSPDRVPLSAILAVGGAHHFLVKERKRSKVALMVETGEAREVHHMCVLIGYGADAICPWLIMEMIYKVGREGLVKESQSVEKLVANYMKATDEGILKVLSKMGVSTLASYKGAQLFEILGLHEEVVGDCFVGTASRVQGATYELLAMDAFEFHERAWPTRDAVMVPGMPESGEYHYRQGSEMRVNDPVSIAQLQDAVRQKNQAAYDTYSKNSRESIKRGTLRGLLEFNFENATPVPIEQVEPWNEIVRRCVTGAMSYGSISMEAHTALALAMNRLGGKSNTGEGGEDAERSIPIPGPGAELNGQPFTHAMELKPVWDSRRSAIKQVASGRFGVTSNYLADSDELQIKMAQGAKPGEGGELPGHKVSASIGRTRHSTPGVTLVSPPPHHDIYSIEDLKQLIYDLKAANPRARVSVKLVSEVGVGIVASGVVKAKADHITISGHDGGTGAAKWTSIKYAGLPWELGLAETHQTLVLNNLRGRVTVQTDGQIRTGRDIAIATLLGAEEWGFATTPLIAMGCIMMKACHKNTCPVGIATQDPALRAKFAGQPEQVINFFYYVIEELRQIMAKLGFRTINEMVGRADMLTVDDSLRTPKTAHLDLSHILKPAQLLRNDVATYRVRAQDHKLYVRLDNKFIDEAEPALQKGLPVTIDCDVVNTDRALGTTLSYHVSKRYGEEGLPRDTIHINMKGSAGQSLGAFLAPGITIELEGDANDYVGKGLSGGRLVVYPPKSSPFKAEENIIIGNVCFFGATSGQAFVRGIAAERFAVRNSGATLVVEGTGDHGCEYMTGGRVVVLGLTGRNFAAGMSGGIAYVLDMAHSFAPKVNMSTIELGPVSDPQEVAELRSLIEDHRHYTGSEIADRVLRNFHHLLPMFVRVMPLDYKRVIEQEAQRAAEEKKRQSVIDLIPSQTASQVDLVATGYDPVLPRDANALTVSTSALISPEGSPKHKPQEPQIVDVEDAMVDETATKERLAKVDKVRGFMKYKRLNEAYRPPRKRVKDWKEISTRLKPSELKYQSARCMDCGIPFCQSDTGCPIANVIPKWNTMIFEGRWLDALNRLLKTNNFPEFTGRVCPAPCESACVLGINEAPVGIKSIECAIIDKGFEMGWMTPNPPEHRTGKRVAVIGSGPAGLAAADQLNKAGHIVTVYERQDRVGGLLMYGIPNMKLDKGVVQRRVDLMAAEGVTFITNAHVGVDSQYDPLNIKAENDAVIVATGATWPRDLKLPHREVDGIHFAMDFLTPNTKVKAFGDDAPGFISAQGKDVIVIGGGDTGNDCIGTSMRHGAKSIVNFELLPEPPKSRAPDNPWPMFNRSFRTDYGHAEVQAHFGHDPRKYCMATKKFVLDDEGKLKGLDTVQVEWTKQNGQWKMEEAVGSEKFYPAQLVLLALGFLGPQQECLKALGVETDPRTNIKTAPNSYSTNVPGVFAAGDCHRGQSLVVWGIREGRQAAAEVDTFLMGSTHLAWQGGIEKRQYVVPSISKPLHGLDEKAGDIETSSQGVDLESASVTASA

SEQ ID NO: 285 - protein, 1486 aa, Salmonella enterica subsp. enterica serovar Paratyphi A str.
MLYDKSLEKDNCGFGLIAHIEGEPSHKVVRTAIHALARMQHRGAILADGKTGDGCGLLLQKPDRFFRIVAEERGWRLAKNYAVGMIFLNKDPELAAASRHIVEEELQQETLSIVGWRDVPTNEGVLGEIALSSLPRIEQIFVNAPAGWRPRDMERRLFIARRRIEKRLQDDKDFYICSLSNLVNIYKGLCMPADLPRFYLDLADLRLESAICLFHQRFSTNTVPRWPLAQPFRYLAHNGEINTITGNRQWARARTYKFQTPLIPDLQSAAPFVNETGSDSSSLDNMLELLLAGGMDIIRAMRLLVPPAWQNNPDMDQDLRAFFDFNSMHMEPWDGPAGIVMSDGRFAACNLDRNGLRPARYVITKDKLITCASEVGIWDYQPDEVVEKGRVGPGELMVIDTRGGRILHSAETDDDLKSRHPYKAWMEKNVRRLVPFEELPDEEVGSRELDDDLLASYQKQFNYSAEELDSVIRVLGENGQEAVGSMGDDTPFAVLSSQPRIIYDYFRQQFAQVTNPPIDPLREAHVMSLATSIGREMNVFCEAEGQAHRLSFKSPILLYSDFKQLTTMSEHHYRADWLDITFDVTETTLDATVKALCDKAEQMVRNGTVLLVLSDRNIDKNRLPVPAPMAVGAVQTRLVDQSLRCDANIIVETGSARDPHHFAVLLGFGATAIYPYLAYETLGRLIDTQAIAKNYRTVMQNYRNGINKGLYKIMSKMGISTIASYRCSKLFEAVGLHDDVINLCFQGVVSRIGGASFDDFQQDLLNLSKRAWLARKPISPGGLLKYVHGGEYHAYNPDVVRTLQQAVQSGEYSDYQEYAKLVNERPAATLRDLLAIHPDGEAVTIDEVEPASELFKRFDTAAMSIGALSPEAHEALAEAMNSLGGNSNSGEGGEDPARYGTNKVSRIKQVASGRFGVTPAYLVNADVIQIKVAQGAKPGEGGQLPGDKVTPYIAKLRYSVPGVTLISPPPHHDIYSIEDLAQLIFDLKQVNPKAMISVKLVSEPGVGTIATGVAKAYADLITIAGYDGGTGASPLSSVKYAGCPWELGLVETQQALVANGLRHKIRLQVDGGLKTGVDIIKAAILGAESFGFGTGPMVALGCKYLRICHLNNCATGVATQDEKLRKNHYHGLPFKVTNYFEFIAREVRELMASLGVTRLVDLIGRTDLLKELEGFTAKQQKLALSRLLETAEPHPGKALYCTENNPPFDNGVLNAQLLQQAKPFVDARQSKTFWFDIRNTDRSVGASLSGYIAQTHGDQGLASDPIKAHFSGTAGQSFGVWNAGGVELYLTGDANDYVGKGMAGGLIAIRPPVGSAFLSHKASIIGNTCLYGATGGRLYAAGRAGERFGVRNSGAITVVEGIGDNGCEYMTGGIVCVLGKTGVNFGAGMTGGFAYVLDEDGEFRKRVNPELVEVLDVDSLAIHEEHLRGLITEHMQHTGSQRGEEILSRWSSFSTQFALVKPKSSDVKALLGHRSRSAAELRVQAQ

SEQ ID NO: 286 - protein, 207 aa, Daucus carota
MERADQQARGFQGYRKIHQQQQLPASGTASTGTDNNPAAGDQDCLVREQDRFMPIANVIRLMRKSIPSHAKISDDAKELVQESVSEFISFVTSEANYRCQKEQRKTITAEDVLWAMSSLGFDDYVEPLTFYLDRFREADGGERSALRGEPLVRRSGEHGAPGIPPTFAPGYYMGPHNALLGAVTMGSFVNDVHNAGPSGAGVNTLDP

SEQ ID NO: 287 - protein, 1527 aa, Prochlorococcus marinus str. MIT 9303
MSQDHRRSNWPYCDSTAPTAVVGEKDACGVGFLAQIDGVASNWILQQALRALNCMEHRGGCGGDADSGDGAGLLCAIPWSYLEAVWSAVEAANHRCGLGMLFMPRDAARRAEARCFCEQEAESLGLRSRGWREVPVDAAVLGPLARDTAPVIEQWLVQGSQPGDALEALLFRLRRRIGDRARQAWGEHANDLYVVSLSSRTVVYKGMVRSEVLAAFYADLLDPRFEVPFAVYHRRFSTNTLPRWPLAQPMRLLGHNGEINTLLGNLNWARATEVNLDTVWGVDAADLKPVVNAAFSDSANLDATLELLVRSGRPIVDSLLTLVPEAFREQPELADKPEIQAFYEYSACTQEPWDGPALLVFSDGRSVGASLDRNGLRPARYCITSDGFVVMGSETGVVELEESRIIEKGRLGPGQMLAVDLEKGRLLRNWDVKQEVAGRYPYSEWLSQNRCKLGQKSWQQESQLGDLELLQQQTAFGFTAEDLELIIDSMAAGAKEPTFCMGDDIPLAVLSDKPHLLYDYFKQRFAQVTNPPIDPLREKLVMSLEMHLGKRGSPLKPEAAAASVIHLETPILNEAELAAFGQLEFPSTTLSTLLPVNDGPSGLGVSLKRLCVEAEDAVRDGSQILVLSDRGVGASTTYIPPLLAVGAVHHHLLNQGLRLNASLVVDTAQCWSTHHLACLIGYGASAVCPWLTWETTRHWWQHPRTQKLIETGKLPALTIDQSQDNLRKAQEDGLRKILSKIGISLLASYHGAQIFEAIGIGADLIELAFKGTTSRVAGLSLNDLASETLTFHAKAFPELDRTKLEFMGFVQYRSGGEFHLNTPDMSKALHAAVRAGPGYDHFSTYKNLLENRPATALRDLLTFRLAPTPLPLDQVESVESICARFCTGGMSLGALSREAHEVLAVAMNRIGGKSNSGEGGEDPARFKILDDVDLESRSETLPSIKGLRNGDTACSAIKQVASGRFGVTPEYLRSGKQLEIKVAQGAKPGEGGQLPGQKVDPYIAKLRNSKAGVALISPPPHHDIYSIEDLAQLIHDLHQVHPAAKVSVKLVAEIGIGTIAAGVAKAKADVIQISGHDGGTGASPLSSIKHAGSPWELGLTEVHRSLLENGLRDRVLLRADGGLKTGWDVVIAALLGAEEYGFGSVAMIAEGCIMARVCHTNKCPVGVATQQEGLRKRFPGVPEHVVNFFLFVAEEVRQLMSVLGVARLEDLIGRTELLEPRSLNLVKTQALDLSCLLDPIPAAADRAWLIHDAKAHDNGPILEDQLLADVELMAAIDGHGHIARNLAIVNTDRSVCARISGEIAERHGNKGFRGQLDLSFEGAAGQSFAAFLLQGVNVRLVGEANDYVGKGMNGGRITLVPPSGADQSGSQVILGNTCLYGATGGELFALGRAGERFAVRNSGVKAVVEGAGDHCCEYMTGGVVVVLGSTGRNVGAGMTGGVTFLLDEQGIVSDLVNKEIVEIFSLTTVEQEAILKTLLEAHLAQTGSTKAKAILANWISLKALFKVLVPPSEKVNVGLTLLEKVAA

SEQ ID NO: 288 - protein, 528 aa, Silicibacter pomeroyi DSS-3
MRHINIYRSFRMGFAYNAIEVMAFVFVSVIGLMMLTAVVLFIVDRFQTGDAIRRNYPVIGRFRNIFTELGEFFRQYFFAMDREEMPFNRAQRNWVYNASEAKGNTVAFGSTRNLNIPGTPIFMNAPFPPLDDQFGASEPLVIGPTCRQPYSAPSIFNISGMSYGAISKPAVLALSKGAKAAGVWMNTGEGGLSPYHLEGGADIVFQIGTAKFGVRDAEGNLSDDKLREVAAHPQVKMFEIKLSQGAKPGKGGILPAAKIDAEISQIRGVPMGMDAISPNRHREVDDFDGLLDLIAHLREVTGKPVGIKTCMGSADPWFDFFRRIRERGADSAPDFITVDGGEGGTGAAPMPLIDLVGLPLREALIRMVDLRDLSGLHDRIRIVASGKLVAPGDVAWAICLGADFITSARGFMFSLGCIQALKCNKNTCPTGITTHIPSLQKGLVVHEKEKRVAAYARSVIHEVETIAHSVGVPEPRLMRRRHVRIVCDDGTSVQMDDLYPSVKSDAEGLDRARGNRQFEDGLRRLGVV

SEQ ID NO: 289 - protein, 1369 aa, Candida albicans SC5314
MLNDMASRIIHPILRILGQGNIDLRESCINTLTYMLVQLGPEFTVFIPVIKKTLLQKNIHAIKFEQLVGKLIGGDPLPLHLDIYKDYDYSLYDIADTDMPSKKLPVNQASLKAAWDASQRRTKEDWQEWIGRLSKELLLQSPSHAIRACAGLASDYYPLAKDLFNASFASCWSELYSQHKEELVESFCIALSSPSNPPEIHQTILNLAEFMEHDDKPLPMSISTLGQYAQRAHAFAKALHYKELEFYDQPTTPTIESLISINNQLQQSDAAIGILKHAQLHHDLQLKETWYEKLQRWDDALKAYNEREKIEPENMEITIGKMRCLHALGEWEQLSELARSKWDNSSSEIKRSVAPLAAAAAWGLSQWDRMDACIKVMKAESPDKAFFNAILSLHRNNFDDASVHILKARDLLVTEITALVSESYNRAYGVVVRVQMLAELEEIIKYKCLPSGSEKRAVMRKTWNTRLLGCQRNVDIWQRMLKVRALVIKPKQDMDMWIKFANLCRKSGRLNLAEKSLNLLLEEGSPENPSRAPPQVVYAQLKYMWAKGQRPEALRHLVDFTTRMSQDLGLNPNDLITQPLPSEGPGIPKHVEEYTKLLARCFLKQGEWQIALNSNWRSETSEIILGAYLLATHFDNKWYKAWHNWALANFEVISLYTSQNTSANNKIEILQDERNGSTEDGHSELKRAEQQKQQQQQQQQQQQQANIIPIEAVQRHVIPSIKGFFHSIALSNSNSLQDMLRLLTLWFKFGGIPEAAKAMTEGFNMVKIDNWLEVVPQLISRIHQPNEIVSRSLFALLTDLGKAHPQALVYPLTVAITSESTSRKKAAQSIIEKMRVHSPSLVDQAELVSRELIRVAVLWHEQWHDALEDASRFFFGEHNTEKMFETLEPLHQMLQKGPETMREQAFANAFGRELTDAYEWVLNFRRTKDITNLNQAWDIYYNVFRRVSKQVQSLASLELQYVSPDLKHAQDLELAVPGTYQAGKPVIRIIKFDPTFSIISSKQRPRKLSCRGSDGKDYQYALKGHEDIRQDNLVMQLFGLVNTLLVNDPECFKRHLDIQQYPAIPLSPKVGLLGWVPNSDTFHVLIKGYRESRSIMLNIEHRLLLQMAPDYDFLTLLQKVEVFTSAMDNCKGQDLYKVLWLKSKSSEAWLDRRTTYTRSLAVMSMVGYILGLGDRHPSNLMLDRITGKVIHIDFGDCFEAAILREKYPERVPFRLTRMLNYAMEVSGIEGSFRITCEHVMRVLRDNKESLMAILEAFAYDPLINWGFDFPTKALAESTGIRVPQVNTAELLRRGQIDEKEAVRLQKQNELEIRNARAALVLKRITDKLTGNDIKRLRGLDVPTQVDKLIQQATSVENLCQHYIGWCSFW

SEQ ID NO: 290 - protein, 1524 aa, Rhodospirillum rubrum ATCC 11170
MTQSSERLSASAPESGEAFVARWQRDAARLEAAHAYDPAHEHSSCGVGLVASINGKPRRSVVEAGIQALKVLFHRGAVDADGKTGDGAGIHVEIPQDFFKEHIRRTTHEPRAGRVAVGMVFLPKTDLNAQEVCRTIVESEILSFGYSIYGWRQVPVDTSVIGEKANATRPEIEQIMIANTRGGDDEQFERDLYVIRRRIEKHALASNVGELYICSLSCRSIIYKGMFLAEQLTSFYPDLLDERFISSFAIYHQRYSTNTFPTWRLAQPFRMLAHNGEINTLTGNINWMKAHETRMDSPFFAEVIEDLKPVVQPGGSDSAALDGVFELLCRAGRPAPMVKAMVIPESLTQNALMPDHHKALIGYCNCVMEPWDGPAAIAATDGRWVVAGLDRNGLRPMRFTITTDGLLIVGSETGMVRVPESDILRKGRLGPGGMVAVDLREGRLYEDGEIKDVLAAREPYAEWVGKITELEGQIGTDVVEPATLSTEDLCRRQLACGQSMEDLELILHPMVADAKEALGSMGDDAPLAVLSSHYRALHHFFRQNFSQVTNPPIDALRETRVMSLKTRLGNLGNILDEDASQCDLLQLESPVLTTAEFEAMRRSMGETVAEVDCTFSPDGGPTGLRDAIVRVQQEAEEAVRGGCTHVVLTDTALSATRVAIPMILAAGAVHTHLIREQLRTFTSLNVRCAEVLDVHYFAVLIGVGATTVNPWLAQESIADRLRRGLFDEGVTLEAAMKRFKKAVNEGLLKIMSKMGISVISSYRGGCNFEAIGLSRSLVAEYFPSLTSRISGIGLAGIQKKVLEQHAKAFGAAAVVLPVGGFYRVRKQGGEAHHFDGDLIHTLQQAVATDSYQTFKKYTAGLRKLPPITIRDLLDFKPGTTGVSIEEVESITSIRRRFVTPAMSLGALSPEAHGTLNIAMNRIGAKSDSGEGGEVRERYKPAANGDNANSAIKQVASGRFGVTAEYLNQCREIEIKVAQGAKPGEGGQLPGFKVTEMIAKLRHSTPGVMLISPPPHHDIYSIEDLAQLIYDLKQINPRAKVCVKLVSRSGIGTIAAGVAKANADVILISGHSGGTGASPQTSIKHAGLPWEIGLAEVHQVLTLNRLRHRVTLRTDGGIKCGRDVVIAAMLGAEEYGIGTTSLVAMGCIMVRQCHSNTCPVGVCTQDDDLRAKFTGTAEKVVNLFSFMAEEVKEILASLGMRSLDEVVGRTDLLQQVSRGADHLDDLDLNPILVQPDTGSGPNICTMEGRNEVPETLDAQMIADAKSALDDGEKMQLTYTVRNTHRAIGTKLSHRIVIKYGMTGLEPGHITVRLRGSCGQSLGAFAVQGLKLEVFGDSNDYVGKGLSGGTIVVRPAVSSPLQTNENTIIGNTVLYGATSGKLFAAGQAGERFAVRNSGAQVVVEGCGSNGCEYMTNGTVVILGQVGANFGAGMTGGMAFVYDPQNTFPLRVNPDSVIWQRIEVPHYAGVLRDLIAEHVSETQSKYAEHLLADWGREIGNFWQIVPKEMVNRLAIPARVAEAEKVSA

SEQ ID NO: 291 - protein, 600 aa, Physcomitrella patens subsp. patens
MGNKITRRRTVIDERYTRPQGLYPHRDVDQRKLRRLILESKLAPCFPGAEEPATDLEECPICFLHYPSVNRSKCCTKGICTECFLQMKSPHVARPTQCPFCKTPQYAVEYRGAKTLEEKGMEQAEEQKVIEAKIRMRQQELLDDEEREQRREENIRAGRIRLQTPRSQPVTNNEIASAPTDEINFLDWGYGDRQPQVLETLDSRESNAPRLNPYLWVEGDYRRSGGFDAAAPSQQSAEPNTVPALSQQQPEIGVPTLQAPSGAIRARHRDDDFDLDLEDIMVMEAIWLSIQEQGARHRFSDGEATRSVPNRPAGLALENSFSSELDGTNTRAPPPPAVPEPESWHQHSGRQGTAAVGLAGAIAALAEQQAVSPNTTHAIHPTVTSSLQPSLSDDHSVPEVSNINEEPLVSTGDAPASQAHESSQRSEELPQSGRENGVREMPVVVSTSGRGKSDAENSSRAFEKLANWVSSTQKEYKGSSVNTWLGDQSSERVEVGTSFSSSVPSASDLPWEAPDIPSDSRNGESSGGFNNDKVLVPDSFEEQMMLAMALSLADAQARVRHGGNHSGPLPQATHFTDAQARVRQGISRSGPLPRPTYIGQ

SEQ ID NO: 292 - protein, 1485 aa, Photorhabdus luminescens subsp. laumondii TTO1
MLYNKSQEKDNCGFGLIAHIEGEPSHKVVRTAIHALARMQHRGAILADGKTGDGCGLLLQKPDRFFRMVAQEQEWHLARNYAVGMLFLSQDPQIAQNCRAIIEQELQNETLSVVGWREVPINRDILGEIALSSLPHIEQIFVNAPAGWRARDLERRLFVARRRIEKRINDSDFYVCSLSNLVTIYKGLCMAADLPRFYPDLADLRLESAICLFHQRFSTNTVPRWPLAQPFRYLAHNGEINTITGNRQWARARAYKFKTPLIPDLHTAAPFVNETGSDSSSLDNMLELFLNGGMDLIRAMRLLVPPAWQNNPDMDEDLRAFFDFNSMHMEPWDGPAGIVMSDGRYAACNLDRNGLRPARYVITKDKLITCASEVGIWDYQPDEVVEKGRVGPGELIVIDTRQGRILHAEETDNDLKSRHPYKEWMDKNVKRLTPFEELLEDQAGHRDLNDQSLAVYHKQFAYSNEELDQIIRVLGENGQEATGSMGDDTPFAVLSSRPRIIYDYFRQQFAQVTNPPIDPLREAHVMSLTTCIGREMNVFCEAEGQAHRLSFKSPILLYSDFHQLITQQSPHYRAEQLDLTFNPQETNLQNALFALCDQAEQLARDGAVLLVLSDRNITPNKLPIPAPMAIGAIQHRLVEKNLRCDTNLIVETASARDPHHFTVLLGFGATAIYPYLAYESLAKMVDNGTINKPYADVMLNYRNGINKGLYKIMSKMGISTIASYRCSKLFEAVGLHSELTEFCFNGVVSRIGGANFSDFEQDLRNLSKRAWLARQPLDQGGLLKYVHNGEYHAYNPDVVSTLQAAVHSGEYNDYLKYSRLVNQRPITTIRDLLAIKTEAEPLPIEEVEPAEELFKRFDTAAMSIGALSPEAHEALAEAMNTLGGFSNSGEGGEDPARYGTKKVSRIKQVASGRFGVTPAYLVNADVIQIKVAQGAKPGEGGQLPGDKVTPYIAKLRYSVPGVTLISPPPHHDIYSIEDLAQLIFDLKQINPNALISVKLVSEPGVGTVATGVAKAYADLITIAGYDGGTGASPLSSVKYAGCPWELGLVETQQALVANGLRHKIRLQVDGGLKTGVDIIKAAILGAESFGFGTGPMVALGCKYLRICHLNNCATGVATQDEKLRRDHYHGLPERVMNYFRFIARETREIMATLGVKNLTDLIGRTDLLEVLEGISAKQSKLNLDPLLATAEPHQGKTLYCTENNPPFDNGALNKNLLTQAASYIENQQSKTFYFDIRNTDRSVGASLSGFIAARYGNQGIAAAPIKIHFNGTAGQSFGVWNAGGLELTLIGDANDYVGKGMAGGRIVIHPPVGSAFKSHQATLIGNTCLYGATGGKLFAAGRAGERFAVRNSGAITVVEGIGDNGCEYMTGGIVCILGRTGINFGAGMTGGFAYVLDENDDFRKRVNLELVEVLAVDALAIHEEHLRGLITEHVLLTGSQRGEDILANWQQWLSKFALVKPKSSDVKALLGHRSRSSAELRIQAQ

SEQ ID NO: 293 - protein, 1481 aa, Pseudomonas syringae pv. syringae B728a
MKAGLYQPDEFKDNCGFGLIAHMQGEPSHHLLQTAVQALTCMTHRGGINADGKTGDGCGLLIQKPDGFLRAIAKQHFDVDLPRQYAVGMVFLNQDDAKADAARENMNREILAEGLDLVGWRQVPIDTSVLGRLALERLPKIEQVFIGGEGLSDQEFAIKLFSARRRSSVSNAADTDHYICSFSHKTIIYKGLMMPADLTAFFPDLSDERLQTAICVFHQRFSTNTLPKWPLAQPFRFLAHNGEINTITGNRNWAQARRTKFTNDLMDLDELGPLVNRVGSDSSSMDNMLELMVTGGIDLFRGVRMIIPPAWQNVETMDPDLRAFYEYNSMHMEPWDGPAGVVMTEGRHAVCLLDRNGLRPARWVTTRNGYITLASEIGVWDYKPEDVIAKGRVGPGQIFAVDTETGQILDTDAIDNRLKSRHPYKQWLRKNALRIQATMEDNDHGSAFYDSEQLKQYMKMYQVTFEERDQVLRPLGEQGQEAVGSMGDDTPMAVLSRRVRSPYDYFRQQFAQVTNPPIDPLREAIVMSLEICLGAERNIFQESPEHASRVILSSPVISPAKWRSLMNLERPGFERHIIDLNYDESLGLEAAVRNVADQAEEAVRSGHTLIVLSDRHIAPGKLPVHASLAVGAVHHRLTEQGLRCDSNILVETATARDPHHFAVLIGFGASAVYPFLAYEVLGDLIRTGEVLGDLYEVFKNYRKGITKGLLKILSKMGISTVASYRGAQLFEAIGLSEEVCDMSFRGVPSRLKGARFVDIEAEQKALAAEAWSPRKPIQQGGLLKFVFGGEYHAYNPDVVSTLQAAVQQGDYSKFKEYTSLVDQRPVSMIRDLLQVRTIDQPLNIDEIEPLSEILKRFDSAGISLGALSPEAHEALAEAMNRLGARSNSGEGGEDPARYGTVRSSKIKQIATGRFGVTPEYLVNADVLQIKVAQGAKPGEGGQLPGGKVNGLIAKLRYAVPGVTLISPPPHHDIYSIEDLSQLIFDLKQVNPAALVSVKLVAEAGVGTIAAGVAKAYADLITISGYDGGTGASPLTSIKYAGAPWELGLAETHQTLRGNDLRGKVRVQTDGGLKTGLDVIKAAILGAESFGFGTAPMIALGCKYLRICHLNNCATGVATQNEKLRKDHYIGTVDMVINFFTYVAEETREWLARLGVRSLEELIGRTDLLDILPGETEKQQHLDLTPLLGSDHIPADKPQFSQVDRNPPFDKGLLAEKMVEMAKPAIESLSGGDYELDICNCDRSIGARISGEIARLHGNQGMNKAPVTFRFKGTAGQSFGVWNAGGLNMYLEGDANDYVGKGMTAGKLVIVPPKGSPFKTNESAIIGNTCLYGATGGKLFAAGTAGERFAVRNSGAHTVVEGTGDHCCEYMTGGFVCVLGKTGYNFGSGMTGGFAYVLDLDNTFVDLVNHELVEIQRISGESMEAYRTHLQSVLNEYVAETDSEWGRNIAENLDDYLRRFWLVKPKAANLKSLLSSTRANPQ

SEQ ID NO: 294 - protein, 604 aa, Candida albicans SC5314
MMFANCSLSKHMQDVLQVLIENIPTLTNLINEKLLNLLSLVLSGKGFQPPGSPFGTIKVNASLARDCRLIMISRDTGMSINTILMNQERYEKLDSKILIQALEMLAFFKFENYQLNEFVRYCTITYLEHNNAKVRLTATVTSCQIFVKDPICQQVSVNALNTVNEVLGKLVSISITDPAPEIRLAGLNCLIKAGNFDPQLSQANNVRLLFIALNDEVFGVRKVAIQILGRLSCINPAYIVPSLRKTLIQLLSKLEYSTTSRKKEESAILLSLLISNSKELTRPYVKPIVDALLPKAKDLSSSVASSAIKCLGELSVVGGEDLKPFIPDLMPLILDTFQDQSSSYKRDAALRTLGQLAFSSGYVIQPLLDYPQLLGMLVAILKSETSPDIKRETVRLLGILGALDPYKHREVEQNSKNIPVEQNAPPVDVALLMQGMSPSNEEYYPKVAITNLMKILKDPSLSIHHTKVIQAVMYIFQTLGLRCVAFLPQIIPGIINVMHTCQLSMLKFYFQQLGDIVLIVKQHIRPFLDDIFKVIKEFFNAGSQLNIQVTIINVIQSVSRALDGEFKMYLPEVLTLMIGVFEEDKSAKRSPSLHVLKKALCFWQ

SEQ ID NO: 295 - protein, 536 aa, Pseudomonas aeruginosa PAO1
MNLSLLSRYAFFACIALFTLLSLPFLGSTEWLWPFTLLGVALSLLGLFDLIQTPHAVRRNYPILGNIRYLVEGIRPEIRQYLLEADGDALPFSRAQRSLVYSRAKNESSEKPFGTLIDVYTAGYEFISHSMRPAPLSDPCEFRVDIGGPQCSKPYSASLFNVSAMSFGALSANAIRSLNRGAQMGNFYHDTGEGSISPYHRENGGDLVWELGSGYFGCRTRDGKFDPERFAAQALDPQVKMIEIKLSQGAKPGHGGILPKHKVTPEIAATRGVPMGEDCVSPSRHSAFSTPIELMQFIAQLRELSGGKPVGFKFCLGHPWEFMGIAKAMLETGILPDFIVVDGKEGGTGAAPLEFTDHIGVPLREGLLFVHNTLVGLNLRDKIKVGASGKIVSAFDIASVLATGADWANSARGFMFAIGCIQSQSCHTNKCPTGVATQDPLRQRALVVPDKAERVRNFHRNTLKGLAEMLAAAGLEHPSQLEAKHLVRRITDTEIRLFSQLHYFLKPGELLSGKIEGEFYERMWNMARADSFDAAA

SEQ ID NO: 296 - protein, 1550 aa, Synechococcus sp. PCC 7335
MAPSDQIVNRLNNRPSVPTQQGLYDPKNEHDACGVGFVVQMKGQVSHDIVRQGLTILLNLDHRGAVGAEPNTGDGAGILLQIPHRFMTKVAAAEGITLPAPGQYGVAMVYASPDEAVRTKSRKEFENAVTEAGLELLGWRDVPTDNSSLGPTAQASEPFIQQAFIGRGSLATDTDELAMERKLYVVRKRSHHIRKTELDNYWYVASLSCRTIVYKGMLMPLQVGNYYLDLHDADIESALALVHSRFSTNTFPSWERSHPYRYIAHNGEINTLRGNINWMTARQSMFESELFGEDLDKARPLINVQGSDSTIFDNTLELLALSGRSLPHALMMMVPEPWSGHANMDAKKKAFYEYHSCLIEPWDGPASIAFTDGTQMGAVLDRNGLRPGRYYVTKDDRVIMASEAGVLPVAPEDVVKKGRLEPGKMFLVDTKAGKIVSDEEIKQQIATEQPYQTWLDENLVSLDDLSSTDDKAFEEAPEVDTSPSAVTKRQMAFGYTFEELRMLLSPMGKNGVEAIGAMGTDTPLPVLSNRPKLLYNYFQQLFAQVTNPPIDSIREAIITSATTTIGSERNLLEPTPESCHLLQLKTPFITNAELARIKCNTQFKTSVLPILFDPDQGEAGLSGAMEALCIKADEEIESGHEILILSDRDIAQNRAPIPALLAVAGLHHHLIRHGTRTRVGIVLESGEPREVHHFAVLLGYGCGAINPYMAFETFERMIEENLLRDISLEAACKNYIKAATKGVVKVASKIGISTLQSYRGAQIFEAIGLNSSVIDKYFTWTASRIQGVGLEVLAEEAIQRHRHAFPDRLAAGSSNAATLDVGGEYQWRKDGEAHLLSPQSIHLLQQATREGNYDLFKKYSALVNEQGKQFFRLRDLLEFTPQASIPIEEVEPIEAIMKRFKTGAMSYGSISQEAHETLAIAMNRIGGRSNTGEGGEDPDRYTWTNEQGDSKNSAIKQVASGRFGVSSLYLSQAKELQIKMAQGAKPGEGGQLPGRKVYPWIAKVRNSTPGVGLISPPPHHDIYSIEDLAELIHDLKNANREARVSVKLVSEVGVGTIAAGVAKAHADVVLISGFDGGTGASPQTSIKHAGLPWELGLAETHQTLVLNNLRSRIVIETDGQMKTGRDVAIAALLGAEEFGFSTAPLVTLGCIMMRVCHLNTCPVGVATQNPDLRSKFSGDPAYTVNFMKFIAQETREIMAELGFRTLDEMVGRTEMLAPKKAIDHWKAKGIDLSPLLHKPEVGPEVGRYCTQAQDHGLDKSLDITKLLEICKPAIEKGEKVKATLPITNINRVVGTIVGNEITKNYWEGLPDDTVHLHFQGTAGQSFGAFTPAGMTLELEGDANDYLGKGLSGGKIILYPHKSSELVAEDNIVTGNVTLYGATRGEAYINGQAGERFCVRNSGAQAIVEGVGDHGCEYMTGGKAIILGRTGRNFAAGMSGGVAYVLDEDGDFATRCNTEMVGLEKVETSGEQQELRDIIQRHLELTGSNKAKVVLANWEDTLPKFVKVMPRDYKRVLQHIQKALADGLSNDEAMSAAFEENARDLARVSGS

SEQ ID NO: 297 - protein, 2167 aa, Oryza sativa Japonica Group
MSAAQGMAYKLRTDAAPTGAGRRARRSHSSVAAPYRAARLVQGGVSIEGGLVGGCQLTEERVAARPPRAAARDAEPVRPLSTLPESSIGLYDPSRERDSCGVGFVAELSGDYKRATVNDALEMLERMAHRGACGCEKNTGDGAGILVALPHNFFREVTKDAGFELPQPGEYAVGMVFLPIDEKRRERSKAEFQKVAESLGHVILGWRRVPTDNSDLGESALQTEPVIEQVFLTKSSSSEADFEQQLYILRRLSILSIRAALNLRRGGKRDFYMCSLSSRTIVYKGQLKPCQLKGYYYADLGHENFTSYMALVHSRFSTNTFPSWDRAQPMRVLGHNGEINTLKGNKNWMKAREGLLECEKLGLTKDQFSKILPIVDATSSDSGAFDGVLELLIRGGRSLPEAVMMMIPEAWQNDVNMEPEKKALYEFLSALMEPWDGPALISFTDGRYLGATLDRNGLRPGRFYVTHSGRVVMGSEVGVVDVPSKDVLRKGRLNPGMMLLVDFENHTVVDDEALKAQYSKAHPYGEWLKRQKIYLKDIVESVPETERVAPGISGSLTQKNEKKEHAGVNGIVTPLKAFGYTVEALEMLLLPMAKDGVEALGSMGNDTPLAVMSNREKLTFEYFKQMFAQVTNPPIDPIREKIVTSMECMIGPEGDLLETTEKQCNRLALEGPLVSIDEMEAIKKMNYRGWRSKVLDITYPKKSGRKGLEETLDRICTEARGAIKKGYTVLVLSDRGFSSDRVAVSSLLAVGAVHQHLVANLERTRVGLLVESAEPREVHHFCTLVGFGADAVCPYLAIEAIWCLQNDGKIPPNGDGKPYSKEELVKKYFYASNYGMMKVLAKMGISTLASYKGAQIFEALGLSSEVIRKCFDGTPSRIEGATFEMLARDALRLHELAFPSRAPPPGSADAKALPNPGDYHWRKNGEVHLNDPLAMAKLQEAARVNSRAAYKEYSRRIQELNKTCNLRGMLKFKDTADMISVDEVEPASEIVKRFVTGAMSYGSISLEAHTALAMAMNKLGGKSNTGEGGEQPSRMEPLANGSMNPKRSAIKQVASGRFGVSSYYLTNADELQIKMAQGAKPGEGGELPGHKVIGDIAVTRHSTAGVGLISPPPHHDIYSIEDLAQLIHDLKNSNPRARISVKLVSEAGVGVVASGVVKGHADHVLISGHDGGTGASRWTGIKNAGLPWELGLAETHQTLVANGLRGRAILQTDGQLKTGKDVAVACLLGAEEFGFSTAPLITLGCIMMRKCHTNTCPVGIATQDPVLREKFAGEPEHVINFFFMLAEELREIMSQLGFRTITEMVGRSDMLEVDPEVVKSNEKLENIDLSLILKPAAEIRPGAAQYCVEKQDHGLDMALDNKLIALSKAALEKEVRVFIETPIQNTNRAVGTMLSHEVTKRYHMKGLPAGTIHVKLTGSAGQSLGAFLCPGITLELEGDSNDYVGKGLSGGKIVVYPPRDSTFIPEDNIVIGNVALYGATIGEAYFNGMAAERFCVRNSGAQAVVEGIGDHGCEYMTGGTVVILGKTGRNFAAGMSGGIAYVYDIDGKFSVRCNHELVDLYHVEEEEDITTLKMMIEQHRLNTGSVVARDILSNFDTLLPKFVKVFPRDYKRVLDNMKAEKAAAKLAKEPKISNGVSVTTKKVQPEQSTNRPTRVSNAKKYRGFISYERESISYRDPNERVKDWKEVAIESVPGPLLNTQSARCMDCGTPFCHQESSGAGCPLGNKIPEFNELVHQNRWREALDRLLETNNFPEFTGRVCPAPCEGSCVLGIIENPVSIKSIECAIIDKGFEEGWMVPRPPLQRTGKKVAIIGSGPAGLAAADQLNKMGHFVTVFERADRIGGLMMYGVPNMKTDKIEIVQRRVNLMAEEGITFVVNANVGSDPLYSIERLRSENDAVILACGATKPRDLGIPGRELSGVHFAMEFLHANTKSLLDSNLEDGRYISAKGKKVVVIGGGDTGTDCIGTSIRHGCTSIVNLELLTKPPSKRAADNPWPQWPRIFRVDYGHQEASSKFGNDPRTYEVLTKRFIGDENGNVKALEVVRVKWEKVDGRFQFKEIEGSNETIEADLVLLAMGFLGPEATIAEKLGLEKDNRSNFKAQFGNFATSVDGIFAAGDCRRGQSLVVWAITEGRQAAAAVDKYLSRNEQDAAEDITPSGAGFVQPVAA

SEQ ID NO: 298 - protein, 1551 aa, Crocosphaera watsonii WH 8501
MDERTIMNMNQNTPNQPNVTYMGIPSLVEERDACGVGFIADVKGKGSHKLIQQTLTALSCMEHRGGCSADNDSGDGSGVMTAIPRELLSPWFSEKGLTMPPVEQLGVGMVFLPQDSSNREEDRSHVESVVKDANLTVLGWREVPVNPDILGVQAKENQPRIEQIMVTSPDGLSGDELDRVLYIVRSQIGKRLADNFYICSFSCRTIVYKGMVRSEVLGEFYQDLSDPNYISRFAVYHRRFSTNTMPKWPLAQPMRLLGHNGEINTLIGNINSMATREVKLNAPGWKPEELTALTPIVNTANSDSYNLDSALELLVRTGCSPLEAAMILVPEAYKNQLNLRDYPEITDFYDYYSGFQEPWDGPALLAFSDGKMVGACLDRNGLRPARYCITKDDYVVVGSEAGVVDLPAADIIEKGKLGPGQTIAVDLTSQEVLKNWQIKQRIAKKHPYGEWLQTHRQQLTHETFSHTLLLNDAKQLLQQQTAFGYTAEDLDMIVVPMAIQGKEPTFCMGDDIPLAVLSDKPHLLYDYFKQRFAQVTNPPIDPLRESLVMSLEMLLGSKGNLLDPQAEDAKLIKIDSPVLNETELQRIKNADFNTTELSTLFDITSGPDGLKVALEKLCQQATEAVEKGAKILILSDRVGANGRSTLEGNINETSSYIPPLLAVGTVHHHLIKQGLRLETSLVVDTAQCWSTHHFACLVGYGASAVCPYLTLETIRQSNKLEDISIPKALDNYRHAVEAGLLKILSKMGISLLASYHGAQIFEAIGLGMELVDTAFKGTTSRVGGLNIAELAQEVITVHSKAFPNLTDKRLTNYGFINSRSKGEYHMNTPKMSKHLHKAVKAYKIGQNGANKEAYDHYEHYKKYLEERPVTALRDLLDFNPDRPSIALEEVEPVEDIVKRFCTGGMSLGALSREAHETLAIAMNRLGGKSNSGEGGEDPTRFNVLSDVDSEGHSPTFPHLNGLRNGDSVSSAIKQIASGRFGVTPEYLMNGKQLEIKMAQGAKPGEGGQLPGKKVSPYIAMLRRSKAGVTLISPPPHHDIYSIEDLAQLIFDLHQINPSAKVSVKLVAEIGIGTIAAGVAKANADIIQISGHDGGTGASPLSSIKHAGCPWELGVTEVHRMLMENKLRDRVILRADGGLKTGWDVIMAALMGAEQYGFGSIAMIAEGCIMARICHTNQCPVGVATQMERLRERFTGIPENVVNFFYFIAEEVRSILAKLGYRSLDEVVGRTDLLKMRSEVNLTKTQSLNLDCLLNLPDVKSDRSWLNHQDVHSNGPVLDDQLLADAAISSAINTHGTIAKNVKIVNTDRTVGARISGVLAKKYGNTGFSGELTFNFTGAAGQSFAAFNLPGMIMHLEGEANDYVCKGMHGGEVVIVPPKNSIFEAADNVIVGNTCLYGSTGGVLYANGRAGERFGVRNSMGKAVIEGAGDHCCEYMTGGVIVVLGSVGRNVGAGMTGGIGYFLDEDYSFPEKVNPENVDIQHICTEAGEAQLKELIEAHFERTGSKKAEHILNNWGEYVSKFWQVVPPSEANSPETNPNPVMIEEKTLTPAK

SEQ ID NO: 299 - protein, 359 aa, Vitis vinifera
MDSFLELYLQISPRRHWFLFFKHKSLKSYIYRNSGGGSDRANCEGYLFDPYSNSWYRLSFSLIPSGFSPASSSGGLICWVSDEAGPKGLFLCNPLVGSLSQLPPTLRPRLFPSIGLTVTPSSIDVAVAGDDLISPYAVKNLTTESFHIDGGGFYSIWGTTSSLPRLCSLESGRMVHVQGRFYCMNYSPFSVLAYDIAANNWWKIQAPMRRFLRSPSLVESRGRLILVATVEKSKLNVPKSLRIWGLQACGTTWVEIERMPQQLYLQFAEVEGSQGFDCVGHGEFIAIMIRGSDKALLFNIYGKTWQWIPPCPFLSGSGGSSSSSGEGCELHGFAYEPRLATPVTTLLDQLTLPFQPFNG

SEQ ID NO: 300 - protein, 2240 aa, Oryza sativa Indica Group
MSAAQGLALKLRAAPAAAAAAGGVRGEKRRRAASATAAAAARPRHGAMSLEGGFLGGALPAEDRVAPRASASRQAEAGAGAGAARPPPRSMSKIPESSIGLYDPSMERDSCGVGFIAELSGEYNRKTVDDAIEMLERMAHRGACGCEKNTGDGAGILIALPHNFFREANLLEVTKDAGFELPPPGEYAVGMFFMPTDDKRREKSKLLFREKAELLGHTVLGWRRVPTDNSGLGQSAVDTEPVIEQVFVTKSASSKADFERQMYVLRRFSVMSIREVLGVKNGGPKDFYMCSLSSRTIVYKGQLKPSQLKGYFFADLGDESFTSYMALIHSRFSTNTFPSWDRAQPMRVLGHNGEINTLRGNKNWMKAREGLLKCEGLGLTRDEMLKLLPIVDATSSDSGAIDNVLELLIQSGRSAPEAVMMMIPEAWQNDVNMDPERKALYEFFSALMEPWDGPALISFTDGRYLGATLDRNGLRPGRFYVTYSGRVIMASEVGVVDVPPQDVSRKGRLNPGMMLLVDFENHCVVNDDELKKEYSKVRPYGEWLKRQRIQLTDIIESVNEAERIAPSISGALPITKENKADMGICGILTPLKAFGYTREALEMLMLPMAKDGQEALGSMGNDTPLAVMSNREKLTFEYFKQMFAQVTNPPIDPIREKIVTSMECMIGPEGDLSETTERQCHRLTLKSPLLNTNEMEAIKKMNYRGWRSKVLDITYPKKNGRMGLKQTLDKICAQAREAIHEGYTILVLSDRERVAVSSLLAVGAVHQHLVSHLERTRIGLLVESAEPREVHHFSTLIGFGADAICPYLAIEAIWRLQIDGRIPPNDGKPYTQEQLIEKYFYASNYGMMKVLAKMGISTLASYKGAQIFEALGLASEVVSKCFEGTPSRVEGATFEMLAQDALRLHEIAFPSRTLPPGSADANALPNPGDYHWRKNGEVHLNDPFSIAKLQEAARINSREAYKEYSRRIYELNKACTLRGMLKFREIPNQISLDEVEPAKEIVKRFCTGAMSYGSISLEAHTSLAEAMNTLGGKSNTGYITIKNGSKGQLTTQTLTFFHGTVEPFALGRWCCENFVPFNLNTNDAQSLCAFPKKNNPRISAIKQVASGRFGVSIYYLTNAVEVQIKMAQGAKPGEGGELPGHKVIGDIAVTRNSTAGVGLISPPPHHDIYSIEDLAQLIHDLKNANPGARISVKLVSEAGVGIVASGVVKGHADHVLISGHDGGTGASRWTGIKNAGLPWELGLAETHQTLVANGLRGRAVLQTDGQMKTGRDVAVACLLGAEEFGFSTAPLITLGCIMMRKCHTNTCPAGIATQDPVLRAKFAGKPEHVINYFFMLAEEVREIMAQLGFRTVNEMVGRSDMLEIDPKVLEGNEKLENIDLSRLLKPAAEISPGAVQYCVEKQDHGLDMALDNKLIASSTAALRKGVRVFIETPVRNINRAVGTMLSHEVTKRYHIHGLPSDTIHIKLNGSAGQSFGAFLCPGITLELEGDSNDYVGKGLSGGKIVVYPPRNSRFNPQDNIVIGNVALYGATKGEAYFNGMAAERFCVRNSGAQAVVEGIGDHGCEYMTGGTAVILGKTGRNFAAGMSGGIAYVYDVDGKFSSRCNYELVDLYAVVEEDDITTLRMMIQQHRLHTQSDLARDVLLNFDTLLPKFIKVYPRDYKRVLDKLKEEKAAKEAEQKAREVVDKKPVEVIQAPNGISVKTEKVMNEEPSSRPSRVSNAVKYRGFIKYEREGTSYRDPNERVKDWNEVAIELVPGPLLKTQSARCMDCGTPFCHQEGSGAGCPLGNKIPEFNELVHQNRWHEALDRLLETNNFPEFTGRVCPAPCEGSCVLGIIDNPVSIKSIECAIIDKGFEEGWMVPRPPLRRTGKRVAIVGSGPAGLAAADQLNKMGHFVTVFERADRIGGLMMYGVPNMKADKEGIVQRRVELMAKEGVQFIVNAHVGSDPLYSVEKLRSENDAIILACGATKPKALSLSRDLPIPGRELAGIHFAMEFLHANTKSLLDSNLEDGNYISAQGRKVVVIGGGDTGTDCIGTSIRHGCTNLVNLELLPEPPRKRAPDNPWPQNWPRIFRVDYGHQEATSKFGKDPRSYKVLTKRFIGDENGNVKALEVIRVEWGKVNGRFQFKEVEGSEEIIEADLVLLAMGFLGPEATVANKLGLEQDMRSNFKAQFGNFATNVEGVFAAGDCRRGQSLVVWAITEGRQAAAAVDNYLSKDDEGETNGTEDIAVSSEGLVQPVVA

SEQ ID NO: 301 - protein, 534 aa, Mycobacterium sp. MCS
MKKRTLAVLAPAATLAGVALQDLIQKEHALRRNFPVLARFRYLLESIGPELRQYIITSNDAERPFSRDQRRWVYTSAKKENNYFAFGTDNDTENAAYPIIKQATFSDVVPASPIHGRDIDLPGAKVLGGPRGRRHAFRPASVVNVSAMSFGSLSPQAIEAINKAAKIAGFWHNTGEGGLSDHHRQGGDLVFQIGTGYFGCRDEHGRFDLDRLVDVVGSGPVRAIEIKLSQGAKPGLGGHLPGAKVNAEIARIRGVQEGKDVASPSRHTAFRNVDEMLDVVERIAETTGLPVGIKSAVGGLQFWHELADQMADGQRGVDFIAIDGGEGGTGAAPLVFADHVSFPFRLGFAEVYGLFARAGLHDRVTWIGSGKLGLPGNAMVAFAMGVDLLNVAREAMLAIGCIQAQKCHTDHCPTGVATQNPWLARGLDPEQKAHRLANYVLTLRRDLLKVSEAAGVRHPAMVGPADIEILDGDRGHRTLAEVYGYQQGWGVPGPEITRDIDEYMSRYDDRPGTDEVLEHAPLEVATEPNQATEP

SEQ ID NO: 302 - protein, 1648 aa, Arabidopsis thaliana
MAMQSLSPVPKLLSTTPSSVLSSDKNFFFVDFVGLYCKSKRTRRRLRGDSSSSSRSSSSLSRLSSVRAVIDLERVHGVSEKDLSSPSALRPQVRFFTDINFTNTQRAKFHPLWGSFKQVANLEDILSERGACGVGFIANLDNIPSHGVVKDALIALGCMEHRGGCGADNDSGDGSGLMSSIPWDFFNVWAKEQSLAPFDKLHTGVGMIFLPQDDTFMQEAKQVIENIFEKEGLQVLGWREVPVNVPIVGKNARETMPNIQQVFVKIAKEDSTDDIERELYICRKLIERAVATESWGTELYFCSLSNQTIVYKGMLRSEALGLFYLDLQNELYESPFAIYHRRYSTNTSPRWPLAQPMRFLGHNGEINTIQGNLNWMQSREASLKAAVWNGRENEIRPFGNPRGSDSANLDCAAEIMIRSGRTPEEALMILVPEAYKNHPTLSVKYPEVVDFYDYYKGQMEAWDGPALLLFSDGKTVGACLDRNGLRPARYWRTSDNFVYVASEVGVVPVDEAKVTMKGRLGPGMMIAVDLVNGQVYENTEVKKRISSFNPYGKWIKENSRFLKPVNFKSSTVMENEEILRSQQAFGYSSEDVQMVIESMASQGKEPTFCMGDDIPLAGLSQRPHMLYDYFKQRFAQVTNPAIDPLRKVWFMSLEVNIGKRGNILELGPENASQVILSNPVLNEGALEELMKDQYLKPKVLSTYFDIRKGVEGSLQKALYYLCEAADDAVRSGSQLLVLSDRSDRLEPTRPSIPIMLAVGTVHQHLIQNGLRMSASIVADTAQCFSTHHFACLVGYGASAVCPYLALETCRQWRLSNKTVAFMRNGKIPTVTIEQAQKNYTKAVNAGLLKILSKMGISLLSSYCGAQIFEIYGLGQDVVDLAFTGSVSKISGLTFDELARETLSFWVKAFSEDTTKRLENFGFIQFRPGGEYHSNNPEMSKLLHKAVREKSETAYAVYQQHLSNRPVNVLRDLLEFKSDRAPIPVGKVEPAVAIVQRFCTGGMSLGAISRETHEAIAIAMNRIGGKSNSGEGGEDPIRWKPLTDVVDGYSPTLPHLKGLQNGDIATSAIKQVASGRFGVTPTFLVNADQLEIKVAQGAKPGEGGQLPGKKVSAYIARLRSSKPGVPLISPPPHHDIYSIEDLAQLIFDLHQINPNAKVSVKLVAEAGIGTVASGVAKGNADIIQISGHDGGTGASPISSIKHAGGPWELGLTETHQTLIANGLRERVILRVDGGLKSGVDVLMAAAMGADEYGFGSLAMIATGCVMARICHTNNCPVGVASQREELRARFPGVPGDLVNYFLYVAEEVRGILAQLGYNSLDDIIGRTELLRPRDISLVKTQHLDLSYLLSSVGTPSLSSTEIRKQEVHTNGPVLDDDILADPLVIDAIENEKVVEKTVKICNVDRAACGRVAGVIAKKYGDTGFAGQVNLTFLGSAGQSFGCFLIPGMNIRLIGESNDYVGKGMAGGEIVVTPVEKIGFVPEEATIVGNTCLYGATGGQDIARGKAGERFAVRNSLAEAVVEGTGDHCCEYMTGGCVVVLGKVGRNVAAGMTGGLAYLLDEDDTLLPKINREIVKIQRVTAPAGELQLKSLIEAHVEKTGSSKGATILNEWEKYLPLFWQLVPPSEEDTPEASAAYVRTSTGEVTFQSA

SEQ ID NO: 303 - protein, 725 aa, Pseudomonas fluorescens
VDIEAEQKALAAEAWSPRKPIQQGGLLKFVHGGEYHAYNPDVVSTLQAAVQQGDYSKFKEYTSLVDNRPVSMIRDLLKVKTLDTPLDISEIEPLESVLKRFDSAGISLGALSPEAHEALAEAMNRLGARSNSGEGGEDPARYGTIKSSKIKQVATGRFGVTPEYLVNAEVLQIKVAQGAKPGEGGQLPGGKVNGLIAKLRYAVPGVTLISPPPHHDIYSIEDLSQLIFDLKQVNPKALVSVKLVAEAGVGTIAAGVAKAYADLITISGYDGGTGASPLTSIKYAGAPWELGLAETHQTLRGNDLRGKVRVQTDGGLKTGLDVIKAAILGAESFGFGTAPMIALGCKYLRICHLNNCATGVATQNDKLRKDHYIGTVDMVVNFFTYVAEETREWLAKLGVRSLEELIGRTDLLEVIEGQTAKQHHLDLTPLLGSDYIPADKPQFCQVDRNPPFDKGELAEKMVDMAAAAINDLSGAEFDLDICNCDRSIGARISGEIARKHGNQGMAKAPVTFRFKGTAGQSFGVWNAGGLNMYLEGDANDYVGKGMTGGKLVIVPPKGSVYKTQDSAIIGNTCLYGATGGKLFAAGTAGERFAVRNSGAHTVVEGTGDHCCEYMTGGFVCVLGKTGYNFGSGMTGGFAYVLDQDNTFVDRVNHELVEIQRISGEAMEAYRSHLQNVLNEYVAETDSEWGRELAENLDDYLRRFWLVKPKAANLKSLLSSTRANPQ

SEQ ID NO: 304 - protein, 1492 aa, Thermus thermophilus HB27
MSWKDAYPDIPLGRDACGIIAMAEKSGKPSHRVVRRTLESLYRMAHRAGAIRGEGDGTGIQTDIPRELWALFLEQAGLDPGLAHNPRFFVGHFFVPKKEAGRLQEFEDLLRREGQRLGVRPVLFRRGEVVSEVLGPVGRRTEPLFLQVAGLSPDGDAPLWELGLRLEASFPVHVVSLSTHSVVYKVRGAAELLKRYYPELSRPEFKSRIALGHNRYSTNTLSTFEQVQPFGLIGHNGEINTIERLRREMDFLGIPRTGGSDSQDLNRMLEGLIYRYGLTLPEAMDLVFPPVLGEIKALPEDLQDLYMALRQRFGPLAQGPAAIVSRHGDEAVFATDAMGLRPLWQFETPYELVFSSERGVFSAEEFVSEPKPLAPGEKVYLRLTPEGAKVLPFDRHQRQVLERVAARTPVEGYRVHLTGPLRQAPPPLAGGSGVEVEEKPAPPPLGLERAFGWDRWDQAYLEALAKTGNEPIGSLGYDGPLAALNPEKPNLSEFFKETVAVVTNPAIDREREVEHFSTRTLLGRRPLPDGRGGGRVEELLLPIVLEEDQALAEAFGTLTLSEVRARFKTKTLVPQFTVEEGLLAGLKRLEEEAVKAVEEGAEVLILSDREAFQGGVWIDVGLAVAAVNRALMKRDAEGVALRRRTSLLVHSGGVRNLHDVAFLLGLGAEAVAPWLMEEKARALEGRKGLAGVLEALKKGLEKVISTMGIHELRGYGRIFSAIGLKPELAEYFGTRNFLGSEKAGYGFLELERTLLEREGFLRAEKVMPAKDFRFNPRIYKAAQEVASGKAPYAHFQEKVRALERENPVAARQLLEVRFPERSDVAPEEVDLSVGAHSLPFVISAMSFGSQGEASFRAYAEAAKRLNMLCINGEGGEIPDMLGKYTPWRGQQVASGRFGVHAYMLNSASVIEIKIGQGAKPGEGGHLPGKKVSPKVAAARNAVPGVDLISPSNNHDLYSIEDLAQLIEELKTVNPKALVSVKVPVIPGIGTIAVGIAKAGADVITLSGFEGGTGAARLHALKYAGLPVELGVRRVHRALVRAGLRDKVEIWADGGLKTAYDVLRMVLLGADRVGMATMAMVAIGCTICRGCQLDTCHVGITTQIETVEEAMAHGLKRFVPQDLDRAVEQLTRFFGAMGEALRELVAALGARSLQELRGRSDLLYQRDHLEELDLSYFFAPVEEPEWLKDTSAHVLRKPLNQLTRTITEVVMAAYAEGSKRLVFQEGPVDSTDRALGAHLAGEIARQRLYGKGFDAEVELRFDAGSVAGNGLAAFNVEGMKVVVEGGAQDGVAKSAFGGTVAVLKGKNPFGAYVDGSVGKSFAYGAIGGLLIVEGVADSRFCIRLSGADVILGGEPERPLRDDLGNLAARAQAKGFAFEYMTRGRALVLGDPGPWICSGMTGGRVYLRHWPEMGLTEEAMKRRLAKGAKVAVKPLDARGVEDVRELLSAYIRVLREAKREEKAKRLEKLLENPAEHFRMVEPVSQQVDQGVSTE

SEQ ID NO: 305 - protein, 1533 aa, Synechococcus sp. CC9605
MSDAIRSAVWPYCDSPAPQVVAGEKDACGVGFLAQLQGQASHWVLEQALRGLGCMEHRGGCGGDGDSGDGAGVLCEIPWSYLKAVWPEAAAARGLGMMFMPTDASRRAEVRGLCDEEARSLGMQPLGWRTVPVEPAVLGPLARATAPVIEQWVLNGDADDSTFDGQLLRLRRRIGARVRAALGAEVAQDVYVASLSSRTVVYKGMVRSEVLEQFYADLQDSRFEVSFAVYHRRFSTNTLPRWPLAQPMRLLGHNGEINTLLGNLNWAKASEASLENVWGEAADDLIPVVNPAFSDSANLDATLELMVRSGRSITDSLITLVPEAFRNQPDLDSRPDVTAMYEFNAGIQEPWDGPALLVFADGKRVGATLDRNGLRPARWCTTADGFVIMGSETGVVDLSGKTIVQKGRLGPGQMVAVDLERGELLDNWSVKEDAARRFPYADWLQKHRRGVPPQPWTQDRKVGELDLLRLQTAMGFTAEDFDLIIEDMAALGKEPTYCMGDDIPLAVLSDKPHLLYDYFKQRFAQVTNPPIDPLREKLVMSLEMHLGERRPALKPQPEAASVIHLETPVLNEAELAAISEQGLPVKTVSTQVAVESCAGGLQHAIAALCSVAEQAVRDGAQVLVLSDRVGGTGAAAPLTPTTVAMPALLAVGAVHHHLLRQKLRLQCSLVVDTAQCWSTHHMACLIGYGASAVCPWLTWETTRHWLDHPKTKKRIEQGKLPALDANQAQANVRESLENGLRKILSKIGISLLASYHGAQIFEAIGLGADVVETAFAGTTSRVAGMTLAELANETLSMHAKAFPELNRSKLEFMGFVQYRSGAEYHRNNPELSKALHKAVAQGPGYDHFSTYQDLLENRPVMALRDLLEFKLAPNPVPLDQVESVESICTRFCTGGMSLGALSREAHEVLAVAMNRIGGKSNSGEGGEDPARFQILKDVDGEGRSASFPSIGGLRNGDTACSAIKQVASGRFGVTAEYLRSGKQLEIKVAQGAKPGEGGQLPGPKVDKYIAWLRNSKPGVALISPPPHHDIYSIEDLAQLIHDLHQVHPAAPVSVKLVAEIGIGTIAAGVAKANADVIQISGHDGGTGASPLSSIKHAGSPWELGLTEVHRSLVENGLRDRVLLRADGGLKTGWDVMIAALLGAEEYGFGSIAMIAEGCVMARVCHTNNCPVGVATQKENLRKRFTGVPEHVVNFFWYVAEEVRQLMSLLGVSRLEELIGRTDLLQARSVDLAKTKGVDLSSLRAPISGAEDRSWLRHSDEAHGNGPILEDQLLADAELMAALENHGSLSRSIEIINTDRSVCARLAGEIAQRHGNRGFNGQLDLTFRGAAGQSFGAFLVQGMQVRLEGEANDYVGKGINSGCITLVPSDGCASPGDQVILGNTCLYGATGGELFANGRAGERFGVRNSGARAVVEGAGDHCCEYMTGGVVVVLGSTGRNVGAGMTGGVTFLLDEEGHVAPRVNPEIVEVCTITTHEQESLLKGLLERHVALTGSEKAAALLADWSAAKGRFKVLVPPSERESMGLADKQAVAA

SEQ ID NO: 306 - protein, 500 aa, Dehalococcoides ethenogenes 195
MKTFLPSKFIVDRIEDRCIKCKVCITQCSFDTHYYDEDDDQIKVRNQNCVGCHRCVTFCPTNALVVRNNPLEYRQNANWTPEMIEDIFKQAETGGVLLTGMGMDKAKPIYWDKLLINASQVTNPSIDPLREPMELTTYLGRRPDKAAFDNCGNVEENITPLVKIDVPVMFSAMSYGAISLNVHRSLAQAAKNMGTMWNTGEGGLHSSLMEFKDNTIVQVASGRYGVQNDYLNSGRIVEIKIGQGAKPGIGGHLPGEKVSADVSLTRMIPMGTDAISPAPQHDIYSIEDLSQLIYALKEATHYRVPISVKIAAVHNVSAIASGIVRAGADIVTIDGMRGATGAAPKVIRDNVGIPIELALAAVDSRLREEGIRNQASLVISGGIRNSGDVFKAIALGADAVNIGTAALVALGCHLCQQCHTGKCAWGICTSDLALTKRINPEIGAKRLTNLLRGWSLEIKDMLGGLGVNAIESLRGNRLHLRGVGLSAEELKILGVRAAGE

SEQ ID NO: 307 - protein, 1496 aa, Campylobacter jejuni subsp. jejuni NCTC 11168
MDLENILENNQSIGLYHPKNEHDACGIAAVANIRGIASYKVICDALEILMNLEHRGGTGAEENSGDGAGILIQIPHDFFKTQELGFELPKKGDYAVAQMFLSPNTDAKEEAKEIFLQGLKDKKLEFLGFREVPFNPSDIGASALKAMPYFLQAFVKKPSKISAGLEFERVLYSTRRLIEKRAINVPKFYFSSFSSRTIVYKGMLLSTQLSDFYLDFKDVNMKSAIALVHSRFSTNTFPSWERAHPNRYMVHNGEINTIRGNVDSIRAREGLMQSEYFENLDEIFPIIAKLSSDSAMFDNTLEFLALNGRTLEEAFMMMVPEPWHKNENMESKKRAFYEYHSLLMEPWDGPAAIVFTDGVIMGASLDRNGFRPSRYYLTKDDMLILSSETGALKLDEKNIKAKKRLEPGKLLLVDTARGRVIADNEIKEHYANAKPYKKWLKNLVELEKQKSGVYKHQFLKEDEVLKLQKAFGWSYDELKMSVAAMAQNGKEAIAAMGVDTPLAILSKTYQPLYNYFKQLFAQVTNPPLDAIREEIVTSTRIYLGSEGNLLKPDENNAKRVKIALPVISNEELFEVKALNKFQVKEFSILYDYSKKTLEKALDELCVKIEDEVKKGVSIIILSDKGVDEKNAYIPALLAVSGVHNHLVRKNLRTHTSLIIESGEPREIHHFACLLGYGATVINPYLVYESIQKLIANKDLNLSYEKAVENFIKASSSGIVKIASKMGVSTLQSYNGSALFECLGLSSKVIDKYFTSTTSRIEGMDLEDFEKELIALHKHAFNDTHKALDSKGIHGFRSAKEEHLIDPLVIFNLQQACRNKDYKSFKKYSALVDEKQVNLRSLMEFDFSEAISIDKVESVESIVKRFRTGAMSYGSISKEAHECLAQAMNKIGAKSNSGEGGEDEERYEIKEGVDKNSAIKQVASGRFGVDLNYLSHAKEIQIKVAQGAKPGEGGQLMGFKVYPWIAKARHSTAGVTLISPPPHHDIYSIEDLAQLIYDLKHANKDAKISVKLVSENGIGTVAAGVAKAGANLILVSGYDGGTGASPRTSIPHAGIPWELGLAETHQTLILNKLRDRVRLETDGKLMNGRDLAIAALLGAEEFGFATAPLIVLGCTMMRVCHLNTCPFGIATQDTELRDRFKGKVDDVINFMYFIAEELREYMARLGFERLDDMIGRVDKLRQKSVQGKAGKLNLDKILKSLPTYNRTAVHFKDYKDNKLEKTIDYRILLPLCKNAVEKKEPIKLSLEVGNQSRTFATMLSSEILKTYGKDALDEDSIHIKAIGNAGNSFGAFLLKGIKLEIIGDSNDYLGKGLSGGKIIAKISNEATFSPEENIIAGNACLYGATKGEVYLDGIAGERFCVRNSGALAVVLGTGVHGCEYMTGGQVVVLGDVGANFAAGMSGGVVYIFGRHNEAHVNTELVDIKDLNAKDEKELKAVIEKHITYTDSKKAKDILEKFDKKDFFKVMPRDYEKMLKMLDLCKNEKDPNLAAFLKITQK

SEQ ID NO: 308 - protein, 497 aa, Silicibacter sp. TM1040
MGFAMNAVSILAVMFICLIGVLGLVALIMFLIDRSQTQDAIRRNYPVLGRFRHLFSTLGEFFRQYFFAMDREELPFNRAQREWIARACAGVTNTVAFGSTRNTSVPGTPIFVNAPFPPLDDQFASAEPMLIGPTARVPYNAPSFFNISGMSYGALSRPAITALSRGAREAGVWLNTGEGGLSPFHLDGGCDIVFQIGTAKYGVRDTAGNLSDARLKELAEIPQVKMFELKLAQGAKPGKGGILPAEKVNAEIAEIRGITEGEASISPNRHLDIANYDDLLDIVARIREVTGKPVGIKTVAGSEVALREMFLNFAARPEDVPDCITIDGGEGGTGAAPMPLIDLVGMSVREALPLVCNLRDEYGFKDRIRLISSGKLVNPGDVAWALAAGADFVTSARGFMFSLGCIQALKCNRNTCPTGITTHDPRFQKGLVVEDKYKKVARYAREVIHEVETIAHSVGVDEPRKMRRRHVRIVGEGGASVPMNVDQPSYGSRGSNA

SEQ ID NO: 309 - protein, 1524 aa, Prochlorococcus marinus str. AS9601
MGESIKRIGGPYQDSYSPNGIIGEKDACGVGFIANVKGIESNWILKQSIKGLNCMEHRGGCGGDSDSGDGAGILCSIPWNYLEKEVNLKNKKESDKGLGMVFMPNKKEKIELCKSICDKEAEKLNVNETFWRTVPVNNEILGPLAKTNAPFICQWILCIDKKDHQNIEKILFQLRKRIEKIIRETLKNHVGDCEFYFASLSSQTVVYKGMVRSEILSEFYQDLKQESFKVSFSVYHRRFSTNTLPKWPLAQPMRFLGHNGEINTLLGNINWAKASETHIDDFWGELSNEIKPIVDVNKSDSSNLDATLEINIRSGQPITDSLLKLVPEAFRDQPELEQRKDIKSFYEYSASIQEAWDGPALLVFADGNFVGATLDRNGLRPARYSITNDGFVVMGSETGVVDLEEERVIEKGRLGPGQMLAVDLHQNRILRNWEVKSEAAQRHDYKKLLSNRTIKIENSQWVKDCELKDLELLQQQTAYGFSAEDNDLILDSMASLAKEPTYCMGDDIPLAVLSSKPHILYDYFKQRFAQVTNPPIDPLREKLVMSLEMHLGERCTPFEIKDPKPFVHLQSPILNEEELISIKKSKIKSQTISSLFDIEEGVQGLENQLLAICKQSELSIKEGCSLIIISDKGINPKKTFIPPLLAVGAIHHYLLKKEIRLKASLIIETGQCWSTHHLACLIGYGASAVCPWLTFEAGRHWLKHPKTQKLIDSKKIDPLSIIGVQENIKKALEDGLRKILSKIGISLLSSYHGAQIFEAVGLGSDLIKMAFDGTTSRIAGITLKELTNETLSIHTKAYPEIDLKKLEFLGFVQFRNNGEYHSNNPEMSKVLHSAVKLGPGYDHFETYKKLISNRPTTSLRDLLTINSKRKSIPLEEVESVESICKRFCTGGMSLGALSREAHEVLAVAMNRIGGKSNSGEGGEDPARFNVLNDIDENTQSATLPFIKGLENGDTACSAIKQIASGRFGVTPEYLRSGKQLEIKMAQGAKPGEGGQLPGPKVDSYIAKLRNSKPGVALISPPPHHDIYSIEDLAQLIHDLHQVHPKAKVSVKLVSEIGIGTIAAGVSKANADVIQISGHDGGTGASPLSSIKHAGLPWELGVAEVHKSLLENNLRERVILRTDGGLKTGWDVVIAALLGAEEYGFGSVAMIAEGCIMARVCHTNKCPVGVATQKEELRKRFKGIPENVVNFFLYIAEEVRQIMSSIGVSNMEELIGNQEFLSARNIDLPKTSNIDLSSLLNKKYLNTDRSWLKHSKAAHSNGFVLEDEFLSDTEFVNSIKNHEILTKEIEIKNTDRSVCAKISGEIAELHGNTGFNGELNLNFKGCAGQSFGAFLLKGMNVQLIGEANDYVCKGMNGGILTIIPPKIEKTSSEQVILGNTCLYGATGGKLFALGKSGERFAVRNSGATAVTEGAGDHCCEYMTGGKVVILGSIGRNISAGMTGGIAFIIDEKNDLSNKVNKEIVSIHKITSSKQEDILLEIIREYLAKTNSLKAAKIIENWSYYKSTFRLIVPPSEEEMLGIKKM

SEQ ID NO: 310 - protein, 555 aa, Thermodesulfovibrio yellowstonii DSM 11347
MEPATGLKLDYNHKLTIKEFPYIVRWREDRCKRCGQCTAVCPNGAIKPAVKYTRVIESGGDTPKPRPVRRIIHVIEQVNNMENYCTGCAMCALVCPNNAIEPEYNPQNKFLFYKNRGGEGYKRGGRRNDPGVSTLDRIKFTRISMLTDPALDAGRHEFRVRSYIGRILPPEELPLKVKDGKLVVDKSSGKFIPPVREIFPIMIGSMSIGALSPHMWEGLAMGVAYLNEVEGIPVVMCSGEGGFPPRLLKSRYVKYFVLQIASGYFGWDSIIHTLPYMTEDPAAIEIKYGQGAKPGDGGLLMAPKVIKLIAEIRGVPKYVDLPSPPTHQTKYSIEEAVMKMIQSMSMAFGFRIPVYPKISGTKTAKAVLNNLARNPYAAALCIDGEDGGTGAAYNVSLDKMGHPIASNIRECYLDLVKQGKQNELPLIAAGGIGKKGNLAANAAALIMLGASAVAIGKYIMQATADCLGDEYNRCNLCNTGKCPRGITTQDPKLYRRLDPDKVAERVVEIFKAADVELRKIFAPMGRSTELPIGMSDGLSIDDKAMAERLEISYAC

SEQ ID NO: 311 - protein, 512 aa, Candidatus Pelagibacter ubique HTCC1002
MDKPTIADNKPKKVELVQNEEYMFCTCGKSKNQPFCDWSHAGTSFEPINFKAEETGDAYLCMCKHSSTKPYCDGTHKNFTSDQINKSEEVSGTNETKSTEEEPHLAYIHELAKNGLTKLGHHGEMGAMGVPSKDLPKWEDIQILTAQLAKKPFLDNDKVETDIIIGKNSNKPLTLKIPIFVSDMSFGALSEEAKIALAKGAEGAGTGICSGEGGMLLEEQKNNSKYFYELASAKFGYSEDKLKNIQAFHFKGGQAAKTGTGGHLPGNKVKGKISEVRQIPEGEDAISPSTFKDLTTVDDFLKFSNRVRELTGGIPIGFKLSAQHIEDDIEFAVSASADYIILDGRGGGTGAAPLIFRDNISVPTIPALARARNYLDKKGYDHVSLIVTGGLRTSADFVKALALGADGIAISNSAMQAIGCVGARMCNTNNCPAGIATQRPELRKKLNIDESSARLTRFFNASVDLMKILARACGHDHLNKLSINDLTTWKKEMSELSGVSFGGIINNKQNNK

SEQ ID NO: 312 - protein, 1362 aa, Oryza sativa
  misc_feature (820)..(820): Xaa can be any naturally occurring amino acid
  misc_feature (832)..(832): Xaa can be any naturally occurring amino acid
  misc_feature (840)..(840): Xaa can be any naturally occurring amino acid
  misc_feature (888)..(888): Xaa can be any naturally occurring amino acid
MKPSPHFPEIGKKPKDLIAKEHGFNIAAYISSGADVIAAALRKHVEEEARDLSGEAFLRFMEQLYEQICSLLQSNDVAENLLALRAIDALIDMPFGEGASKVSKFANFLRTVFEVKRDPEVLVPASAVLGHLAKAGGAMTADEVERQIKTALGWLGGDRVEYRRFASVLILKEMAENASTVFNVHVPEFVDAIWVALRDPKQAVRERAVEALRACLHVIEKRETRWRVQWYYRMCEAAQVGLGKNASVHSIHGSLLAVGELLRNTGEFMMSRYREVADIVLNYLRHRDQLVRRSITSLLPRIAHFLRDRFVTNYLKICMDHILFVLRTPDERASGFVALGEMAGALGAELVPYLPLITSHLHDAIAPRRGRPSLEAISCVGSFAKAMGPAMEPHIRGGLLDAMFSAGLSDKLVEALESISTSIPSLLPTIQERLLDCISQALPKSSVRPGAAVGRGSRSSSLQQFVDSGGPVLVQLALGTLANFNFKGHELLEFARESVILYLEDEDCSTRKAAATCCCKLVAHSLSASSSSQFSSNRPNRMGGAKRRRLVEEIVEKLLMAAVADADVGVRSSVFKALYRNPSFDDFLAQADIMTSIFVALNDEEYHVRELAISVAGRLSEKNPAYVLPALRRYLIQLLTYLDQSMDSKCREESARLLGCLIRSCARLILPYIAPIHKALVARLREGTGPNANNALAAGVLATVGELAKVGGFAMRQYLPELMPLVVDALLDGGAVSKREVAVATLGQVIQSTGYVISPYNEYPPLLGLLLKLLNGELEWSTRLEVLKVLGIMGALDPHAHKRNQHKLPGQHREVLRPTXKQHNILFPWKNXPTDFWPSXFQHLRTIIQQLQLVLSCGFFMILPFQVIIRWWLALLYLFLSRWDLAVXPYLPKVLPELFRAVRMCEDGGLKEFITWKLGTLVSIVRQVLHLVEQLCLALNDEFRMYILHILPSCIQVLGDAERCNDYYYVPDILHTLEVFGGNLDEHMHLVAPVLVRLFKVELVDIRRRAIVTLTKLIPTVQLCITRLLICLSVARNNDDLRKDAAEALCCLAHALGEDFTIFVSSIHKLLVKHHMRYRKWDEIENRLLRREPLISENLSVQKYTQCPPEVISDPLDDFGGVPSEEADETQRQPRSHQVNDVRLRSAGEASQRSTREDWAEWMRHFSIALLKESPSPALRTCARLAQLQPSVGRELFAAGFASCWAQMNETSQEQLVRSLKTAFSSQNIPPEILATLLNLAEFMEHDEKPLPIDTRLLGALAEKCRAFAKALHYKEMEFEAVCSKKMGANPVTVVESLIHINNQLHQHEAAIGILTYSQQHLEVQLKESWYEKLHRWDEALKAYKAKSSQASGPLQNLDATL

SEQ ID NO: 313 - protein, 491 aa, Glycine max
ARARLYYGDGNVEAMFATLDPLHDMLERGPETLREIAFQQSFGRDLQDARESCRRFQQYGELNDLNQAWDLYYQIFKRIARILPSFSILELQQVSPKLLAARDLELAVPGTYHSGKPIIRISKFAESLDVLTSKQRPRKLKVAGSDGKDHAFLLKGHEDLRQDERVMQLFGLVNTLLSKDPETFKRHLMTIPYPIIPLAPNSGLLGWVDNTDTLHVLVKNYRDSRKILLNIEHRIMLQMAPDYDHMMLIQKMEVFEYALDNTTGQDLYRVLWLKSRNSEAWLDRRTQYTRTLAVMSMVGHILGLGDRHPSNLLLERISGSVVHVDFGDCFEVAMVRDKYPERVPFRLTRMLIQAMEVSGIEGTFRITCENSMRVLRDHKESIMAVLEAFVHDPLINWRLINTGRRGGAGANERGTSKRVGVDESNPLDDETNEALNQRALQVVDRVQQKLTGRDFKPTQVLDVSEQVQKLILQSTSVENLCQTFIGWCAFW

SEQ ID NO: 314 - protein, 1486 aa, Colwellia psychrerythraea 34H
MQLYDHSVQKDNCGFGLIAHQQGETSHKLIKTAISALDRMQHRGGIASDGKTGDGCGLLLQKPDSFFRAVAADNKWKLGKKYAVGMIFLSPDPVEAALSKKVLEEELANECLTLIGWRTVPIDTSVLGEIAIGNLPTIEQVFVDAPPGWRNLELERRLYMARRRAEKRITDEKFYVASLSCLVTIYKGLMMPVDLPNFYLDLADIRMQSAICVFHQRFSTNTSPQWHLAQPFRYLAHNGEINTINGNRQWSRARTHRFKSPLLPDLQDAAPFVGQTGSDSSSLDNMLELFLAGGMDLYRAMRLLMPPAWQNSPLMDDDLRAFYEFNSMHMEPWDGPAGVVMTNGRHVACNLDRNGLRPARYVITRNGFITLASEVGIWDYGEDEVVEKGRVGPGEMLAIDTYTGKISHSADIDNNLKERHPYREWLTKNIRRLVPFDQLEANLIGQRVFTDAEMNQYHKMFNYSYEEIQQVIRTLAENGQEATGSMGDDTPMAVLSSQTRTLYDYFRQQFAQVTNPPIDPLRERYVMSLGTCIGREHNVFNETSGHADRMLFSTPVLMYTGLKQLRDLDPEHYRSDTLTLSFDAKEGLEAAIRRLCNEAETLVRDSSTVILVLSDRNIQPGLLVIPAAMAVGAVQKRLVDQQLRCDSNIIVETGSVRDSHQYAVLLGLGATAIYPYLAFETIEQLVEQKQIDLSARDAIVNYREGINKGLLKILSKMGISTIASYRCAGLFEVIGLNEDIMELCFSDLPSRIKGADFSDIQQDAANLARKAFLPHQKVNHGGLLKYVHGGEYHAFNPNVVNYLQRAVQNGDYNDYRTFADEVNQRPVATLRDLLKLRDDCEPIELDQVESEGEMFKRFDSAAMSIGALSPEAHEALAIAMNRLGGFSNSGEGGEDERRFGTVKNSRIKQIASGRFGVTPHYLVNADVLQIKVAQGAKPGEGGQLPGDKVSPLIAKLRYSVPGVTLISPPPHHDIYSIEDLAQLIFDLKQVNPKAVISVKLVSGPGVGTIASGVAKAYADFITISGYDGGTAASPLSSVKYAGCPWELGLAEAHQSLVTNGLRHKVRLQVDGGLKTGVDIVKAAILGAESFGFGTAPMVALGCKFLRICHLNNCATGVATQDEVLREQFFKGLPDQVMNYFKFIAREVREILAGLGVKSLTEIIGRTDLLIQIDGLTSKQSKLDLSPIIAPVVAGENTALHQTEENTAFDKGQLNQKILAATSDSVSHSKGGEYRFTIQNTDRSVGATLSGEIARHHGDQGMASSPITIHLSGTAGQSFGVWNAGGLNMILTGDANDYVGKGMAGGKLTIKPPVGVEYASHKTMIMGNTCLYGATGGVLFSSGRAGERFAVRNSGCHAVVEGTGDHACEYMTGGIVTILGDTGVNFGAGMTGGFAYILDETGDLDVRLNKESIEMLAIEDLTIHQEHLRGIINQHFEETGSLRAHEMLHDFDRYAPLFKLIKPTATDVKTLLGHRSRSSAELRVQAQ

SEQ ID NO: 315 - protein, 174 aa, Picea abies
LVGVGDGPWDTMRQFDDKLPRREFDNFQFVNFTSIMSKNLPQSAKEAASALAALMEIPIQYKATIEFNILGRRVGSVPNIPPRNPPLPTIRHDAVPSSFPNSETFQSTASHSISSTENSPAGMSSERESQACPVCLTNSRDMVFGCGHMACRDCSPRLSNCPICRARISTRLRV

SEQ ID NO: 316 - protein, 747 aa, Sulfolobus solfataricus P2
MIIEYNKLGTILYSRISHKQLYNIFHYSYHEVRLLVYNKYLPIPKQFNDEFWTVEKVEHIRYLSLTGKPYKIFNEDMNSLRVLDKVRFKLDKATSISLTPKANLELEFSGIYMKSPLYLGDMSYGALSGNPNIAIATAADLTETLAGTGEGGLHPEVAKHKRIFVQWASARFGVDIRVLTAGMGVVIKIGQGAKPGIGGHLPGNKVTEPISLTRRIPIGIDAISPAPHHDIYSIEDLGQRIEALKEATGRPVFVKVAATNYIPYIVSGIARMGADGVIIDGHGAGTGATPVVIRDNVGIPIELAIASADKILRREGLRDKFTIIAAGRVSSATDAAKLFALGADIVSVGTGALIAMGCVMVHKCHVGSCPTGLTAKIDGTRVVDTEFGVKMLVNFINGFSLELANILDNLGLNNIRELRGRRDLLYGHGLSKDTLETLGIDGTEDEANPKLGELWNRRIIAYMHELMNKGNPVITSMGSTAPPDVEKPARIIDWLRSDGAQVTRPSIDPYREDVDTSFYLKGGEIYLSLPIIFDITEAPLEYKEAFSWSALALSSAVFDYETIDKYAEVFISSDGRGIARWSRNEIYENSYLLIPADENVIDEVIGMGVQGFIIDEDSGNSDLELVVSALDTKLKEVGVRNHYDILAKSSRLRHSADAFKLILLGADSVIMPYFILEKAIGEGNKGNLKEKAFSLITGMKKEIALLAGAAGVYSVQSTLTGNRELLRSINLNHSIRKALRIKPAGSL

SEQ ID NO: 317 - protein, 1515 aa, Magnetospirillum magnetotacticum MS-1
MGQAAEAEESTMSDFVAQYLANQEILESAGIDTSPHDACGVGMVAALDGKPRRDVVEAGIQALSVLFHRGAVDADGKTGDGAGIHVEIPQDFFKEHVANSGHAVAAGRLAVGMVFLPKTDLGAQENCRCIVETEILNFGYSIYGWRQVPVDVSIIGEKANATRPEIEQIMIANTLGKSEERFEADLFVIRRRIEKRVLGNHITDFYICSLSCRSIIYKGMFLAEQLTSFYPDLLDKRFVSRFAIYHQRYSTNTFPTWRLAQPFRMLAHNGEINTLTGNINWMKAHEPRMEHEVFGASMDDLKPVVQPGGSDSAALDNVFEVMCRAGRPAPLVKQMLIPESLGSNALMPEAHRTFFGYCNSVIEPWDGPAAICATDGSWAVAGVDRNGLRPMRFTITKTGLLILGSETGMVKVKDCDVVEKGRVGPGQSIAIDLDAGKFYRDTEIKDLLASRRNYSAWIKRITELDSLVKTGAPEPAELSSDELRRRQAAYGMTMEDMELILHPMVEDAKEAIGSMGDDTPLAVLSAGYRGLHHFFKQNFSQVTNPPIDSLRESRVMSLRTRLGNLGNILDEDESQCDLLQLESPVLSNAEFAAMRKYMGEAAAAIDCTFDPKGGIEALRDALARVRRESEEAVRGGCTHLILTDEGIGESRAAIPMILAAGGVHSHLVRLSLRTWTSLNVRSGECLDVHYFAVLIGVGATTVNAYLAQEAIAERQRRGLFGSMPLEECVRRYKYALDQGLLKIMAKMGISIVSSYRGGYNFEAVGLSRTLVAEFFPGMTSRISGIGLSGIQKKTVEQHATGFTGPAPALPIGGFYRVRRGSEAHSFDGTLIHLLQTAVASDSYATYKKYSDGMRRLPPITIRDLLDLKPAGAPISLDEVESITEIRKRFLTPGMSLGALSPEAHGTLNIAMNRIGAKSVSGEGGEDRERYRPRPNGDNANSAVKQIASGRFGVTAEYLNMCREIEIKVAQGAKPGEGGQLPGFKVTVEIAKLRHATPGVMLISPPPHHDIYSIEDLAQLIYDLKQINPQARVTVKLVSRSGIGTVAAGVAKAKADTILVSGHVGGTGASPQTSIKFAGLPWELGLSEAHQVLTLNRLRHRVKLRTDGGLKTGRDIVIAAMLGAEEFGIGTSSLVAMGCIMVRQCHSNTCPVGVCTQDLSLREKFTGSPEKVVNLFSFIAEEVREILASLGVRSLAEIIGRADMLHQVSRGASHLDDLDLNPLLAQADTGGFPRYCVEDKTQEVPETLDAQMIIDAKPALEDGEKMQLDYNVRNVQRAIGTKLSHKIFKRHGMTGLEPGHVTVRLRGSAGQSLGAFAVQGLTLEVFGDSNDYVGKGLSGGTIIVRPPVASNLKSNQNTIIGNTVLYGATAGKLFAAGQAGERFAVRNSGAETVIEGCGSNGCEYMTGGTAVILGPVGANFAAGMTGGMAFVYDSDQSFAKRVNPESVIWQRLETPHWEGVLKSLVQEHAAVTGSAWAESLLADWDREVPRFWQVVPKEMLSRLTHPVGRDRNAAAE

SEQ ID NO: 318 - protein, 1517 aa, Shigella flexneri 2a str. 2457T
MTRKPRRHALSVPVRSGSEVGFPQSLGEVHDMLYDKSLERDNCGFGLIAHIEGEPSHKVVRTAIHALARMQHRGAILADGKTGDGCGLLLQKPDRFFRIVAQERGWRLAKNYAVGMLFLNKDPELAAAARRIVEEELQRETLSIVGWRDVPTNEGVLGEIALSSLPRIEQIFVNAPAGWRPRDMERRLFIARRRIEKRLEADKDFYVCSLSNLVNIYKGLCMPADLPRFYLDLADLRLESAICLFHQRFSTNTVPRWPLAQPFRYLAHNGEINTITGNRQWARARTYKFQTPLIPDLHDAAPFVNETGSDSSSMDNMLELLLAGGMDIIRAMRLLVPPAWQNNPDMDPELRAFFDFNSMHMEPWDGPAGIVMSDGRFAACNLDRNGLRPARYVITKDKLITCASEVGIWDYQPDEVVEKGRVGPGELMVIDTRSGRILHSAETDDDLKSRHPYKEWMEKNVRRLVPFEDLPDEEVGSRELDDDTLASYQKQFNYSAEELDSVIRVLGENGQEAVGSMGDDTPFAVLSSQPRIIYDYFRQQFAQVTNPPIDPLREAHVMSLATSIGREMNVFCEAEGQAHRLSFKSPILLYSDFKQLTTMKEEHYRADTLDITFDVTKTTLEATVKELCDKAEKMVRSGTVLLVLSDRNIAKDRLPVPAPMAVGAIQTRLVDQSLRCDANIIVETASARDPHHFAVLLGFGATAIYPYLAYETLGRLVDTHAIAKDYRTVMLNYRNGINKGLYKIMSKMGISTIASYRCSKLFEAVGLHDDVVGLCFQGAVSRIGGASFEDFQQDLLNLSKRAWLARKPISQGGLLKYVHGGEYHAYNPDVVRTLQQAVQSGEYSDYQEYAKLVNERPATTLRDLLAITPGENAVNIADVEPASELFKRFDTAAMSIGALSPEAHEALAEAMNSIGGNSNSGEGGEDPARYGTNKVSRIKQVASGRFGVTPAYLVNADVIQIKVAQGAKPGEGGQLPGDKVTPYIAKLRYSVPGVTLISPPPHHDIYSIEDLAQLIFDLKQVNPKAMISVKLVSEPGVGTIATGVAKAYADLITIAGYDGGTGASPLSSVKYAGCPWELGLVETQQALVANGLRHKIRLQVDGGLKTGVDIIKAAILGAESFGFGTGPMVALGCKYLRICHLNNCATGVATQDDKLRKNHYHGLPFKVTNYFEFIARETRELMAQLGVTRLVDLIGRTDLLKELDGFTAKQQKLALSKLLETAEPHAGKSLYCTENNPPFDNGLLNAQLLQQAKPFVDERQSKTFWFDIRNTDRSVGASLSGYIAQTHGDQGLAADPIKAYFNGTAGQSFGVWNAGGVELYLTGDANDYVGKGMAGGLIAIRPPVGSAFRSHEASIIGNTCLYGATGGRLYAAGRAGERFGVRNSGAITVVEGIGDNGCEYMTGGIVCILGKTGVNFGAGMTGGFAYVLDESGDFRKRVNPELVEVLSVDDLAIHEEHLRGLITEHVQHTGSQRGEEILANWSTFATKFALVKPKSSDVKALLGHRSRSAAELRVQAQ

SEQ ID NO: 319 - protein, 1487 aa, Vibrio sp. Ex25
MALYDPSLEKDNCGFGLIAHMEGEQSHKLVRTAISALDRMTHRGGIAADGKTGDGCGLLLQKPDSYLRLIAEENGFNLGKQYAVGMIFFNQDPVKAQLAKDIVNRELAQETLTVAGWREVPTNSEVLGPIAANSLPNIQQVFISAPAGWRERDIERRLYIARRRIEKQITEDPDFYICSLSTQVLVYKGLCMPADLPRFYLDLADLRMESAICLFHQRFSTNTQPRWPLAQPFRYLAHNGEINTIEGNRQWARARAYKFSSPLLPDLQTAAPFVNETGSDSSSLDNMLDLFLAGGMDIFRAMRMLVPPAWQNHPDMDPDLRAFYDFNSKHMEPWDGPAGIVLSDGRYAACNLDRNGLRPARYVITKDKLITLASEVGIWNYAPDEVAEKGRVGPGELLVIDTRKGKLWQSSEIDNDLKSRHPYREWMENNVRKLTPFSQLPEDQVGERSFDEDLLKTYQKQFAMTNEEVDQVLRVLGEMGQEAVGSMGDDTPMAVLSSKERLVTDYFRQKFAQVTNPPIDPLREKHVMSLATSIGKEMNVFCETDGHAHRVTFDSPVLLYSDMQQLLELGDDHYRNTILDINYDPQEKDLKQAINDLCEQAEQVVREGTVLVVLSDRALVKGKLPIPAAMAVGAVQTRLIDANLRCDANIVVETATARDPHQFAVLLGFGATAIYPYLAYEALGKLIDDKALEKDYRDVMQNYQYGINKGLYKIMSKMGISTIASYRCSQLFEAVGLSQDVVDLCFKGVTTRIEGANFDDFQQDLTNLSRKAWAKRKSIDHGGLLKYVHGGEYHAYNPDVVGTLQQAVKSGESNDYQSFAKQVNQRPVAMLRDLMSLKKSDSPLPLEQIEPRTELFKRFDSAAMSIGALSPEAHEALATAMNRLGGYSNSGEGGEDPRRFGTERNSRIKQIASGRFGVTPHYLTNADVLQIKVAQGAKPGEGGQLPGHKVTAEIAKLRYSVQGVTLISPPPHHDIYSIEDLAQLIFDLKQVNPNALVSVKLVSEPGVGTIATGVAKAYADLITISGYDGGTAASPLTSVKYAGSPWELGLAETQQALVANGLRHKIRLQVDGGLKTGLDVVKAAILGAESFGFGTAPMVAMGCKFLRICHLNNCATGVATQDETLRKEYFKGLPEMVMNYFTGLAEEVRELLSELGVEKLTDLIGRTDLLEAVEGFTAKQTKLDLSNILEAPVSPEGHPLFWTEPNKPFDKAELNQKIIDDAMHAVENSQSASFFYNVINTDRSVGARLSGEIAKRYGNQGLAASPIKIYLDGTAGQSFGVWNAGGVELYLTGDANDYVGKGMAGGKIAIKPHLGTAFKCHEATIIGNTCLYGATGGKLFAAGKAGERFGVRNSGTIAVIEGAGDNACEYMTGGIVAILGATGVNFGAGMTGGFAYVLDENQSFEGRVNTESVEAISLSDLYIHQEHLRGLIAEHLEETGSSHAENILANFDEWIPKFYLVKPQAADLRTLLGHQSRSAAELRVQAQ

SEQ ID NO: 320 - protein, 254 aa, Triticum aestivum
MLLPSSSSSAYDPKGDSFGKSVDDHMRSTLTFGDKHSVYAGQNTDYGHPMACISYPFNDSGSGVWAAYGSRAMFQPLMAGGGASATARVPLPVELAADEPIFVNPKQYNGILRRRQLRAKLEAQNKLTKNRKPYLHESRHLHAMKRARGSGGRFLNSKQLKQQQQSGSACTKAIADGANSLGSTHLRLGSGAAGDRTNSVSKAMSSQENSKRVAAPAPAFTMIQAARKDDDFFHHHAHHLSFSGHFGQSSDRYT

SEQ ID NO: 321 - protein, 234 aa, Glycine max
  misc_feature (113)..(113): Xaa can be any naturally occurring amino acid
MKPFLLSHPDTMYNCSQVYCSHSLAHTSYPCGDPYFGSSIVAYGTQAITQQMVPQMLGLASTRIALPVELAEDGPIYVNAKQYHGILRRRQSRAKLKAQNKLIKSRKPYLHEXSRHRHALKRVRGTGGRFLSAKQLQQFNAELVTDAHSGPGPVNVYQKKDASEAESHPSRTGKNASITFTAISGLTSMSGNSVSFRRPEHNFLGNSPNIGGSSQCSGGLTFGGGARQCTSVGR

SEQ ID NO: 322 - protein, 420 aa, Oryza sativa Indica Group; identical to SEQ ID NO: 270

SEQ ID NO: 323 - protein, 1532 aa, Synechococcus sp. WH 7803
MSHPTGSLWPYSDSAAPEAVAGEKDACGVGFLAQLSGETSHWVLQQALRGLGCMEHRGGCGGDGDSGDGAGVLCQIPWTYLKAVWPEAASARGLGMMFMPQDPERRELARRFCKEEAEALGLTSAGWRVVPVDSSVLGPMARDTAPVIEQWSLAGGPDGDAFEALLLRLRRRIGARARQAWGFEGSRDLYVASLSSRTVVYKGMVRSEVLAQYYADLRDPRFEVSFAVYHRRFSTNTLPRWPLAQPMRLLGHNGEINTLLGNLNWAKASEASLADVWGEAANDLNPVVNPAFSDSANLDATLELMVRSGRSITDSLITLVPEAFRNQPDLEDRPAVTAMYEFNAGIQEPWDGPALLVFADGKRVGATLDRNGLRPARWCTTADGFVIMGSETGVVDLSGKTVVQKGRLGPGQMVAVDLENGQLLDNWTVKEDAAGRFPYGDWLQHHRRSVEAQPWTQDRQIGELDLLRLQTAMGFTAEDFDLVIEDMAGLGKEPTYCMGDDIPLAVLSDKPHLLYDYFKQRFAQVTNPPIDPLREKLVMSLEMHLGERRPALKPQAEAAAVIHLDTPVLNEAELAAISEQGLPVATLSTHVAVEACAGGLSSALQRLCESAEEAVRGGAQVLVLSDRVDGSGAAAQLTATSVAMPALLAVGAVHHHLLRQKLRLRCSLVIDTAQCWSTHHMACLIGYGASAVCPWLTWETTRHWLAHPKTQKRIEQGKLPALDADKVQANVRVSLENGLRKILSKIGISLLASYHGAQIFEAIGLGADVIDTAFSGTTSRVAGMTLAELANETLSLHAKAFPELNRSKLEFMGFVQYRTGGEYHLNSPDMAKALHAAVKTGPGYDHFSTYKTLLENRPVTALRDLLEFKLAPTPLPLDQVESAESLCKRFCTGGMSLGALSREAHEVLAVAMNRIGGKSNSGEGGEDPARFQVLHDVDAEGRSQAFPSIGGLRNGDTACSAIKQIASGRFGVTAEYLRSGKQLEIKVAQGAKPGEGGQLPGPKVDDYIAWLRNSKPGVALISPPPHHDIYSIEDLAQLIHDLHQVHPKAPVSVKLVAEIGIGTIAAGVAKANADVIQISGHDGGTGASPLSSIKHAGSPWELGLTEVHRSLLENGLRDRVLLRADGGLKTGWDVVIAALLGAEEYGFGSVAMIAEGCIMARVCHTNNCPVGVATQKEALRKRFTGVPEHVVNFFWYVAEEVRQLLSLLGVAKLEDLIGRSDLLQPRAVQLAKTQGVDLSSLLAPIQGSEERSWLRHSAEAHGNGPILEDQLLADAELMAAVESHGSLSRTIAIINTDRSVGARLAGEIAQRHGNRGFKGQLNLTFQGAAGQSFGAFLVQGMNVRLEGEANDYVGKGMNSGRISLVPSDGCANPGDQVILGNTCLYGATGGELFAHGRAGERFGVRNSGARTVVEGAGDHCCEYMTGGVVVVLGSTGRNVGAGMTGGVTFLLDEGDRVTARVNPEIVAVCSLTTSQQEETLKELLEAHVAATGSSKASALLADWAAAKGRFKVLIPPSERAAMGLVDQQAVAA

SEQ ID NO: 324 - protein, 156 aa, Glycine max
  misc_feature (123)..(124): Xaa can be any naturally occurring amino acid
LEPNTSSTCFFIPLPDPKGYMKPFLFLNLPNTEFNSSQVDCNHSMAHSSYPYGDPIFAYGPQAISHPQMIPPMLGLASTRVALPLDLAEDGPIYVNAKQYHGILRRRQSRAKLEAQNKLIKNXXKPYLHESRHRHALNRVRGSGGRFLSTNSLHSL

SEQ ID NO: 325 - protein, 513 aa, Vibrio parahaemolyticus RIMD 2210633
MSKPIIADNKPIKVELKAGQEYYFCRCGRSKKQPYCDGSHSGTGMKPMSFTAEKDEDAYLCQCKHTANAPFCDGTHKRFTAEQVGKEGPDQKREKSEKLAAANTQEEPTLEFIHQLAREGLSKLGHHGPMAAMGVPRHLLPHWDAIQIMVAQMATQPLLEDVPVSTELIVGPNARKPLKLAIPLLVSDMSFGALSEEAKIALAKGAELAGTGICSGEGGMLPEEQAANSRYFYELASAKFGYDESKLLKVQAFHFKGGQGAKTGTGGHLPANKNVGKISQVRGIPEGQPAISPPTFTDLHTTHDFRKFADRVRGITGGIPIGFKLSANHIEQDIQFALDASADYIILDGRGGGTGAAPTMFRDHISVPTIPALARARKYLDEKGASDRVTLIITGGLRVPMDFVKALALGADGVAIANSAMQSIGCVAARICNTNNCPAGIATQNADLRQRLDIEKSSQQLKNFFESSVELMQVMARACGHDSLSQFNVRDLATWDQNMARLSGVKYSGVNPI

SEQ ID NO: 326 - protein, 2194 aa, Medicago sativa
MSNSLSLTFTALNNPQINAISNPNARLRPLARFTRCSATCVERKRWLGTKLRSGGGPERIQLWESGGLGRLPKLRVAVKSSFSAVPDKPMGLYDPAFDKDSCGVGFVAELNGQSSRKTVTDALEMLVRMTHRGACGCEANTGDGAGILVALPHGFYQEVVDFQLPPQGNYAVGMFFLPKSDSRRMESKNIFTKVAESLGHKVLGWRSVPTDNTGLGKSAQLTEPVIEQVFLTPSSDSKVDLEKQMYILRKLSMVSITSALNLQSDGITDFYICSLSSRTVIYKGQLTPAQLGEYYYADLGNERFTSYMALIHSRFSTNTFPSWDRAQPFRVLGHNGEINTLRGNVNWIKAREGLLKCKELGLSENDLKKFLPIVDANSSDSGCFDGVLEFLLHSGKSLPEAVMMMIPEAWQNDKNMDPQRKAFYEYYSALMEPWDGPALISFTDGHYLGATLDRNGLRPGRFYVTHSGRVIMASEVGVVDIPPEDVCRKGRLNPGMMLLVDFEKQIVVNDDALKEQYSLARPYGDWLEKQKIELKDIIDSVHESDIVPPTISGVPPLSNDDVDMENMGIQGLLAPLKAFGYSVESLEILLLPMAKDGVEALGSMGNDTPLAVMSNREKLTFEYFKQMFAQVTNPPIDPIREKIVTSMRCMVGPEGDLTETTEEQCHRLSLKGPLLSTKEMEAIKKMNYRGWRSKVIDITYSKERGTKGLEEALDRICTEAHNAISEGYTTLVLSDRAFSKKRVAVSSLLAVGAVHQHLVKTLERTRVALMVESAEPREVHHFCTLVGFGADAICPYLAIEAIWRLQVDGKIPPKASGDFNSKDELVKKYFKASTYGMMKVLAKMGISTLASYKGAQIFEALGLSSEVIEKCFAGTPSRVEGATFEMLAQDALHLHELAFPSRIFSPGSAEAVALPNPGDYHWRKGGEVHLNDPLAIAKLQEAARTNSVDAYKQYSKTIHELNKACNLRGLLKFKDAASKVPISEVEPAGEIVKRFCTGAMSYGSISLEAHTALATAMNTIGGKSNTGEGGEQPSRMEPLADGSRNPKRSAIKQVASGRFGVSSYYLTNADELQIKMAQGAKPGEGGELPGHKVIGDIAITRNSTAGVGLISPPPHHDIYSIEDLAQLIHDLKNANPAARISVKLVSEAGVGVIASGVVKGHAEHVLISGHDGGTGASRWTGIKSAGLPWELGLAETHQTLVANDLRGRTTLQTDGQLKTGRDVAIAALLGAEEYGFSTAPLITLGCIMMRKCHKNTCPVGIATQDPVLREKFAGEPEHVINFFFMVAEEMREIMSQLGFRTVNEMVGRSDMLEVDKEVVKGNAKLENIDLSLLLRPAAELRPEAAQYCVQKQDHGLDMALDNKLISLSNAALEKGLPVYIETPICNTNRAVGTMLSHEVTKRYNLAGLPADTIHIQFTGSAGQSFGAFLCPGITLELEGDSNDYIGKGLSGGKVVVYPPKGSNFDPKDNILIGNVALYGATRGEAYFNGMAAERFCVRNSGAQAVVEGVGDHGCEYMTGGTVVVLGKTGRNFAAGMSGGIAYVLDVDGTFQSRCNLELVDLDKVEEEEDIITLRMLIQQHQRHTNSLLAKEVLVDFENLLPKFVKVFPREYKRVLASMKSDAASKDAVERAAEDVDEQDDEAQAVEKDAFEELKKLATASLNEKPSEAPKRPSQVTDAVKHRGFVAYEREGVQYRDPNVRLNDWNEVMMETKPGPLLKTQSARCMDCGTPFCHQENSGCPLGNKIPEFNELVYQNRWQEALERLLETNNFPEFTGRVCPAPCEGSCVLGIIENPVSIKNIECAIIDKAFEEGWMIPRPPVKRTGKRVAIVGSGPSGLAAADQLNKMGHIVTVFERADRIGGLMMYGVPNMKTDKVDIVQRRVNLMAEEGINFVVNANIGLDPLYSLERLREENDAIVLAVGATKPRDLPVPGRELSGVHFAMEFLHANTKSLLDSNLQDGNYISAKGKKVVVIGGGDTGTDCIGTSIRHGCTAVVNLELLPQPPPTRAPGNPWPQWPRIFRVDYGHQEAETKFGKDPRTYEVLTKRFVGDENGVVKGLEVVRVCWEKDETGKFQFKEIEGSEEIIEADLVLLAMGFLGPEATIAEKLGVERDNRSNFKADYGRFSTSVDGVFAAGDCRRGQSLVVWAISEGRQRAAQVDSYLTNEDHGIDGNQDEFVKRQQDLNKKHSKHTVMT

SEQ ID NO: 327 - protein, 1545 aa, Zymomonas mobilis subsp. mobilis ZM4
MSIKSSADSFDVFAERERLAKEGMYRPEFETDACGVGLVAATDGKASRRVVTAAIDALKAVWHRGAVDADGKTGDGAGIHVDLPASFFDDAIAHAGHAPLPNRLAVGMVFLPRTDLSALYTCRTIVESEIIDFGYRIYGWRQVPVDISVIGEKAMRTRPEIEQIMIAGPHPDEMSAAEFEKNLYLIRRRIEKKVIAAQINDFYICSLSCRSIVYKGLFLAEALSIFYPDLQDERFVSRVAVFHQRYSTNTFPQWWLAQPFRMLAHNGEINTIRGNRNWMKSHEIKMASLAFGEHSEDIKPLIPAGASDTAALDAVFETICRAGRHAPAAKLMLIPEAWQHNPDMPNAHRDMYSYLDSVMEPWDGPGALAITDGSWAVAGVDRNALRPLRTVRTKDNLLIVGSESGMVVVPENNVIAKGQLGPGQMIAVNLDEGRFYEERPLKDLIASERPYGEWIKDFKKLSDLDLKSYDPVIPYDRDELIKRQVSAGLTLEDMDLVLSPQAETGKEAMGSMGDDTPLAVLTEKPRLTSQFFRQNFSQVTNPPIDSLRETQVMALTTRFGNLGNILDSENKQKQILTLDTPYLKTSEWCQLKDHFGEQAVEIDCTFSPDDGADALRHAISNLRTQAENAVRSGHSELFLTDEHIGSDRVAVAMILATAAVHTHLIRKGLRSYASINVRASECIDPHYVAVLIGVGATTVNAYLAESAIAYRHSQGLFGTMTLEQCLDNHHHAICNGLLKIMAKMGIAVVSSYRGAYNFEAVGLSRALVNDLFPGMTAKISGEGYASLQRSALLRHQNAFAANKKALDVGGFYRQRASGDSHAYTAELMRKLQKAVSSDSYTTYLEFSKEVHQLPPVYLRDLLGFNWSKQPIPIEEVEPITEIRRRFITPGMSLGALSPEAHETLAIAMNRIGAKSVSGEGGEAPERFHPYENGDNANSPIKQVASGRFGVTAAYLGACEEIEIKVAQGAKPGEGGQLPGFKVTDMIAKLRHSTPGVTLISPPPHHDIYSIEDLAQLIYDLKKINPNARVGVKLVSSAGIGTIAAGVAKAHADSIMISGNVGGTGASPLTSIKYAGTPWEMGLSEANQVLTLNGLRHRVKLRTDGGLKTGRDIVIAAILGAEEFGIGTLSLIAMGCLMVRQCHSNKCPVGICTQDKATAAEIYRNAGTVINLMTFIAEEVREILAKLGVRSLKEIIGQTDLLSQVNRGADHLDDLDLNPVLAKVDANTEARYFQIDGFRNPVPDSLDAQMLQDAQAVFTRREKTQLTYSVRNTQRAIGTRFSAEITRNFGMDSLADGHVHVRLRGSAGQSLGAFSVKGLTLEVFGDANDYVGKGLSGATIIVRPTVSSPIDGHTNTIIGNTVLYGATAGKLFAAGRAGERFAVRNSGAETVIEGCGANGCEYMTGGLAVILGSVGPNFGAGMTGGMAFVLDEDNSFERHANPDNIIWQRLASSHWETVLRSMIADHAVKTDSPWAHRVLDEWDLWSQKFWQICPKEMLGRLEYPLDDKKNTEDHPFYCRSGKNHPYSSAYDRNDQQTGSDKSPDLA

SEQ ID NO: 328 - protein, 155 aa, Arachis hypogaea
MHLEAETWTALVVILCFLGLILKESIMGGKSSRESGGDRRHVPSYGSGGASSSSWDNYGYSQPPPYAYQPSIQHRPPAAPYYDYQQPKRRLDRRYSKIADNYRSLDEVTAALSQAGLESSNLIVGIDFTKSNEWTGKRSFNRKSLHHLRNGHNPL

SEQ ID NO: 329 - protein, 2450 aa, Kluyveromyces lactis NRRL Y-1140
MLRRKGESAKKRLVSGTAASLQELSLKPNSNGIQSSGKTEDTDVPGDSISGEFGAALSDSNVENSVKAFNLIFTKLKSTSEMERTAASFELRSSLISLAREVSTEHFQRFSNDINNKVFELIHGNDSNEKLGGVLAVDTLIDFYSRTDELPNQTSRLANYLRVLIPSNDIEVMRAAAGTLGKLAVPGGTLTSEFVEFEVKTCIEWLTTSPENSSSNSKQEYRKHASLLIISAIADNSPYLLYPFVNSILDNIWRALRDTKLVIRTDASVTLGKCLTIINNRDSSLTKKWVQRLFNGCIYGLQLNSTVSIHGTLLVYRQLVSLEGGYLKDKFEEIYETTMRYRENKNIIIRKEIYAIIPVLAAFDPKLFTQKYLDSTMIHYLTLLKNMNSHPVTNSDKGPILISVGDIAYYVGPDIGPYLDAIVENLRDGLTTKYKFRKDYEQEIFYCIGKLACAVRPLLAKYLNRGLLEYMLACPLSDHMQETLLIVCEKIPSLEGTINEKLLNIICLVLSGEKFRPPGSPTPMKPFSAETARNYRDQSLFKKTGEANNDIFDAVILTKALRMLSDIKPKYSLTEFIRRVIISYMEHDNLQVRKLAALTSCDLFVEDSICKQTSLYALNVVSEVLSKLLTVAITDPVAEIRLEILRHLDTNFDPQLSQPDNTKLLFMALNDEVFAIQMEAMRICGRLALVNPAYVIPSLRKTLIQLLTELKHSKLTRKKEECASLLCTLISSSSDVTKPYLEPVIEILLPKSQDSSSAVASTALKAIGELSVVGGEDMVPFLDELMPLIIDTFQDQSNSFKRNAALKALGQLSASSGYVIDPLLDYPELLGVLLNILKSESSQNIRRETVRLIGILGALDPYKHREVERTSSTNITVEQNAPPIDVALLMQGMSPSNEEYYPTVVIGVLMKILKDPSLSIHHSTVIQAIMHIFQTMGLRCVIFLKQIIPGFILVMHTCPPSLLELYFQQLSVLISIVKQHIRLHVSEIVEVISEFFPIVKLQLTIISVIESLSRALEGEFNPYLPNILSLFLDVLEKDQSNKKVVSIRILKSLVVFGPHLEEYAHLVLPTIIKLSEFSSGNLKKAAIITIGRLSKNVNPLEMSSRIVQALVRVLNTSELEYVKATMNTLSLLLLQLNIDFTVFIPVINKTLVKQNIQHTIYDRLVAKLLNNEPLPTKIIIDKDFDLPNKEMDDVKVASKKLPVNQLVLKNAWDCSQQRTKEDWQEWIRRLSISLLKESSSHALRACSGLAGIYYPLARELFNASFASCWGELYTQYQEDLVQSLCSALSSPNNPPEIHQTLLNLVEFMEHDDKPLPISISTLGEYAQRCHAYAKALHYKELEFIEEPTTSTIESLISINNQLHQTDAAIGILKHAQQHHDLQLKETWYEKLQRWDDALTAYNKREAAGEDSIEVTIGKMRSLHALGDWDQLSELAADKWASSKIDIKRAIAPLAAGAAWGLAQWDRIEQYIEVMKPQSPDKAFFAAVLCLHRNNFDKAQEQIFAARDLLVTEMSALVNESYNRAYGVVVRTQMVAELEEIIQYKNLPQGSDRRAMIRKTWNKRLLGCQKNVDVWQRILKVRSLVIKPKQDMKVWIKFANLCRKSGRLGLAQKTLNTLLEESSDPKNPNTARAPPPVVYAQLKYMWATGSQKEALNHLISFTSRMAHDLGLDPSNMIAQSVPQNSSVSQHHIEDYTKLLARCFLKQGEWRVSLQPNWRLENPDAILGSYLLATHFDKSWYKAWHNWALANFEVTSSLTQRIKDDKVLTLEDASTEFTNGAVAGLGANENFPPELVQRHVVPAIKGFFRSIALSQSSSLQDTLRLLTLWFKFGGIPEAAQAMHEGFGLIKIDNWLEVIPQLISRIHQPNQTVSRSLLSLLADLGKAHPQALVYPLTVAIKSDSVSRQRAALSIIDKMRMHSPKLVDQAELVSDELIRVAVLWHELWYEGLEDASRQFFGEHNTEKMFATLEPLHEMLKRGPETLREISFQNSFGRDLNDAHEWVMNYKRTKDINNLNQAWDIYYNVFRRISRKLPQLQTLDLQHVSPKLAAAKDLELAVPGTYHAGKPVIRITHFEPIFTVISSKQRPRRLSIKGSDGKDYQYIVKGHEDIRQDNLVMQLFGLVNTLLQNNPESFQRHLNIQQYPAIPLSPKSGLLGWVPNSDTFHVLIREHREASKVPLNIEHRIMLQMAPDYDNLTLLQKVEVFTYALDNTKGQDLYKVLWLKSRSSESWLERRTTYTRSLAVMSMVGYILGLGDRHPSNLMLDRVTGKVVHIDFGDCFEAAILREKYPEKVPFRLTRMLTYAMEVSGIEGSFRITCENVMMVLRDNKESLMAILEAFAYDPLINWGFDLPTQAVMEQTGIDLPLANPSELLRKGVITVEDAAKMELQQKAEVRNARATLVLKRIADKLTGNDFPRYQELSVPDQVDKLIQQATSVENLCQHYIGWCSFW

SEQ ID NO: 330 - protein, 1543 aa, Nitrosococcus oceani C-27
MYDPHNEHDSCGVGFVANVKGHKSHNLIRKGLQILKNLTHRGAVGADPRAGDGAGILLQMPDQFLQEECARQGINLPPVGEYGVGMLFLPQGAEARATCEELISHYIDAEGQTLLGWRDVPTDNTQLGESVKAVEPIIRQVFIGHGDNTSSGDPFERKLFVIRKQIENAVRELDQADQATFSIPSLSSRILVYKGMLLASQVPSYFTDLTDERMITALSLVHQRFSTNTFPSWDLAQPFRMIAHNGEINTLRGNINWMAARRHAMTSKLLGDDLKKLWPLIAEGQSDSACFDNALELLVAGGYPLAHAMMLLIPEAWAGNPLMEAKQRAFYEYHAALMEPWDGPAAMAFTDGRMIGATLDRNGLRPARYLITNDDLVAMASEMGVLDIPQERIIKKWRLQPGKMLLIDLEAGRIIDDDELKRKLAEAEPYQQWLDQTQIRIEHLPAETGPMAPDPATLLDRQQAFGYTQEDLKFLLTPMAVTGQEAVGSMGADEPLAVLSNRAIPLSNYFKQRFAQVTNPPIDPIREELVMSLVSLIGPRPNLLGHHHQAGAHKRLEVSQPVLTNTDLERIRRIEDHTGGAFRTHTLTICYPVTEGAAGMEAALGKLCRSAEQAVHKGYNILILSDRGVDIDHVAIPALLATSAVHHHLVQTGLRTETGLVVETGAAREVHHFAVLAGYGAEAINPYLAFETLSALRQQLPEELNEEEIQKRYIKAVGKGLLKIMSKMGISTYQSYCGAQIFDGVGLSHNFVEKYFTGTVSTIEGAGLSEIAEEAFRWHRNAYSDVPLYRHGLDAGGYYAYRLRGEDHMWTFDTISKLQHASRANEAKTYEEYAQLVNQQNKRLLTLRGLLEFRFAANPLPLEDVEPAKDIVKRFATGAMSFGAISHEAHTTLAIAMNRIGGKSNTGEGGEEAERFKPLPNGDSMRSAIKQVASGRFGVTAEYLVNADDIQIKMAQGAKPGEGGQLPGHKVDATIAQVRHSTPGVGLISPPPHHDIYSIEDLAQLIFDLKNVNPQARISVKLVSEVGVGTVAAGVSKAHADHVTIAGHDGGTGASPLTSIKHAGLPWEIGLAETQQTLVLNRLRGRIAVQVDGGIRTGRDVVIGALLGADEFGFATAPLIVAGCIMMRKCHLNTCPTGVATQDPVLRKLFTGKPEHIVNYFFLVAEEVRQIMAQLGFRCFDEMIGRLDVLDTRQALDHWKAKGLDFSRILYHPTTDPEVPLYNRERQDHGLDEVLDRWLIAQAQPALERQEAVQIETPVGNTDRTVGAMLSGEVARRYGHKGLPQDTIYIRTEGTAGQSFGAFLAHGISLELIGEANDYVGKGLSGGRLVITPPPECPIVPEENIIIGNTVLYGAISGECYFRGVAGERFAVRNSGVTAVVEGVGDHGCEYMTGGVVVVLGRTGRNFAAGMSGGIAYVLDEAGNFEQRCNLAMVELEPIAEEDEALEHLEHQGGDLETHGRVDISHHISRFDGQRLRNLIEKHQHYTHSGRARQILENWSAYLPRFVKVMPVDYRRALQEMEHAQAARHTIPVMQQEALDQYG

SEQ ID NO: 331 - protein, 1524 aa, Prochlorococcus marinus str. MIT 9515
MRESIKRSKGPYQDSYSPSGIIGEKDACGVGFIANIYGKESNWILKQSLRGLNCMEHRGGCGGDNDSGDGAGILCSIPWEFLDQEMNLEPRPDQIRGLGMIFMPNNELKVKESKLICEQEAKKLNFKKTFWRNVPVKNEILGNLAKQNAPFICQWIVCLEKVDSQEFETLLFQLRKRIEKRIRENTKNNAADCEFYFASLSSKTVVYKGMVRSEILSKFYGDLQKKEFKVSFSVYHRRFSTNTLPKWPLAQPMRFLGHNGEINTLLGNINWAKASEKHIDEYWGELSKDIKPIVDINKSDSSNLDATLEINIRSGQLITDSLMKLVPEAFRDQPELKGKEDIKAFYEYSASLQEAWDGPALLVFTDGDFIGATLDRNGLRPARYSITDDGFVIMGSETGVVDVEDNKVIEKGRLGPGQMLAVDFTNNKILRNWEVKTEAARRNDYLNLLKKRTVKLQKKEWFENCELKDLELLQQQTVYGFSAEDNDLILDSMASVSKEPTFCMGDDIPLAVLSSKPHILYDYFKQRFAQVTNPPIDPLREKLVMSLEMHLGERCSPFETKNIKPFIHLKSPIINEQELISIKESKIKSHTISSLFDIKEGQKGFENKLNDICKQSEIAINEGSSLIIISDKGVTSNKSFIPPLLAVGAIHHYLLKKEIRLKASLIIETGQCWSTHHLACLIGYGVSAVCPWLILESARHWLKHPKTQKLIESKKINSLSTKDVQKNIKKALEDGLRKILSKIGISLLSSYHGAQIFEAVGLGSDLIKIAFDGTTSRIAGITLKELSNESFSIHTKAYPEIDLKKLEFLGFVQFRNYGEYHSNNPAISKVLHTALKEGPGYDHFNTYQELVRNRPITSLRDLLTIKSKRDSIPLDQVESVESICKRFCTGGMSLGALSREAHEVLAVAMNRIGGKSNSGEGGEDPARFNVLNDIDKNTRSATLPFIKGLENGDTACSAIKQIASGRFGVTPEYLRSGKQLEIKMAQGAKPGEGGQLPGPKVDSYIAKLRNSKPGVALISPPPHHDIYSIEDLAQLIHDLHQIHPKAKVSVKLVSEIGIGTIAAGVSKANADVIQISGHDGGTGASPLSSIKHAGLPWELGVAEVHKSLLQNNLRDRVLLRADGGLKTGWDVVIAALLGAEEYGFGSVAMIAEGCIMARVCHKNTCPVGVATQKEELRKRFKGLPDNVVNLFLYIAEEIRQIMSSIGVSKMEDLIGNKEFLTTRDISLPKTGNIDLTSLVNNNHIFNDRSWINHSKNAHNNGPVLEDEFLMDSHFMDTIRNHKEFTKDIKIKNTDRSVCAKISGEIAELFGNNGFKGKLNLNFYGHAGQSFGAFLLKGMNIQLIGEANDYVCKGMNGGLLTIVPPKVDEKSSEQVILGNTCLYGATGGKLFALGKSGERFAVRNSGAIAVTEGSGDHCCEYMTGGKVIILGSTGRNIGAGMTGGIAYILDENDDLENKVNKEIVSIYKINNLKQEEILLEILNEYHEKTKSLKALKIIKDWSNCKKIFKIVVPPSEEALLGINSQ

SEQ ID NO: 332 - protein, 622 aa, Methanothermobacter thermautotrophicus str. Delta H
MIHMVQILLTEPEKCDGCNKCLEACESVLGRSAIFLNKMDTGYHAIVCQQCVDPSCARGCFRDAIRRENGAVKIDQESCVGCKLCMLMCPIGAITYTDEGMVKCDQQCIEKPGDTPACVAACEQGCLEALDVMEYVNDIQRGFEIKTPSTGSITPSSPSSDLAAATQGLCVFCGTCEIVCPTDAIKIVEDHAEIDKTKCIMCGSCLAACPVLIPTGAGSIWDPRTIADIRYTSKAGKYVLRGFGTERRLPNFDDIIILPAQASIPPVDKYREPCNTSVVLGDRFAEEPLVLQTPVLIAGMSFGALSKESKLAMAKGSSMVGSCANTGEGGMLPEERELADNLMVQYSSGRFGVSSDYLNVADAIEVKIGQGAKPGMGGHLLAEKVSPEVAKIRGIPEGTDALSPARFLDATREGDLAKHIELLREVTDWRVPIVVKLGPGRVYEDVQIAAEAGADVISVDGMEGGTGAAPEVVIEHTGVPTLAALVQAVNGLNDIGLKDEVDLIITGGIRSGADVAKAMAMGADAVYIGTGAMIAMGCRACRMCYTGKCPVGVATQDPVLRERMDVDLAARRVANYIKSMTEEAKMLAQLAGHDDIRKFSPEDLRALDTNTAAITGLKLINQ

SEQ ID NO: 333 - protein, 1600 aa, Ralstonia eutropha JMP134
MDQSQNHPAQELAQAQTSATSTDIALRPQAQGLYDPTNEHDACGVGMVAHIKGKKTHEIISQGLKILENLDHRGAVGADALMGDGAGILIQIPDQFYREEMAAQGVSLPPAGEYGVGMIFLPKEHASRLACEQELERTVRLEGQVVLGWRDVPVDCNMPMSPTVRKTEPVIRQIFIGRGRDIMTTDALERKLYVIRKTASHAIQALKLKHGKEYFVPSMSARTVVYKGLLLANQVGEYYLDLQDQRAVSALALVHQRFSTNTFPAWELAHPYRMVAHNGEINTVKGNVNWINARTGAISSPVLGDDLPKLWPLIYPGQSDTASFDNCLELLTMAGYPLVHAMMMMIPEAWEQHTLMDDNRRAFYEYHAAMMEPWDGPAAICFTDGRQIGATLDRNGLRPARFYVTEDDIVVLASEAGVLPFPESRIVEKWRLQPGKMFLIDMEQGRIIDDKELKDNLANAKPYKSWIDAVRIKLDEIDAKPEDVAAEKKPVAKLLDRQQSFGYTQEDVKFLMAPMALSGEEATGSMGNDSPLAVLSSKNKTLYHYFRQLFAQVTNPPIDPIRENMVMSLVSFIGPKPNLLELNNINPPMRLEVSQPVLDFKDIAKIRNIEHYTGGKFRSYELNICYPTAWGKEGIEARLASLCAEAVDAVRSGYNILIVTDRRVDADQVAIPALLATSAVHHHLVEKGLRTSTGLVVETGTAREVHHFALLAGYGAEAVHPYLAMETLADMAAGLSGDLSPEKAVKNFVKAIGKGLFKVMSKMGISTYMSYTGAQIFEAIGLSRELVQKYFHGTPSNVEGIGIFEVAEEALRLHKDAFGNSPVLDNMLDSGGEYAYRIRGEEHMWTPDSIAKLQHSVRAEDAKGSYQTYKEYANIINDQSKRHMTLRGLFEFKVDPAKAIPLEEVEPAKEIVRRFATGAMSLGSISTEAHATLAVAMNRIGGKSNTGEGGEDEKRYRNELRGIPIKQGDSLKSLLGDVIEADLPLKEGDSLRSKIKQVASGRFGVTAEYLASADQIQIKMAQGAKPGEGGQLPGHKVSDYIGKLRYSVPGVGLISPPPHHDIYSIEDLAQLIHDLKNVNPSSDISVKLVSEVGVGTVAAGVSKAKADHVVIAGHDGGTGASPWSSIKHAGSPWELGLAETQQTLLLNGLRNRIRVQADGQMKTGRDVVIGALLGADEFGFATAPLVAEGCIMMRKCHLNTCPVGVATQDPQLRKKFQGKPEHVVNFFFFVAEEAREIMAQLGIRTFDELIGRADLLDTKAGIEHWKARGLDFSRIFHQVSLPADTPLFHTDVQDHGLSVEAGKALDHVLIAKARPAIEKGERVSFIQPVKNVNRTVGAMLSGVVAKQYGHEGLPDDTIHIQLQGTAGQSFGAFLAHGITLDLVGDGNDYVGKGLSGGRVIVRAPHEFRGDPTRNIIVGNTVLYGAIAGEAFFNGVAGERFAVRNSGAVAVVEGTGDHGCEYMTGGTVVVLGGTGRNFAAGMSGGVAYVYDEDGLFDKRCNTSMVALEAVLASADQEKGQSPASWHKVNGKRQLDEVVLRNLIEQHFRYTGSERAKALLADWTTARRKFVKVFPTEYKRALGEMYAKEQAARDSDREAIAA

SEQ ID NO: 334 - protein, 554 aa, Schizosaccharomyces pombe
MGNTIGKERQENDEELIQHLVQLVDGGFLDPQGVYSSAPAYKTNIVRKLMLERRLMPFYKGLDSYSKDWPADKVVEVVEKALGPHKSALLHCAIRQSRSLSVGNTRSLKRDSRGSSDHLLTRNRSNSTPGSISADYRTTAITTIYANAMECPICFLYYPSNFNYTRCCAQPICSECFVEIRRAEPHLPTVHANEPTPNEFDLISEPAKCPYCMTERFGVIYKPNPKLTPFSFNNNPDTLPSNIAPMGTLSKSSLPLHHIPWPPNQHIKFAHDDKNVVSTDFIHPDWQYKLERARRRALRRAANATLLNSHLLETGPANANANHNTDLSHDPTSHGGPRRTLSSRRQHYLANVEQLMLAEAIRQSLLDAQSNDSTNSLPSTEVSQPDSTNISNEQEIVQPQPTHTTNVALVEEINRPDSVESAITASSSIDTGNENETQEVNSDSLPQFVHQTMTQTNFQESSPSVAADETRVHNVDEYIEQQDLDELIHSPIASTNPFLADQFARSETVDLNAHICSPALSVSDDGVTATNKTQSSFPSVYEHQLKSNELERGH

SEQ ID NO: 335 - protein, 179 aa, Daucus carota
MERADQQARGFQGYRKIHQQQQLPASGTASTGTDNNPAAGDQDCLVREQDRFMPIANVIRLMRKSIPSHAKISDDAKELVQESVSEFISFVTSEANYRCQKEQRKTITAEDVLWAMSSLGFDDYVEPLTFYLDRFREADGGERTALRGEPLVKKSGEHGHRGFLQHLHHGTIWGRIMRF

SEQ ID NO: 336 - protein, 265 aa, Saccharomyces cerevisiae
MSADETDAKFHPLETDLQSDTAAATSTAAASRSPSLQEKPIEMPLDMGKAPSPRGEDQRVTNEEDLFLFNRLRASQNRVMDSLEPQQQSQYTSSSVSTMEPSADFTSFSAVTTLPPPPHQQQQQQQQQQQQQQLVVQAQYTQNQPNLQSDVLGTAIAEQPFYVNAKQYYRILKRRYARAKLEEKLRISRERKPYLHESRHKHAMRRPRGEGGRFLTAAEIKAMKSKKSGASDDPDDSHEDKKITTKIIQEQPHATSTAAAADKKT

SEQ ID NO: 337 - protein, 248 aa, Gibberella zeae PH-1
MSDSPQSPPKEVDQGAPSPDDEAQMNEQQDPQSANAAGYEFEGVKEQDRWLPIANARSAVHIWIPLMSCDSSSKSPKASRASKADRADELDANIRNFAPVARIMKNALPDNAKIAKEAKECMQECVSEFISFITSEASEKCQQEKRKTVNGEDILFAMTSLGFENYAEALKVYLSKYREQQNQSNRERVNMDNGQWGSGTMMGDAKAESGAVGDFGHDGNSVESGADPNYMYGSQPGHNGNAPEARER

SEQ ID NO: 338 - protein, 165 aa, Glycine max
MAESDNDSGGAQNAGNSGNLSELSPREQDRFLPIANVSRIMKKALPANAKISKDAKETVQECVSEFISFITGEASDKCQREKRKTINGDDLLWAMTTLGFEEYVEPLKIYLQRFREMEGEKTVAARDSSKDSASASSYHQGHVYGSPAYHHQVPGPTYPAPGRPR

SEQ ID NO: 339 - protein, 1500 aa, Hydrogenobacter thermophilus
MEMREYDSCGVGFVCNIRGEKSEQIVRWGIEAVKNLTHRGAIGGDGKTGDGAGILVEIPKTFFSYYIQKEGLDLSHIDNLCVGVLFLYEDVRGPVEELINNSPFRLVGWREVPIDRSAVGEMALKTMPKIFHLLLDAKGIEEDKRELELYLLRRRIERDAKVRDKVYVASLSSRTMVYKGMMVALQLDNFYIDLKEGGLESSFCLFHQRYSTNTFPNWKLAQPFRYLAHNGEINTIQGNRNWMLVLQSELQHEIFGDNIKLIKPLVSYDESDSASLDKVFELLCLVGYSPEHAINMLIPPAWEKVPDMSQEVRDFFEYQSLLMKPWDGPASVAFTDGKTIGAHLDRNGLRPARYILTEDGILVLGSEVGMIDLSGRKIKKKGRLGPGDTLSVDLQKGTVRETQDILRELSSKKPYGEWLRKHLLRLSDILKEHTIPEPAEDKERLRKQIFFGYTQEEIKHVISYMAQEGKELTFSMGDDTPLPPLSEKPVLLFRYFKQRFAQVTNPPIDPIREKAVMSLKMNLGHKRNFLKETEDHAKRFQIESPILLPHQIKAIEEQTYFKVVKIPMTYPKERSYCVVELQDLAGERRITDILYDAMYEGVQICDLRLGVEIVCRRVEEAVREGAHIVILTDRNTSRYRLAVPSLLAVSAVFKWLSDRGLSTKVSIIVETGEARDTHHMACLIGYGASAVYPYLAYETIYELCKKGEINIPYHQAVLNYKKALEDGLLKIMSKMGISTLNSYQGAKIFDTVCLNRDFLEEYFPNTPVTVESDGIFEIEESMLKRHQMAYEAETPQLDYGGDMKFRKGGEWHAWSPFVVRALHKFLETKDYQDYKSFSQIANGEHPTFIRHLLTYKKGPHPVPLEEVEPVEDILKRFVTGGMSLGALSPEAHETIAEACNRLGMKSNSGEGGEDPERYWTIKNSAIKQVASGRFGVTPTYLASAQDIEIKIAQGAKPGEGGQLPGHKVSEYIAKLRHAQPGVTLISPPPHHDIYSIEDLAQLINDLKEANPNARVCVKLVAETGVGTVAAGVAKAYADIVQISGAEGGTGASPYSSIKNAGNYWEIGLAETQKVLMENGLRDKVRIRIDGGMRTGKDVIVAALLGAEEFGFGTAAMIAEGCVMARMCHTNQCPTGVATQDPKYREKFKGKVEDVMAYFRAVAQEVREILSEMGFRKLDDIIGRRDLLDILSFDHIPGSKRIKLEKFLKDDYPADKPRRCTVHRNDNPRPSINQKIVQELLPYIERGEKVYREYTIRNTDRSVPVRINYYIALKYKDSGLPEDTINLTFVGTAGQSFGAFNHRGVSLTLLGDANDYVGKGMYGGRIVIKAQGVEDTQNHVIMGNTCLYGATGGELYAAGRAGERFAVRNSGAVAVVEGAGLHCCEYMTGGVVVVLGSVGFNLGAGMTGGYAYVLDQELSKKINTSYVMIRKIRHEREEQELKSLINKHYTYTGSAWAKHLLDNWDMYVEKFYKVIPLEQCKRDVYGETDECEVEITPEKKA

SEQ ID NO: 340 - protein, 2126 aa, Candida albicans SC5314
MSPSASYLPQEEFSTTNVYDYDEVPENKSWASSLPVAKGLYNPELEKDACGVGFTCHLKGVPSHKIVSDAKSLLCNMTHRGGELNPQDGDGAGLLSSIPHKFLKREFQYYCNVELPAKGQYGVGNVFFKKDDAVFEKSKKTFESIADSLGLKVLGWREVPHDSSILGAAALSREPYILQPAVVYKEIWGQKVSDDEFDSKYRKDFEKRLFILRKQASHTIGLHNWFYICSLSNKTIVYKGQLAPKQVYSYYHDLVNAEYESHFALVHSRFSTNTFPSWDRAQPLRLAAHNGEINTLRGNKNWMRAKEGVMKSKLFGDEMDKLFPIIEEGGSDSAAFDNVLELLVINGVVSLPEAVMMMIPEAWQNDENIDPKKKAFYEWAACLMEPWDGPALFTFADDRYCGANLDRNGLRPCRYYVIDDDRMICASEVGVIEIQPEKVIQKGRLQPGRMLLVDTKEGRIVDDRELKSKVASRYDFKSWVLANMISLQDLNEKLASRKIDINAKPIDVNVNVQSDPRLIAAGYSHEQILFVLAPMAEGNEALGSMGNDNALACISEQPKLLYEYFRQLFAQVTNPPIDPIREKIVMSLECYVGPQGNLLEMKPDQLNRLLLKSPILTSSELLAIKNIQTVYPSWSVANIDITFEKSEGIQGYINTIDRICQAASQAIADDNQIIILSDVATSAERLPISALIAVGAVHHHLVRQKQRSKVALIIETQEAKEVHHACCLVGYGADAINPYLAMETLVRMKHQGLLKNESLTEEKIIQNYKGSIDAGILKVMSKMGISTLASYKGAQIFEALGIDNSVIDRCFAGTASRIKGVTFEYIAQDAFTLHERGYPTRDTIKPIGLPETGEYHWRDGGDAHINDPAAIASLQDAVRNKNERAYEAYAKKENEAVRNCTLRGLLDFEFESSTEVPIDQVEPWTEIVRRFFTGAMSYGSISMESHSTLAVAMNRLGGKSNTGEGGEDAARSQVLENGDTMRSAIKQVASGRFGVTSYYLADADELQIKMAQGAKPGEGGELPGHKVSAEIGKTRHSTPGVGLISPPPHHDIYSIEDLKQLLYDLKCANPRARTSVKLVSEVGVGIVAAGVAKAGSENILVSGGDGGTGAAKLTSIKYAGLPWELGLAESHQTLVLNDLRGRVILQTDGQIRTGRDIAIACLLGAEEWGFATSPLIAMGCIYMRKCHLGTCPVGIATQDPELRKKFEGTPEHVINFFYYLANDLRKFMAKLGFRTINEMVGRTEKLKVRDDLRNTKNANIDLSPILTPAHTIRPGVATHCVRKQDHKLHIRVDNKLIDESELTLAKGLPVTIDCEVVNTDRSLGTTLSYRVSKTFGEQGLPHDTIHVNVTGSAGQSFGAFLASGVTLELEGDANDYIGKGLSGGRIIVYPPRESKFKAEDQIIAGNTAFFGATSGSAFIRGIAAERFAVRNSGAIIVTEGTGDHGCEYMSGGRVVVLGATGRNFASGMCGGIAYVLDMAQDFSEKVNRAQVELSQVTETEEIAFLRNLIEDHRHYTGSEVADNILNDFNRYLPRFVKVLPNDYKKVLEKEKKLAEEAKKKELSSFLKSIKEDPESDVTNGEAYKIKKGHVHHPNKGKNEPKVADVEDTIFNTEFEKKAPVKLDKLRGFMKYKRRNEKYRDAKARTKDWNEMTSRLTKEELKYETARCMDCGVPFCTSDTGCPISNVIPKWNELVFNDRWYDALQRLMMTNNFPEFTGRICPAPCNGACVLGINEDPVNIKSVECAIIDHGFEQGWIKPTPPAHRTGKTVAVIGSGPAGLAAADQLNKAGHLVTVYERSDRPGGLLMYGIPNMKLDKGIVKRRTDLLAAEGIEFICNTTVGEDITVSELKSQFDAVVFAVGSTIPRDLRIPGRELKNINFAMQLLHSNTKALLDDQLEDIRKNLAGKNVVVIGGGDTGNDCLGTSTRHGAKSVTNFELLPNPPNARPKDNPWPQWPRIFRVDYGHTEVATHYGKDPREYSILSKEFVGDEEGNVKGIKTVRVEWKRSDSGAWQMAEVPGSEEFFPAEVVLLSMGFLGPEADNLEVQKTKRGTITTVDPNVYKVDKDDNVFAAGDCRRGQSLVVWGIQEGRQCAREVDEYLMGSTRLPGNGSVEQRNYKLLEELAEKV

SEQ ID NO: 341 - protein, 1498 aa, Leptospira interrogans serovar Lai str. 56601
MNDLKEQLQLQKYLEENGLYEKSFEHDNCGVGFVASYQGENSHRIVSMGLKAVACLTHRGAVDADMVTGDGAGIMIQIPKKLFATYIEEMGHRRPDEDSIGVGMIFLPREDIDKQDMCRSLVESALMEFNFKLYAWRYVPVNPEVLGPKANQSRPQIEQVLIGKPEGMSNEDFETKLFLIQKKLMRDADRHSLAGDLYICSLSSERIVFKGLFNGNQVSQFYDDLNSEEMVSPYCIFHQRYSTNTFPSWALAQPFRILAHNGEINTIAGNRIWMLAREEELECKKWGEYQKEIHPIIRPHMSDSASLDNAMEAIVRSGKDVLQAKAMLVPNAWSKNLTMSEELKSFYEYNNTLIEPWDGPAALAFAEGDWIGGALDRNGLRPARYAVTEDGLLVMGSEAGLVQVEEELVIKKGRLGPGEMIGINLKEKKLYYNEDINSLFEKKYDYREWSKENVSYLNQDLDSSINETITYKGDDLRRRQILFAYSPFKQKSVIKPQAHQGKEAISSMGDDTPLSILMLSRIGLYTYFRQRFAQVTNPPIDYMREKGVTSLYTRLVKKMNLFGDEKPQNCLVLSHPYLTNLDLKRIREMEGKPYKILTLDATFEAHLETEASQSRNYLETALDALLEQALKAATSGTNILILSDKKLSKERAPIPMELAVAAVHNHLIRNKTRSAVSILVETGSAFEIHNVAVLLGYGASGVNSYLIWDTLFDLWEKGEFDGEDGARPEFYKICGNYRYGVDDGLLKIMSKMGISILSSYVGGQVFEAIGLSRTLVSKYFPGTYSRISGIGIGGIEQNILRNHEQAFYKEINPEDFISEKDDQPHRWSPRVVKFLRKAAVDNDYEAFKEATKILKESDPINIRDLFDFVAKKPIPIEEVETVTEIQKRFLTPGMSHGALSIEAHTDLAIAMNRLGAKSSSGEGGENPSRYVVNEKGDLANSSIKQIASGRFGVTSEYLNSATEIEIKIAQGAKPGEGGQLPGKKNNEEIATNRHTPMGIDLISPPPHHDIYSIEDLSQLIYDLKMANHKAQVSVKLVSEAGVGTIAAGVAKANADVILISGHVGGTGAAPITSIKYAGSPWELGLSETHQVLVMNGLRDRVVLRTDGGIVSGRDVIIAACLGAEEYGVGTASLVALGCIMARKCHLNNCPTGIATQDIKFRAKYKGSPDQLVNLFTCLALEVREYLAELGFRSIDEIIGRTDLLKQITRYERDRLDSLDLNPILVRLPLFYDPTKQKKDRSIRKEPVGEVLDDRIIKDAEKALEGKSSMALSYLVRNTNRTVGAKISGLIARKYGSKGLPGKLEIILEGTAGQSLGAWLVKGVQITLHGDANDYVGKGLCGGVIVIKKHRKSKFKAYENTIIGNTCLYGATSGKLFCSGRAGERFGVRNSGAEAVVGGAGDHFLEYMTSGTIVCLGSVGKNMGAGMTGGTAYFFQKGWDIQPLLNKEYVRTVDLENVDYEIIKNLISEHSKLTSSDLSEGILKDFEANKNYFVKVVPK

SEQ ID NO: 342 - protein, 550 aa, Leptospira interrogans serovar Copenhageni str. Fiocruz L1-130
MIKIFLAKHFPKVQNYRMQNSMILQFISEHPWYSLFYTIGTYLFFALLHDIFQRRHAIKHNFPLVGRIRYIFETIGPELRQYWVANDKEEMPFNRAERSWVYATAKKQNNNFGFGTTELLYEAGYPIIKHSAFPFPESKVKHLKNDTSMIPCLKVIGEFHNRKKPFRPPSVVNISAMSYGSLGKNAVSALNKGAMMAHCYQNTGEGGISPYHKLGGDIVWQIGTGYFGARDEKGNFSLEVFGQKIQENPQIRMIEIKLSQGAKPGKGGILPGKKVTKQIASIRGVPIGKDCVSPNAHSEFGNVNELIDFIERLHFASGLPVGIKSAIGEIHFWNELAERMKQTNKGPDFITIDGGEGGTGAAPLAFADHVSLPFKVGFARVYQIFQKEKLSERMAWIGSGKLGFPDRAIVAFAMGCDLINVAREAMMSIGCIQAQRCHTDHCPAGVATQNRWLQAGLDIELKAERNANYIKGLRKEVLSVTHAAGYEHPLQFRGSDIEISAGLNIFKTLETILGYERDHVHFTKMLDYTDHTYLEEYMQGTTKQEHPKTV

SEQ ID NO: 343 - protein, 561 aa, Bradyrhizobium sp. ORS278
MFRDARSIVTADRPRSVPGLFMDTLLLPFSPRYIVLTICATATALLLILGIYDRKIFDLVLIPLLVFAALTALGVRDLLQKSHAVLRNYPISAHLRFILEEIRPEMRQYFFESEKDGMPFSRDTRAVVYQRAKMVLDKRPFGTQEDVYREGYEWMHHSVSPKPHAEEKFRITVGGPGCAKPYSASVFNISAMSFGALSPNAVRALNGGAKRGGFAHDTGEGGFSPYHAEMGGDIIWEIGSGYFGCRHRDGTFDPDAFARVAATEQIKMVELKVSQGAKPGHGGVLPAAKVSEEISKIRGVAMGEDCISPPAHRAFSTPVGMMQFIGEMRRLSGGKPAGFKLCIGHPWEFLAICKAMLETGIYPDFIVVDGNEGGTGAAPLEFMDHLGMPMREGVNFVHNALVGINIRDRVKIGASGKIATAFDMARAMSIGADWCNSARGFMFALGCIQSLSCHTDRCPTGVATQDPTRARALVVPHKIDRVYNYHHATLHALAELLAAAGLEHPQDLRPIHFSQRTSTTEVSSFAKLYPSLRPGELLDGTQDVRFRDAWAMARPDTFAAA

SEQ ID NO: 344 - protein, 105 aa, Candida albicans SC5314
MNQQNARDIELREQDRWLPIANVARIMKNTLPPTAKVSKDAKECMQECVSEFISFITSEASDKCLKEKRKTINGEDILYSMYDLGFENYAEVLKIYLAKYREARK

SEQ ID NO: 345 - protein, 445 aa, Zea mays
MGQKDSKPSNGYGYSSDYGGTSSGYNLRNTGSTSSSYGARYVPSSENNVQPETHARLQRKYSRIGDDYRSLSQVTEALAQAGLESSNLIVGIDFTKSNEWTGKISFNRRCLHDIGNTPNPYEQAISIIGRTLSVFDEDNLIPCFGFGDASTHDQEVFSFYPENRPCNGFEEALDRYREIVPTLRLAGPTSFAPMIETAIGIVDSTGGQYHVLLIIADGQVTRSVDTQSGQLSPQERDTIDAIVRASQFPLSIVLVGVGDGPWDMMHQFDDNIPARSFDNFQFVNFTEIMSKSIAADRKEAEFALSALMEIPTQYKATLDLQLLGRRQRITPRIALPPPTRTAYSRTTSFSQQSGVYSRSSSFDQQTSVYQQRSESLKQQQPAAPKGPDTYVSESALEDRILCPICMYKSKDLAFGCGHQTCYECGRDLERCPLCQQHITTRIRLY

SEQ ID NO: 346 - protein, 1515 aa, Haloarcula marismortui ATCC 43049
MVERQTGLSAGDAGLADPTDERSNCGVGVVMDLDGQSDHWVVSDGLELLDNLEHRGTTGAEQDTGDGAGIMLQIPHEFFAAEVDADLPPAGEYAVGTLFLPQDDEVAESLKDLVETELAAEGLDVLDWRDVPTDNSDLGATALESEPDIVQFFVTSATGKTGDAFENQLYIGRRALENTVEEKKPPGHERFYVVSLATDVVVYKGLLKAEQLEDYYPDLEDEQMQSTFAMVHARFSTNTLGAWHLAHPYRRVIHNGEFNTIQGNINWMRARETDIQSDEFEGDLEKIKPIIDDPEQSDTASVDNALELLLQGGRDLPHALRMLIPEAWRGEMNDVTGDRRDFYDYHASLVEPWDGPALVAATDGDRIGAVLDRNGLRPCRYDVLEDNTLVMSSEAGALEHDASEIKERGRLQPGQCFLADPEEGRVIPDEEVFDDIADDKYGEWVAEEQVDIDEVANREDNAPRDPADALRSQQAMYGYTYDEVDHLIEPMAEKGKDPVGSMGDDTPLSVLSQFNRPLFTYFKQLFAQVTNPPLDYIREELVTSLESRLGHQRNILDESQGHARQLVLDSPILTDEETQSIKDLNANGMSTKVIDITYKEGGDLRQAVEDVRAEADAAAREHDILVLSDRAASEGRVPIPSLLAVGGIHHHLVRNGLRNHVGLVVESGDPRAVHHFATLIGYGAGAVNPYLAYQTIEDLVAGPDGADLADAIDAYITAVEDGLLKTMAKMGISTVESYQGAQIFEAVGLSSDFIAEYFEGTTCRTDGIGIEEIEDDLTQRHDVAWSEEEPDMPRQGEYEFRSNGIHHQWNPNTVGKIQQAVRMGDYDTYKEFAELVNDQNEELQTLRGLLEFDSDRESIPIEDVEPVDDIVERFETAAMSLGSLSPEMHENNAIAMNRLGANANTGEGGEPPERFDTEKECTTKQVASGRFGVTSDYLASADELQIKMAQGSKPGEGGHLPGKKVNEMIAHVRYATPGVGLISPPPLHDIYSIEDLKQLIHDLKASNPEADINVKLVSEDGIGTIAAGVAKANADVVHISGHDGGTGASPKTSIKNAGLPWELGVSEANQMLRATGLRSRIKVTTDGGMKTGRDVAVAALLGAEGYTFGTASMVTSGCVMARQCHENTCPVGIATQNENLRERFPGEPQHVINYMTFVAQELREIMAELGFETIDEMIGRPSVLKQRDDVSQPKAQKLDLSGVIAEPADNDGRYKQREQTHEVDEQLDWDLIDAAEDAIYSGDPVAIDTDITNVDRAVGATLSNRISREHASDGLADDTIRVDFDGTAGQSFGAFLAQGVTMELTGTANDYVGKGLSGGKLIVNTPDQAPFDPSENIVIGNVALYGATQGEAYVNGMAGERFAVRNSGVKGVVEGVGDHGCEYMTGGAIVVLGETGKNFAAGMSGGVAYVYDPDGEFAAKANTGMVSLADTLEGKDRQMITRLVENHAAYTDSDRAAELLDDWDAEVENFTKVMPDAYAEVIADRERDDVRNEPPAKAAASAEAAEADFAASTDD

SEQ ID NO: 347 - protein, 2481 aa, Arabidopsis thaliana
MSTSSQSFVAGRPASMASPSQSHRFCGPSATASGGGSFDTLNRVIADLCSRGNPKEGAPLAFRKHVEEAVRDLSGEASSRFMEQLYDRIANLIESTDVAENMGALRAIDELTEIGFGENATKVSRFAGYMRTVFELKRDPEILVLASRVLGHLARAGGAMTSDEVEFQMKTAFDWLRVDRVEYRRFAAVLILKEMAENASTVFNVHVPEFVDAIWVALRDPQLQVRERAVEALRACLRVIEKRETRWRVQWYYRMFEATQDGLGRNAPVHSIHGSLLAVGELLRNTGEFMMSRYREVAEIVLRYLEHRDRLVRLSITSLLPRIAHFLRDRFVTNYLTICMNHILTVLRIPAERASGFIALGEMAGALDGELIHYLPTIMSHLRDAIAPRKGRPLLEAVACVGNIAKAMGSTVETHVRDLLDVMFSSSLSSTLVDALDQITISIPSLLPTVQDRLLDCISLVLSKSHYSQAKPPVTIVRGSTVGMAPQSSDPSCSAQVQLALQTLARFNFKGHDLLEFARESVVVYLDDEDAATRKDAALCCCRLIANSLSGITQFGSSRSTRAGGRRRRLVEEIVEKLLRTAVADADVTVRKSIFVALFGNQCFDDYLAQADSLTAIFASLNDEDLDVREYAISVAGRLSEKNPAYVLPALRRHLIQLLTYLELSADNKCREESAKLLGCLVRNCERLILPYVAPVQKALVARLSEGTGVNANNNIVTGVLVTVGDLARVGGLAMRQYIPELMPLIVEALMDGAAVAKREVAVSTLGQVVQSTGYVVTPYKEYPLLLGLLLKLLKGDLVWSTRREVLKVLGIMGALDPHVHKRNQQSLSGSHGEVPRGTGDSGQPIPSIDELPVELRPSFATSEDYYSTVAINSLMRILRDASLLSYHKRVVRSLMIIFKSMGLGCVPYLPKVLPELFHTVRTSDENLKDFITWGLGTLVSIVRQHIRKYLPELLSLVSELWSSFTLPGPIRPSRGLPVLHLLEHLCLALNDEFRTYLPVILPCFIQVLGDAERFNDYTYVPDILHTLEVFGGTLDEHMHLLLPALIRLFKVDAPVAIRRDAIKTLTRVIPCVQVTGHISALVHHLKLVLDGKNDELRKDAVDALCCLAHALGEDFTIFIESIHKLLLKHRLRHKEFEEIHARWRRREPLIVATTATQQLSRRLPVEVIRDPVIENEIDPFEEGTDRNHQVNDGRLRTAGEASQRSTKEDWEEWMRHFSIELLKESPSPALRTCAKLAQLQPFVGRELFAAGFVSCWAQLNESSQKQLVRSLEMAFSSPNIPPEILATLLNLAEFMEHDEKPLPIDIRLLGALAEKCRVFAKALHYKEMEFEGPRSKRMDANPVAVVEALIHINNQLHQHEAAVGILTYAQQHLDVQLKESWYEKLQRWDDALKAYTLKASQTTNPHLVLEATLGQMRCLAALARWEELNNLCKEYWSPAEPSARLEMAPMAAQAAWNMGEWDQMAEYVSRLDDGDETKLRGLASPVSSGDGSSNGTFFRAVLLVRRAKYDEAREYVERARKCLATELAALVLESYERAYSNMVRVQQLSELEEVIEYYTLPVGNTIAEERRALIRNMWTQRIQGSKRNVEVWQALLAVRALVLPPTEDVETWLKFASLCRKSGRISQAKSTLLKLLPFDPEVSPENMQYHGPPQVMLGYLKYQWSLGEERKRKEAFTKLQILTRELSSVPHSQSDILASMVSSKGANVPLLARVNLKLGTWQWALSSGLNDGSIQEIRDAFDKSTCYAPKWAKAWHTWALFNTAVMSHYISRGQIASQYVVSAVTGYFYSIACAANAKGVDDSLQDILRLLTLWFNHGATADVQTALKTGFSHVNINTWLVVLPQIIARIHSNNRAVRELIQSLLIRIGENHPQALMYPLLVACKSISNLRRAAAQEVVDKVRQHSGALVDQAQLVSHELIRVAILWHEMWHEALEEASRLYFGEHNIEGMLKVLEPLHDMLDEGVKKDSTTIQERAFIEAYRHELKEAHECCCNYKITGKDAELTQAWDLYYHVFKRIDKQLASLTTLDLESVSPELLLCRDLELAVPGTYRADAPVVTISSFSRQLVVITSKQRPRKLTIHGNDGEDYAFLLKGHEDLRQDERVMQLFGLVNTLLENSRKTAEKDLSIQRYSVIPLSPNSGLIGWVPNCDTLHHLIREHRDARKIILNQENKHMLSFAPDYDNLPLIAKVEVFEYALENTEGNDLSRVLWLKSRSSEVWLERRTNYTRSLAVMSMVGYILGLGDRHPSNLMLHRYSGKILHIDFGDCFEASMNREKFPEKVPFRLTRMLVKAMEVSGIEGNFRSTCENVMQVLRTNKDSVMAMMEAFVHDPLINWRLFNFNEVPQLALLGNNNPNAPADVEPDEEDEDPADIDLPQPQRSTREKEILQAVNMLGDANEVLNERAVVVMARMSHKLTGRDFSSSAIPSNPIADHNNLLGGDSHEVEHGLSVKVQVQKLINQATSHENLCQNYVGWCPFW

SEQ ID NO: 348 - protein, 534 aa, Blastopirellula marina DSM 3645
MWTLIVLGVIVAVAAIVTVHDLWQTKHAILKNFPIIGHFRYWLEAIGPELRQYIVTSNNEERPFSRDQRTWVYASSKRENNYFGFGTDDDLESSPNHLIIKHAAFPIHDPHPGEKEFDQEFRIPCAKVMGAYRGRRFAFRPKSVVNVSGMSFGSLSGPAVEALNIGSKLAGCLHNTGEGGISPYHQRGGDLIMQVGTGYFGCRDSHGNFDLGMFKEVVAANPVRAVEIKLSQGAKPGVGGFLPSAKITAEISRIRGIPQGRDCASPSNHTAFRNVDEMLDFIEKLADASGVPIGIKSAVGELHFWTDLAESMARTHRGVDFITIDGGEGGTGAAPLVFADHVALPFKIGFGRVYREFVKFDLHHHVVFNGSGKLGFPETGLFAMALGCDIISVAREAMLAIGCIQAQRCHTGHCPSGVATQNWWLKRGLDPTLKSFRVANYVATLRKELLRLSRACGVVHPSLVTLDHFDVLDDRLQALAATTLFDHRPEWGLPSADDQETIRRIMSAPLDQRDSLVRLEVMGTKRPTLAESSV

SEQ ID NO: 349 - protein, 1544 aa, Dechloromonas aromatica RCB
MEPAVPERQGLYDPANEHDACGVGFVAHFKGQKSHSIVEQGLLILKNLDHRGAVGADPLQGDGAGILIQIPDQFYREEMAKQGVELPPNGEYGVGMVFLPQEAASRHACVEEIERSVKAEGQVVLGWRDVPVNADMPMSPTVKAKEPVIRQIFVGRGPDVFVTDALERKLYIIRRRAANAIKSLKLKHGQEFYVPSFSARTVNYKGLLLADQVGVYYADLQDKRTVSALALVHQRFSTNTFPTWDLAHPFRYIAHNGEINTVRGNVNWFKAREQAISSPILGDDLKKVWPLHYPGQSDSASFDNALELLVMGGGYSLAQAVMLMIPEAWEKHTTMDENRRAFYEYHAAMMEPWDGPAAVAFTDGRQIGATLDRNGLRPARYLVTDDDLVVMASESGVLPIPEKKIVKKWRLQPGKMFLIDMEQGRIIDDQELKNSLANAKPYREWIEKIRIKLDEVPAAAEKCAESAASLLDRQQAFGYTQEDVKVILEPMVQNGEEATGSMGTDSALPVLSSKNKTLYTYFKQLFAQVTNPPIDPIREELVMSLVSFIGPKPNLLNTNDINPPIRLEVSQPVLSFADMEKLRNIEKYTSGKFRSLELDICYPVAWGKDGIEARLASLAADAEDAVRSGANILIVSDRKVDAGHVAIPALLATSAIHQHLVKKGLRTSAGLVVETGSARETHHFALLGGYGAEAVHPYLALETIESFAKGDAEKAEKFTKNFIKAIGKGLNKVMSKMGISTYMSYTGAQIFEAIGLQKAFVEKYFTGTPSNIEGIGVFEVAEESIRLHDEAFSSDPVLANMLDAGGEYAYRIRGEEHVWTPDSIAKLQHSTRSGKYETYKEYAKLINDQTKRHLTLRGLFEFKPQGTAIPLEEVEPAKEIVKRFATGAMSLGSISTEAHTTLAIAMNRIGGKSNTGEGGEDAKRFLPLKAGQKLSEVIGASRIERDYEFKDGDSLRSAIKQVASGRFGVTAEYLVNADQIQIKMAQGAKPGEGGQLPGHKVSEYIGFLRHSVPGVGLISPPPHHDIYSIEDLAQLIHDLKNANSRASISVKLVSEVGVGTVAAGVAKAKADHVVIAGFDGGTGASPQSSIKHAGTPWELGLSETQQTLVLNRLRSRIRVQVDGQMKTGRDVVVGALLGADEFGFATAPLVVEGCIMMRKCHLNTCPVGVATQDPVLRQRFSGQPEHVVNFFFFVAEEVREIMAQLGIRKFDDLVGRADLLDTRAGIEHWKAKGLDFSKVFYQPSVPAEVSRRHTETQDHGLEKALDHKLIEQAKPALEKGQKVQIETKIINVNRTCGTMLSGEVARRYGNDGLPDDTIHVKLTGTAGQAFGAFLAKGVTLELTGEGNDYVGKGLSGGRLIIKPSPDFRGDTQQNIICGNTVMYGATDGEAYLAGVGGERFCVRNSGATAVVEGVGDHGCEYMTGGTVAVLGMTGRNFAAGMSGGIAYVLDEDGSFKNRCNLAQVALEKVLPATRQAASEPLHRGIADETQLKELVTRHAEFTGSATAKAILANWDACREKFVKVYPHEYKRALTEMAAAQKEAA

SEQ ID NO: 350 - protein, 210 aa, Vitis vinifera
MADSDNDSGGHNNNAGSELSPREQDRFLPIANVSRIMKKALPANAKISKDAKETVQECVSEFISFITGEASDKCQREKRKTINGDDLLWAMTTLGFEDYVDPLKIYLHRFREMEGEKTSMGRQGEKDGPSAAGGNGSVVNPANTGSGGFGETGMYGAIPSTMMMMGHHQHQGHVYGSSAYHPMAAAGANFGSGKANSGHPGSGPSAGRPR

SEQ ID NO: 351 - protein, 194 aa, Magnaporthe grisea 70-15
MSDSPQSNPKEIEGAHTPDEEAQMNDPQDPQSAGLGYEFEVKEQDRWLPIANVARIMKNALPDNAKIAKEAKECMQECVSEFISFITSEASEKCHQEKRKTVNGEDILFAMTSLGFENYSEALKIYLAKYREGQQNRPSSQGYGAPPGAAPGTNATAGFPGGELGQQGTEAPGDASGYLYSTQPGHNGATAGEY

SEQ ID NO: 352 - protein, 72 aa, Chlamydomonas reinhardtii
PKIPEEYLRPHGLYDSSRVDVKKLRRLILNKQLAPCHPGAEECASGQDECPICFLYYPVLNTSLCCQKRVCT

SEQ ID NO: 353 - protein, 2337 aa, Schizosaccharomyces pombe
MKEFPGLKSRNEEIRNKAANDLYEYVIAYSRELSGEALVQFNNDVNKYVYTLIHSTDPLDRLAGVTAINRLIDYEGEDTTRITRFANYLRIILPGTDQKATVLAAKALGRLAVPGGALTSEFVNFEVKRALEWLQGERNENRRYAAVLILKELAKNTSTLIYAHIDSIFELLWHGLRDPKVTIRIASADALSEFLKIVRQRDSSIRLQWYTSILNEAQRGVAQGSSDYIHGSLLVYRQLFLKAGMFMHERYREVSDIILQFRDHKDLLIRKTVTELIATLAAYNPDEFVSNYLHVCMLHLLNLLKKENVKMLAFATIGKVAVAITNSIIPYLDPICDSIKESLKIHIRNKSASDAAIFQCISLLSIALGQAFSNYAYDLFDLIFASGLSEASYRALSDLAHNIPPLLPVIQERLLDMLSKILSGRPFIPPGCPPQYVARSLKSSKSASLKTGFFPNDVYILALKVLGNFDFSGYILNEFVKDCVVVYLENNDPEVRKTASITCSQLFARDPILSQTSDHAIQVVAEVLEKLLTVGICDTVPDIRLTVLNSLDSRFNKHLAQADKIRLLFIAINDENFAVRESALRIIGRLNVYNPAYVMPYLRKIMLKTLTILDYSTIIRTKEENAKLLCLLIAAAPRLIESHVEPILQILLPKAKDSSSIVAASIVNSLGEICQISGEVIVPFIKDLMPLIIEALQDQSSPIRRAAALKALGNLSSSTGYVIDPYIEFPSLLDILIGITKTEQDITIRRETIKLIGTLGALDPNRHRVLEKGTEKVVPEQKNIPPDISLLMSGIGPSSDEYYPTVVITALMSILKDPSLTIHHTAVIQAVMYIFKTMGLRCAPFLSQIIPEFIAVMRTCPTNILEFYFQQLSILVLIVRQHIRSFLPDLFKLIKDFWNPHSNLQFTILSLIESLARAMQGEFKPYLPSLLVMMLQIFDSDVSVDSVSTKKVLHAFIVFGDTLADYFHMLLDPILRLYERNDVSIGIKESIMITIGRLSMVINLSEYASRIIHPVMRMLSCNNASLIRVSMDTVCALIYQLNVDFAIFIPMIDKCLKMNGVTHETYSILVEQFLQEQPLPIKLNPYEKYDKPKLDVVASAADITSKKLPVNQEILRNAWEASQRSTKDDWQEWIRRLGVALLRESPSHALRACAALAAAYQPLARDLFNASFVSCWSELYDHFQEELVKSIEIALTSPHISPEIIQILLNLAEFMEHDDKPLPIDIRTLGAYAAKCHAFAKALHYKELEFIEEELVTKPSVDTIEALISINNQLQQPDAAIGILKHAQQHDKMNLKETWYEKLQRWEDALSAYEKREAAGAGNFEITMGKLRCLHALGEWDRLSQLAQENWIHAGHDARRYIAPLSVAAAWGLGQWEQMDEYISVMKSESPDKAFFNAIVALHRSQFEEAASYITRARDLLDTELTALVGESYNRAYSVAVRVQMLSELEEIITYKKAEDKPEVREMIKKTWVRRLKGCQRNVDVWQRMLRIRSLVISPRDNMEMWIKFANLCRKSGRISLAKKSLNLLLEDDENLDNSLVLKKTHPSIVYANLKFLWAVDDKRKALNSMQEFTSQLISDINVDPALFVQSTSVNTQKSQEEIQYYFHLLARCYHKQGQWQQEIENNWSEGSFDGVLQSYMYATQFDSKWYKAWHSWALANFEAVKFLEQSEEQIPSAAYEQYIIPAVKGFFKSIALSKGNLQDTLRLLNLWFKFGNNSNVINTLNVGISTVNIDIWLDVIPQLIARIHASSLSVRKSVHQLLSDVGRAHPQALVYPLTVAAKSQSSARQNAALAIMDSLKTHSPRLVEQARLVSHELIRAAILWHEQWHEGLEEASRLYFGDHNIEGMFAVLRPLHEMLERGPETLREISFQQAFGRDLVEARDCCIRFEQTGDISDLNQAWDLYYQVFKKIRKQLPQLTTLDLQYVSPKLLHVHDLELAVPGTYVSGKPVIRIVKFYPTFNVITSKQRPRRLSIKGSDGKDYQYVLKGHEDIRQDERVMQLFGLCNNLLLADPETFKRLLSIQRYPVIPLSPDSGLLGWVLDSDTLHVLIRDYRESRKILLNIEHRLIIQMAPDYDRLTLLQKVEVFEYALLSTTGQDLYRVLWLKSRSSEAWLNRRTNYSRTLAVMSMVGYILGLGDRHPSNLMLDRYTGNIIHIDFGDCFEVAMHREKFPEKIPFRLTRMLVNAMEVSGIEGTFRITCEHVMRVLRTNKESVMAVLEAFVYDPLINWRLAPAYSPSIDEKQSNEPNTLLGETIDGLHRKRLNEEGITLEERQKPEILNQRAITVLNRVSNKLTGRDFKPQQQLDVPSQVEKLILQATSIENLCLCYIGWCSFW

SEQ ID NO: 354 - protein, 1525 aa, Leifsonia xyli subsp. xyli str. CTCB07
MALTPPHHRFGALPGKQGLYDPAHEKDACGLAMVATLRGTAGHDIVAAALEALRNLEHRGAVGSDAGTGDGAGIVTQVPDAFLRAVSGTALPGAGEYAAGNAFLPVGAEERERVKAAVEAIAAEQDLTVLGWRPVPNRPDELGDLARAAMPVIEQLFVSSTRTAEDGDPVAGIALDRQTFFLRKRAERELDIYFSSLSSRTIVYKGMFTTLQLEPFYPDLSDQRFASKLALVHSRYSTNTFPSWQLAQPFRMIAHNGEINTVQGNRNWMRARQSQLESELLGELGPVLPIVTPAASDSASFDEVVELLSLTGRSLPHSVMMMVPEAWENQTEIDPVRRDFYEYHSMLMEPWDGPAAIVFTDGSLVGATLDRNGLRPGRYVITNDGLVVLASEIGVLDIEPSRVVRKGRLRPGRMFLVDTVAGRLIEDEEIKSELAAGAPYGEWLQQGRIHLKDLPEREHIVHTPASITRRQRTFGYTEEEVRVLLKPMAATGAEPLGAMGSDTPVAVLSERPRLLFDYFAQQFAQVTNPPLDSIREEVVTSLALGVGPERNLLTAGPEHARQVVLDFPVIDNDELAKIQHIDPRPGSRLTTTVRGLYRFDAGEDAMRRRLAEMCAEADEAIESGAQFIVLSDRDSTKDLAPIPSLLMLAAVHHHLIRAESRMKVGLIVEAGDVREVHHVALLIGYGASAVNPYLAMETCEELVRSGMITGVTSEKAVGNVIKALGKGVLKIMSKMGVSTVSSYAGAQAFEAVGLSQEFVGEYFTGTTSKLGGVGIEVIAAENLARHFAAYPAESAIIAHERLATGGEYQWRRDGAPHLFNPETVFRLQHSTRTRRYDIFREYTTIVDDQSETLMTLRGMFKLKTGERPAVPIDQVEPVESIVKRFSTGAMSYGSISREAHETLAIAMNRLGAKSNTGEGGEDLERLLDPERRSAIKQVASGRFGVTSMYLTHADDIQIKLAQGAKPGEGGQLPPAKVYPWVARTRHATAGVGLISPPPHHDIYSIEDLKQLIFDLKRANPRARIHVKLVSESGIGAVAAGTAKALADVILVSGHDGGTGASPVNSLKHAGTPWELGLTETQQTLMLNGMRDRVVVQVDGQLKTGRDVIVGALLGAEEFGFATAPLVVSGCVMMRVCHLDTCPVGVATQNPELRARFSGKPEFVVTFFEFIAQEVREHLAELGFRSLEEAVGHAELLDVDRAIEHWKASGMDLSPILLGPELPEDAPRKHGRDQDHELAEHVDNSLIEAAQHVLENGGRLELSLPIHNTERAVGTMLGHEVTVRHGENGLPTGSIDITLTGSAGQSLGAFLPAGITLRLEGDSNDYVGKGLSGGQIVVRPPRDSAFAAEDNVIAGNVIGYGATQGSLFIRGIVGERFLVRNSGATAVVEGVGDHALEYMTGGLAVILGGTGRNFGAGMSGGTAYVYDLTPARVNREALGSGELELLPLGSDDIEIVRDLLEKHRTETGSALADRLLADFDATVARFVKVLPRDYAAVLQMRQEAADEGLDPDGDVVWNRILEVTGG

SEQ ID NO: 355 - protein, 2207 aa, Physcomitrella patens subsp. patens
MEALHFTPLTLHRQPQAALSIHDRGISTKSHESSDQGKRALGVVRGGVATGSQADSSFGSRQLQAGCNFSGLRKTREFVECSKSRKCRSVNRYWWESLRQRQSKFYFLPVRAGLSSAPVTNQGLYDPSFDKDGCGVGFIAKLSQEPSRDIVKDALEMLERMAHRGACGCEENTGDGAGILVGIPHTYFSQARTKKYLGCDLPPPGDYAVGMMFLPTSEIRREHAKKVFTEVAEALGHTVLGWRRIKTDNSDLGKSAIQTEPVIEQVFLTSSTLSKIDFESQMYILRKTSMLAIRAVLNLKRGAAKDFYICSLSSKTVVYKGQLKPNQLTNYYYADVGDERFTSFMSIVHSRFSTNTFPSWDRAQPMRMLGHNGEINTLRGNVNWMHAREGLFKCKNLGLSPEELKKLLPIVDAGSSDSGVFDGVLELLVRAGRSLPEAVMMMIPEAWQNDPNMDPERRNLYEYFSCIIEPWDGPALVTFTDGKYLGATLDRNGLRPGRFYVTHDGRVIMASEVGVVDVEPENVAQKGRLHPGTMLLVDFENHKVVDGDELKKQQSSRYPYGEWLERQSFTLQDVVNSVSENLRVPPAILGDKNVASPNFSASNMGVKGLLTPLKAFGYTMENLEMLLLPMAKDGSEALGSMGNDAPLAMMSNRPKLVFEYFKQMFAQVTNPPIDPIREAIVTSTRCMVGPEHDLTETVEEQCNRLSLSGPLLDLGEMEAVKKMEYRGWKTMVVDTTFDKSEGPAGLESALTRICAEARNAVAEGYSMLVLSDRATSAQRVPVSSLLATGAVHHHLVQSMERTRIGLVVESAEPREVHHFCTLVGFGADAICPYLAIETISRLQVDGKIPMEWSREELVKKYFYASNSGMLKVLAKMGISTLASYKGAQIFEALGLSSEVVSRCFKGTPSRVEGATFEMLAKDCLRLHELAFPARESPEGSADANALPNPGDYNWRKDGEVHLNDPMAMAKLQEAARTNSVEAYNEFSKLTHELNKKVNVRGMLKFKEQPESTRIPLDNVESAAEIVKRFCTGAMSYGSISLEAHSTLAIAMNKLGGKSNTGEGGENPRRLEPLSDGSQNPQRSAIKQIASGRFGVTSYYLTNADELQIKMAQGAKPGEGGELPGHKVIGDIAVTRNSTPGVGLISPPPHHDIYSIEDLSQLIHDLKNANPAARVSVKLVSEAGVGVVASGVVKGHADHVLISGHDGGTGASRWTGIKNAGLPWELGLAETHQTLVANDLRGRTILQTDGQLKTGRDIMIAALLGAEEFGFATAPLITMGCIMMRKCHKNTCPVGIATQDPVLRAKFAGQPEHVINYFFMVAEEAREIMANLGISKMDDLVGRADLLQVDEEVMAENEKLANIDLSLLLRPAAEIRPGAAQRCVQKQDHELELALDQKLISLSHAALESKVPVYIESPVVNVNRAVGTMLSHEVTKQYKLEELPTDTIYVKLNGSAGQSLGAFTCKGVTLELEGDSNDYVGKGLCGGKIIVYPPRSSTFDPKENILIGNVALYGATSGEAYFNGMAAERFAVRNSGAKTVVEGVGDHGCEYMTGGVVVVLGETGKNFAAGMSGGVAYVLDKEGTFSSTCNTGLVDLDPVEEEEDVMTLRAMIQQHQRHTKSQLAGEILANFDSLLPSFIKVFPRDYKRVLKEIKAKEEAEKMKVAAAAVADAGLAASVANSAPKAAPSTIRPTEVSNPIKHGGFVKYDRKPLPYRPAEERMKDWGEVLASDNQDGLVKTQSARCMDCGTPFCNQDKTGCPLGNKVPEWNELVYQNRWREALDRLLETNNFPEFTGRVCPAPCEGACVLGIIENPVSIKTMECTIIDKGFENGWMVPRPPLKRTGKKVAIVGSGPAGLAAADELNKKGHSVTVFERADRIGGLMMYGVPNMKTDKENVVQRRVNLMEAEGVQFVTNAHVGVDPVYSVENLRSDYDALLLATGATKPRDLPVEGRDLAGVHFAMEFLHKNTKSLLDSNLEDGQYISAKGKKVVVIGGGDTGTDCIGTSVRHSCASVVNLELLPQPPQTRAANNPWPQWPRIFRVDYGHEEAATKFGKDPRSYEVLTKRFIGNEKGEVTGMELVRVEWSKGADGRFQMTEVVGSTQIIEADLVLLAMGFLGPEQNIAEKLGLQTDARSNFQADFGKHATNSQGVFAAGDCRRGQSLVVWAIAEGRQAAAQVDNYLMVKEVVLEQLPSEEHIREFIATSSVQ

SEQ ID NO: 356 - protein, 446 aa, Pseudomonas syringae pv. syringae B728a
MSDPISHKPAPVLRESATFDRLTIQEIQRAAETGIYDIRGGGTKRKLPHFDDLLLLGASVSRYPLEGYREKCGTDVVLGNRFAKKPLYLKIPVTIAGMSFGALSANAKEALGRGATIAGTSTTTGDGGMTPEERGQSQHLVYQYLPSRYGMNPDDLRKADAIEIVLGQGAKPGGGGMLLGMKVTERVAGMRTLPVGVDQRSACRHPDWTGPDDLAIKIAEIREITDWEKPIYVKIGASRPYYDVKLAVKAGADVIVLDGMQGGTAATQEVFIEHVGIPILPAIPQAVQALQEMGMHRKVQLIVSGGIRNGADVAKAMALGADAVAIGTAALIALGDNHPRLDEELRKIGSAAGYYDDWQNGRDPAGITTQDPELSKRLDPVEGGRRLANYLRVLVLEAQTMARACGKSHLHNLDPEDLVALTVESAAMARVPLAGTSWIPGSGSGY

SEQ ID NO: 357 - protein, 1479 aa, Azospirillum brasilense
CGVGFIAAIDGKPRRSVVEKGIEALKAVWHRGAVDADGKTGDGAGIHVAVPQKFFKDHVKVIGHRAPDNKLAVGQVFLPRISLDAQEACRCIVETEILAFGYYIYGWRQVPINVDIIGEKANATRPEIEQIIVGNNKGVSDEQFELDLYIIRRRIEKAVKGEQINDFYICSLSARSIIYKGMFLAEQLTTFYPDLLDERFESDFAIYHQRYSTNTFPTWPLAQPFRMLAHNGEINTVKGNVNWMKAHETRMEHPAFGTHMQDLKPVIGVGLSDSGSLDTVFEVMVRAGRTAPMVKMMLVPQALTSSQTTPDNHKALIQYCNSVMEPWDGPAALAMTDGRWVVGGMDRNGLRPMRYTITTDGLIIGGSETGMVKIDETQVIEKGRLGPGEMIAVDLQSGKLYRDRELKDHLATLKPWDKWVQNTTHLDELVKTASLKGEPSDMDKAELRRRQQAFGLTMEDMELILHPMVEDGKEAIGSMGDDSPIAVLSDKYRGLHHFFRQNFSQVTNPPIDSLRERRVMSLKTRLGNLGNILDEDETQTRLLQLESPVLTTAEFRAMRDYMGDTAAEIDATFPVDGGPEALRDALRRIRQETEDAVRGGATHVILTDEAMGPARAAIPAILATGAVHTHLIRSNLRTFTSLNVRTAEGLDTHYFAVLIGVGATTVNAYLAQEAIAERHRRGLFGSMPLEKGMANYKKAIDDGLLKIMSKMGISVISSYRGGGNFEAIGLSRALVAEHFPAMVSRISGIGLNGIQKKVLEQHATAYNEEVVALPVGGFYRFRKSGDRHGWEGGVIHTLQQAVTNDSYTTFKKYSEQVNKRPPMQLRDLLELRSTKAPVPVDEVESITAIRKRFITPGMSMGALSPEAHGTLNVAMNRIGAKSDSGEGGEDPARFRPDKNGDNWNSAIKQVASGRFGVTAEYLNQCRELEIKVAQGAKPGEGGQLPGFKVTEMIARLRHSTPGVMLISPPPHHDIYSIEDLAQLIYDLKQINPDAKVTVKLVSRSGIGTIAAGVAKANADIILISGNSGGTGASPQTSIKFAGLPWEMGLSEVHQVLTLNRLRHRVRLRTDGGLKTGRDIVIAAMLGAEEFGIGTASLIAMGCIMVRQCHSNTCPVGVCVQDDKLRQKFVGTPEKVVNLFTFLAEEVREILAGLGFRSLNEVIGRTDLLHQVSRGAEHLDDLDLNPRLAQVDPGENARYCTLQGRNEVPDTLDARIVADARPLFEEGEKMQLAYNARNTQRAIGTRLSSMVTRKFGMFGLQPGHITIRLRGTAGQSLGAFAVQGIKLEVMGDANDYVGKGLSGGTIVVRPTTSSPLETNKNTIIGNTVLYGATAGKLFAAGQAGERFAVRNSGATVVVEGCGSNGCEYMTGGTAVILGRVGDNFAAGMTGGMAYVYDLDDSLPLYINDESVIFQRIEVGHYESQLKHLIEEHVTETQSRFAAEILNDWAREVTKFWQVVPKEMLNRLEVPVHLPKAISAE

SEQ ID NO: 358 - protein, 290 aa, Nicotiana tabacum
MEESLPIYVNAKQYSAILKRRQVRAKLEVQNKLVKDRKPYLHESRHRHAMKRARGTGGRFLNTQICSNLSLHLNARYKHLYGDGRWQLNYIHGSALREWYLGHFHPIWFSTQRVVVGALPPNLVLMLRASSVVMTCSSSQNSESLVSLFTCRSCRLHACWNLTTRCVIHWCRCQHRLHYKMHSYWLHSDGYSAVHPWLCYSFLFQNCNRLLHFFLGVGRPYDICVHVCCIKARLVLHVITKGNERSQTIRLFLARNCGDYGSFLHFLVERRVDHSALLSLLATVFHFLLL

SEQ ID NO: 359 - protein, 532 aa, Ralstonia solanacearum GMI1000
MLPRRYWAFAGVVLLFVVTAGFALAGRLHWACAAIPGMLAMLGVRDLTQPRHSVLRNYPLWGHLRFLLEFIRPEIRQYFVEDDTDERPFSRAQRSIVYQRAKGEVDSRPFGTELDVKIAGYEWIGHSLAPTRIASSDFRVLVGEGRAKPYSMSVFNISAMSFGALSANAIRALNRGAKLGNFIHDTGEGSISPYHREEGGDLIWEIGSGYFGCRDADGRFDPDRFAEQARSPQVKMIEVKLSQGAKPGHGGVLPAAKVTAEIAATRGVPIGQDCISPATHSAFSTPLGLLQFVDRLRTLSGGKPTGFKLCIGHPWEFFGIVKAMLASGILPDFIVVDGAEGGTGAAPLEFTDHVGTPLQEGLLLVHNTLVGTNLRDKIKIGASGKIVTAFDVARTLAMGADWCNAARGFMFALGCIQAQKCHTDRCPTGVATQDKSRQKALVVPDKAQRVHQYHAHTLHALLELTQAAGLRHPVDFRAHHIVRRVSGNEVQLLSTLLKYLEPGDLLAGRYRYQLYERYWPMAQADRFDPVAA

SEQ ID NO: 360 - protein, 484 aa, Capsicum annuum
MGGKSSREDSWRQTSSTRSSWNQYEYPPTHSSSPSYPQDSYSYSSQQQAVPSYAPPPPHQQAVPSYAPAPPQQNYASHASRPRLDRRYSRIADNYNSLDEVTEALARAGLESSNLIVGIDFTKSNEWTGKRSFGNRSLHHIGQNLNPYEQAISIIGKTLAAFDEDNLIPCFGFGDASTHDQDVFSFFPDERFCNGFEEVLFRYREIVPQLKLAGPTSFAPVIEMAMTIVEQSGGQYHVLLIIADGQVTRSVDTGRGQLSPQEQKTVDAIVQASKFPLSIILVGVGDGPWDMMKEFDDNIPARDFDNFQFVNFTEIMAKNVPQSRKETEFALSALMEIPSQYKATMELHLLGGQSGKSPSRVALPPPMYGATSVGASKPSRATSFQQPTSSYYGYGSPADAAPHFQQTSSSYYNSAHPVDTVPSAPSSPYIAPSSTYDNQVCPICLTNPKDMAFGCGHQTCCDCGRALENCPICRSSIQTRIKLY

SEQ ID NO: 361 - protein, 2796 aa, Aspergillus fumigatus
MCVIQRLTYAYLIRTSLNDKACHKIFESLFRFISVERSLYNRASSKGACASRLSACASVIRTAINVFLRNLRTKSIRAIVDHITEILQVPGEGLWEHLGADYLKCLTTLLRYPPHLEHLAANEWDKVLNLCLRSIGAPEDGDSQSSDHNGHPSTLDDFLDASSRSTPSRRTSSLALREKQSGDKRIVAEAIVCIQLLTATPTAPVQVAAEKVLRGLGTFLKLSPIAGSEHQAAFNSINTVVMRVIFDQSDLVRMFLLDLIPVIRHLWSTKLMGLKDELLVTILLCMIILTDATRRAPTDSLALSIENLLDTIYSEYTKRSEKDILQIDELIFDRTSFTQIIDLALQPRLEVPRSEHNLTVVWVMAKLMRLSEESTAQLSHPAGETPSKKQRLNSASDQVFRDCVMSSGNRRVCALQLIPILLQGRLTMESKASLLQRLIPYILDDNGVIASWTMVAISSISDSSLELWAIITRLCAQTNPGSVSNASKQICSWLREAWVIGTVTDRIQTAQVAAFARPLDLLNLFLACTNRQFEMPTPQFRGPSGIVAKGWHFYQSNRELLHYLFHVDGMLVPSSLHGRDDCISLQLATRKDHNDDIVLDLLQAKSEMFLQAWRSVSDSKSHHVTVDVVQILASFCIVAVLYTECIPEQLHTQIKDLRGNIQQLWDSLCSFMASRELVFVQYCLELLCPFLPQGGRVGFEKSVVNSSLYRLVSPLGAILENHRQDQKRLLSSDEEEPMDLDDQLLQSNDLLAENMCIINSNRESVPLFHDSATFQRSMTIRLSIFNIAYGSVVQPDQPARSALVEYLTDLDEADILSSKDFLPDVYRACAGYERTSLLDLLEDMGEKCLQTYQLERCETSQVLCIHMLDSFIKSWTTGDGDHLSDSASDIYNWVTDVLLVNGRASSRVSIAFSRLLEEIFSTNPAYTSGESNPSPRTTLFMILQESDILTKYNVGNLVPKLFRHFPLKDHDAIFDDILESLPRDPDWTEGIALRLFILARLASQWHTLLRRSIYHMFETPAQLPHSRWHAEKCIRHVASVFGLEDARQLFRLFSSQILYTWTENESVMTMPFSIFGYSTLEDMLSDVQDEIVGQIMMRANEHEASELSTRLKIPFIELLATSFYKAEAYSIARDISTPPGQSSQPKGVENRLKKILGADRFVSLVEKQFPQVIATFFGTLDQCEQIERAFSKRANFQEAFSILKSITAKGASKEILPPNQQPSFRARYLLDELEFLCKRSGYELETIWTPTLASYVCRTLLESIHPALGSLHACSVIRKIRILICITGPVMLRDYPFEMLLHALRPFLTDIHCSEDALGMFWYLLDAGRSYLTENPSFTAGIAVSTLLSFRKFLASTSATMQESESVAVLTIVQTFLQWFEDYLKSYESPHLSPEAHAFFQRLMESSRRISTPDKELDGTEECNLLLEVIQDRNSKTRLLSQSISDHILSLLCASFKSAPNYHQGLVERGYDAIADSVALYQTLQDFSPTKEYRLWAARVIGRNFAATGMISDDLLREQQSTLFEPRMAKLSLHMSCQSKARILQVLCSMLQNSSPLEVGLVERTLQLIVSNLAGAPGFENYEEIISPSLLKALIWSPYQCPSIPLPASQTKNHDTIVRWNPGISFAHWARSIGLFLTKAAPQDPVIGPLRNILHVIPSLAVRILPYILHDVLLTEPDGVANVRKTISDVFQQGLHEADAHSIPHVRLIINCLLYLRNQPRPQEATIVERDEWLEIDFAVASRAANTCGLPKTALLFLEIQASRAVSGSRRSSLVKYEPPPDLLHDIFRNVDDPDLFYGVQQSSSLESVMETLEHESSGFKNLLFQSAQYDCEIQMSGDADAHGLLKALNSSNLQGIANSLTSTLRGSKSSVSFDSMMQAAIDLRQWDLPVSPMNHSPSAALFRTFQSLNTSTSLVDVSNSVNESLLAILGSLGSTSRSAMSFRAAMRDLGIVTEISDVLSATSLEELSEEWRKIAERNSWLKATSVDEVGEILKCHEALFSSIKTRDYLKSAVGLSDRDAQLLEVKVIRQSLSITRSHGIPQVSLKSAMRLSKLADLCVVQGINVEGATKFDLANVLWDQGEMAASIRMLQQLDNQGDLHKQAIPISRPELLVTLGHHVAEARLEKPEAIIQGYLGPAVKELKNRSEAEEAGRVYHGFATFCDQQLQNPDGLEDFRRAEQLRNRKEKEVLGLEEMMKNAEGKEREALRHYRTKTKQWFDLDDREYQRLRRSREAFLQQCLENYLLCLKESDMYNNDALRFCALWLGKSDSEIANKAVSKYLNQVPSRKFAPLMNQLTSRLQDTSDEFQNMLFALIFRICVEHPFHGMYQIFASSKSKGGKDPSALSRNRAASRLVDCLKNDKRIGPTWVAVHNANISYVRFAVDRLDEKVKSGAKVPLKKLLTGQRLEQDASTQKLPPPTMKIAIRVDCDYSEIPKLVRYHPEFTVASGVSAPKIVTAVATDGHKYKQLFKGGNDDLRQDAIMEQVFEQVSSLLKDHQATQQRKLGIRTYKVLPLTSNAGIIEFVPHTIPLHDYLMPAHQRYFPKDMKPNMCRKHISDVQTRSFEQRVKTFRQITEHFHPVMRYFFMEKFNSPDDWFSKRLSYTRSTAAISILGHVLGLGDRHGHNILLDERTGEVVHIDLGVAFEQGRVLPVPEVVPFRLTRDLVDGMGITKTEGVFRRCCEFTLEALRQESYSIMTILDVLRYDPLYSWTLSPLRMKRMQDAQEAGDGPPMISGAAEDQRSANEPSEADRALTVVAKKLSKTLSVTATVNELIQQATDERNLAVLYCGWAAYA

SEQ ID NO: 362 - protein, 2195 aa, Zea mays
MSTAQGTALKSAPIGAGHRARRGRPVVPPYRSGWQAYGGVSLEGSGFLGGLQRTEERVATLAPRAAARDAEVVRPLSKLPNSSIGLYDPSFERDACGVGFVAELSGDYKRETVNDAIEMLERMAHRGACGCEKNTGDGAGIMVALPHDFFKEVTKDAGFELPPPGDYAVGMFFMPTDEKRREKGKAEFKKVAESLGHVILGWRPVPTDNSDLGESALETEPVIEQVFVTKSSRSEAEFEQQLYILRRLSIISVRASLNIKRGGERDFYMCSLSSRTIVYKGQLKPCQLKGYYYADLGQENFMSYMALSQAAVLLWPTAMPDSSGCDLRLGGGKEMCLVHSRFSTNTFPSWDRAQPMRVLGHNGEINTLRGNKNWMTAREGLLEAEKLGLSKEQLARILPIVDATSSDSGAFDNVLELLVRGGRSLLEAVMMMIPEAWQNDGNMDPEKKALYEFLSALMEPWDGPALISFTDGRYLGATLDRNGLRPGRFYVTHSGRVIMGSEVGVVDVPPEDVLRKGRLNPGMMLLVDFENHTVVDDEALKAQYSKAHPYGEWLKRQKIYLKDIVESVPETDRVAPSISSSLPAKNENKDHVGINGILTPLKAFGYTVEALDMLLLPMAKDGVEALGSMGNDTPLAVMSNREKLTFEYFKQMFAQVTNPPIDPIREKIVTSMECMIGPEGDLLETTEKQCNRLSLKGPLVSIDEMEAIKKMNYRGWRSKVLDITYPKKSGRKGLEETLNRMCAEAREAIREGYTILVLSDRGFSSDRVAASSLLAVGAVHQHLVANLERTRIGLLVESAEPREVHHFCTLLGFGADAICPYLAIEAIWCLQNDGKIPPNGDGQPNSKEELVKKYFYASNYGMMKVLAKMGISTLASYKGAQIFEALGLSSEVIGKCFEGTPSRIEGATFEMLARDALRLHELAFPSRTPPAGSADAKALPNPGDYHWRKNGEVHLNDPLAMGKLQEAARVNSRAAYKEYSKRIQELNKACNLRGMLKFKDISDKISLDDVEPASEIVKRFCTGAMSYGSISLEAHTALAIAMNKLGGKSNTGEGGEQPSRMEPLPDGSMNPRRSAIKQVASGRFGVSSYYLTNADELQIKMAQGAKPGEGGELPGHKVIGDIAVTRHSTAGVGLISPPPHHDIYSIEDLAQLIHDLKNSNPGARISVKLVSEAGVGVVASGVVKGHADHVLISGHDGGTGASRWTGIKNAGLPWELGLAETHQTLVANGLRGRAVLQTDGQLKTGRDVAVACLLGAEEFGFSTAPLITLGCIMMRKCHMNTCPVGIATQDPVLREKFAGEPEHVINFFFMLAEELREIMANLGFRTITEMVGRSDMLEVDPEVVKTNEKLENIDLSLILKPASEIRPGVAQYCVEKQDHGLDMALDNKLIDLSRTAIEKQVRVFIETPIQNTNRAVGTMLSHEVTKRYHINGLPAGTIHVKFTGSAGQSFGAFLCPGITLELEGDSNDYLGKGLSGGKIVVYPPRNSSFSPEDNIVIGNVALYGATMGEAYFNGMAAERFCVRNSGAQAVVEGIGDHGCEYMTGGTVVILGKTGRNFAAGMSGGIAYVYDVDGKFSARCNNELVDLYHVEEEDDIITLKMMIEQHRRNTESVLARDILSDFDNLLPKFVKVYPRDYKRVLESMKVEKAVAKHAKEPKMANGISVTTKKVQPDQSASRPTHVANAKKYRGFITYERESISYRDPKERVRDWKEVAIESTPGPLLNTQSARCMDCGTPFCHQESSGAGCPLGNKIPEFNELVHQNRWREALDRLLETNNFPEFTGRVCPAPCEGSCVLGIIENPVSIKSIECAIIDKGFEEGWMIPRPPLQRTGRKVAIVGSGPSGLAAADQLNKMGHFVTVFERADRIGGLMMYGVPNMKTDKIGVVQRRVNLMAEEGVTFVVNANVGSDPLYSIERLRSENDAVILACGATKPRDLTIPGRELSGVHFAMEFLHANTKSLLDSNLEDGKYISARGKKVVVIGGGDTGTDCIGTSIRHGCTSLVNLELLSKPPSTRAADNPWPQWPRIFRVDYGHQEAATKFGKDPRTYEVLTKRFIGDGNGKVKALEVVRVKWEKVDGRFQLKEMEGSEEIIEADLVLLAMGFLGPEATIAEKLGLEKDNRSNFKAQFGDFATSVDGVFAAGDCRRGQSLVVWAITEGRQAAAAVDKYLSRYDQNAAATGDSTPSGTGLVQPVAA

SEQ ID NO: 363 - protein, 2166 aa, Oryza sativa
MSAAQGMAYKLRTDAAPTGAGRRARRSHSSVAAPYRAARLVQGGVSIEGGLVGGCQLTEERVAARPPRAAARDAEPVRPLSTLPESSIGLYDPSRERDSCGVGFVAELSGDYKRATVNDALEMLERMAHRGACGCEKNTGDGAGILVALPHNFFREVTKDAGFELPQPGEYAVGMVFLPIDEKRRERSKAEFQKVAESLGHVILGWRRVPTDNSDLGESALQTEPVIEQVFLTKSSSSEADFEQQLYILRRLSILSIRAALNLRRGGKRDFYMCSLSSRTIVYKGQLKPCQLKGYYYADLGHENFTSYMALVHSRFSTNTFPSWDRAQPMRVLGHNGEINTLKGNKNWMKAREGLLECEKLGLTKDQFSKILPIVDATSSDSGAFDGVLELLIRGGRSLPEAVMMMIPEAWQNDVNMEPEKKALYEFLSALMEPWDGPALISFTDGRYLGATLDRNGLRPGRFYVTHSGRVVMGSEVGVVDVPSKDVLRKGRLNPGMMLLVDFENHTVVDDEALKAQYSKAHPYGEWLKRQKIYLKDIVESVPETERVAPGISGSLTQKNEKKEHAGVNGIVTPLKAFGYTVEALEMLLLPMAKDGVEALGSMGNDTPLAVMSNREKLTFEYFKQMFAQVTNPPIDPIREKIVTSMECMIGPEGDLLETTEKQCNRLALEGPLVSIDEMEAIKKMNYRGWRSKVLDITYPKKSGRKGLEETLDRICTEARGAIKKGYTVLVLSDRGFSSDRVAVSSLLAVGAVHQHLVANLERTRVGLVESAEPREVHHFCTLVGFGADAVCPYLAIEAIWCLQNDGKIPPNGDGKPYSKEELVKKYFYASNYGMMKVLAKMGISTLASYKGAQIFEALGLSSEVIRKCFDGTPSRIEGATFEMLARDALRLHELAFPSRAPPPGSADAKALPNPGDYHWRKNGEVHLNDPLAMAKLQEAARVNSRAAYKEYSRRIQELNKTCNLRGMLKFKDTADMISVDEVEPASEIVKRFVTGAMSYGSISLEAHTALAMAMNKLGGKSNTGEGGEQPSRMEPLANGSMNPKRSAIKQVASGRFGVSSYYLTNADELQIKMAQGAKPGEGGELPGHKVIGDIAVTRHSTAGVGLISPPPHHDIYSIEDLAQLIHDLKNSNPRARISVKLVSEAGVGVVASGVVKGHADHVLISGHDGGTGASRWTGIKNAGLPWELGLAETHQTLVANGLRGRAILQTDGQLKTGKDVAVACLLGAEEFGFSTAPLITLGCIMMRKCHTNTCPVGIATQDPVLREKFAGEPEHVINFFFMLAEELREIMSQLGFRTITEMVGRSDMLEVDPEVVKSNEKLENIDLSLILKPAAEIRPGAAQYCVEKQDHGLDMALDNKLIALSKAALEKEVRVFIETPIQNTNRAVGTMLSHEVTKRYHMKGLPAGTIHVKLTGSAGQSLGAFLCPGITLELEGDSNDYVGKGLSGGKIVVYPPRDSTFIPEDNIVIGNVALYGATIGEAYFNGMAAERFCVRNSGAQAVVEGIGDHGCEYMTGGTVVILGKTGRNFAAGMSGGIAYVYDIDGKFSVRCNHELVDLYHVEEEEDITTLKMMIEQHRLNTGSVVARDILSNFDTLLPKFVKVFPRDYKRVLDNMKAEKAAAKLAKEPKISNGVSVTTKKVQPEQSTNRPTRVSNAKKYRGFISYERESISYRDPNERVKDWKEVAIESVPGPLLNTQSARCMDCGTPFCHQESSGAGCPLGNKIPEFNELVHQNRWREALDRLLETNNFPEFTGRVCPAPCEGSCVLGIIENPVSIKSIECAIIDKGFEEGWMVPRPPLQRTGKKVAIIGSGPAGLAAADQLNKMGHFVTVFERADRIGGLMMYGVPNMKTDKIEIVQRRVNLMAEEGITFVVNANVGSDPLYSIERLRSENDAVILACGATKPRDLGIPGRELSGVHFAMEFLHANTKSLLDSNLEDGRYISAKGKKVVVIGGGDTGTDCIGTSIRHGCTSIVNLELLTKPPSKRAADNPWPQWPRIFRVDYGHQEASSKFGNDPRTYEVLTKRFIGDENGNVKALEVVRVKWEKVDGRFQLKEIEGSNETIEADLVLLAMGFLGPEATIAEKLGLEKDNRSNFKAQFGNFATSVDGIFAAGDCRRGQSLVVWAITEGRQAAAAVDKYLSRNEQDAAEDITPSGAGFVQPVAA

SEQ ID NO: 364 - protein, 370 aa, Oryza sativa
MGNRIGGRRKAGVEERYTRPQGLYEHRDIDQKKLRKLILEAKLAPCPFCKTPSYAVEYRGVKTKEERSIEQFEEQKVIEAQMRMRQQALQDEEDKMKRKQNRCSSSRTITPTKEVEYRDICSTSFSVPSYRCAEQETECCSSEPSCSAQTSMRPFHSRHNRDDNIDMNIEDMMVMEAIWRSIQEQGSIGNPVCGNFMPVTEPSPRERQPFVPAASLEIPHGGGFSCAVAAMAEHQPPSMDFSYMAGSSAFPVFDMFRRPCNIAGGSMCNLESSPESWSGIAPSCSREVVREEGECSADHWSEGAEAGTSYAGSDIVADAGTMPQLPFAENFAMAPSHFRPESIEEQMMFSMALSLADGHGRTHSQGLAWL

SEQ ID NO: 365 - protein, 803 aa, Arabidopsis thaliana
HELAFPTRGYAPGSAEASALTNPGNYHWRKNGEIHLNDPLAIAKLQEAARTNSVAAYKEYSKRINELNKQSNLRGLMKFKDADVKVPLDEVEPASEIVKRFCTGAMSYGSISLEAHTTLAMAMNKLGGKSNTGEGGELPSRMEPLADGSRNPKRSSIKQIASGRFGVSSYYLTNADELQIKMAQGAKPGEGGELPGHKVIGDIAITRNSTAGVGLISPPPHHDIYSIEDLAQLIHDLKNANPGARISVKLVSEAGVGVIASGVVKGHADHVLIAGHDGGTGASRWTGIKNAGLPWELGLAETHQTLVANDLRGRTVLQTDGQLKTGRDVAVAALLGAEEFGFSTAPLITLGCIMMRKCHKNTCPVGIATQDPVLREKFAGEPEHVINFFFMLAEEVREIMSGLGFRTVTEMIGRADMLELDREVVKNNDKLENIDLSLLLRPAAEIRPGAAQYCVQKQDHGLDMALDQELIALSKSALEKSLPVYIETPICNVNRAVGTMLSHEVTKRYHLTGLPKDTIHIKFTGSARQSLGAFLCPGIMLELEGDSNDYVGKGLSGGKVVVYPPKGSSFDPKENIVIGNVALYGATSGEAYFNGMAAERFSVRNSGAKAVVEGLGDHGCEYMTGGTVVVLGKTGRNFAAGMSGGIAYVLDVDGKFNTRCNLELVDLDKVEDEEDKMTLKMMIQQHQRHTNSQLAQEVLADFENLLPKFIKVFPRDYKRVLSAMKHEEVSKQAIERASEEADETEEKELEEKDAFAELKNMAAASSKEEMSGNGVAAEARPSKVDNAVKNGGFIAYEREGVKY

SEQ ID NO: 366 - protein, 695 aa, Oryza sativa
  misc_feature (580)..(580): Xaa can be any naturally occurring amino acid
  misc_feature (608)..(608): Xaa can be any naturally occurring amino acid
  misc_feature (616)..(616): Xaa can be any naturally occurring amino acid
  misc_feature (621)..(621): Xaa can be any naturally occurring amino acid
  misc_feature (629)..(629): Xaa can be any naturally occurring amino acid
DILRLLTLWFNHGATSEVQMALQKGFSLVNIEMWLVVLPQIIARIHSNNKIVRELIQSLLVRIGKDHPQDMSSIKRNNLEKILKIEGTEFIAQALMYPLLVACKSISILRQRAAQEVVDKIRQHSGGLVDQAQLVSKELIRVAILWHEMWHEALEEASRMYFGEHNIEGMLAVLEPLHAMLERGPETIKENTFIQAYGHELLEAHECCLKYRATGEDAELTKAWDLYYHVFRRIDKQLPSLTTLDLHSVSPELLECRKLELAVPGTYSADAPLVTIEYFVPQLIVITSKQRPRKLTIHGSDGNDYAFLLKGHEDLRQDERVMQLFGLVNTLLENSRKTSEKDLSIQRYAVIPLSPNSGLIGWVPNCDTLHALIREYRDARKIFLNQEHRCMLSFAPDYDHLPLIAKVEVFQHALENSEGNDLAKVLWLKSRTSEVWLERRTNYTRSLAVMSMVGYLLGLGDRHPSNLMLDRYSGKILHIDFGDCFEASMNREKFPEKVPFRLTRMLVKAMEVSGIEGTFRTTCENVMQVLRTNKDSVMAMMEAFVHDPLINWRLFNFNEVPQVTNYGNAHSHTVVNTEEXVNRELMQPPRGARKKKLLQAVNPLRDAXKVLNDPPXTLMAXRMIHNLTXGRDFFFRFILSGAGSSTQHGNEHLASGDTREVEPGLSVKVQVQRLILQATSHENLCQNYVGWCPFW

SEQ ID NO: 367 - protein, 2324 aa, Eremothecium gossypii
MDGQTRYLDELVGALRAERAQGRAGGYAGEFPPREGGGRARRVARTVVAKLADAEVADAAFWRACEALDLVFTGRPMVLAEALDEEAGVLWAVRSCWRVAAVHFGRRERGWALRRASSRWVRLCADLYGQRWRARVGAELDRELCAGEAAVRAVLGGGQEAGEHMRALRALCVAAEWAVSREFWFVTGGAERVGLRLQRLARLARYIGDAVELPLAEYEEVQVRLLGVSVQAYLEPDRPGLGELRFALEQLQYFVRGKHLRREFAAWSRLLLRLYVRCRSDRAALLLVREVLVLDAAELPEAATDAQRSLQLVRYDLERQFAADHALRWDPALRAKLLAAGTPPVILEPFTSNRQLEKLRLRVLCDFQVGDSALLVHQFSAAGVPLGADPVALYTHLDEGIARAFGRQDTEAQVRYLSLVRKLACLESRKPSPGFDCDLCDHTNLWLPRESIDPSRPEAASDSLAFKLLVGYYLREQLESSGEALVIGILITLRSIFTHFQPPKLVENHYGDMVDEHGCIQLFRMAFMSLNRHVRILSVLLIPYWNLSRSYNADEQQTALIIKFLQRNPDPHITETYLMAWTQLTLSTSGELFDSLLLKLIDIFNSSNYVEHVVMASQLKFIARVLNRTAYQLLSPILPILLKQIGKNLGEKKLSLERLLNLLEYSAKTVIENFQRYIVPYALTQYKGDALTEIAKIMCQNNEPSMVSEQKKRLLDRNSRQIFAVALVKHGLFSLETIETLFINNDPTFDRSYVAGFLPDYKTLAEVLKLFKPVEKVDSPMNDNERAVLSSLRFLFLTNFSVDKHRGSKFKNVTEWTQEKEAVFQKKLKDNILGIFQVFSSDMHDIEGKTTYFEKLRVISGISFLIKYASKECIISALAQVSICLQTGLEIPEMRYNTLRCWLHLVKYLSEEELSTVIDVLICFILQKWDEFSGKIQQAAIDILDALILEKQTLLTNSRPYIVLAFLNKSELHIFENHGFFATTASKLLKNTNWVSVFVSNLKSHNIYVIKQTLQDIRLFLEKKQDAGIDIKLISKDGKNISELLGALLDTSHKYRNSDLIICETCALCISMIGVLDVTKHELQRCNVYDNDICDFNNPTQTTKFLINIINERLVPSFWQSENPTKQLFVALVIQESLKYCGLSASSWDVTKPDLYPNESKLWNRFNDISKTTLYPLLSSLYLAQSWKEYVPLSYPSFKVKDGYSTWIKNLSLDLLKTATESSHPLHVFSSLIREDDGTLSDYLLPYIIMDIIIKAESGTKYFDYLQNVIKDFEYIFNYTLYDLNHYQIDGLKMCYDSIFRVFEYCKKWVNQFRQNYSKQHGTFTIREEKYTRMLNRAGKFADIIPSHVLAQKSLETNSFERSALYLEQSYREKSSNGLQDDKLLPYLQTTYAEINDIDAVVGVLKVFCSNNLTSRIEELQYSDNWKMAQDCFDALGDSLLNEQGGVENSVPTSRMLKLMYDHQLYDQTLKKLELNIPSKKRQLPLNLDEFYNMGIETASLSGNITELKIWIRRIEQLETLTDPSILLHYNLAKSLLAVLEGKTDMIETHSKYCYRLIGSHFTTPSHSTTLLKRRNLFIKLHGIRDNSILSKCSTDIQFNRSVRNLAVRLKMWVAILDQLLLLSMRKSQNLMRSEEFVKQGSCQKLIFKMAQLARENDRLDIASDCLMHALKLEHTEAELEYAEILWKQGEKELALKTVAEIHQKRKGIKTLKDRDRAKVLLKYTEWLDLSNNATSVQISHQYKEVIGLDKDWDEPYYSFGLYYSRLLEKKRADGFVTTGSLEYKAITYFLSAFEKNTVKVREALPKVITFWLDTASRSVESGSSEGEYHFKRYTKEICKCIDVAIQNCPTHIWYTVLTQLLSRLLHKHTDSATLIMNILLKLTLEYPSIMLWYITVLLNSQENKRVHAGKQIMDAIKKRMPDKSSLISSAISLVQAMTRVCIKDVKNMSSRSGKSLQNDFKFDINLAPSEMVVPVNINLANLSPSYADTSGKHGSSKRVTINCFTPHYKVYSSLKKPKKINIIGSDGELYGIMCKKEDVRQDNQYMQFANMMVFLLGKDSESRRRSLNITTYAILSLREDCGLIEIVPNVDTIRSILMAKYDSMKIKYTLSVLYEKWKSVSEEQRLGFYKSCTDTFPPVLYQWFLETFPNPIRWYNARNAFVRSYAVMAMVGHILGLGDRHLENILLDLQTGKVLHVDFDCLFEKGKTLPVPEIVPFRLTQNIQDAFGVTGTEGTFKKSSEVTVRVMRNNELALVNIIETIMYDRNMDHSIQNALRVLRNKVRGIDPRDDLPLSVPGQVDTVVQQASSDENLAQMYIGWLPFW

SEQ ID NO: 368 - protein, 550 aa, Pinus sylvestris
PGEGGQLPGKKVSTYIARLRNSKPGVPLISPPPHHDIYSIEDLAQLIFDLHQVNPMAKVSVKLVAEAGIGTVASGVAKGNADIIQISGHDGGTGASPISSIKHAGGPWELGLTETHQTLIENGLRERVVLRVDGDFKSGVDVMLAAAMGADEYGFGSVAMIATGCIMARICHTNNCPVGVASQREELRARFPGVPGDLVNFFLYVAEEVRGILAQLGYAKLDDVIGRTDLLRPRHISLMKTQQLDLSYLLSSVGRPKWSSTKIRQQNVHTNGPVLDDILLADPQISDAIEKEREVKKTVQIYNVDRSVCGRIAGVIAKKYGDTGYAGRLEILFTGSAGQSFGCFLTPGMNIRLVGEANDYVAKGMAGGEIVITPSDKTGFVPEDATIVGNTCLYGATGGRLFVRGKAGERFAVRNSLAEAIVEGTGDHCCEYMTGGCVVVLGKVGRNVAAGMTGGLAYLLDEDDTLIPKVNKEIVKIQRVVAPVGQLQLKQLIEAHVDKTGSTKGTAVLKEWEKYLPLFWQLVPPSEEDSPEANPEFGDRTVERITVKSA

SEQ ID NO: 369 - protein, 1485 aa, Pseudoalteromonas tunicata D2
MLYDSKLEKDNCGFGLIAHIAGTASHKLVRTAITGLDRMQHRGGIAADGKTGDGCGLLLQKPDNFFRSIAQEQNWHLGKNYAVGMIFLNPDPELAQKTRQIVNQELEKETLTIVGWRDVPTDPASLGPIAIEQLPQFQQIFVSAPEGWRPKDLERRLYIARRRIEQRIINDDYFYICSLSGLVTVYKGLVMPADLPNFYLDLADIRMESAICVFHQRFSTNTQPRWPLAQPFRYLAHNGEINTIEGNRQWARARAYKFSSPLLPDLQTAAPFVNETGSDSSSLDNMLELFLAGGMDIFRAMRMLVPPAWQKNKAMDEDLRAFYDFNSMHMEPWDGPAGIVMSDGRFAACNLDRNGLRPARYVVTKDGLITLASEVGIWDYTPDEVQEKGRVGPGELLVIDTLHGKIWHSNEIDNDLKNRHPYKSWLEQNVQRLTPFEDLAQELTGQRELDDDLLAVYHKQYAYSFEELDQVIRVMGAIGQEATGSMGDDTPFAVLSSKERPIYDYFRQKFAQVTNPPIDPLRENHVMSLATCIGREQNVFNETTGHAKRLQFSSPVLMFSDMTQLLLADQAHYNSCTINLNYLIEEGLAAAVSRVCDEAQAQAESGVVLIVLSDKGLTPAHLPIPAAMAVGAVHQRLVKNNLRCDANIIVETASCRDPHQFAVLLGFGATAIYPYLAYETLTQMSDKGTIKQSYCQVTSSYRNAINKGLYKIMSKMGISTVASYRCSMLFEAVGLADEVVATCFEGVVNRIKGADFSDFHQELLNLSRKAWVKRKPIDHGGLLKYVHGGEYHAYNPDVIQTLQVAVRSGEYQDYLRYADLVNNRPITTLRDLLQLQAGDGAISIDEVEPAEALYKRFDSAAMSIGALSPEAHEALAIAMNRLGGCSNSGEGGEDVLRYGTEKNSRIKQVASGRFGVTPHYLVNADVIQIKVAQGAKPGEGGQLPGEKVTPYIAKLRYSVPGVTLISPPPHHDIYSIEDLAQLIFDLKQVNPKAMISVKLVSEPGVGTIATGVAKAYADLITIAGYDGGTGASPLTSVKYAGSPWELGLAETQQALVENGLRHRIRLQTDGGLKTGLDIIKAAILGAESFGFGTGPMVALGCKYLRICHLNNCATGVATQDEKLRQNHYHGLPEMAMNYFKFIAQEAREIMASLGIRQLVDLIGRTDLLVAIEGKTAKQSKLDLSGLLYRPNNKSGQTLFCSTANTSHYQGRLNETLLAKSQPAIDEKLGKVIRSKINNTDRSVGALLSGYIAERHGNQGMAADPIQIELTGTAGQSFGVWNAGGLEMSLVGDANDYVGKGMAGGKLSIAPPPGSSFACHQASIIGNTCLYGATGGKLFAAGRAGERFAVRNSGAIAVIEGAGDNACEYMTGGVVCILGKTGINFGAGMTGGFAYVLDEAQDFEKRINSELVELIAMDDLVIHHEHLRGLIIEHLEATKSCWAETILADFENYLAKFRLIKPKSSDVKSLLGHRARSSAELRVQAQ

SEQ ID NO: 370 - protein, 328 aa, Arabidopsis thaliana
MDKKVSFTSSVAHSTPPYLSTSISWGLPTKSNGVTESLSLKVVDARPERLINTKNISFQDQDSSSTLSSAQSSNDVTSSGDDNPSRQISFLAHSDVCKGFEETQRKRFAIKSGSSTAGIADIHSSPSKANFSFHYADPHFGGLMPAAYLPQATIWNPQMTRVPLPFDLIENEPVFVNAKQFHAIMRRRQQRAKLEAQNKLIKARKPYLHESRHVHALKRPRGSGGRFLNTKKLQESTDPKQDMPIQQQHATGNMSRFVLYQLQNSNDCDCSTTSRSDITSASDSVNLFGHSEFLISDCPSQTNPTMYVHGQSNDMHGGRNTHHFSVHI

SEQ ID NO: 371 - protein, 1485 aa, Alteromonadales bacterium TW-7
MLYDSKLEKENCGFGLIAQVNGQASHRLIRTAITGLDRMQHRGGISADGKTGDGCGLLLQKPDSFFRAIASEHNWHLGKNYAVGMIFLNSDPVLAQAAKEILSEELEKETLNILGWREVPTDPSMLGPIAVQQLPGFEQIFVSAPEGWRSKDLERRLYVARRRAEKRLADDESFYIASLSGLVTIYKGLMMPADLPNFYLDLADIRMTSAICVFHQRFSTNTQPRWPLAQPFRYLAHNGEINTIEGNRQWARARSYKFSSPLIPDLQSAAPFVNETGSDSSSLDNMLELFLAGGMDLFRAMRMLVPPAWQKNRAMDDDLRAFYDFNSMHMEPWDGPAGIVMSDGRFAACNLDRNGLRPARYVITQDGFITLASEVGIWDYTADEVVEKGRVGPGELLVIDTKLGKIWHSDEIDQDLKSRHPYKSWLEENVKRLTPFEELKEQDAGNRSFDDETLAKYQKMFGYTNEELDSVIRVMGENGQEATGSMGDDTPFAVLSEGHRSLYDYFRQKFAQVTNPPIDPLRENHVMSLATCIGSEQNVFNETTGHAKRLQFDTPILMYADMQQLLNADEAHYSYCKIDITYTVEEGLENAVKRICDKAKEKAAAGSIMLILTDRNFDDVNLPIPAAMAVGAVQKCLVDNNLRCESNIIIETGSVRDPHQFAVLLGFGATAIYPYLAYESLVAMSDSKIIDKSYCEVTLAYRKAVNKGLYKIMSKMGISTVASYRCSMLFEAVGLSDTVVDMCFKGVASRIKGACFTDFDDDQQSLHKLALSKRKLLSHGGLFKYVHGGEYHAYNPDVIQTLQVAVRSGEYRDYNEYAKLVNNRPISTLRDMLALKLPENGISIDDVEPAEALYKRFDSAAMSIGALSPEAHEALAIAMNRLGGCSNSGEGGEDKLRYGTEKNSRIKQVASGRFGVTPHYLRSADVIQIKVAQGAKPGEGGQLPGEKVTPYIAKLRYSVPGVTLISPPPHHDIYSIEDLAQLIFDLKQVNPKALVSVKLVSEPGVGTIATGVAKAYADLITISGYDGGTGASPLTSVKYAGSPWELGLAETQQALVENGLRHRIRLQTDGGLKTGLDIIKAAILGAESFGFGTGPMVALGCKYLRICHLNNCATGVATQDETLRQKHYHGLPEMAMNYFKFIAQEAREIMASLGVANLTDLIGRLDLLEAIEGKTAKQKKIDLSSVIAQPNNPTGETLFCSAPNSSHYLGKLNESLLGKAQEAIDASSGISLVSRICNTDRSVGAMLSGYIADKHGNQGMAADPVAIELHGTAGQSFGVWNAGGLEMTLVGDANDYVGKGMAGGKLVIRPPVGSSFESHKATIIGNTCLYGATGGKLFAAGCAGERFAVRNSGVQAVVEGVGDNGCEYMTGGVVCVLGNVGVNFGAGMTGGFAYVLDERNDFEKRINPELVEVVTLEALTSHQEHLRGLIAEHLELTGSCRAESILANFELYLPMFKLVKPKSSDVKSLLGHRARSSAELRVQAQ

SEQ ID NO: 372 - protein, 1912 aa, Oryza sativa
IHSRFSTNTFPSWDRAQPMRVLGHNGEINTLRGNKNWMKAREGLLKCEGLGLTRDEMLKLLPIVDATSSDSGAIDNVLELLIQSGRSAPEAVMMMIPEAWQNDVNMDPERKALYEFFSALMEPWDGPALISFTDGRYLGATLDRNGLRPGRFYVTYSGRVIMASEVGVVDVPPQDVSRKGRLNPGMMLLVDFENHCVVNDDELKKEYSKVRPYGEWLKRQRIQLTDIIESVNEAERIAPSISGALPITKENKADMGICGILTPLKAFGYTREALEMLMLPMAKDGQEALGSMGNDTPLAVMSNREKLTFEYFKQMFAQVTNPPIDPIREKIVTSMECMIGPEGDLSETTERQCHRLTLKSPLLNTNEMEAIKKMNYRGWRSKVLDITYPKKNGRMGLKQTLDKICAQAREAIHEGYTILVLSDRERVAVSSLLAVGAVHQHLVSHLERTRIGLLVESAEPREVHHFSTLIGFGADAICPYLAIEAIWRLQIDGRIPPNDGKPYTQEQLIEKYFYASNYGMMKVLAKMGISTLASYKGAQIFEALGLASEVVSKCFEGTPSRVEGATFEMLAQDALRLHEIAFPSRTLPPGSADANALPNPGDYHWRKNGEVHLNDPFSIAKLQEAARINSREAYKEYSRRIYELNKACTLRGMLKFREIPNQISLDEVEPAKEIVKRFCTGAMSYGSISLEAHTSLAEAMNTLGGKSNTGYITIKNGSKGQLTTQTLTFFRGTVEPFALGRWCCENFVPFNLNTNDAQSLCAFPKKNNPRISAIKQVASGRFGVSIYYLTNAVEVQIKMAQGAKPGEGGELPGHKVIGDIAVTRNSTAGVGLISPPPHHDIYSIEDLAQLIHDLKNANPGARISVKLVSEAGVGIVASGVVKGHADHVLISGHDGGTGASRWTGIKNAGLPWELGLAETHQTLVANGLRGRAVLQTDGQMKTGRDVAVACLLGAEEFGFSTAPLITLGCIMMRKCHTNTCPAGIATQDPVLRAKFAGKPEHVINYFFMLAEEVREIMAQLGFRTVNEMVGRSDMLEIDPKVLEGNEKLENIDLSRLLKPAAEISPGAVQYCVEKQDHGLDMALDNKLIASSTAALRKGVRVFIETPVRNINRAVGTMLSHEVTKRYHIHGLPSDTIHIKLNGSAGQSFGAFLCPGITLELEGDSNDYVGKGLSGGKIVVYPPRNSRFNPQDNIVIGNVALYGATKGEAYFNGMAAERFCVRNSGAQAVVEGIGDHGCEYMTGGTAVILGKTGRNFAAGMSGGIAYVYDVDGKFSSRCNYELVDLYAVVEEDDITTLRMMIQQHRLHTQSDLARDVLLNFDTLLPKFIKVYPRDYKRVLDKLKEEKAAKEAEQKAREVVDKKPVEVIQAPNGISVKTEKVMNEEPSSRPSRVSNAVKYRGFIKYEREGTSYRDPNERVKDWNEVAIELVPGPLLKTQSARCMDCGTPFCHQEGSGAGCPLGNKIPEFNELVHQNRWHEALDRLLETNNFPEFTGRVCPAPCEGSCVLGIIDNPVSIKSIECAIIDKGFEEGWMVPRPPLRRTGKRVAIVGSGPAGLAAADQLNKMGHFVTVFERADRIGGLMMYGVPNMKADKEGIVQRRVELMAKEGVQFIVNAHVGSDPLYSVEKLRSENDAIILACGATKPKALSLSRDLPIPGRELAGIHFAMEFLHANTKSLLDSNLEDGNYISAQGRKVVVIGGGDTGTDCIGTSIRHGCTNLVNLELLPEPPRKRAPDNPWPQWPRIFRVDYGHQEATSKFGKDPRSYKVLTKRFIGDENGNVKALEVIRVEWGKVNGRFQFKEVEGSEEIIEADLVLLAMGFLGPEATVANKLGLEQDMRSNFKAQFGNFATNVEGVFAAGDCRRGQSLVVWAITEGRQAAAAVDNYLSKDDEGETNGTEDIAVSSEGLVQPVVA

SEQ ID NO: 373 - protein, 635 aa, Sulfolobus tokodaii str. 7
MSAPLYLGDMSYGALSGNPNIIIARAADLTGTLAGTGEGGLHPEVAKSKRIFVQWASARFGVDFDVLMHGAGIVIKIGQGAKPGIGGHLPGSKVTEPISLTRRIPVGIDAISPAPHHDIYSIEDLGQRIEALKEATGKPVFVKVAATNYIPYIVSGIARMGADGVIIDGHGAGTGATPIVIRDNVGIPIELAVASADKVLREQGMRDNFYIIAAGRVADATDAAKLIALGADVVSVGTGALIAMGCVMVHKCHIGSCPTALTNKIDGSRMVDIDFGLKVLVNYIHGFSLELANILDNLGLSSIDELKGRRDLLVGKGLSRETLSVLGIEGEEEELPPKLGELWSRRRKVYLHELINKGDPVITSMGSTAPPDVEKPARIVDWLRSDGAQVTRPSIDPYREDIDTSFYLAGGRIYLSLPVIFDIIDAPEDERNALQWASLALSSAVFTDVTPRYYEDISISHDGKGIIKWSKNYESGSYILLPSNEEALEEVVELKGIPGFIIDEDLGNEDLEVVISEIDTKLKRMGIRKKFDLIAKSSRIRDSGDVFKFVALGADSVIISYKVFEVALGEGSRSDLKSKAFNLISGFKKEIALLAGAAGVYSVQSTLTGNRELLRAINLNSYLLQKLRVKVAGSL

SEQ ID NO: 374 - protein, 1496 aa, Campylobacter jejuni RM1221
MDLENILENNQSIGLYHPKNEHDACGIAAVANIRGIASYKVICDALEILMNLEHRGGAGAEENSGDGAGILIQIPHDFFKTQELGFELPKKGDYAVAQMFLSPNTDAKEEAKEIFLQGLKDKKLEFLGFREVPFNPSDIGASALKAMPYFLQAFVKKPSKISAGLEFERVLYSTRRLIEKRAINVPKFYFSSFSSRTIVYKGMLLSTQLSDFYLDFKDVNMKSAIALVHSRFSTNTFPSWERAHPNRYMVHNGEINTIRGNVDSIRAREGLMQSEYFENLDEIFPIIAKPSSDSAMFDNTLEFLALNGRTLEEAFMMMVPEPWHKNENMESKKRAFYEYHSLLMEPWDGPAAIVFTDGVIMGASLDRNGFRPSRYYLTKDDMLILSSETGALKLDEKNIKAKKRLEPGKLLLVDTARGRVIADNEIKEHYANAKPYKKWLKNLVELEKQKSGVYKHQFLKEDEVLKLQKAFGWSYDELKMSVAAMAQNGKEAIAAMGVDTPLAILSKTYQPLYNYFKQLFAQVTNPPLDAIREEIVTSTRIYLGSEGNLLKPDENNAKRVKIALPVISNEELFEVKALNKFQVKEFSILYDYSKKTLEKALDELCVKIEDEVKKGVSIIILSDKGVDEKNAYIPALLAVSGVHNHLVRKNLRTHTSLIIESGEPREIHHFACLLGYGATVINPYLVYESIQKLIANKDLNLSYEKAVENFIKASSSGIVKIASKMGVSTLQSYNGSALFECLGLSSKVIDKYFTSTTSRIEGMDLEDFEKELIALHKHAFNDTHKALDSKGIHGFRSAKEEHLIDPLVIFNLQQACRNKDYKSFKKYSALVDEKQVNLRSLMEFDFSEAISIDKVESVESIVKRFRTGAMSYGSISKEAHECLAQAMNKIGAKSNSGEGGEDEERYEIKEGVDKNSAIKQVASGRFGVDLNYLSHAKEIQIKVAQGAKPGEGGQLMGFKVYPWIAKARHSTAGVTLISPPPHHDIYSIEDLAQLIYDLKHANKDAKISVKLVSENGIGTVAAGVAKAGANLILVSGYDGGTGASPRTSIPHAGIPWELGLAETHQTLILNKLRDRVRLETDGKLMNGRDLAIAALLGAEEFGFATAPLIVLGCTMMRVCHLNTCPFGIATQDTELRDRFKGKVDDVINFMYFIAEELREYMARLGFERLDDMIGRVDKLRQKSVQGKAGKLNLDKILKSLPTYNRTAVHFKDYKDNKLEKTIDYRILLPLCKNAVEKKEPIKLSLEVGNQSRTFATMLSSEILKTYGKDALDEDSIHIKAIGNAGNSFGAFLLKGIKLEIIGDSNDYLGKGLSGGKIIAKISNEATFSPEENIIAGNACLYGATKGEVYLDGIAGERFCVRNSGALAVVLGTGVHGCEYMTGGKVVVLGDVGANFAAGMSGGVVYIFGRHNEAHVNTELVDIKDLNAKDEKELKAVIEKHIAYTDSKKAKDILEKFDKKDFFKVMPRDYEKMLKMLDLCKNEKDPNLAAFLKITQK

SEQ ID NO: 375 - protein, 191 aa, Glycine max
MADSDNDSGGAHNGGKGSEMSPREQDRFLPIANVSRIMKKALPANAKISKDAKETVQECVSEFISFITGEASDKCQREKRKTINGDDLLWAMTTLGFEDYVEPLKGYLQRFREMEGEKTVAARDKDAPPLTNATNSAYESANYAAAAAVPGGIMMHQGHVYGSAGFHQVAGGAIKGGPAYPGPGSNAGRPR

SEQ ID NO: 376 - protein, 1489 aa, Rubrobacter xylanophilus DSM 9941
MTLKTGLYDPAYEHDACGFGFVARVDGRKTRETVEEGLEILRNLEHRGARGSDPETGDGAGILLQLPDAFFRREAGRLGIELPPPGHYAVGTLFESEEGLGAERMLEEIAAEEGQRVLGFRDVPVDAERCGRLARRVMPRIRQFFVGREAPDEMAFERKLYVIRRRLHKAVADTHACYVVTLSSRTIVYKGLLTGVQLPEFYLDLQDPAVQSAIALVHARFSTNTLGSWELAHPYRYVAHNGEINTLRGNINWMRARESRLESELFGEDLGKISPVIQPGGSDSAAFDNVLELLYLAGRSLPHAVAMMVPEAWENDELMDPERRAFYRYHSALMEPWDGPAAVAFTDGRLIGATLDRNGLRPARYSVTKDGRVIMASEDGALRVPAEEVVERWRLQPGRMLVVDTERHEILHDEDVKRPLFRRRPYARWLEEQEIHLDELPDVEPDPRPEPATLFERQRAFGYTVEDLRLLLTPMARGGKEPDGSMGTDTPLAVLSERPQLLFNYFKQHFAQVTNPPIDPLREELVMSLKMSLGPEQNLFDETPRHCRRVLLDHPILTGPELEKVRHLGREPFSATTLSALFPAAGGGEGLRRALESLCERAERAVRGGSPVLVLSDRGVSHNQAPIPSLLATAAVHHHLVRRGIRTATTLVVETAEAREVHHFALLVGYGATAVSPYLAFETIEKLARDGMLGGVGPEEAQENYIKAVQKGLLKILSKMGISTLLSYCGAQIFEAVGLSREVIDRYFTGTASRIGGVGLEEIAREVLMRHEAAFRAGELGPEELDVGGEYQQRQQGQYHQWNPETIVPLQRAVRTRSFETFKEFTRHFDERSARFATLRGLLEFEEDPIPLEEVEPAREIVRRFTTGAMSLGALSKEAHETLAVAMNRIGGKSNTGEGGEDPERFGDERRSAIKQVASGRFGVTTEYLVNADMLQIKMAQGSKPGEGGQLPGHKVSGYIAKIRYSTPGVGLISPPPHHDIYSIEDLAQLIHDLKNANPRALVSVKLVAEAGVGTIAAGVAKAKADHITISGHDGGTGASPLSSIKHAGLPWELGLAETQQVLVQNDLRGRVVLETDGQLKTGRDVVVAALLGAEEFAFSTAPLVTVGCIMMRVCHLNTCPVGVATQDPVLRKKFAGAPEHVINYFFFLAEEVREYMARMGFRTFEEMVGRCDRLRPRAALDHWKARGVDLSPLLHRPQIPQGVAIRHVQQQNHNLEKALDNELIRRCRPALEGGEPVRFSRLILNTNRTVGGMLSGEVARRYGQEGLPDGTIRIDFKGVAGQSFGAWLAKGITFTLEGTTNDYAGKGLSGGRLAVFPSREAAYRPEEAIVVGNVALYGATGGEAYFRGFAGERFCVRNSGARAVVEGVGDHGCEYMTGGVVVVLGPTGRNFAAGMSGGMAFVLDEESRFEKLCNTDMVGLEAVESEEDVALLRGMVEAHLRWTSSAVARRVLEEWEALLPKFVKVMPHDLRRVLEERRRAEEEVEVAG

SEQ ID NO: 377 - protein, 296 aa, Candida glabrata CBS 138
MSRREVIYSETMNLQNVHPPSSIVGGTSNASPAGTDLYTSNPDDNESQAPTNEELYLYNELKRVSENVDSDNLEGKQQEDTGVPQNIITKQYVQTIPRTALDNESNNGNIKMESEPPINSTTRVPDNKNTHINGKEKNYKFDGPQRSSTNDNVRKSVPKNYENPSNKFSTEIPESNLPKEESTSEQPYYVNAKQYYRILKRRYARAKLEESLRICRERKPYLHESRHKHALRRPRGEGGRFLTAAEIKELKEKGELKDTEKTKSQSDAEKSIDTNADIVNSQKSGASTGDLDTKKD

SEQ ID NO: 378 - protein, 1549 aa, Synechococcus sp. PCC 7002
MDRDIMNHQGTFSQNNHQETTNYYTGPRWLVEERDACGVGFLAYKDGRKTHKLIEQTLTALGCMEHRGGCTADRESGDGAGVMTALPHELFAEWFQAEGITQPAPETYGVGMVFLPQAEAECAAAKALVEDVLTRRQFKILGWRDVPVAPETLGIQARENQPQMKQVFVVSEQGLTGDELDKALYIARSEIGKHLTDVFYVCTLSCRTIVYKGMVQSEVLGKFYKDLTNPLYKSEFAVYHRRFSTNTMPKWPLAHPMRLLGHNGEINTLIGNINWMKARENILEIPGWNKDDIEALHPIVNTDNSDSFNLDSAMELLVRAGRSPMEAAMILVPEAYQNQPSLKAHPEITDFYDYYAGMQEPWDGPALLVFSDGKTVGATLDRNGLRPARYCITKDGYILVSSEAGVVDVLDEDIVEKGRLGPGQMVAVDFQTQELLKNWEIKQRVAESQPYGTWLRENRQVLESQDFVGDRQQGETDLLRLQTAFGYTAEDVEMIINAMAEMGKEPTFCMGDDIPLAVLSDKPRLLYDYFKQRFAQVTNPPIDPLRESLVMSLNMYLGERGNLLDCGTEDAKVLKLNSPVLNEAELQRVRDSQLGATTLATTYAIANGPDGLRGALEKLCAAAEAAVRAGNKIIILSDRADGTVDQDHSFIPPLLAVGAVHHHLISVGLRLSASIVVDTAQCWSTHHFACLVGYGASAVCPYLALEAVRHWWYIPRVQKQMAAEQIPAMTIEKAQDNYRHAIEAGLLKILSKMGISLLQSYHGAQIFEAIGLGMEVINVAFKGTTSRVGGMTLADLSQEGIAFHSRAFPELSGSKLANYGFVNYRKGGEYHMNSPEMTKALHKAVAAYNDDQQEAFDHYGNYQDYLENRPATALRDLLDFESDRPAIDLSEVESVESIVKRFCTGGMSLGSLSREAHETLAIAMNRLGAKSNSGEGGEDPVRFKILDDVNASGDSPTLPHLHGLRNGDTANSAIKQIASGRFGVTPEYLMSGRQLEIKMAQGAKPGEGGQLPGKKVSEYIAMLRNSKPGVTLISPPPHHDIYSIEDLAQLIYDLHQINPAAKVSVKLVAEIGIGTIAAGVAKANADVIMVSGHDGGTGASPLSSIKHAGCPWELGVTEVHKTLMDNQLRDRVILRADGGLKTGWDVIMAALMGAEEYGFGSIAMIAEGCIMARVCHTNQCPVGVATQQQRLRDRFKGIPEHVVNFFYFIAEEIRAILAKLGYRSLNEIIGRADLLKPRENVKLTKTSGLVLDCLTNLPDVRDNRDWLNHGDVHSNGPVLDDEILANAAVQQAIREQGSLSQEIKIINTDRSVGARVSGFIAKQYGNEGFEGELKFNFKGSAGQSFGAFNLLGMTMHLEGEANDYVGKGMNGGEIIIVPPTQSQYAAADNVIIGNTCLYGATGGTLYANGRAGERFAVRNSKGKAVVEGTGDHCCEYMTGGVIVVLGDVGRNVGAGMTGGLTYILDEHNTLPEKMNTEIVNIQRVGTTAGEKQLKDLITAHAEKTGSPKAKAILANWANYLPQFWQVFPPSEADSPEANVNAAAKQLTSV

SEQ ID NO: 379 - protein, 1494 aa, Thiobacillus denitrificans ATCC 25259
MERQAWLDGTLYSPDFEQDSCGFGLIAQIDNQPSHTLVQNAIGSLACMTHRGAIAADGLSGDGCGLLFKKPDAFLRAVAGDAGFTLGELYAAGLVFLSRDAGPQAHARATLKSALEAQGLVVAGFRLVPTDPSVCGESALESLPHFEQVFVNAPTGLSEDDFERKLYIARRQAEKALDAVDPVFYLPTLSCRVISYKGLVMPANLPVFYPDLNDARFASALVVFHQRFSTNTWPQWRLAQPFRYLAHNGEINTVQGNRNWSRAREQKFETPLIPDMDAIRPIVGTKGSDSMSLDNMVEGLVMGGAGLFRALRLVIPPAWQNVEAMDADIRAFYEYNSMHMEPWDGPAGIVLTDGRYAVCTLDRNGLRPARWVLTKDRILTIASEVGVWQVDPANVEMKGRVKPGQMVAADLETGRLLMPEDIDNELKGAQPYREWLKASAVKLDLSIGQDADLAIMDAASLLTHQKLFNVSFEERDQIIRVLAEDGAEAIGSMGDDTPMAVLSQKVRSPFDYLRQQFAQVTNPPIDPIREAIVMSLDTAFGPERNLFKESPAHAHRVEVHSPLLSKEAFDKLLNLNDPAFAATTLDLHYDPASTTLEAGLQALTARAIEAVKGGKVILVLSDRNIAKNRLPIHALFATGAVHHALINAGLRCDANIVVETGTVRDPHHYACLIGYGATAVYPYLAYQVIGEFVKSGEIKPGLEKALANFRKGIDKGLYKVLSKMGISLVASYRGAQLFEAIGLHESVVALCLKGTVSRISGANFEDFESDQKLLHKTAFNPLRPLSAGGLLKFMFGEEFHAYNPDVVQQLQKAVKTGDYAEFKKYSEIVNTRPVAMVRDLMKLKTGSTPIPLEEVEPLETILKRFDSAGMSLGALSPEAHEALAEGMNRIGGRSNSGEGGEDPRRYGTVKTSKIKQVASGRFGVTATYLVNAEVLQIKIAQGAKPGEGGQLPGDKVSPMIASLRHCKPGTTLISPPPHHDIYSIEDLAQLIFDLKQVNPDALVSVKLVAEPGVGTIAAGVAKAYADLITISGYDGGTGASPLTSVKYAGTPWELGLSEAQQVLRANGLRGRVRVQTDGGLKTGLDVIKAAILGAESFGFGTGPMVALGCKYLRICHLNNCATGIATQNDTLRKEHFIGLPGMVVNYFKFVAEETRELMAQLGVRSLTDLIGRTDLLELSPGETPRQGRLKLDVLLSQGDIPADAPRFAQQERNPSFDKGELAEKMVADAIGAIKAGTRIELDYAIRNINRSIGARLSGEIAKAHGAKGLPDDTIRIGLAGSAGQSFGVWNHKGLTLTLEGDANDYVGKGMGGGRLVIYPPCTATFEAHRNTLIGNTCLYGATGGELYAAGMGGERFGVRNSGALAVVEGIGDHGCEYMTGGTVIVLGDTGLNFGAGMSGGMAFVIDEAGDFMSKANKEMIELTRITSVETEPYRIFLRGQVERHLALTGSARAREILADFDAALAKAWLVKPKRISIEDLVEDLPGQQREVLEA

SEQ ID NO: 380 - protein, 1534 aa, Microcystis aeruginosa PCC 7806
MAQQNNLKTDNIHQIDPYWGPPWLVEERDACGVGFIADVRGSGSHQLIEQALLALGCLEHRGGCSADQDSGDGSGMMTAIPRDVLAPWFAENGLNMPESERLGVGMVFLPQADKERADAKAHIEEIVNKYNIKILGWRAVPVRPEVLGRQARENQPYVEQILVTSPDLAGSQFDRLLYIARSEVGKQLADDFYFCSFSCRTLVYKGMVRGEILREFYLDLQNPAYSSQFAIYHRRFSTNTQPKWPLAQPMRLLGHNGEINTLLGNINWMSAREPALETQGWTHEELQSLTPIVNPANSDSYNLDSALELLVRTGRSPLEAAMILVPEAYNNQPDLQDYPEIIDFYEYYSGLQEPWDGPALLVFSDGGIVGACLDRNGLRPARYSITNNGYIVVSSEAGTIPLDETTIMEKGRLGPGQMIAVDLEKGEIKRNWPIKQEIARANPYGEWVQSQRTLIDKETAIDIPAPSHLLPLQTAFGYTSEDVDLIIVPMAEQGKEPTFCMGDDTPLAVLSSKPHLLYDYFKQRFAQVTNPPIDPLRESLVMSLTMYLGRRGNILKLGVDDAHLLKLDSPLLNNAELAKVKTSSYKTAELSTLYDLTTGPGGLEDAIANLCAEAAKKVASGAEILILSDRTAPIDEKTSYIPPLLAVGAVHHHLIRSHLRLKASIVIDTAQCWSTHHFACLIGYGASAICPYLALETIAQWWIEPKTQKLMENGKLEAISLEKALINYRKSVEAGLLKILSKMGISLLSSYHGAQIFEAIGLSADLVKLAFNGTTSRVGGLSIAEVAQEAIAFHSKAFPNLTAKKLENYGFVNYRPGGEYHMNSPEMAKALHKAVAAHSQGQGYDHYETYRQILQQRPVTALRDLLEFNSDRASIPLEAVESIESILQRFCTGGMSLGALGREAHETLAIAMNRIGGKSNSGEGGEDPIRYTSLSDVDEEGHSVTMPHLNGLKNGDTANSAIKQIASGRFGVTPEYLMSGKQLEIKMAQGAKPGEGGQLPGKKVSSYIAMLRRSKPGVTLISPPPHHDIYSIEDLAQLIYDLHQINPRAKVSVKLVAEIGIGTIAAGVAKANADIIQISGHDGGTGASPLSSIKHAGSPWELGVTEVHRMLMENQLRHRVILRADGGLKTGWDILMAALMGAEEFGFGSISMIAEGCIMARVCHTNNCPVGVATQQERLRARFPGIPAHVVNFFTLVAEETRQLLAKLGYHSLNEVIGRSDLLKVRSDARLTKTESLNLDCLLNLPDGRSDRSWLQHEEVHSNGAVLDDEILADSEIKQAIERQGTVSKTYRIVNTERSVGARIAGVIAQKYGNDGFEGEIKLNFQGAAGQSFGAFNLPGVNLHLEGEANDYVGKGIYGGEIVIVPPQNANYQPEDNAIIGNTCLYGATGGVLYANGRAGERFAVRNSTAKAVIEGAGDHLCEYMTGGVIVVLGSVGRNVGAGMTGGLAYILDPSLPEKLNPEIVKIQRVATAAGAEQLKSLIETHVERTNSPKGKLILANWDSYLGQFWQVVPPSEADSPEAQISAEKTLTSV

SEQ ID NO: 381 - protein, 1612 aa, Medicago truncatula
MALNTVSSVSLSQVLRLSDTIGNRHLFVDFAPFRRNTKRCNRRLTPAILRRSSVKAVLQLDNNHLNPAPPPSSPSTSDSKPKVANLEDILSERGACGVGFIANLENKGSFEIVKDALNALSCMEHRGGCGADNDSGDGSGLMTAVPWDLFDNWANEQGLASFDKLHTGVGMVFLPKDVELMNKAKKVIVNTFQQEGLEVLGWRPVPVNTSVVGYYAKETMPNIQQVFVKIGKEENTEDIERELYICRKLIEKEVSSESWGNELYFCSLSNRTIVYKGMLRSEVLGLFYSDLQNDLYKSSFAIYHRRYSTNTSPRWPLAQPMRLLGHNGEINTIQGNLNWMQSREPSLKSPVWRGRENEIRPFGNPKASDSANLDSAAELLIRSGRTPEESMMILVPEAYKNHPTLTIKYPEAIDFYDYYKGQMEAWDGPALLLFSDGKTVGACLDRNGLRPARYWRTSDNMVYVASEVGVVPVDESKVISKGRLGPGMMITVDLLGGQVYENMEVKKRVALSNPYGNWIKENLRSLKSENFLSSSVMENDAVLRHQQAFGYSSEDVQMVIESMASQGKEPTFCMGDDIPLAALSQKPHMLFDYFKQRFAQVTNPAIDPLREGLVMSLEVNIGKRRNILEIGPENASQVILSSPVLNEGELESLLKDSHLKPQVLHTFFDITKGIDGSLEKALNKLCDAADEAVRNGSQLLVLSDRSEALEPTHPAIPILLAVGTVHQHLIQNGLRMSASIVADTSQCFSTHQFACLIGYGASAVCPYLALETCRQWRLSNKTVNLMKNGKMPTVSIEQAQKNYCKAVKAGLLKILSKMGISLLSSYCGAQIFEIYGLGKEVVDLAFSGSVSKIGGLTFDELARETLSFWVKAFSEDTAKRLENFGFIVFRPGGEYHANNPEMSKLLHKAVRQKSQNAFSVYQQYLANRPVNVIRDLLEFKSDRAPIPVGKVEPALSIVKRFCTGGMSLGAISRETHEAIAIAMNRIGGKSNSGEGGEDPIRWKPLTDVVDGYSPTLPHLKGLQNGDTATSAIKQVASGRFGVTPTFLANADQLEIKIAQGAKPGEGGQLPGKKVSMYIARLRNSKPGVPLISPPPHHDIYSIEDLAQLIFDLHQVNPKAKVSVKLVAEAGIGTVASGVAKGNADIIQISGHDGGTGASPISSIKHAGGPWELGLTESHQTLVENGLRERVILRVDGGFRSGVDVMMAAIMGADEYGFGSVAMIATGCVMARICHTNNCPVGVASQREELRARFPGVPGDLVNLFLYVAEEVRGTLAQLGYEKLDDIIGRTELLRPRDVSLVKTQHLDLSYILSNVGLPKLSSTEIRNQEPHTNGPVLDDVLLADPKIADAIENEKAVSKTIKIYNVDRSACGRIAGVIAKKYGDTGFAGQLNITFTGSAGQSFGCFLTPGMNIRLVGEANDYVGKGIAGGELVVTPVDKIGFQPEDAAIVGNTCLYGATGGQVFVRGKAGERFAVRNSLAEAVVEGAGDHCCEYMTGGCVVILGNVGRNVAAGMTGGLAYILDEDNTLIPKINREIVKIQRVTAPVGQIQLKKLIEAHVEKTGSNKGEAILKDWDKYLSLFWQLVPPSEEDTPEANAKYDITATEQVTLQSA

SEQ ID NO: 382 - protein, 546 aa, Burkholderia pseudomallei K96243
MLSRRYLAMWCALALFAAAAVLAARHTISWLWIVPVAALVALGLYDLNQDRHAILRNYPLWGHLRFLFEFIRPEIRQYFVEDDTDEKPFSRAQRSVVYQRAKNVADNRPYGTELDVKAVAHEWISHSLAPTKLDGHDFRIRVGATRKQPYDISIFNISAMSFGALSANAIRALNLGAKQGGFAHDTGEGSLSKYHREHGGDIIWEIGSGYFGCRRDDGTFDPEKFAKQAREPQVKMIEVKLSQGAKPGHGGVLPAAKITPEIAETRGVPMGKDCVSPAAHSAFSTPRGLLEFVDRLRELSGGKPTGFKLCVGHPWEFFGIAKAMLETGIVPDFIVVDGAEGGTGAAPLEFTDHVGVPLQEGLLLVHNTLVGIGLREQVKLGASGKIITAFDIARTLAIGADWVNSARGFMFAVGCIQAQHCHTDRCPTGVATQDPVRQRALVVPDKADRVYNFHRNTLHALQELVQAAGLSHPSELRAHHIVQRVAPHEVRLMSQLLKYLEPGALLNGGHCGFSLYETWWPLARGDSFSPGEGAYARVGTGAPARA

SEQ ID NO: 383 - protein, 1498 aa, Pectobacterium atrosepticum SCRI1043
MRVTQSLGRFTNMLYDASQERDNCGFGLIAHIEGEPSHKVVRTAIHALARMQHRGAILADGKTGDGCGLLLQKPDRFFRLVAEEHGWRLAKNYAVGMMFLNQDEELARATRRIVEEELQNETLSVLGWREVPTNPDVLGEIALSSMPRIEQIFVNAPAGWRQRDMERRLFMARRRIEKRIEDKEFYVCSFSNLVTIYKGLCMPADLPRFYLDLADLRLESAICLFHQRFSTNTVPRWPLAQPFRYLAHNGEINTIAGNRQWARARAYKFKTPLIPDLQDAAPFVNETGSDSSSLDNMLELFLSGGMDIIRAMRLLVPPAWQNNPDMDPELRSFFDFNSMHMEPWDGPAGIVMSDGRYAACNLDRNGLRPARYVITKDKLITCASEVGIWDYQPDEVVEKGRVGPGELMVIDTRSGRILHSAETDNDLKSRHPYKEWMEKNVKRLVPFEELPDEQVGSREFNDELLETYQKQYGYSSEELDQIIRVLGENGQEATGSMGDDTPFAVLSSRPRIIYDYFRQQFAQVTNPPIDPLREAHVMSLATSIGREMNVFCEAEGQAHRLSFKSPILLYSDFTQLTSQDELHYRADTLDLTFDPSQQTLQQTIEKLCDEAESKVRDGAVLLVLSDRGISESRLPVPAPMAVGAVQRRLVEKSLRCDANIIVETASARDPHHFAVLLGFGATAIYPYLAYETLARMVDNHTIDKPYRAVMLNYRNGINKGLYKIMSKMGISTIASYRCSKLFEAVGLHKDVSTQCFLGVVSRIGGANYSDFEQDLLNLSKRAWLKRKTLEQGGLLKFVHGGEYHAYNPDIVTTLQTAVKSGEYSDYEQYAKLVNERPVATLRDLLALRPQEGAAIAIDNVEPATEMFKRFDTAAMSIGALSPEAHESLAEAMNGLGGFSNSGEGGEDPARYGTNKVSRIKQVASGRFGVTPAYLVNADVIQIKVAQGAKPGEGGQLPGDKVTPYIARLRYSVPGVTLISPPPHHDIYSIEDLAQLIFDLKQVNPKAMISVKLVSEPGVGTIATGVAKAYADLITIAGYDGGTGASPLSSVKYAGCPWELGLVETQQALVSNGLRHKIRLQVDGGLKTGLDIVKAAILGAESFGFGTGPMVALGCKYLRICHLNNCATGVATQDEKLRRDHYHGLPERVTNYFHFIAHETRVLMAELGVSRLVDLIGRTDLLVELDGFSAKQNKLDLSPLLHAAQPQPGKALHCTESNLSFDKGLLNKELLAQAQPHIDAKQGKALYFDIRNTDRSVGATLSGAIAEKHGDQGLAGDPIKAHFSGTAGQSFGVWNAGGLELKLIGDANDYVGKGMAGGSISVRPPVGSAFRSHEASIIGNTCLYGATGGKLFAAGRAGERFAVRNSGCITVVEGIGDNGCEYMTGGIVCVLGRTGVNFGAGMTGGFAYVLDEDGEFRKRVNPELVEVLDVEELAIHEEHLRGLITEHVQNTGSHRGEEILANWPIWAPKFALVKPKSSDVKALLGHRSRSAAELRVQAQ

SEQ ID NO: 384 - protein, 306 aa, Magnaporthe grisea 70-15
MMEYAQYQQPPQNAHSNFQSSTASNNITSPTSQHVQTSPIIPQQNQQAANANQTHMYQPPYGVPQQSLHYGMPGIQAAALAATAAASGSNYPYSLPSDPSLQQTSPRMGSKKEARGNPRSPQQMDAQRRMSQVTSPGLPNAQAMMNHTGARPGVAAPTMPAQQMGPPQSPEIAAGAVEESPLYVNAKQFHRILKRRVARQKLEEQLRLTSKGRKPYLHESRHNHAMRRPRGPGGRFLTADEVLEIEKQKGLGGAESEIKHDVESSPPAKANNKRKSMSVPDTANKKAKVDTESPDVEEEEDAEDDG

SEQ ID NO: 385 - protein, 181 aa, Oryza sativa Japonica Group
MAFASGRFYCMSSSPFAVLVFDVAENVWSKVQPPMRRFLRSPALVELGGGREGAARVALVSAVEKSRLSVPRSVRLWTLRGGGGGGGGGAWTEVARMPPEVHAQFAAAEGRARAPTSALVFDSRRDEWRWAPPCPYVVVAHHGGAGAAGFRVFAYEPRLATPAIGLLDATAPVALHGMHDG

SEQ ID NO: 386 - protein, 2372 aa, Coccidioides immitis RS
MSQSSSATDALPKLFLELKSKNEETRLRAATELYDNVVAASRELPQDKFLEYYNTVSQRIAQLVVTGGDANEKVAGLLALDRLIDFDGVDAALKTTRFSGYLRSALRSNDNAVLLYAARSLGRLAKPGGALTAELVESEIQSALEWLQSERQENRRFAAVLVIRELAKGSPTLIYGFVAQILELIWVAIRDPKVLIRETSADAISECFEIISARDSQVRHQWFAGIYDETLLGLRSTNVDWIHGSLLALRELLLKGAMFMNEHYRNACEIVLRLKDHRDPKIRTQVVATIPVLASYAPLDFTNTYLHRFMIYLQAQLKREKERNAAFIAIGKIASAVGNAIVNEAPMLECLSMLSMAVGQTLSKYMESLLDPIFACGLSKALTQALVDMAHYIPPIRATVQEKLLDMLSLVLCGRPFQPLGCPDNRAPPMPSFVKESAPPPQEVTDSEITLALLTLGSFDFSGHILNEFVRDVAIKYVDNDNSEIRKASALTCCQLFVHDPILNQTSSHSLQVVSQVIDKLLSVGVGDPEPEIRCTVLQSLDRKFDRHLAKPENVRCLFLAVNDEVFSVREAAISIIGRLSNVNPAYVFPPLRKLLVNLLTGLSFATTSRQKEESAQLISLFVTNATKLVRSYVDPMVTTLLPKTTDLNAAVSATTIKAIGEIATIGGEGMKQYLAQIMPIILEALQDLSSPSKREAALRTLGQLASNAGYVIEPYKEYPQLLAVLINIIKTEQAGSLRKETIKLIGTLGALDPYKYQQISQDTPDVHHINEIQAVSDVSLIMQGLTPSNEEYYPTVVINTLLHNILSESSLAQYHSAVIDAIVTIFKTLGLKCVPFLGQIIPAFISVIRDTPVSRLDTYFNQLAILVTIVRQHIRAYLPEIIVVIREYWDASYQVQATILSLVEAISKSLEGEFKKYLAGLIPLMLETIEKDSSPRRQPSERVLHAFLVYGSSAEEYMHRIVPAIVRLFDKQQAPQNIRKSAIETLAKLSRQVNVSDFASLMIHPLARAIGSSDRTLRQSALDCVCTLIFQIGQDFTNYIQLINKVLYPFRSLQFLATNVQQVLKNNQIHHHNYQILVSKLQKGEPLPQDLNPDEQYGSFGDDQSFGEVGQRKILVNQQHLKNAWDATQKSTREDWQEWMRRFSVELLKESPSHALRACASLAGIYQPLAKDLFNAAFVSCWTELYHTYQEELVHSIDLALTARNIPPEILQILLNLAEFMEHDDKALPIDIRTLGKYAGKCHAFAKALHYKELEFEQDQNSGAVEALISINNQLQQFDAAIGILRKAQAYRDVELKETWFVKLQRWEEALAAYKRRELIDPDSFEVTMGKMRCLHALGEWKMLSDLAQEKWNQATNDHRIAIAPLAAAAAWGRGQWELMDSYIGVMKEQSPDRSFFGAILSLHRNQFKEAAEYIEKARNGLDTELSALLGESYNRAYNVVVRVQMLAELEEIITYKQSAGDPEKQEAMRQTWNKRLLGCQQNVEVWQRMLKVRALVISPRENLDMWIKFANLCRKSNRMGLAERSLASLEAVESSEFGIPPEVTYARLKFDWAAGRQQEALQALKDFTASLTEEYGKYNSLVSAARGQQQQAAENNHMTNGQTEQREAEIAAIRQHLGDLGKFRRLLAKSHLKQGEWQTALQRGDWRSENVCDVLNAYSAATHYNRESYKAWHAWALANFEVLNALSPQSNNETVSIPHHIISEHVVPAIQGFFRSIALSSSSALQDTLRLLTLWFTHGGDADVNSVVTDGFATVSIDTWLEVTPQLIARINQPNPRVRAAVHRLLADLGKAHPQALVYPLTVATKSNVVRRSQSAIHIMDSMRQHSPRLVEQAEVVSHELVRVAVLWHELWYDGLEEASRLYFANHNVEGMFATLAPLHDMLDKGAETLREVSFAQAFGRDLAEARHFCLLYRETQEIGDLNQAWDLYYTVFKKIDRQVRHMRTLDLKYVSPKLKDAVDLDLAIPGTYQSGKPVIRILSFDPVLTLVQTKKKPRKMIVKGSDGNSYMYALKGHEDIRQDERVMQLFGLVNTLLEKDSECFKRHLTIQRFPAIPLSQNSGLIGWVTNTDTLHALIKEYRESRRILLNIEHRIMLQMAPDYESLTLMQKVEVFGYAMDNTTGKDLYRVLWLKSKSSEAWLERRTNYTRSLGVMSMVGYILGLGDRHPSNLLLDRITGKIVHIDFGDCFEVAMHREKYPERVPFRLTRMLTFAMEVSNIEGSYHITCEAVMRVLRENKESLMAVLEAFIHDPLINWRLGARESPAQPSFADRRQSGELDLDHPLQPGNFTRRRPSILDGGILDAQQGIPNEAREVQNARALQVLGRVREKLTGRDFKPHEELNVSDQVDKLLVQATSVENLCQHYIGWCSFW

SEQ ID NO: 387 - protein, 213 aa, Glycine max
MKPFLSNHTDSMYNCSQVGCSHPMAHTSYPCGDPYFGSSIVAYGPQAINQQMVPQMLGLASTRIALPVDLAEDGPIYVNAKQYHGILRRRQSRAKLEAQNKLIKSRKPYLHESRHRHALNRVRGSGGRFLSAKQLPQSNAELVTDAYQKKDASEAENHPSSTGENASITFTAISALTSMSSNSVNFPNMAGSSQCSGGLTFGAGALQCTSVGR

SEQ ID NO: 388 - protein, 1536 aa, Synechococcus elongatus PCC 6301
MNQHSVHSSSHPTYQGPRWLVEERDACGVGFVADQQGRASHDLVEKSLRALGCMEHRGGCSADSDSGDGAGLMTAIPTDLLKTWLGAAAPADLSSVGLGMVFLPQHGAEATIARQLIEQIVAEENLQFLGWRLVPTRPEVLGQQARANLPRIEQCFIASEQLRDDEFERQLYLVRKRVETAVKKALGTASEDFYICSLSSRTVVYKGMVRSEVLGQLYTDLTNPAYTSNFGVYHRRFSTNTMPKWPLAQPMRFLGHNGEINTLLGNINWMMARQADLQHPAWGDRIGDLLPVVDLNRSDSANLDNALELLVNSGRTPQEALMVMVPEAYQNQPALADHPEIVDFYEFYSGLQEPWDGPALLVFSDGKKVGACLDRNGLRPARYSITADGYIVFASEAGVVDLPVETIIEKGRLGPGQMIEVDLETKEVIKNWDIKKRIASQQPYGQWLQERQVLENKDFGNEQQLGDFDLLRLQTGFGYTAEDVDMVIEAMASDGKEPTFCMGDDIPLAVLSSKARLLYDYFKQRFAQVTNPAIDPLRESLVMSLSMTLGARDNLLQVGPESARLLKLDSPVLNEAELEQVKQSTLKAAELSTLYAIEQGPDGLQAAIAALCQQAEQAVQAGHQILILSDRTGAGLAPQISYIPPLLAVGAVHHHLIRQGLRMKASLVVDTAQCWSTHHFACLIGYGASAVCPWLALETVRHWWHAPKTQSLMERGKIAQVSLAGAQQNFRKAVEAGLLKILSKMGISLLPSYHGAQIFEAIGLSMEVVDLAFRGTTSRLGGLTLADIAHEVMSFHTRAFPELNQKKLENFGFVQYRPGGEYHMNSPEMSKALHKAVVAGKNYDHFEVYRKYLEERPVTALRDLLQFVSDRPAISLDEVESVEAIVQRFCTGGMSLGALSREAHETLAIAMNRLGGKSNSGEGGEDPVRYKVLGDVDAEGNSPTLPHLHGLRNGDTASSAIKQIASGRFGVTPEYLMSADQLEIKVSQGAKPGEGGQLPGKKVSPYIAFLRNSKAGVLLISPPPHHDIYSIEDLAQLIFDLHQINPKAQVSVKLVAEIGIGTVAAGVAKANADIIQVSGHDGGTGASPLSSIKHAGGPWELGLTEVHRVLMENQLRQRVLLRVDGGLKTGWDVVMAALMGAEEFGFGSIAMIAEGCIMARVCHTNNCPVGVATQQEQLRKRFTGIPEHVVNFFILIAEEVRSILAKLGYRSLTELTGRTDLLAPRPDLKLTKTAALNLDCLIKLPDTRSDRSWLVHDEVHDNGPVLDDQLLANPALTAAIANQDSVAIEQAIVNTDRSVGARLAGAIAQRYGNYGFEGQISLNFNGSAGQSFGAFNISGVSLNLVGEANDYVGKGMNGGEIIVRPEAGVRFDPSQSSIVGNTCLYGATGGSLFANGRAGERFGVRNSKAQAVVEGTGDHCCEYMTGGTIVVLGPCGRNVGAGMTGGLAYFLDEDGQFPAKVNPEIVKLQRVSTSAGEQQLKQLITAHAEKTGSPKACHILEQWEQYLPQFWQVVPPSEADTPEVNPEVADKQLTAV

SEQ ID NO: 389 - protein, 496 aa, Shewanella sp. MR-7
MQELNWFMWGLDLFSGLFLILIGLGALAVVYMYIADKLQTKQAVRHNYPVIGRFRYLFEKQGEFFRQYFFAQDREELPFNRAERSWVYRAAKNVDRTIAFGSTRPLDSTGAIMFMNTAFPTQDEDITPILPQTIGPHCREPYTTKAICHISAMSFGALSRPAVTALSHGAAQAGCWLNTGEGGLSPYHLKGGCDLVFQIGTAKYGVRNEQGHLDDDKLKEIAAHPEVKMFEIKMSQGAKPGKGGILPGIKVTEEIAKIRGIPQGHDSISPNGHIEFKNVADILDMIARVREVTGKPTGIKAVLGDVQWLEDFCDEIERRGEASAPDFFTLDSADGGTGAAPQPLMDYVGLPLKESLPILVNILIQRGLRKRIKVIASGKLIVPSRVAWALALGADFIASARGNMFALGCIQALQCNKDTCPTGITTHNKKLQQGLNPRDKSTRVANYNHNLHHDLALIAHSCGVTEPRQLKPSHVRIVLESGLSVSLDKYYSHINQ

SEQ ID NO: 390 - protein, 116 aa, Schizosaccharomyces pombe
MSADGLDYTNLLPIANVARIMKSALPENAKISKEAKDCVQDCVSEFISFVTGEASEQCTQEKRKTITGEDVLLALNTLGFENYAEVLKISLTKYREQQARSASMKETKQSRSEEPQ

SEQ ID NO: 391 - protein, 497 aa, Yarrowia lipolytica CLIB122
MGNVPGKEQQVRNARSVSEDYHREGQVRSKRPSAPREKKREPRVFVDPNEQVDGGYLVPQGVYTGPQDFDILVVKSLMTSRKLAPFFKGLQDYEEEWTDHQLMAAIRGFPIPSAASESPTTESTDTKDASASTSTPHAISTPSHLSPPTAPPQVAISPPRHTLSSNNPFRDPLEHMSHLRIDLDNTTFSQSAPTPSWMRSGEPDQEDGDELINPGILQSPPSREAPKPPPSRQRAKTLTNKEPPLMVKIYRDPIECPICFLYYPNSLNMTRCCAQPICSECFVQMKRAEPHPRHDEPEPDTLLGQLDLISEPTACPYCAMSDFGVVYSPRHGPGAKAAGANSADAAAAKGNGDESAIDDSGDSSDGIDTTNMDDVADKLMHMSGAKRRSSISVTNPNVVTVDRVRPDWSKTLAAARARAARKAATANALHATAFVEGGNGEVAGSSRSSRRTRQNHEQRQAARAQELEQIMLSEAMRLSMLESQEAEEKRSREQESK

SEQ ID NO: 392 - protein, 499 aa, Methanothermobacter thermautotrophicus str. Delta H
MPFKVERKEEVCKRNFDRPGCCWYMCDNRDESLCANCYSCYNNCPHDVYEIINGEPVPVRHENCVGCRICEEMCPNNAIEVNAVPEDRRNVWSFADLLEIERKSREGSYKVRGCGAVRRIPTFDDLVIIPAQVSRPPIDKYREPCNTRVVIGDRYAENPLELDTPIMIAAMSFGALSKEAKIALAMGASLAGTATNTGEGGMLPEERRYASKLIAQYASGRFGVSAEYLNNSEAIEIKIGQGAKSGMGGHLLAEKVTAEVSRIRMIPEGTDALSPARHMDIVGPEDLSMKISQLREITDWKVPIMVKFTSGRVADDVKIAAKAGADAVVVDGMQGGTGAGPDVVTEHSGIPTIAAIVEADEALKEVNLRDEVSLIAAGGIRSGADVAKAIALGADAVYIGTAALVSIGCRVCQMCYTGTCRKGIATQDPRLRKRLDYVEAGKNVARYIEAMTEEVCMLTQQAGNTDVSKLEKDDLRALTVEASALTGVKLAGMESPARF

SEQ ID NO: 393 - protein, 1558 aa, Cyanothece sp. PCC 7424
MNNNKQPIKQGLYDPQFEHDACGVGFIVHMKGKKSHEIVEQALTILLNLDHRGACGCETNTGDGAGILMQVPHKFLLKVAAASKINLPEPGLYGVGMIYSSPDPTIREQSRRIFERVVEEEGQSVLGWRDVPTDNSSLGNTALSAEPFMEQVFIGRNPNLTDDLAFERKLYVIRKRSYKAIREPGIDPRWYPSSISCRTIVYKGMLMPVQVGQYYPELHDPDMESALALVHSRFSTNTFPSWERAHPYRYIAHNGEINTMRGNINWMHARQSLFECDKFGEDMKKVQPVINIDGSDSTIFDNALELLVLSGRTLPHAMMMMIPEPWAGHEEMSDEKKAFYQYHSCLLEPWDGPASIAFTDGTQMGAVLDRNGLRPSRYYVTKDDLVIMASEAGVLPIEPERVALKGRLQPGRMFLVNMEEGRIISDSEIKSQVVNEHPYREWLNEHLVKLEDLSEGRGQEAGGRREDLSEGRGQEAGGRREDTSHTPHTPPSLDLKARQMTFGYTFEDLRLLLTPMARDGVEAVGSMGTDTPLAVLSDRPKLLYDYFQQLFAQVTNPPIDSIREEIITSPLTTIGSEGNLLKPTPSSCHLIELKTPILTDAELAKLKSIDQGSFKSVTIPILFNPKDGVKGLETRLEEILLEVDEAIASSCVNIVILSDRGINQSLAPIPALLAVAGLHHHLIRKGTRTRVGIVLESGEPREVHHFATLIGYGCGAINPYLAFETLNEMIHEGLLVNVDHYTAVKNYIKAATKGVIKVASKIGISTIQSYRGAQIFEAVGLNRSVVDKYFSWTASRIEGSDLEVIATETILRHTHAYPDRQINGHVLDPGGEYQWRKAGEAHLFSPEAIHSLQKAVRTGNYEAFKEYAKLINEQNKKFFTLRGLLEFKGREPVPLEEVEPIEAIMRRFKTGAMSYGSISKEAHEALAIAMNRIGGKSNTGEGGEDPERYTWTNERGDSKNSAIKQVASGRFGVTSLYLSQAREIQIKMAQGAKPGEGGQLPGRKVYPPIAKVRHSTPGVGLISPPPHHDIYSIEDLAQLIHDLKNANREARINVKLVSEVGVGTIAAGVAKAHADVVLISGYDGGTGASPMTSIKHAGLPWELGLAETHQTLVLNNLRSRIVVETDGQLKTGRDVVIAALLGAEEFGFSTAPLVSLGCIMMRVCHLNTCPAGIATQNPELREKFVGDPEHTVNFMRFIATEARELMAQLGFRSLDEMVGRTDVLEPKKAVDHWKAKGLDFSKILYQPEVGPEVGRYCQIPQDHGLEKSLDMTVLLDLCKPAIEKGEKVSATVPIKNINRTVGTILGNEITKNHWQGLPDDTVHLHFKGSAGQSFGAFVPRGVTLELEGDANDYLGKGLSGGKIILYPPVESTFVPEENIIVGNVALYGATAGEVYIRGIAGERFAVRNSGVSAVVEAVGDHACEYMTGGKVVVLGATGRNFAAGMSGGVAYVLDEAGDFATRCNTQMVGLESLDDPLEINEVYQLIKNHAEYTQSATAAKILANWEAMIPLFVKVMPFDYKRVLECIKNALASGLSGDEALSAAFEENSRDVARIGGS

SEQ ID NO: 394 - protein, 1497 aa, Alkaliphilus metalliredigens QYMF
MKRFELPEKQGLYDPSMEKDSCGLGFIAHIKGHQNHEILKQGLQILKSLKHRGAVGADATTGDGSGILIQIPQDFFKEEVEALNIDLPDPGDYAVGMIFLPRDPNARLFCEGVIERVIREEKQNLLGWREVPIDEAGCGESAKATRPVVAQFFLARKGQSKALFEQKLLVVRKRAQQEVRSAQKPYTDHFYVCSLCSKTIIYKGQILGYKLEEFYVDLLDERVITAIALVHERYSTNTFPSWKLAQPFRYLAQNGEINTIRGNINWMNAREGVMHSESFGDDFKKILPIIEPGGSDSASIDNVLELLVKNDHAIEDAMMMLIPEAWQKGIKMPQEKRDFYEYHARVMEPWDGPATITFTDGVNVGVTVDRNGLRPARYLTTKDDLIIMASEIGVVDVPVEMVLKKGCLKPGKILLVNTKEGRIVSNDEIKSTAMNKHPFGEWVSRNRMTLKDIEQPYEPKKMNYETLHKNHLVFGFTEEELKKVIAHMAEHGKEPIGSMGVDTPLAILSEKPQLLFNYFKQKFAQVTNPPIDPIREESVMSLIQFIGKYGRLLDKIETDTDNKYIKLAHPILTNSQIENIRGLNTEDFRAITIPTVFQADHEDNGLKEALDYLCKRAEENVKLGYNIIVLSDRNIDMYNAPIPSLLALGAVHHHLVRKKLRTSVDIMIEAGDARDAMHMALLLGFGAKAVNPYMAFETIAYMVENKKSVKGVKNTEEAFGHYIEAICSGLLKIISKMGISTLQSYSGAQIFEAIGIKQDVIDQYFTDTPAVLSGIGLGGIVKEVLIRQESAYQQLQQLDVGGEIQWNPKGEYHTFSPKVVSNLRKACVENNRETYNLYADQVNGQDVNITTLRGLLKFKERKSVSIEEVESVEEILKRFRISGMSFGSLSTEAHETLAIGANRVGVTSNCGEGGEDPSRYKLGFDGENMTSEVKQVASGRFGVTANYLAHCHEIEIKMAQGAKPGEGGHLPGDKVTPEIAKVRHSAPGIDLISPPPHHDIYSIEDLAQLIFDLKNVNPQATVGVKLVAQTGVGTVAAGVAKAFADFVLISGHDGGSGASPISSMKYVGLPWELGIAEAQQTLLLNNLRSRITLQVDGKMKTGRDVVIATLLGAEEYGFATTPLIALGCKMCRQCHLNKCPVGIATQEIDLREGFIGEPDHLINYLTFVAMEIREIMAEIGFKTIDEMVGRVDVLEQKQTDQKKLKNLDLSSILYRPELPSRIVGKRVISQKHKIINVLDKKLIEDAKDSLENGERTQHVLEIRNTDRAFGTMISGEIAKAYGDAGLPDDTISVRLEGSAGQSFGAFAAKGLTLTLEGDANDYLGKGLSGGKIIVVPPRKATFDPSKNIIAGNTLLYGATSGEVYIAGGAAQRFGVRNSGAVAVVEGIGDHGCEYMTGGVVLVLGPIGKNFGAGMSGGIAYILDEKNKYSDNYNREMVDVEPLINAQDIQRVKDLINLHLQYTGSVQAKRILDNWNFYVSKFIRVCSPLYQKQLENIG

SEQ ID NO: 395 - protein, 1143 aa, Bacillus cereus G9241
MLNKKNTWTPSLFRDYKNAEHDACGIVSVMEKRKFPTKENIDLCIQSLVKMNHRAGFINGEGDGIGIHIDVPKALWNEKLKSSGYNPTIVDHPHFIVGHFFLNKNENIINLKNHIRTQLNNENFTILFESDNVINSDALGPLGKQEEPLFWQVALIAENEVANIEQSLFAVTIKIEENEAIHVASLSRDHVVYKVLGAGDTLVAYYNDLQHPLIASTMTLGHNRYSTNTLSNFFRVQPFSVLGHNGEINTIAKLRDQAEMIHVPLTAGGSDSQDLNRTLETLLVQYDYSLFEAMDILFPPIINEIKLYEPHLQDLYTYIREAWGHFAQGPAGIISRYKDEAVFSVDSLGLRPVWKVETESSYIFSSEPGVVSPTEYVAEPKPLAPGEKVGLKWNKQDELVLYEYDDYQTQVYNRFKKRVDVTNYHLHLSIPETKEIPDSCDFMQVETKQYVAFGWDREHIQLLEQMATKGVEPIRSLGHDSPLAALDTDRRNIADFIKESVAVVTNPAIDRDREVEHFSTRTILGERPSLLSGAKQPFVVEMLSPIILEGSTAQSIAEELHTITYEQLIQLFNTHSSISTISATFSQTETLQCALSRISSEAITAVNDGVSLLLIDDANAHLNERLWIDPHLVTAKVHQVLSENKLRRNCSLVIRSGALRSLHDIVTLYGLGADSINPYLLFATVNDGTKTPITNLYHALNKGLEKVISTIGIHELRGYGRLYSSIGLHEEIANILQITNFLGSNDLAFSLESLAEDAQMRADDYNNPKVRMRKSFHIFPRIWKAIGDVAKGNSYDDYRDKLSELEENNPIAIRHLVQTKEAKHVVPAEEVSIRIQNHDLPFIISSMSFGSQNEIAFRAYAEAADQLNMISLNGEGGEIKDMIGKYPHTRGQQVASGRFGVNAELLNSSNLIEIKIGQGAKPGEGGHLPGSKVTAKIAEARNATIGSDLISPSNNHDIYSIEDLAQMITEIKTANQLAKVAVKVPVVPNIGTIAVGIAKAGADFINISGFDGGTGAARIHALQHVGLPVEIGVKAAHNALLEANMRHKVEIWADGGIRSVNDALKIMLLGANRIGFGTLSMIAIGCTTCRGCHLDTCHVGIATQIESEAQAKEHGLRRFVPRELESAVAGLLHLFTTFGEKLK

SEQ ID NO: 396 - protein, 543 aa, Rhodopseudomonas palustris CGA009
METLLLPLSPRYIVLTISAVLTTLLATLAAFDVDTPMFGVVLVPLLVFGALTLLGIHDLLQTSHAVLRNYPIAAHLRFLLEEMRPEMRQYFFESEKDGKPFSRDTRALIYQRAKMELDKRPFGTQKDVYGDGYEWMHHSVAPRPHADEPFRITIGGPDCAKPYSASVFNISAMSYGALSPNAIRALNAGAMKGGFAHDTGEGGVSPYHREHGGDLIWEIGSGYFGCRTRDGRFDPEAFARVATDDQIKMVELKVSQGAKPGHGGVLPMAKISEEIAQIRGVGMDEDCVSPPYHKAFSTPIEMMRFIAEMRRLAGGKPTGFKLCVGHPWEFLAICKAMLVTGIYPDFIVVDGKEGGTGAAPLEFMDHLGMPMRDGISFVHNALIGIGARDRIKLGAAGKIATGFDVARAMALGADWCNSARGFMFALGCIQSLSCHTDRCPTGVTTQEPSRYRALVVPHKLERVYNYHRATLQALAELVAAAGLDHPRDIRPYHFSQRTSPSDVVSLAQLYPALRPGELLEGTDDPRFKQAWEMAQAESFAPLV

SEQ ID NO: 397 - protein, 1240 aa, Cryptococcus neoformans var. neoformans B-3501A
MSQAVVDEAIVSLLSDKTVNKEILIMFLDLLAFCTKDTTPYFSPKVFEAAKMCALQCFHGGLNQTLPGVILWYIEQQAEALPTPESISNLVEANIRVGTGGYDAAWSTLLWLENDWNIEPQPMWITSLSHWQQALSAQDKIDKNQQATMYSSFNLRMICYHALGNYQKGYDLAQNFFEGLDDNERRNTAHWATAAAWHMGDFDTMADHLAFHPRGTSKSLYKAIIDVHNEQYASAFHHINKAQSLSYDELQMQLGAGLQVALKSLAKTEFLVELQEAIQYKSQPELRPTILATWKTRFKRSHADANSWLKRLEIWTLACSPKTFELQDCFLKTAKLCESAGMHEAARSIIKRITPEVTLPGCKVEYTKLRFQWKDVFQRHDQNGMEDALERLYIHTRRYLEYINVNKHELEASALGLQPLSKTENLSTLERKVIARRYYRLGEWTSVLQGSEWLQDRESTVLMYTSLAAKLDVSWHEAAFSLAERSVTLFESNGFSRYDGVAVGSYIVPALRGLFQAARTKESPEFIIKALLRLVTLWFRFGESQAVLVEVENQLNITDVEPWLSAIPQLIARLGTPQKDLQCTLIKLLRTISSHYPHAVIWPLLTATQTRKVEHQEAARVIMDYICTMADGTRLVDQAELVGRELIRTSISWLEKWRGIIDGFLPRQDLMEIKWQDIPEIWEEDLRMLTNPETPDEHQFVLQYGEQLHLVDKTLIRYNSSRQLNLVNNAYSTLYRLYGEIEAQLNQWRLPGMKLHLASTAPRLLSLRDCILTVPGLYDPHIKLDDQAFIDGFQPVVHILSSKQLPRKLLIQSYLSDHTFLLKGNEDLRGDERIMQLFNLINTLLNHRSDAFSRNLHLLPYEVVPLSPSAGLVSWVSNTQQLQSMIQANRDKHKRNALTNRELGSLLGYDPDVFNPNNPKLDATAEMGKYDKLPLLIKVQRLKAALSHSNQSDIKDVLWQRSPSADIWIKRRTNFARTVGVASFVGYIIGLGDRHGSNILVDQLTWGALHIDFGDLFNVAQERSFLPEKVPFRLTRMMTNAFELASQGDLETPGSAGTFKQASFITMDVLRGSRSTLLAMLEAFLYDPLLSWTSSQNNPSGTTRLEEAVLREAPKVGASLEGLKSKAGQKDSSQGTQSQQGETKDLSIQEDSLPYEQLDNSLTSTCLRTDSYMARVSSTEMTNSKALQVLTQIERKLVGLHNTNSEQPFSVSKQVQELIKEATNLQNLSQGYVLGWIPHW

SEQ ID NO: 398 - protein, 1489 aa, Xylella fastidiosa Temecula1
MVSSTRQRIEESMLYDASDERDACGFGMVAQLDDQPSRALLEIAIAALSRMTHRGGVAADGLTGDGCGLLIRKPDAFLRALAGEAGIALGPRYAVGMVFLPGERAAAAHCRQVLEAELQRVGVRLCGWREVLINRSVCGQLARDTLPHIEQVFVDIDPKHSEDAFGVALFLARRRAERQLCDYHDFYVATLSPYAISYKGMVLPDKLPVFYPDLQRSELSSSVIVFHQRFSTNTLPRWPLAHPFRLLAHNGEINTIEGNRRWAQARSKVWRSPRFDIAEFDPVISMKGSDSQSLDNMLELLIAGGMDLLQALRILVPPATRTLEFKDADLASFYEFYGLNTEPWDGPAGIVAYDGRYAACMLDRNGLRPARWMLTADRHFLVASEAGVWELPVERVIRKGKLGPGEMMAIDLKRGDLLDSDAIDRINRARAPYKQWLQQGVTYLQTELIDPSLVEEPFSDQTLCSYQKLFQLSTEEVEQVLRPLAETEQEAAGSMGDDTPMAVLSAQIRPLYDYFRQAFAQVTNPPIDPLRESIAMSLTTQLGRETNIFHAGPETVNHVILDSPVLSQRKLRQLLKMPQYLEKNRLIDLSYTVDEGLQAGLKRMCDEAEQAARDGIVMLLLSDRYPVPERPMAHALLATGAVHHHLCRVGLRCDVNLIIETGTARDPHHMACLLGFGATAVYPYLSYQMLFNLGRRGILKLQKAGEQSQIGRSYRKGIYKGLSKIISKMGICTIASYRGAQLFEIVGLDPDVVALCFPDTPARIGGVSLMQLHTEACELTARAWNDRIAPEVGGLLKYVHGGEYHMYNPDVVMTLQHATRTGDAADWRFYMDAVHTRPPSALRDLLQLKKAEIPTPLDQVAPATDVLCRFDTAAISLGALSPEAHEALAVAMNRLGGRSNSGEGGEDPARYGTERRSKIKQVASGRFGVTPEYLINAEVLQIKIAQGAKPGEGGQLPGHKVNDLIARLRYAKPGIGLISPPPHHDIYSIEDLAQLIYDLKQVNPQALVSVKLVSHVGVGTIAAGVVKAGADLITVSGHDGGTGASPISSIRYAGVPWELGVAEVHQALVANDLRERTTLQTDGGLKTGLDVVKAALLGADSFGFGTAPMIVLGCKYLRICHLNNCATGVATQDERLRANHFTGLPERVENFFRLLAEEVRQWLSYLGAMSLDDIIGRTDLLQQLEVSSREGVRVNLSRLLTNACYEGTHCAAQRLYESPDSLSVQIDSLLADAIANKTGGDYRFLIHNTDRSVGTRLSGAIARVHGNHGMEDAPLHLRFRGTAGQSFGAFNVGGLHLELEGEANDYVGKGMAGGCLVVRPPRGARFEARHTPILGNTCLYGATGGELFAAGRVGERFAVRNSGALAVIEGAGDHCCEYMTDGVVLVLGKVGLNFGAGFTGGLAYVLDIERDFVDRYNHELIDIHRVSVEGFENYRQHLRHLVVRHRALTGSIWAQQILDEFRDYIGRFWLVKPKAASIESLAESLRSAA

SEQ ID NO: 399 - protein, 501 aa, Robiginitalea biformata HTCC2501
MRRGFIIMSVLLVLVLAAMLILYPLWWGVALIIIPLLILGLIDYCQKSNNIRRTYPLFGRITNLLEKQRHVFQEIVLLNRAEGKPFNWIQKEIIYKRAADANKSQPFGTQIPYDKVGREWFTHSTYPVKEVNDDFRVTVGSSLCTQPYSSSILNLSGMSYGSISKNATLALNGGAKIAGFAQNTGEGGFTPYHQEYGADIIFQIGTGYFGCRTKEGNFDTEKFRDIALHEVVKMIEIKISQGAKPGFGAILPAKKNTEEIAKFRVVEKGKQILSPPHHSAFGSDEEMIFFIDKLRKLSNGKPIGIKLCIGQKDEFDSMAQSLAKNQNYPDFIAIDGAEGGTGAAHMESLHWAGLPIVEAIHFAHSTLVKHKIRDEIKLMAAGKIISAFDIYRMLALGADACYSARGMMFALGCVQSLKCNLDKCPTGITTMEPSRVKSLVVEDKKAKVANYHKNTMEAFKELLGSMGLENRKGIQKKYIVRRINETETKTYDEIFVNPSKE

SEQ ID NO: 400 - protein, 1523 aa, Bifidobacterium longum DJO10A
MTFKAPLDLTVHAPDGMYDPANEHDACGVGMVTTLNKRPERKIVTDAIEVLVNLDHRGAVGAEENTGDGAGILMSMPDEFMRATVPAELPEAGHYAAGIAFLDRDIETSGQQEQAIAKIVREEGLEVLAWRVVPTNPDGLGLQALAAMPGFKTLVVASPDGALAGVDLDRKTFRIRKRVEHEVGVYFASLSARTITYKGMLTTMQLTHFFEDLNDERMKATIAIVHSRFSTNTFPSWPLAQPFRLLAHNGEINTIQGNRNWLSAREGRLSSELLGEFEPLLPITTPGYSDSGTFDECLELLHLAGRSLPHAICMMLPPAWEKNPDLDPDVRAFYEYNNTLIEPWDGPADIVFTDGTQVGALLDRNGFRPGRWQLTDDGYIVLASEAGVLPEIAQEHIVSKGRLEPGEMFLVDTAEGRIIPDEEVKRNLAAQHPYRKWVEGNSVEMSDLPRREHVSHSGQSVQRRQRAFGYTEEDLKLLLTPMANTGKEPLGSMGNDAPMPALSSRSRMLFDYFTQKFAQVTNPPLDWEREEIVTSLESAIGPEPNLLADSELHAKKILIPLPVVNSDEMAQLKRLDKARILGGYYRPYVVKGLYQVAGGGKALEERLDEIFAEIDEAIANGKNFIVLSDRESNHTWGPIPSLLLTSAVQHHLLRRHTRTQISVAVEAGDVREIHHVALLIAYGAACVNPYLAFESVEDLARNGYLKVDADTAVKNLTKALSTGVLKIMSKMGVSTIMSYRGAQLFEAVGLSQEVIDEYFTGTTSRVGGVGLDEIAEEVAIRHRVAYPNQWSASPHRNLRTGGDYKWRRTGEDHLNDPEAIFLLQQSTQRGDYQMFKKYSHHINDTSNRLMTLRGLMKFNTNRKPIDIAEVEPASEIVKRFSTGAMSYGSISQEAHETLAIAMNSIGARSNSGEGGESDDRINDPQRYSRIKQIASARFGVTSDYLVHATDLQIKLAQGAKPGEGGHLPGAKVPPWIAKVRHATPGVELISPPPHHDIYSIEDLKQLINDAKMANPKARIHVKLVSEFGVGTIAAGVAKCHADVVLISGYDGGTGAAPLNAIKHAGTPWEIGLSETQQTLILNGLRSRIVVQCDGELKTGRDVVIAALLGAEEFGFATAALIVEGCVMMRACQKNTCPQGIATQDPELRARFKGKPEYVVNFFMFIAEEVREILAQLGFRTLEEAIGHVECLDQDEAIKRWKSSGIDLSNVLKQAGPVPGTILHQTIEQNHELEKALDNKLIELAQPALEHKEPVRIEMPIRNVNRTVGTMVGYEITRRYGEEGLPDDTIDMTLHGSGGQSIGAFIPRGETMRIYGEVNDYAGKGLSGGRMIVRPEDNVTFDKHSNVIAGNVTGFGATSGQMFVAGRAGERFGVRNGGATFVVEGVGDHGCEYMTGGTVVVLGPTGRNFGAGFSGGNTYVLDLDMKKVNPGAIKSGALLFKSLDAETSKLVYALVKQHAEETGSQFAAALLEDWNETVKRFTHVVPKQFVAMTKAMEEAKTNNVDFNAPGAWEKVYEQVMEGAR

SEQ ID NO: 401 - protein, 2471 aa, Candida glabrata CBS 138
MQAILRKGADKRIKTGNKSNKLTVRKHRKSEEELSNVSAPGGDPTDNSTARRAASSANGEENAKFIDLENGWDDSDISPSNLYDLFERLKSDDQMVRTNTAMELRTSIISIAREIPTDQFQRFINTLNNKIFELIHGSSSNEKMGGILAVDSLIDFYLEIGELSNQTTRLANYLRVLIPSNDIDVMRLATQTLGKLALPRGTVTSEFVDFEVKTCLEWLTASTDNPPLNFKQEYRRHAAILILYSLIENSPYLLFPYINPILDNIWGSLKDTKLIIRRDAAETMRKCMETLQSRDPQNAREWYQRSFSTATQGLNSNNIESIHATLLTFKELLNLKDSYIKDKYSQIFQVVIKFRDHKNDIVRREVYAILPLLAMNDSDIFASKYLDPTMSFYLKVLKDMDSSTANNADKEAIFISIGDLSENVRSKMHSYIHQLEINLREGLQTKYKIRKHYEKALFYCIIKLTAALGPAIATNINKGFLDLILSCPLSSHLLEVMATIKKSIPALSTSIDKRLIEIVHAYLSGERYNDGTNSQIMKTVSLPLARKWRDRDYCWKTGDQNSDNNDDFLLVQTLKMVDIIDPKHLVSEHTKMSIIAYIEHTHETVRKLAALKSVELYKLTEANLPDDEHALDTSATVLGKLLVLAITDPNSNIRLSILQSFDYHFSSQLAQPDNLRLLFCSVNDEVYTIRLEAIRVIGALTEFNPIYVVPEMQKIFLSFLTELKYSATNRKKENMLTLIHAVINSHPDTLVPFIKDCLDSLIQRLEDNSSAVATIAMKTIGALAEAVGPDITNYVHQLMPIIISTLHNQLNSIKRATAIKTLIQISSSTAYVIDPLIEYPELLGLLMNILKTESNMEIKRDIIQLIGTLGAIDPYKYRAVETNSKGVQKIDTTQHSTAIDLLIKGMSPSNEEFYPSVVMHSLVKILNDNSLSSYHTNTLQTIMRIFQDMGVQSIIFLKILVPAIKSVVKTCPPSHLEFYFQQLSVLVNTVNHHIEPFTEDIFEIIADHFSITKLQVVIISLIESMSHLVKNNLKRFLPKTVNLFLNVLENDRSNQKMASVSIMKALIAFGKNLEDYSHLIIPTIVRICEYSQNHLRKISIVTFGKLAKCINLTELSSMIINALVRVLTNGDKSLIKVTMNTLCLLLLQLGNDFVVYIPTIHSVLIKNRIQHSIYDQLVNKLLNGEVLNTNILLDKDSEEKNKNINLQNNPRTEKFVVDQQILKSAWDCSQQKSKEDWQEWFRRLSVHTIRESASPSLRACSNLVSVYNPLARDLFNVSFSSCWNELNIGSREHILNSLCSALSSPQNPTEIYLILINLIEFMEHDMNPLPIPATITGEYAQKCNAFAKALHYKETEFIENEKPCIIESLIDINNQLHQPDASIGILKYAQQHYNLQLKETWYEKLQRWDDALQAYTDREKNGEDTPEVLMGKMRSLYALGNWSEIADLANDKWNTVPLHIQEKLSPIAAGSSWALHNWDDIEKYCSILQDNSIDKEFFSTVMCLHHNNFEEAEQHADNVNSLLVGEMSALINESYSRIYNSVAKCQTVAELKEIIKYKRLPRMSPKRKAMRETWNKRLLGCQQNIDVWQVILKTRSLVVNPEDDEEIWIKFANLCRRNGRMNMTRDVLNSLLKFNEMSENPDILQASPEVVYSYLKYKWDTGEKNSALNQLAIFIGKVIRDLGLHPEHIISNKTFQSKTNISPNERPKYQKLLATCFAKQGDWTIALDPNWSNTDPGSVLSSYLLATHFDPQWYKAWHNWALANFEVISMMSSTNKDTNYQKSNAPITSFYQIRNNIFEKNGETPYYNQFPSRLINNHVVSAIKGFFHSIALSDSSLLQDALRLLTLWFTFGSTSETTQAMQEGFNMVKISTWLEVLPQLISHIHQPNPLISRALLTLLSDLGKEHPQALVYPLTVAIKSESLSRQKAAISIIDNVRSHSPVLVDQAELLSRELIRVVALWNEMWYEGLEDASRHFFGENDNTKMLETLEPLYELLNKGPETIREISFKYAFGKDLTYAYEWVKKYKETGEVSNLNQAWDIYYSIFKKINKQLPQMETLELQHVSPKLLAAKNLELAMPGTYIPGTEIVTIESVNGTCEVISSKQRPRKIALKGSDGKEYLYVLKGHEDIRQDSLVMQLFGLVNTLLQNDIECFQRHLDIQQYAAIPLSPKTGLLGWVTESDTIHVLIKDYRDAKKMPLNIEHLVMLQMAPDYDSLTLLQKVEVFKYVLDNTQGFDLYNILWLKSKSSETWLERRTTYTRSLAVMSMTGYILGLGDRHPSNLMLNRNTGKVVHIDFGDCFEAAILREKFPEKVPFRLTRMLIKAMEVSGVEGSFRITCENVMRVLRDNKDSLMAILEAFAFDPLIRWGFDLPTEQIKKENDKHFKATESIYGIDEASSMSNITTTSVKDKKREYINTRAVLVLKRISSKLTGNDIPKHEDLDVAEQVDHLIEQAKSVENLCQHYIGWCPFW

SEQ ID NO: 402 - protein, 110 aa, Physcomitrella patens
LPANAKIAKDAKETVQECVSEFISFITSEASDKCQREKRKTINGDDLLWAMSTLGFEDYVEPLKVYLHKYREIEVCSVFIDNLHSLCFESLAGCFDKQGWRIILWQEGGK

SEQ ID NO: 403 - protein, 546 aa, Desulfotalea psychrophila LSv54
MVSTGSIPVTPTSLTYSDLPWIIEHREDRCTLCGKCTTICPKGAISLSYRRQRLPKLDVFSKKRSSDYRTFTGIRQSTDLAHACIGCGMCAMVCPNEAITPVANDNEHRSQFFHNINGEPYKRGGRRNISGATLLDRIMFNRISMLTDPALDAGRHEFNVTTTLGRVLAPKEFLDRTRKGEWIPPTREIFPFVIGSMSFGALSPNMWLGLLQGVAYCNEVLGIPVVMCTGEGGCPPWVLRSPYLKYIILQIASGYFGWDEIIRAIPEMECMPAAIEIKYGQGAKPGDGGLLMGHKVSQLISRLRGVPQGVDLPSPPVHQTLYSIEESVMKMIQTLSTAFDHKVPVYPKISASTSAKSVLNNLVRNPYAAGLTIDGIDGGTGAAYDVSMHATGHPIASCVRECYLELAKQGKQNEIPIFAAGGIGKNGNVAQNGMALIMLGASGVHIGKYIMQAAAGCLGNEKNRCNVCNLGICPKGITSQNPKLYRRLDPDKVAERVAEVFCSINTEVKKIMAPLGRSQSLPIGMSDALGIADKAAADRLNIKYVC

SEQ ID NO: 404 - protein, 396 aa, Ochromonas danica
YSIEDLAQLIHDLKNAQPTGEVSVKLVSEVGVGVVAAGVAKAKADHITISGGDGGTGAAAWTGIKGAGLPWELGLAEAQQTLVINNLRDRVRLQTDGQIKTGRDVVIAACLGAEEFGFATAPLITLGCIMMRKCHLNTCPVGIATQDPLLRKKFSGKPEYVINFFFLLAEEVREYMAELGVRSLDELVGRADLLEVDQQVLHEKNKGLDLSGLLTTSYELNPKSPLKKTTQQNHMLESALDQQIIADARPALEEGVPVTLEYPVTNLNRTVGTMLSYHISKKYGAAGLPEDTIQIKLHGHGGQSLGFALAKGVRIEVEGDSNDYVGKSLSGGCIAVYPEREALAGGFVAEENVIVGNVCLYGATSGRAFFRGKAGERFAVRNSGAIAVVEGCGDHG

SEQ ID NO: 405 - protein, 135 aa, Selaginella moellendorffii
NLSSLSPREQDRFLPIANVSRIMKRGLPGNAKISKDAKETVQECVSEFISFVTGEASDKCQREKRKTINGDDLLWAMSTLGFEDYVEPLRVYLHKYREQEGEKAMLAKAGERESHADPAPLPRAMIMSGYGFHHR

SEQ ID NO: 406 - protein, 609 aa, Ustilago maydis 521
MGQQQTKETGAAGSSAAQYSSHTRSSSRGMSPSVSANMIASLSAASLRPPSPPPLPAHLADSVKVDQGGLVPYGVYTGPKDYDQHFVRQSIVDRRLAPFCKGTDDEDELADSKFNSECPICFLNYPTPLNFSRCCHQPICTECFVQMKRADPTSTNPPSSEPRSCPFCVEPDFGVTYTPPESIEHARRSSASGGDSPNDATDAANFAEMAIGTGGAAVTGTGKKKILAADDPSVITVDQVRPDWHTKLAQAEAAVARRANRRVIMRQVGDRLIPIGISSSRMGADLAAAAESGRINLNGPGGSIILNDGQNWPGAAPVATSRRRSSRPSRGANDGVHELARLMRMGNGEDMEEAMIMEAMRLSLLEHEEQQRKQAEEEKKNKAAAAAAASATQGSMATSSRLSTSNDLSAGGSAANRFPVGAAQSVLEESEGSSSNAARSSPLAADAPTVPRLPPVSNVDPAALGLSQTTMDELRELIDADPMLPSSSDSAPSPMPVESGGLARPLRLVAAPESVPVPQPIAGLGSVLAEQHDPSISSQHGYPSPPPEVSGSAKHATSFSTTTTTPPLDAHASAPAVPGSSGFASAAAVPPSRIMNPNNPFRRSMGEQH

SEQ ID NO: 407 - protein, 1484 aa, Pseudomonas fluorescens Pf-5
MSMKAGLYQPDEFKDNCGFGLIAHMQGEPSHTLLKTAIEALTCMTHRGGINADGKTGDGCGLLMQKPDLFLRAVATEHFGIELPKQYAVGMVFFNQDPVKAEAARENMNREILAAGLQLVGWRKVPIDTSVLGRLALERLPQIEQVFIGGQGLSDQDFAIKLFSSRRRSSVANAADTDHYICSFSHKTIIYKGLMMPADLAAFYPDLGDERLQTAICVFHQRFSTNTLPKWPLAQPFRFLAHNGEINTITGNRNWAVARRTKFANDLIPDLEELGPLVNRVGSDSSSMDNMLELMVTGGIDLFRGVRMIIPPAWQNVETMDADLRAFYEYNSMHMEPWDGPAGVVMTDGRYAVCLLDRNGLRPARWVTTQNGFITLASEIGVWNYQPEDVIAKGRVGPGQIFAVDTETGQILDTDAIDNRLKSRHPYKQWLRKNALRIQATMEDNDHGSAFYDVDQLKQYMKMYQVTFEERDQVLRPLGEQGYEAVGSMGDDTPMAVLSQRVRTPYDYFRQQFAQVTNPPIDPLREAIVMSLEICLGAERNIFQESPEHASRVILSSPVISPAKWRSLMNLDRPGFERQVIDLNYDESVGLEAAIRNVADQAEEAARAGRTQIVLSDRHIAPGKLPIHASLATGAVHHRLTEKGLRCDSNILVETATARDPHHFAVLIGFGASAVYPFLAYEVLGDLIRTGEVLGDLYEVFKNYRKGITKGLLKILSKMGISTIASYRGAQLFEAIGLSEEVCNLSFRGVPSRIKGARFVDIEAEQKALATEAWSPRKPIQQGGLLKFVHGGEYHAYNPDVVNTLQAAVQQGDYAKFKEYTALVDNRPVSMIRDLFQVKTLDTPMDISEVEPLESILKRFDSAGISLGALSPEAHEALAEAMNRLGARSNSGEGGEDPARYGTIKSSKIKQVATGRFGVTPEYLVNAEVLQIKVAQGAKPGEGGQLPGGKVNGLIAKLRYAVPGVTLISPPPHHDIYSIEDLSQLIFDLKQVNPQALVSVKLVAEAGVGTIAAGVAKAYADLITISGYDGGTGASPLTSIKYAGAPWELGLAETHQTLRGNDLRGKVRVQTDGGLKTGLDVIKAAILGAESFGFGTAPMIALGCKYLRICHLNNCATGVATQNEKLRKDHYIGTVDMVVNFFTYVAEETREWLAKLGVRSLEQLIGRTDLLEVLEGQTAKQHHLDLTPLLGSDHIPADKPQFCQVDRNPPFDKGLLAEKMVEMARSAINDKSGADFALDICNCDRSIGARISGEIARLHGNQGMAQAPITFRFKGTAGQSFGVWNAGGLNLYLEGDANDYVGKGMTGGKLVIVPPKGSVYKTQDSAIIGNTCLYGATGGKLFAAGTAGERFAVRNSGAHTVVEGTGDHCCEYMTGGFVCVLGKTGYNFGSGMTGGFAYVLDQDNTFVDRVNHELVEIQRISGEAMEAYRSHLQRVLNEYVEETDSEWGRNLAENLDDYLRRFWLVKPKAASLKSLLSSTRANPQ

SEQ ID NO: 408 - protein, 364 aa, Candida albicans SC5314
MTSLEDPNGQAQATYFQESVSTTGNSTPTVTQSNDPQHHHHHQQQQQQHHHHHVGSYYQDSPSSTYTYEVEGDYLENHPNVTSTSAEQGTGTMPTYVDNDNIHGGVGVGMGVETEEEDDDDTNGASIGNGSGSGGGSGGGEQPFYVNAKQYHRILKRRIARAKLEENLKIARTRKPYLHESRHKHAMRRPRGQGGRFLTAAEIAELEKAKQQQQQQQQQQQQQNEQSNQENNNENGNEIKKENQHVDDNNEIKNGDNNINKENIIENNKEEIDPNNVIIKKENNNNEVNHEMNNIENEQSSNEDFNQNNNNNINNNNTTISNNDNENGNTISSSKSNELQESIKNDNNNNNNNNGNDLQEEEER

SEQ ID NO: 409 - protein, 522 aa, Bacillus thuringiensis serovar konkukian str. 97-27
MSETLLVIISILLLLMLLLIVFFIITFFIKKRTHHSILKLHPYLGRMRYLLEKIGPEFRQYWFDHDIDGKPFSRYDFQSVMFLAKYRSEILGFGSKRDFEASGYYIANTLFPVLTEELSVNVTPEREGKKYVIHKEGLFSRREKLTADTTNLWLYEEDDAIIIGENRKYPWKLYGMFGASATSYGSIGENYILASGFGAKMAGGSWINTGEGGVIPEHLHTGANIVAQIGPGLFGYRDEDGNFSMEKFMGKAKESNIKAFELKFGQGAKIRGGHLEGQKVNEKIAFVRNVREGETINSPNRFSFLNNAAETLYFIQQLQENGGKPVGMKIVIGQQEPLENLFKTMKELNIYPDFITIDGSEGGSGATYKSMADSMGMPLIPALLTFIDTANHYDIRDKFKVFAAGKLITPDKVAIALAIGADAVNSARGFMMASGCIMALQCNSGQCPSGVATTNPHYQKALDPYEKKWRVMNYIVSMRYSLFSLAAAAGVKSPRHLKRDHIVFKDEMGRVVPLSELFPISK

SEQ ID NO: 410 - protein, 1583 aa, Brucella suis 1330
MTHLTPSVSNVVSHNVQNEAVKAATTASTRTTRKTKAAGVPPAQGLYDPRNEHDACGVGFIAHMKGRKSHVVVENGLKMLENLTHRGAVGADPLMGDGAGILVQIPDRFFREEMARQGIDLPQPGHYGVGYIFMPRDPDLRAHAEEIVREVIAAEGQTFIGFREVPVDNSSLSKAPHIAATEPFHMQVFIGRSPMLETDDDFERRLFVLRKVISNRIYQENDGDDKGFYVVSMSARTVVYKGMFLAYQVGAYYLDLKDPRFESAVALVHQRFSTNTFPSWRLAHPYRMVAHNGEINTLRGNVNWMAARQASVDSELFGNDISKLWPISYEGQSDTACFDNALEFLHQGGYSLAHAMMMLIPEAWSGNKLMSDERRAFYEYHAALMEPWDGPAAVAFTDGRQIGAMLDRNGLRPARYIVTEDDFVILASEAGVLPVDEKKIVRKWRLQPGRMLLIDMEEGRIISDEEIKSQIAQKHPYKQWLANTQLILEDLNPVEPRALHKDVSLLDRQQAFGYTQEDTKFLMAPMATTGQEAIGSMGTDTPISAMSDKSKLLYTYFKQNFAQVTNPPIDPIREELVMSLVSFIGPRPNIFDLVGTSRRKRLEVRQPILTNGDLEKIRSIGHTEDRFDTKTLDITYNTGEGATGMHGAIERLCDRAEAAVHGGYNIVILSDRQVGPDRIPIPALLATAAVHHHLIRKGLRTSVGLVVESGEPREVHHFACLAGYGAEAINPYLAFDTLLDMHRRREFPPEVDEHEVVKRYIKSIGKGILKVMSKMGISTYQSYCGAQIFDAVGVRTDFVDKFFFGTATTIEGVGLDEIAEETVRRHTDAFGNDPVLLNALEVGGEYAYRMRGEAHMWSPDAVAKLQHAVRTSNPDTFTEYTRMLDAKSSQAKTIRGLFNIRFAEERGLKPVSIDEVEPATDIVKRFSTGAMSFGSISREAHTTLARAMNAIGGKSNTGEGGEEPDRFYPLPDGTANPERSAIKQVASGRFGVTTEYLVNSDLIQIKVAQGAKPGEGGQLPGHKVDATIAKTRHSTPGVGLISPPPHHDIYSIEDLAQLIYDLKNVNPAADISVKLVSEVGVGTVAAGVAKARADHITVSGYDGGTGASPLTSLKHAGSPWEIGLAETHQTLVLNGLRSRVALQVDGGLRTGRDVVIGALLGADEFGFSTAPLIAAGCIMMRKCHLNTCPVGVATQDPVLRKRFKGTPEHVINFFFYLAEEVRALLAQMGFTRLEQIIGETELLEKQAMIDHWKAKGLDFSRIFYKPEAEKHEIYWTERQHHPIDDILDRKLIELAAPALEERQPVKIDVEIKNVDRSAGAMLSGEVAKRFRHKGLPEDTISVTLRGTAGQSFGAFLARGISFELIGDGNDYIGKGLSGGRIVVRPPEDTRIVAEDSIIVGNTVLYGALEGECYFRGVAGERFAVRNSGAVTVVEGVGDHGCEYMTGGVVVVIGQTGRNFAAGMSGGVAYVLDEEGDFAQRCNMAMVELEPVPEEDDILEKLHHHGGDLMHKGRVDVSANMTHHDEERLVQLIANHLHYTGSTRAKDILDNWESYRPKFVKVMPVEYRRALEEMERMQIGVAAE

SEQ ID NO: 411 - protein, 144 aa, Kalanchoe daigremontiana
MDGGGGGGCGGGGFHGFHRLPLHSNRGMKWTDINMKLPGDGSSNGATVPAGDSECIVREQDRFMPIANVIRIMRKILPSHAKISDDAKETIQECVSEYIGFITSEANERCQHEQRKTVTAEDVLWAMSKLGFDSVPAPIQGHGG

SEQ ID NO: 412 - protein, 441 aa, Pisum sativum
MEGFHPSMNMSMSMNMNPSFSYTFPITATASGAITNITTTTTTYNTTSTTPWMNSRIWSKLPHRLLDRIIAFLPPPAFFRARAVCKRFYSLLFSNSFLELYLQVSPRFHWFIFFKHKTRSKTHIYKNNTITDNNSFEGYIFDPNEVAWYRISFALIPSGFSPSSSSAGLLCWVSDESGPKTMLLSNPILGSITQLPPTLRPRLFPSIGLTITPSSIDVTAAGDDMISPYAVKNLSSESFHIDASGFYSIWGTTSSLPRLCSLESGRMVYSQGKFYCMNCSPFSVLAYDIATNTWFKIQAPMRRFLRSPNLVECKGKLLLVAAVEKSKLNVPKSLRVWSLQGCGSVWVETERMPQQLYVQFADMENGNGFECVGNGEFIVIMIKGSDKGLVYDIGRKRWQWIPPCPYAGYDGFELHGFAYDPRLATPVTALLDQLAMPLPQF

SEQ ID NO: 413 - protein, 680 aa, Picrophilus torridus DSM 9790
MGNRNFIPVPKQKNPEFWDIKRIDHIRRLSMTGEPYEIFVNNSGNRILDRISFNVNDRTINDDYGNTETELAGLKMSVPLYLGDMSYGALSGNPNIAIANAAEKTETMAGTGEGGLLPELYDKKRIFVQWASARFGVTLDTLNRGSAVVIKIGQGAKPGIGGHLPGIKVTGPISTTRKIPEGLDAISPAPHHDIYSIEDIAQRIESLKIATKKPVFVKVAATNYIPYIAAGIARSGGDGIIIDGHGAGTGATPLVIRNNFGIPVELAVASAHKMLLKDGNRRKFKIIAAGRVSNSTDAAKLMALGADVVSMGTGVLIAMGCIMVKKCNLGFCPVALTSKIDGKRVFDESYGTDNLIRFINGFTKELSLIVKRLGLRSIRDLTGRSDLLYSDGISEKDLDILSINGEPAEVSPEYGRIDPDYSYLNHLSNTGSAYITSMGSDAPPEIKSPRRIIDFLRLDGAQVTRPPIDPYREEIDISFRLHSIDLEMPLIIDIRNAPGRIKMMLRFAAQASGIAVIDNETLEDYNDITIRYIDGIYIHRSSIYTEKTLAKGFSGYIINSEINLIKIDNYLRSINKRNEYDIIFNLNDNFLNSGDIAKLIALGADAVIISHKIFMESTTDPNYNKALNFVNAIKKELLLISGAMGMYDMQNSLTGNHEILRSVSLNYSLPEINVKEAGSQ

SEQ ID NO: 414 - protein, 495 aa, Oryza sativa
MGGGQSRSPRDGSGHGRYGHSPSFQQQWGGGGGGGGGGGGGYPYGQDAHGGGYYGAPAPQGGYAAPYPAYQQPPPPMPSPAATQPPARAGGASKPRLDRRYSRIADDYHSVDQVTDALAQAGLESSNLIVGIDFTKSNEWLGKFSFHGRSLHHISNAPNPYEQAISIIGQTLSKFDEDNLIPCFGFGDATTHDQDVFCFYPDLRPCNGFSEALSRYRELVPHLRLAGPTSFAPIIEMAMTIVEQSGGQYHVLLIIADGQVTRSVDTASGQLSSQEQKTVDAIVRASELPLSIVLVGVGDGPWDMMKEFDDNIPSRAFDNFQFVNFSEIMNKNMPQSRKEAAFALSALMEIPQQYKATVELGILGRRSFKSPERVPLPPPGGSHDAYSYGSKSFSKPSTYPQSSTSSSSYPHYETAQSSSPAVPSSTYDNQVCPICLVNPKDMAFGCGHQCNPCKAFERLADKPVKYWVCIDKDRKASNPLLQDCGAGDVSSIETH

SEQ ID NO: 415 - protein, 2056 aa, Physcomitrella patens subsp. patens
MLERMAHRGACGCEENTGDGAGILVGIPHSYFSQVVPEEIGCELPPLGDYAVGMMFLPTSEIRREHAKKVFTEVAEALGHTVLGWRRVQTDNSDLGKSAIQTEPLIEQVFLTASTLSKVDFETQMYILRKTSMLAIRAVLNLKRGAAKDFYICSLSSKTVVYKGQLKPNQLTKYYYADLGDERFTSFMAIVHSRFSTNTFPSWDRAQPMRMLGHNGEINTLRGNVNWMHAREGLFKCKNLGLSPEELKKLLPIVDAGSSDSGVFDGVLELLVRAGRSLPEAVMMMIPEAWQNDPNMDPERRALYEYFSCIIEPWDGPALVTFTDGKYLGATLDRNGLRPGRFYVTHDGRVIMASEVGVVDVEPENVAQKGRLHPGTMLLVDFENHKVVDGDDLKKQQSSRYPYAEWLERQKFTLEDVVNSVPEKLRAPPAIIGDKNMASLNFSADNMGVKGLLTPLKAFGYTMENLEMLLLPMAKDGSEALGSMGNDAPLAMMSNRPKLLFEYFKQMFAQVTNPPIDPIREAVVTSTRCMVGPEHDLTEKVEEQCNRLSLSGPLLTVEEMESVKKMEYRGWKTMVVDITFDKSEGPAGLENALTRICAEARNAVAEGYSMLVLSDRATSAQRVPVSSLLATGAVHHHLVQSMERTRIGLVVESAEPREVHHFCTLVGFGADAICPYLAIETIFRVQVDGKIPMKVSKDDLVKKYFYASNSGMLKVLAKMGISTLASYKGAQIFEALGLSSEVVSRCFKGTPSRVEGATFEMLAKDSLRLHEMAFPAREAPEGSADANALPNPGDYSWRKGGEVHLNDPMAMAKLQEAARTNSVDAYKEFSKLTHELNKKINVRGMLKFKEQPESARIPLEEVEPAAEIVKRFCTGAMSYGSISLEAHSTLAIAMNKLGGKSNTGEGGENPKRLEPLQDGSQNPQRSAIKQIASGRFGVTSYYLTNADELQIKMAQGAKPGEGGELPGHKVIGDIAITRNSTPGVGLISPPPHHDIYSIEDLSQLIHDLKNANPDARVSVKLVSEAGVGVVASGVVKGHADHVLISGHDGGTGASRWTGIKNAGLPWELGLAETHQTLVANDLRGRTILQTDGQLKTGRDIMVAALLGAEEFGFATAPLITMGCIMMRKCHKNTCPVGIATQDPVLRAKFAGQPEHVINYFFMVAEEAREYMANLGIRKMDDLVGRADLLEVDEEVIAQNEKLTNIDLSLLLRPAADIRPGAAQRCVMKQDHELELALDQKLINLSRAALESKLPVYIETPVVNVNRAVGTMLSHEVTKRYKLEGLPIDTIYVKLNGSAGQSLGAFMCKGITMELEGDSNDYVGKGLCGGKIIVYPPRSSTFDPKENILIGNVALYGATSGEAYFNGMAAERFAVRNSGAKAVVEGVGDHGCEYMTGGTVVVLGKTGKNFAAGMSGGVAYVLDKEGTFKSTCNMGLVDLDPVVENEDVMTLKALIQQHQRHTKSQLAGEILANFDALLPSFIKVFPRDYKRVLQEIKAKEAAEQLKETPAVTVEVVTTVANGAPSGKASVTEEAAPSTIRPTQVLSPVKHGGFVKYERKPLPYRPADERMKDWGEVLASDNQDGLVKTQAARCMDCGTPFCNQDKTGCPLGNKIPEWNELVYQNRWREALDRLLETNNFPEFTGRVCPAPCEGACVLGIIENPVSIKTMECTIIDKGFENGWMVPRPPLKRTGKKVAIVGSGPAGLAAADELNKKGHSVTVFERADRIGGLMMYGVPNMKTDKVQVVQRRVDLMEAEGVQFVTNAHVGVDPVYSVEKLRSDYDALLLTTGATKPRDLPVEGRDLAGVHFAMEFLHKNTKSLLDSNLEDGQYISAKGKKVVVIGGGDTGTDCIGTSVRHGCTRVVNLELLPQPPQTRAANNPWPQWPRVFRVDYGHEEAATKFGKDPRSYEVLTKRFIGNDKGEVTGMETVRVKWDKSADGRFQMSEIPGSNEIIETDLVLLAMGFLGPEQLISEKLGLETDARSNFKADYGKHATNLQGVFAAGDCRRGQSLVVWAIAEGREAAVQVDNYLMVEESSEEQLPSGEEIREFTTTTSVQ

SEQ ID NO: 416 - protein, 443 aa, Pisum sativum
MEGFHPSMNMSMSMSMNMNPSFSYTFPITATASGAITNITTTTTTYNTTSTTPWMNSRIWSKLPHRLLDRIIAFLPPPAFFRARAVCKRFYSLLFSNSFLELYLQVSPRFHWFIFFKHKTRSKTHIYKNNTITDNNSFEGYIFDPNEVAWYRISFALIPSGFSPSSSSAGLLCWVSDESGPKTMLLSNPILGSITQLPPTLKPRLFPSIGLTITPSSIDVTAAGDDMISPYAVKNLSSESFHIDASGFYSIWGTTSSLPRLCSLESGRMVYSQGKFYCMNCSPFSVLAYDIATNTWFKIQAPMRRFLRSPNLVECNGKLLLVAAVEKSKLNVPKSLRVWSLQGCGSVWVETERMPQQLYVQFADMENGNGFECVGNGEFIVIMIKGSDKGLVYDIGRKRWQWIPPCPYAGYDGFELHGFAYDPRLATPVTALLDQLAMPLPQF

SEQ ID NO: 417 - protein, 1493 aa, Aquifex aeolicus VF5
MWQEYDSCGVGFVCDIYGRKSHDILKKGIQAVKNLTHRGAIGGDGKTGDGAGILTEIPVKFFMKEFKKLGYEVSSPENLAVGMFFLYEPVEDKVEEAFISEGIKVIGWREVPVNTDAVGKVALKVMPQIKQLFLDMKNIPEEERELRLFFARRKIEKKYEDKVYIPSLSTRTIVYKGMLVAPQLDNFYQDLLDEDYETSFVLFHQRYSTNTLPNWRLAQPLRYLAHNGEINTIQGNRNWMLTLQHELEHEILKGREDLIKPLVSHEESDSASLDRVFELLCLVGYKPEHAMYMLIPPAWEAIPDLPEEVRAFLEYESLLMKPWDGPAAIAFTDGKVIGAHLDRNGLRPARYVITEEGFMVLGSEVGMVDLDDQRVKEKGRLGPGDTILIELGKGVIKKSEEILKELANSKPYKEWLDKHLLRLSEIENDYKLEKPKEDPDRIRKLVAFGWSEEEIKNPIKYMAETGNEMTWAMGDDTPLPPLSEKPQLLYRYFKQRFAQVTNPPIDPIRERAVMSLRMNLGYKRNFLKETEEHAKRLQIDSPILLDYQLKAIENQKEFKVVRIPIAYPKERSYNIVELQDMAGERRISELIMDALYEEIPINDMRLGIETLQRRVEEAVREGADIIILSDRYISKYRVAIPALLALSACVKHLAKQGLAHKVSFIVETGEARDSHQIACLIGYGASAVYPYLAYEVIYELCEKGEIELPYEEAVFKYKEALEKGLLKIMSKMGISTLNSYQGAQIFDSVCLNKDFVEEFFTGTPVTLEADGLEEIEASTLARHNAAYEVEEPKLDIGGHMKARKGGEFHAWSPEVVRALHKFLKTKDYKDYKEFSRLANSQHPTFIRHLLTYKKGNPIPIEEVEPVESILRRFVTGGMSLGALSPEAHETIAEACNRLGMKSNSGEGGEDPERYWTIKNSAIKQVASGRFGVTPTYLASAKDLEIKIAQGAKPGEGGQLPGHKVNEYIAKLRHSQPGVTLISPPPHHDIYSIEDLAQLIHDLKQANPFARVCVKLVAERGVGTIAAGVAKAYADVVQISGAEGGTGASPYSSIKNAGNYWEIGLTETQRVLMENHLRDKIRVRVDGGFRTGKDVVIAALMGAEEFGFGTAAMIAEGCVMARICHTNRCPTGVATQDPNYRKKFKGKVENVMAYFKAVAQEVREILAEMGYRSLDEIIGRTDLLEVVRYDEFPGSKRIKVEALLEKYPENEPRRCMVEKNDNPAPNFNDKILEDLLPYIEEGIPVEKEYTIRNVDRTIPTKINYFISLFYGDRGLPEDTIKLTFRGTAGQSFGAFNHRGVSLTLIGDANDYVGKGMYGGRIVIIPDGVKETDKNVIMGNTCLYGATGGELFAAGVAGERFAVRNSGATAVIEGAGLHCCEYMTGGVVVVLGKVGFNLGAGMTGGHAYVLDDELDKKLNYAYVYARRLVGEEEIKELRELIEKHYEYTKSPKAKEILENWEEYVKKFWKVIPLEQCSRDPYGDSDACEVEFLGRK

SEQ ID NO: 418 - protein, 1510 aa, Sulfitobacter sp. EE-36
MTKYDDAWVAREEAKRAFMAENGLYSEEEEHSSCGVGLVVNIDGSSSRAVVENGIKALKAIWHRGAVDADGKTGDGAGIHVQIPVNFFYDQVRRTGHSPREGELIAIGQVFLPRTNFAAQETCRTIVETEVLRMGYYIYGWRHVPVDTSVLGEKANATRPEIEQILISNAKGVDEETFERELYVIRRRIEKAALAAQVPTLYIASMSCRSIIYKGMMLAQDVANFYPDLMDERFESAFAIYHQRYSTNTFPQWWLAQPFRMLAHNGEINTLKGNVNWMKSHEIRMASGTFGDMAEDIKPIVAAGSSDSAALDSVFEVLVRAGRSAPMAKTMLVPESWSKQAVELPQAWRDMYSYCNSVMEPWDGPAALAMTDGRWVCAGLDRNGLRPMRFVVTGDGMLIAGSEAGMVPQDEANVVRKGALGPGQLLAVDIEEGKMFGDTEIKDKLAASRPFGEWVGKINELDKALGDVEEKALFSGDELRRRQVAAGYTIEDLEQILAPMAEDAKEPLASMGDDTPSAVLSNQYRPLSHFFRQNFSQVTNPPIDSLREFRVMSLKTRFGNLKNVLDESSAQTEILVLDSPFLANAQFDQLMTEFNANSVTIDCTFEPGGNSLSENLRRIRDEAEDAVRSGAGHIVLTDQFSDATRVAMPMILATSAVHSQLTRKGLRTFTSLNVRSAECVDPHYFAVLIGCGATVVNAYLAEDSLADRIGRGLLDMTLTTAMARYREAIDQGLLKIMAKMGISVMSSYRGGLNFEAVGLSRAMCAEYFPGMTSRISGIGVTGIQRKAEAVHDRGWQGDGVVMPIGGFYKARKSGETHAWEASSMHMLQMACNKASYQMWKQYSAKMQSNPPIHLRDLLDIKPLGAPVPIEEVESITSIRKRFVTPGMSLGALSPEAHKTLNVAMNRIGAKSDSGEGGEDPAHFVPEANGDNPSAKIKQVASGRFGVTAEYLNQCEELEIKVAQGAKPGEGGQLPGMKVTDLIARLRHSTKGVTLISPPPHHDIYSIEDLAQLIYDLKQINPRCKVTVKLVASSGVGTIAAGVAKAKADIILISGHNGGTGASPATSIKYAGLPWEMGLTEAHQVLAMNNLRDRVTLRTDGGLRTGRDIVMAAMMGAEEYGIGTAALIAMGCIMVRQCQSNTCPVGVCTQDEALRGKFTGNADKVVNLITFYATEVRELLASIGARSLDDVIGRADLLAQVSRGSAHLDDLDLNPLLITVDGAAEIVYDRNKPRNAVLDTLDSEIVRDAARFLEDGEKMQLSYAVQNTHRTVGTRVSSHIIRNFGMNNQLQPDHLTVKLTGSAGQSLGAFAAPGLKLEVSGDANDYVGKGLSGGTIVVRPSMASTIVASDNTIIGNTVLYGATKGFLFAAGRAGERFGVRNSGAHVVIEGCGSNGCEYMTGGVAVILGEIGANFGAGMTGGMAYLYNPDGKADKMLNRETLVTCPVTVEHWENQLKGLIERHLQETNSRKAEDILQHWDIEKDNFLQICPKEMLVHLPAPLSVEEHAIPAE

SEQ ID NO: 419 - protein, 1539 aa, Prosthecochloris aestuarii DSM 271
MYLENMKAMQATGLYDPQYEHDACGVGFVANIKGKKSHEIVLQGLEVLEKMKHRGACGWEKNTGDGSGILIQIPDKYLRKVCAERSIELPAEGEYAVGMVFMPPDISQRRAIEDICRQMVQAEGQKFLGFRKVPTINESLGNTAKAQEPVVKQFFVAKGKDVASDLEFERKLYVIRRRITKRVKYTAGLLGSNYFYICSLSSRTIVYKGMLLPEQVSLYYPELNDADTESAISMVHSRFSTNTFPSWDRAHPYRFLSHNGEINTLRGNINWMKAREKMFSSKLYGSEIEDIKPVIMEDGSDAAILDNSFEFLVLSGRSMAHAAMMMIPEPWTGTRDMPADKRAFYEYHSCLMEPWDGPACVTFTDGTQIGAILDRNGLRPSRYYITKDDLVVMASEAGVLDIEPERILKKDRLQPGKMFLVDTAEGRIVSDEEIKSGVSNAEPYQEWLDSNMLGLENLPELPLLNNPDEDKYSITARQKAFGYTQEDISMQLIPMANAGVEPVGSMGNDTPLAVLSNRPKMLYDYFKQLFAQVTNPPIDSIREDVITSTLVMLGTEGNLLEPDDKSCRRLRLDRPVLSNEELEKIRGIDKPGFKAVTFPIFYNVSDGGKGIDREMQDIYRRCEKEINNGTNLIILSDKGSLEKDRAPIPALLAVSGLHHFLINAGLRTKIGLILESAEPRTVHHFAVLIGYGVGAVNPYLAFESIRALCQSGQIKLDVAKAQKNYIKAIVKGVVKTMAKMGISTIQSYCGAQIFEAVGLNSQLVDAYFTRTASRIEGVGLDTIAEELCRRHQAAFPVTGNKVDRGLDTGGDRKWRHNGEYHLFGPESIHLLQHSCRTGDVELYKKYEELIDNQSEHLCTLRGLMTIKFSKNPIPLEEVEPVENILKRFKTGAMSYGSISQEAHETLAIAMNRLGGKSNTGEGGEDPVRFVKEANGDSRMSAIKQVASGRFGVTSEYLTNAEEIQIKMAQGAKPGEGGQLPATKVYPWVAKVRHSTPGVGLISPPPHHDIYSIEDLAQLIHDLKNANRFARINVKLVSTVGVGTIAAGVAKAHADVVLISGHDGGTGASPISSIMHAGMPWELGLAETHQTLVLNNLRSRIIVEADGQLKTARDIVVAALLGAEEFGFATTALVVMGCIMMRACQNDSCPVGVATQNPELRKNFTGKPEHVENFMRFLAEGVRQYMAKMGIRTLNELVGRTDLLEMKKAVSHWKAEGLDLSKILYQADPGEQNQSLYNTCSQEHGLEDSLDMQTLLKICEPAIKRGEKVNSNLPIRNTNRVVGTMVGNEVTKVHGGKGLADDTIHLKFYGSAGQSLGAFIPKGMTLELEGDANDYIGKGLSGGRIVVYPPKQSTFVPEENIIVGNVAFYGATSGEAYIRGMAGERFCVRNSGLEAVVEAVGDHGCEYMTGGTVVILGPTGKNFAAGMSGGVAYVYDADRKFSARCNCEMVGLDIIEDEHEIARLHGMIERHASYTGSACAKAILEEWAEAKDRFIKVIPHDYKRAMEAMEAVSNAGMTGEEAVMSAFLKNIHDPARLSGN

SEQ ID NO: 420 - protein, 328 aa, Arabidopsis thaliana; identical to SEQ ID NO: 370

SEQ ID NO: 421 - protein, 1522 aa, Shigella flexneri 2a str. 2457T
MRGARMTRKPRRHALSVPVRSGSEVGFPQSLGEVHDMLYDKSLERDNCGFGLIAHIEGEPSHKVVRTAIHALARMQHRGAILADGKTGDGCGLLLQKPDRFFRIVAQERGWRLAKNYAVGMLFLNKDPELAAAARRIVEEELQRETLSIVGWRDVPTNEGVLGEIALSSLPRIEQIFVNAPAGWRPRDMERRLFIARRRIEKRLEADKDFYVCSLSNLVNIYKGLCMPADLPRFYLDLADLRLESAICLFHQRFSTNTVPRWPLAQPFRYLAHNGEINTITGNRQWARARTYKFQTPLIPDLHDAAPFVNETGSDSSSMDNMLELLLAGGMDIIRAMRLLVPPAWQNNPDMDPELRAFFDFNSMHMEPWDGPAGIVMSDGRFAACNLDRNGLRPARYVITKDKLITCASEVGIWDYQPDEVVEKGRVGPGELMVIDTRSGRILHSAETDDDLKSRHPYKEWMEKNVRRLVPFEDLPDEEVGSRELDDDTLASYQKQFNYSAEELDSVIRVLGENGQEAVGSMGDDTPFAVLSSQPRIIYDYFRQQFAQVTNPPIDPLREAHVMSLATSIGREMNVFCEAEGQAHRLSFKSPILLYSDFKQLTTMKEEHYRADTLDITFDVTKTTLEATVKELCDKAEKMVRSGTVLLVLSDRNIAKDRLPVPAPMAVGAIQTRLVDQSLRCDANIIVETASARDPHHFAVLLGFGATAIYPYLAYETLGRLVDTHAIAKDYRTVMLNYRNGINKGLYKIMSKMGISTIASYRCSKLFEAVGLHDDVVGLCFQGAVSRIGGASFEDFQQDLLNLSKRAWLARKPISQGGLLKYVHGGEYHAYNPDVVRTLQQAVQSGEYSDYQEYAKLVNERPATTLRDLLAITPGENAVNIADVEPASELFKRFDTAAMSIGALSPEAHEALAEAMNSIGGNSNSGEGGEDPARYGTNKVSRIKQVASGRFGVTPAYLVNADVIQIKVAQGAKPGEGGQLPGDKVTPYIAKLRYSVPGVTLISPPPHHDIYSIEDLAQLIFDLKQVNPKAMISVKLVSEPGVGTIATGVAKAYADLITIAGYDGGTGASPLSSVKYAGCPWELGLVETQQALVANGLRHKIRLQVDGGLKTGVDIIKAAILGAESFGFGTGPMVALGCKYLRICHLNNCATGVATQDDKLRKNHYHGLPFKVTNYFEFIARETRELMAQLGVTRLVDLIGRTDLLKELDGFTAKQQKLALSKLLETAEPHAGKSLYCTENNPPFDNGLLNAQLLQQAKPFVDERQSKTFWFDIRNTDRSVGASLSGYIAQTHGDQGLAADPIKAYFNGTAGQSFGVWNAGGVELYLTGDANDYVGKGMAGGLIAIRPPVGSAFRSHEASIIGNTCLYGATGGRLYAAGRAGERFGVRNSGAITVVEGIGDNGCEYMTGGIVCILGKTGVNFGAGMTGGFAYVLDESGDFRKRVNPELVEVLSVDDLAIHEEHLRGLITEHVQHTGSQRGEEILANWSTFATKFALVKPKSSDVKALLGHRSRSAAELRVQAQ

SEQ ID NO: 422 - protein, 1074 aa, Glycine max
MEAVLRHQKAFGYSSEDVQMVIESMAAQGKEPTFCMGDDIPKTALSQKPHMLFDYFKQRFAQVTNPAIDPLREGLVMSLEVNIGKRRNILETGPENASQVMLSSPVLNEGELESLLKDSYLKPQVLPTFFDISKGIEGSLEKALNKLCEAADEAVRNGSQLLILSDHSEALEPTHPAIPILLAVGTVHQHLIQNGLRMSASIVADTAQCFSTHQFACLIGYGASAVCPYLALETCRQWRLSNKTVNLMRNGKMTTVSIEQAQKNYCKAVKAGLLKILSKMGISLLSSYCGAQIFEVYGLGKEVVDLAFRGSVSKIGGLTFDEVARETLSFWVKAFSEDTAKRLENFGFIQFRPGGEYHANNPEMSKLLHKAVRQKSQSAFSVYQQYLANRPVNVLRDLLEFKSDRAPIPVGKVEPASSIVQRFCTGGMSLGAISRETHEAIAIAMNRIGGKSNSGEGGEDPVRWKPLTDVVDGYSPTLPHLKGLQNGDTATSAIKQVASGRFGVTPTFLANADQLEIKIAQGAKPGEGGQLPGKKVSMYIARLRNSKPGVPLISPPPHHDIYSIEDLAQLIFDLHQVNPKAKVSVKLVAEAGIGTVASGVAKGNADIIQISGHDGGTGASPISSIKHAGGPWELGLTESHQTLIENGLRERVILRVDGGFRSGVDVMMAAIMGADEYGFGSVAMIATGCVMARICHTNNCPVGVASQREELRARFPGVPGDLVNYFLYVAEEVRGILAQLGYEKLDDVIGRTDLFQPRDISLAKTQHLDLNYILSNVGLPKWSSTEIRNQEPHTNGPVLDDVLLADPEVADAIENEKVVNKTIKIYNIDRAVCGRIAGVIAKKYGDTGFAGQLNITFTGSAGQSFACFLTPGMNIRLVGEANDYVGKGIAGGELVITPVDKTGFEPEDAAIVGNTCLYGATGGQVFVRGRAGERFAVRNSLAEAVVEGAGDHCCEYMTGGCVVVLGKVGRNVAAGMTGGLAYILDEDDTFIPKVNREIVKIQRVSAPVGQMQLKSLIEAHVEKTCSTKGAAILKDWDKYLSLFWQLVPPSEEDTPEANAKYDTTTADQVTYQSA

SEQ ID NO: 423 - protein, 1536 aa, Antithamnion sp.
MQVSKYFTHQLSQFSGYPSIVSERDACGVGFIANLNSKPSNKIVTEALNALSCMEHRGGCGADNISGDGAGVTIQIPWDIFISEGINFLPKLQSNQSILNYGVRMILRSSDDLDKIKKIFSWALDEYQLDLISWRNVPVDKSILGEESKFNQPLVVQCIVRSNNLIDYKLDKHLYLVRKKIEKLVSKLDINTNKQFYICSFSSKTIVYKGMLRSEFLVKYYNDLSNSLYVSNFAMYHRRFSTNTMPKWSLAQPMRFMAHNGEINTLLGNLNWNKSKESLLKSSIWSDYYDILSPITNLENSDSANLDSVLELFIHSGRTPQEALMILIPEAYKNQPALSLFPEITDFYEYYSILQEPWDGPALVVFTDGKFVGATLDRNGLRPARYTITDDGFISLSSETGVSNINSQNVVTKGRLGPGQMLCVDLSKNLVLDNWMIKQQISQKFPYKEWVNKYQSNLNLLEYLNDFTFDKVQMNRWHTAFGYTNEDVELVIEHMASSAKEPTFSMGDDTPLPILSEKPHLIYDYFKQRFAQVTNPAIDPLRESLVMSLITYLGPKGNILEPTAIMAKSIKLESPIINENELAQLNSFNLSVVTVPTFIDKHLSTQTFVDKILEICSQCDSYISQGIEILVLSDRIEILPVDKIFVSPLLIVGAVHHYLIKKQLRHKVSLVIDTGQCWTTHHFALLIGYGASAICPYLAFLTVRQWWHNSRTQKLMSTGKLSRLTIQESQDNYRSAIEKGLLKILSKMGISLLSSYHGAQIFEILGLGQDVVDLAFSGTVSRLNGMTLNELYEDSLKSYNLAFITEIPKKLPNLGYVQYRPSAEYHVNNPEMSKTLHKAVRNNDNILYSKYKSLLNDRRPTNLRDLLELKTDRQPISIDQVEDVNSVLMRFCTGGMSLGALSRETHETLAIRMNRIGGKSNSGEGGEDSTRFKSIQDLDTSGVSRTFSHLKGLKINDLASSAIKQIASGRFGVTPEYLVNAKQLEIKIAQGAKPGEGGQLPGKKVSPYIAELRNCKPGVTLISPPPHHDIYSIEDLAQLIFDLHQINPDAQVSVKLVASLGIGTIAAGVAKGNADIIQISGHDGGTGASPLSSIKHAGAPWDVGLAEVHTTLVENSLREKVILRVDGGLRTGKDIIIAALMGAEEFGFGTVAMIATGCVMARVCHTNNCPVGVATQRQDLRNRFPGIPSDVVNFFIFVAEEVREILAELGYKSLEELIGLNDLFKVKDIELSKTKNLNLNILFNSINMNRNLIPKLKHKTVHTNGNVLDDILLSKSNIINAINLQSNIVQDIEILNTDRCVGARISGLITKMYGRDNFNGNLQLNFVGSAGQSFGAFISKGIHLYLKGEANDYVGKGMNGGEIIICPPIEQKTSSSNQVILGNTCLYGATGGYLFANGQAGERFAVRNSNGYSVVEGVGDHACEYMTGGLIVVLGTFGRNIGAGMTGGIAYFLDEDNTLKNKLNTEIVKAQRLLTKESEEQLKNIMELYEIKTKSEKAKLILDNWSQYLAKFYQIVPPSEQIQHLLMLIFFFSKYC

SEQ ID NO: 424 - protein, 2410 aa, Ustilago maydis 521
MSVLGTHQSDALNRIFAGLKSRDEATRQAAGEELKSHVALVVSELKGDSLSSFNNDLHRRIFELAHSQHVHEKLGGVIAIEDLIEQESEDNSARLYRFYQYLKPNLPCNDASVMIAASRALGRVAYHGGQSLGEQFIEYEVLRVLDFLQAGDRNESGRYAAVLIIREMAKRVPQQFHPYVPRVLDRIWVALRDVRVIVREGAAEAMGACLGIIAAREKQMGSHFFESIYEEAEKGLKMSAPEAIHGSLLAVQQLLQHSKTFMRNRFQRACELVFRLHKHRDPLIRRTITNLVPVLARYDPHYFAEEHLRAVMGILTEQLRREKDRSPKESAQTFETIGFVAAAMGPRMKPFIEPVLACVKEGLQMRGKKNAPPEGPIFLCVGNLATAVGPHLTRYMHDLLDLMFSCGLSIPLVTALDGIVKAIPPLMKVVQDRLLDMLSMTLIGQPYRPLGAPASLRPSANASRDVVAAQTVESKGVETITVALQTLGRFDFQGHILNEFVRNCTLPYLEDDHAAVRQAAAETCADLFVNDPICRQTSMHAIEVVNDVLDKLMTVGIADPDPELRWTVLSKFGAQEQFDRHLAQSEYVRSLFIALNDEKFKVREVAIVIIGRLAKHNPAYVMPSLRKALIQLLTELEYSTVSRHKEEAAKLLTEVVRASQRLVKSYALPMLEVLLPKANDPSVGVAARVMECLGELAKVGGEDLAPNVDQLMRLAIDQLSSTAPGSSTAKRDAALKTLGLVASNTGHVVNPYLTYRNLLGTVVKILKTEQSKPVRRETIRVMGILGALDPYRYKLLEKNGDEGQDETSKGSGTDLFELALAIGTSTDDYYQNIAIDALITILKDPSLSTHHHAVIEAIMYMFKTQGLKCVTFLPQIIPAFLNVIRTCGTGLSEFYFQQLAILISIIKQHVRSYLEPIFELVQENWNPNSSIQLTIVSLVEAVAKALEGEFKSYLPILLPNMLQTLDGEITSKRQPTLLRILQAFYVFGSNIEEYLHLVLPVVVKMFERPDASQTLRRAAILTVGNLSRKVSFCDHASRVIHPLVRVLPTGTSDIRNAVMETLSALVVQLGASYAIFIPVVNKVLIQNRIQHATYDQLVSKLLNGERLPQDLSAADNALGSKIDESPQAEANKMTVNQQHLKQAWDTSKVSTSEDWQEWLRRMAVEFMRESPSHALRACRSLADVYPALAYGLFNVAFVSCWTELYEQYQSDLVKALETAFDAPEVPGDVVHMLLNLAEFMEHDDKALPINIRVLGDRAYKFHSYAKALHYKEAEFLTDPSPQVVESLIDINTKLQQSDAAFGALTYAREHLDITHHEEWYEKLHRWEEALTAYDRKAMLDPDDYGVAFGKMRCLHALGEWEHLSDLVQQKWGRADMEDRRHMAPLAAAAAWSLGQWDTMDDYISAMRSDSSERSFYRAILHTHRSQRAAANKQIAKARESLDSELTALISESYGRAYDLMVRTQMLSELEEALAYKLDYKEQPDRQATIRSTWMKRLKGCQPEVEVWQRILSVRSIVLTPADDTETWIKFANLCRKSGRMVLAEKTLNSLLGPERTNADPRSPIGPRAPPPVIYAHLKFMWASGARIESLSYLQEFTLNLAEDLGVHTVDEHGNLVTQDWQSSPHLGEFARLLARCFFKQGEWQMSLRENWVTDDNSNVIESYRRATELDRNWYKAWHAWALANFEVISHHEERNEQITPQMIAASIVPSVQGFFRSIALASGNSLQDTLRLLTLWFKYGHQEDVSQAVSEGFASVIVDTWLEVIPQIIARITAPSPRVRRLIHNLLSDVGLAHPQALVYPLTVAAKSPSHMRIQAAMGIMDNVREHSPVLVEQALLVSNELIRVAILWHEMWHEGLEEASRLYFTEDNIDAMFATLEPLHDALEKGPETLRETSFAQTHGRDLAEARECGRRFRQYGDISDLNQAWDLYYHVFKKIAKQLPAGNSVQLDLQYVSPKLLAMRDLELAVPGTYQSGKPIVCITRFEQIVLVIASKQHPRRLKMKGSDGKTYQYLLKGHEDLRQDERVMQLFGLVNTLLSIDSESYKRRLEIRRFPVIPLSPNTGMLGWVENTDTLHVLIKEYREQHKILLNIEHRLMLQMAPDYDHLTLMQKVEVFEYALDNTPGQDLYRVLWLKSRNSESWLERRLAYTRSLAVSSVAGYILGLGDRHPSNLLLDRLTGQIVHIDFGDCFEIACHRPKFPEKVPFRLTRMLVNAMEVGGIKGTFKVTAENTMRVLRDNKESVLALLEAFVHDPLISWRLVADDGAERAPDAKENEAVAAEGGAASGTATGAVTGAANVGAGGTVAPNQRQDQALYPAAGAPGGGIALPPTATATATAAAAAAPNAVQAGGQDMRNQRALEVVRRIQNKLSGRDFNPAESLSVAAQIERLVQDATSKENLCVAFVGWCSFW

SEQ ID NO: 425 - protein, 1529 aa, Mycobacterium avium 104
MHMTPKRAGLYNPAFEHDACGVAMVVDMHGRRSRDIVDKAITALLNLEHRGAQGAEPRSGDGAGILIQVPDAFLREVVDFELPPEGSYATGIAFLPQSSKDAATACAAVEKIAEAEGLTVLGWRNVPTDDSSLGALSRDAMPTFRQVFMAGASGMTLERRAYLVRKRAEHELGTKGPGQDGPGRETVYFPSLSGQTFVYKGMLTTPQLKAFYLDLQDDRLTSALGIVHSRFSTNTFPSWPLAHPFRRIAHNGEINTVTGNENWMRAREALIKTDVFGTEADVEKLFPICTPGASDTARFDEVLELLHLGGRSLAHAVLMMIPEAWERHESMDPARRAFYQYHASLMEPWDGPASMTFTDGTVIGAVLDRNGLRPSRIWVTEDGLVVMASEAGVLDLDPATVVRRMRLQPGRMFLVDTAQGRIVSDEEIKAELAAEHPYQEWLDRNLVPLDDLPQGDYKRMPHDRLVKRQQTFGYTYEELNLLVAPMVRTGAEPIGSMGTDTPVAVLSQRPRMLYDYFQQLFAQVTNPPLDAIREEVVTSLQGTTGGERDLLTPTELSCHQIVLSQPILRNRELAKLVNLNPDDEVNGRPHGMRSKVIRCLYPVAEGGAGLAAALEDVRAQASAAIADGARVIILSDRESDEKMAPIPSLLAVAGVHHHLVRDRTRTHVGLVVESGDAREVHHMAALVGFGAAAINPYMVFESIEDMLDRGVIEGIDRNTALNNYVKAAGKGVLKVMSKMGISTLASYTGAQLFQAVGISEDVLDEYFTGLSCPIGGITLDDIAADVAARHALAYLDRPNERAHRELEVGGEYQWRREGEYHLFNPETVFKLQHATRTGQYKIFKDYTRLVDDQSERMASLRGLLKFRAGVRPPVPLEEVEPASEIVKRFSTGAMSYGSISAEAHETLAIAMNRLGGRSNSGEGGEDVKRFDRDPDGSWRRSAIKQVASGRFGVTSHYLTNCTDIQIKMAQGAKPGEGGQLPGHKVYPWVAEVRHSTPGVGLISPPPHHDIYSIEDLAQLIHDLKNANPAARVHVKLVSENGVGTVAAGVSKAHADVVLISGHDGGTGATPLTSMKHAGAPWELGLAETQQTLLLNGLRDRIVVQVDGQLKTGRDVMIAALLGAEEFGFATAPLVVSGCIMMRVCHLDTCPVGVATQNPVLRERFTGKPEFVENFFMFIAEEVREYMAQLGFRTLNEAVGQVKSLDTTLARAHWKAHRLDLGPVLHEPESAFMNQDLYCSSRQDHGLDKALDQQLIVMSREALDSGKPVRFSTTISNVNRTVGTMLGHEVTKAYGGQGLPDGTIDITFDGSAGNSFGAFVPRGITLRVYGDANDYVGKGLSGGRIVVRPSDNAPADYVAEDNIIGGNVILFGATSGEAYLRGVVGERFAVRNSGAHAVVEGVGDHGCEYMTGGKVVVLGRTGRNFAAGMSGGVAYIYDPPGEFPQHLNAEMVELESLDDDDIEWLHGMIQAHVDATDSAVGQRILGDWAQQQRHFVKVMPRDYKRVLQAIAEAERDGGDVDKAIMAAAHG

SEQ ID NO: 426 - protein, 187 aa, Selaginella moellendorffii
HSDNESGGGNYSSVKEQERFLPIANVSRIMKKVLPGNAKISKDAKETVQECVSEFISFITGEASDKCKREKRKTINGDDLLWAMGALGFEDYTDPLKLYLQRYRETEGEKANVKQQGGGGGGAGGGGDFQQFQNQNGGGGMMAMGSLIQQQQQSQGYAPGGSSSRYGGSSQQSYWMQGGSSAAGQPR

SEQ ID NO: 427 - protein, 412 aa, Zea mays
  misc_feature (13)..(13): Xaa can be any naturally occurring amino acid
MGNQAGGRGIAGXDERYTRPQGLYPHPDIDLRKLRRLILEAKLAPCHPGADDARADLDECPICFLFYPSLNRSKCCAKGICTECFLQMKSPTSCRPTQCPYCKTLNYAVEYRGVKTMEEKGIEQLEEQRVIEAQIRMRQQEVQDDAERMKNKRTATLGDVVASAQVDSCNTDGASTAVANSPRGNDVLSSEVQHSELISRNSEAFKQMRGNNFEVDLEEVMLMEAIWLSIQDQEALGNPGCVSTTPSSIPSRPFDDGDMTTTAEAASSGGFACAVAALAEQQHMHGQSSSASACQTTRFDILSRSDRSFTEDLSVVGNSSSDSRVDEPSSSSTHRTVEGSNGWWSEVAEAGTRIAESDVTVEAGVGNSSTSAVSNIGSGSVPDSFEEQMMLAMALSLVDARARAGSPGLAWR

SEQ ID NO: 428 - protein, 385 aa, Arabidopsis thaliana
  misc_feature (5)..(5): Xaa can be any naturally occurring amino acid
  misc_feature (22)..(22): Xaa can be any naturally occurring amino acid
  misc_feature (86)..(86): Xaa can be any naturally occurring amino acid
  misc_feature (104)..(104): Xaa can be any naturally occurring amino acid
  misc_feature (106)..(106): Xaa can be any naturally occurring amino acid
  misc_feature (132)..(132): Xaa can be any naturally occurring amino acid
  misc_feature (139)..(139): Xaa can be any naturally occurring amino acid
  misc_feature (142)..(144): Xaa can be any naturally occurring amino acid
  misc_feature (152)..(152): Xaa can be any naturally occurring amino acid
  misc_feature (163)..(163): Xaa can be any naturally occurring amino acid
  misc_feature (282)..(282): Xaa can be any naturally occurring amino acid
  misc_feature (287)..(287): Xaa can be any naturally occurring amino acid
  misc_feature (291)..(291): Xaa can be any naturally occurring amino acid
  misc_feature (301)..(301): Xaa can be any naturally occurring amino acid
  misc_feature (319)..(319): Xaa can be any naturally occurring amino acid
  misc_feature (376)..(376): Xaa can be any naturally occurring amino acid
HEDLXQDERVMQLFGLVNTLLXNSRKTAEKDLSIQRYSVIPLSPNSGLIGWVPNCDTLHHLIREHRDARKIILNQENKHMLSFAPXYDNLPLIAKVEVFEYALXNXEGNDLSRVLWLKSRSSEVWLERRTNXTISLAVXSSXXXILGLGDRXPSNLMLLDTVXKILHIDFGDCFEASMNREKFPEKVPFRLTRMLVKAMEVSGSEGNFRSTCENVMQVLRTNKDSVMAMMEAFVHDPLINWRLFNFNEVPQLALLGNNNPNAPADVEPDEEDEDPADIDLPXPQRSXSREXRLLQPVNMLXMPNEPLNERAVVVMARMXHKLTGRDFSSSAIPSNPIADPNNLLGGDSHEVEHGLSVKVQVQKLINQATSHENLCXNYVGWCPFW

SEQ ID NO: 429 - protein, 1315 aa, Oryza sativa Japonica Group
MARQARAQARNGWHGDLSGVGGSGIEREREQREGGKKERERALSCSGLERRTCLARAGKDGGERRDGLRGNGRGEEIGPRTRGRQNRLFREDLIRDRLRRHDGTDATGMQVEEPEKCMQYGTIEMLAALFPGIETCGVGKQVFMILHSNPGRAPNQPTLTSRIGCRCSPHTPNQRRCSSSYTPDLVQVLRPLGDSFRRTVDGPMRSTLTFDNNHSVVPSQNIDYGQPMFHPQIVGGGTSPRVPLPSLEIADDGPIYVNPKQYHGILRRRQLRAKLEAQNKLVKTRKPYLHESRHRHAMKRARGTGGRFLNTKQLQLQQQSHTTSTKTTTDSQNSSGSVHLRLGGGAIGDQTPFPFKAMDSQANIKRAAASASTFTVTSAAQKDDAFFDRHGHHLSSFSGHFGQASAQGGVGSMHNGDEEQPRISAAPRLCPSGVNVILRREKTTGNPRDNPREIVGIGSVQIKTHDGMTRTLKDVRHIPGIARNLISLSTLDAEGYKYSGSGGVVKVSKGSLVYMIGDMNSANLYVLRGSTLHGSVTAAAVTKDEPSKTNLWHMRLGHMSELGMAELMKRNLLDGCTQGNMKFCEHCVFGKHKRVKFNTSVHRTKGILDYVHADLWGPSRKPSLGGARYMLTIIDDYSRKVWPYFLKHKDDTFAAFKEWKVMIERQTEREVKVLRTDNGGEFCSDAFDDYCRKEGIVRHHIIPYTPQQNGVAERMNRTIISKSRCMLSNARMNKRFWAEAANTACYLINRSPSIPLNKKTPIEVWSGVKGYKLWNPETNKTFMSRSVVFNESVMFNDSLPTDVIPGGSDEEQQYVSVQVEHVDDHETEIVGNDVNNTVQHSPPVLQPQDEPIAHRRTKRSCGAPVRFIEECDMVYYAFSCAEQVENTLEPATYTEAVVSGDREKWISAMQEEMQSLEKNGTWELVHLPKQKKPVRCKWIFKRKEGLSPSEPPRFKARLVAKCFSQIAGVDYNDVFSPVVKHSSIRTFFSIVAMYDLELEQLDVKTTFLHGELEEEIYMDQPEGFIVPGKEDYVCKLKRSLYGLKQSPRQWYKRFDSFMLSHGFKRSEFDSCVYIKFVNGSPIYLLLYIDDMLIAAKSKEQITTLKKQLSSEFDMKDLGAAKKILGMEITRDRNSGLLFLSQQSYIKKVLQRFNMHDAKPVSTPITPHFKLSALQCASTDEDVEYMSRVPYSSAVGSLMYAMVCSRPDLSHAMSLVSRYMANPGKEHWKAVQWIFRYLRGTADACLKFGRTDKGLVGYVDSDFAVDLDKRRSLTGYVFTIGSCAVSWKATLQPVVAQSTTEAEYMAIAEACKESVG

SEQ ID NO: 430 - protein, 433 aa, Glycine max
MGGKSSKGSGRRYDFGASSSSRDNNYGGYHPQSPYPSYQTPQHPRASAPFYDYAQPKRKLDKKYSRIADNYRSLDEVTAALANAGLESSNLIVGIDFTKSNEWTGKRSFNRKSLHDIRSGQNPYEQAISIIGKTLSAFDEDNLIPCFGFGDASTHDQDVFSFYSEERFCNGFEEVLTRYRQIIPSLKLAGPTSFAPIIEMAMTIVEQSGGQYHVLLIIADGQVTRSVDTQNGNLSPQEQNTIDAIVKASEYPLSIVLVGVGDGPWEMMREFDDNIPSRAFDNFQFVNFTEIMTRNVDSTRKETDFALSALMEIPSQYKATLELGILGSRRGHSPDRVALPPPLYSRTSSSISTKSTRSNSFQQRTPTHTSYDSSVHTETSSSSLYDNKVCPICLTNAKDMAFGCGHQTCCECGEDLQFCPICRSTIHTRIRLY

SEQ ID NO: 431 - protein, 425 aa, Oryza sativa
MGNRIGGRRKAGVEERYTRPQGLYEHRDIDQKKLRKLILEAKLAPCYMGADDAAAAADLEECPICFLYYPSLNRSKCCSKGICTECFLQMKPTHTAQPTQCPFCKTPSYAVEYRGVKTKEERSIEQFEEQKVIEAQMRMRQQALQDEEDKMKRKQNRCSSSRTITPTKEVEYRDICSTSFSVPSYRCAEQETECCSSEPSCSAQTSMRPFHSRHNRDDNIDMNIEDMMVMEAIWRSIQEQGSIGNPVCGNFMPVTEPSPRERQPFVPAASLEIPHGGGFSCAVAAMAEHQPPSMDFSYMAGSSAFPVFDMFRRPCNIAGGSMCNLESSPESWSGIAPSCSREVVREEGECSADHWSEGAEAGTSYAGSDIVADAGTMPQLPFAENFAMAPSHFRPESIEEQMMFSMALSLADGHGRTHSQGLAWL

SEQ ID NO: 432 - protein, 539 aa, Pseudomonas fluorescens Pf-5
MSLSLLSRYAFFAACVIFTLASLPFLEHDWLWPFALVTGLLSLLGIFDLLQSPHAVRRNYPILGNIRYLVEGIRPEIRQYLLESDSDALPFSRAQRSLVYSRAKNESADKPFGTLIDVYQSGFEFIGHSMRPAPLSDPNSFRVTVGGPQCTQPYSASVFNISAMSFGSLSANAIRALNQGAKLGNFAHDTGEGSISPYHREHGGDLTWELGSGYFGCRTSDGRFDPERFAVQAQNPQVRMIEIKMSQGAKPGHGGILPKHKVTQEIADTRGIRMGEDCISPSSHSAFSTPIEMMHFIQQLRELSGGKPVGFKFCLGHPWEFMGIAKAMLETGILPDFIVVDGKEGGTGAAPVEFTDHIGAPMREGLLFVHNTLVGLNLRDKIKLGASGKIVSAFDIASVLAIGADWANSARGFMFAIGCIQSQSCHTNKCPTGVATQDNLRQRALVVPDKAQRVFSFHRNTLKALAEMLAAAGLQHPSQLEAKHLVRRMSATEIKLFSQLHVFLKPGELLTGEVNGEFYSRMWQLARADSFEPNTEAAA

SEQ ID NO: 433 - protein, 428 aa, Zea mays; identical to SEQ ID NO: 174

SEQ ID NO: 434 - protein, 355 aa, Triticum aestivum
  misc_feature (313)..(313): Xaa can be any naturally occurring amino acid
HASEDENRLSRRELFISDNLLVQKYTQCPPDVISDPLDDFEGVPSEEADETQRQPRSHQVNDVRLRSAGEASQRSTREDWAEWMRHFSIALLKESPSPALRTCARLAQLQPSVGRELFAAGFASCWAQMTESSQEQLVRSLKTAFSSQNIPPEILATLLNLAEFMEHDEKPLPIDTRLLGALAEKCRAYAKALHYKEMEIEAVCSKKMGANPVTVVESLMHINTQLHQHEAAIGILTYSQQHLEVQLKESWYEKLHRGDEGLTAYTMKSSQASGPLQHTQNWDAKLGRMRCLTSLARWGDLSTLCREQGIGAXPPARLEMAQRVGNAALHLGEWDQSSEFFLPLDNGDKNTPALG

SEQ ID NO: 435 - protein, 169 aa, Zea mays
  misc_feature (13)..(13): Xaa can be any naturally occurring amino acid
YHEAGVGVVASGXLVKGHADHVLISGHDGDTGSFKMDRFNNAGLSWELELADTHQTLVSNGLLGRAVLQTHGQLKTGRDVAGACLLGAQEFGFSTDPLITLGCLMMRKCHMNTCPAGIATQDPVLREKFAGEPQHVINFFFMLAEELREIMANLGFRTITEMVGRSDML

SEQ ID NO: 436 - protein, 1490 aa, Vitis vinifera
MEHRGGCGADNDSGDGSGLMTSIPWDLFNNWAKEQRIGSFDRLHTGVGMVFLPKDDDLMKEAKTVIDNSFKQEGLEVLGWRPVPVDISIVGYYAKETMPNIQQVFVRVVKEENIDDIERELYICRKLIERAVKSETWGNELYFCSLSNQTIVYKGMLRSEVLGNFYLDLKSDIYKSPFAIYHRRYSTNTSPRWPLAQPMRLLGHNGEINTIQGNLNWMQSREASLKSPVWRGRENEIRPFGNPKASDSANLDSTAELLIRSGRSAEESLMILVPEAYKNHPTLMIKYPEVVDFYNYYKGQMEAWDGPALLLFSDGKTVGACLDRNGLRPARYWRTIDNVVYVASEVGVLPMDESKVVMKGRLGPGMMISVDLTSGQVYENTEVKKQVALSNPYGKWVNENMRSLRPVNFLSATVMDNEGILRHQQAYGYSSEDVQMVIETMAAQAKEPTFCMGDDIPLAVISQRSHMLYDYFKQRFAQVTNPAIDPLREGLVMSLEVNIGKRGNILEVGPENASQVNLSSPVLNEGELESLLKDPHLKPRVLPTFFDIRKGVEGSLQKRLNKLCEAADEAVRNGSQLLVLSDRSDELEPTRPGIPILLAVGAVHQHLIQNGLRMSASIVADTAQCFSTHHFACLIGYGASAVCPYLALETCRQWRLSNKTVNLMRNGKMPTVTIEQAQKNFCKAVQSGLLKILSKMGISLLSSYCGAQIFEIYGLGREVVDLAFCGSVSSIGGLTLDELARETLSFWVKAFSEDTAKRLENFGFIQFRPGGEYHGNNPEMSKLLHKAVRQKSESAFSVYQQHLANRPVNVLRDLLEFKSDRSPIPLGKVEPAASIVQRFCTGGMSLGAISRETHEAIAIAMNRLGGKSNSGEGGEDPIRWSPLTDVVDGYSPTLPHLKGLQNGDTATSAIKQVASGRFGVTPTFLANADQLEIKIAQGAKPGEGGQLPGKKVSAYIARLRNSKPGVPLISPPPHHDIYSIEDLAQLIFDLHQVNPKAKVSVKLVAEAGIGTVASGVAKGNADIIQISGHDGGTGASPISSIKHAGGPWELGLSESHQTLIENGLRERVILRVDGGFKSGVDVMMAATMGADEYGFGSVAMIATGCVMARICHTNNCPVGVASQREELRARFPGVPGDLVNFFLYVAEEVRGILAQLGFEKLDDVIGRTDLLRPRDISLVKTQHLDLSYILSNVGLPKWSSTEIRNQDVHSNGPVLDDIILADPETSDAIENEKVVNKSIKIYNVDRAVCGRIAGVVAKKYGDTGFAGQLNITFTGSAGQSFACFLTPGMNIRLIGEANDYVGKGMAGGELVVTPVEDTGFLPEDATIVGNTCLYGATGGQIFVRGKGGERFAVRNSLAEAVVEGTGDHCCEYMTGGCVVVLGKVGRNVAAGMTGGLAYILDEDDTLIPKVNKEIVKIQRVTAPVGQMQLKSLIEAHVEKTGSSKGSAILKEWDTYLPLFWQLVPPSEEDTPEASAEFERTDASQVTLQSA

SEQ ID NO: 437 - protein, 226 aa, Triticum aestivum
FQHFVDSSGPVLVQLALRTLANFNFKGHELLELARESVILYLEDEDSSTRKAAAICCCRLVAHSLSASSTSQFSSNRSNRMGGAKRRRLVEEIVEKLLIAAVADADVGVRSSVFRALYRNPTFDDFLAQADILTSIFVALNDEEYGVRELAILVAGRLSEKNPAYVLPALRRYLIQLLTYLDQSMDSKCREESARLLGCLIRSCPWLILPYIAPIHKALVARLCEG

SEQ ID NO: 438 - protein, 188 aa, Glycine max
MADSDNDSGGAHNAGKGSEMSPREQDRFLPIANVSRIMKKALPANAKISKDAKETVQECVSEFISFITGEASDKCQREKRKTINGDDLLWAMTTLGFEDYVEPLKGYLQRFREMEGEKTVAARDKDAPPPTNATNSAYESPSYAAAPGGIMMHQGHVYGSAGFHQVAGGAIKGGPVYPGPGSNAGRPR

SEQ ID NO: 439 - protein, 207 aa, Vitis vinifera
MADSDNDSGGAQNNNSGGNVNSELSAREQDRLLPIANVSRIMKKALPANAKISKDAKETVQECVSEFISFVTGEASDKCQREKRKTINGDDLLWAMMTLGFEEYVEPLKVYLQKFREVEGEKTAVGRQVEKDGGGSSGDGGNGGVVNTGNFGSGYGAMQQTMMMMGHHQHHQGHVYGSGSYHQMGSGSRPTSGGSSSGGGAATGRPR

SEQ ID NO: 440 - protein, 341 aa, Arabidopsis thaliana
MMHQMLNKKDSATHSTLPYLNTSISWGVVPTDSVANRRGSAESLSLKVDSRPGHIQTTKQISFQDQDSSSTQSTGQSYTEVASSGDDNPSRQISFSAKSGSEITQRKGFASNPKQGSMTGFPNIHFAPAQANFSFHYADPHYGGLLAATYLPQAPTCNPQMVSMIPGRVPLPAELTETDPVFVNAKQYHAIMRRRQQRAKLEAQNKLIRARKVPYLHESRHVHALKRPRGSGGRFLNTKKLLQESEQAAAREQEQDKLGQQVNRKTNMSRFEAHMLQNNKDRSSTTSGSDITSVSDGADIFGHTEFQFSGFPTPINRAMLVHGQSNDMHGGGDMHHFSVHI

SEQ ID NO: 441 - protein, 1536 aa, Mycobacterium sp. JLS
MGPVPSGLYNPAYEHDSCGVAMVADMHGRRSRDIVDKAITALLNLEHRGAQGAEPNTGDGAGILLQVPDEFFRAVVDFDLPEPGSYATGIAFLPQSSKDAATACEQVQKIAEAEGLTVLGWRDVPTDDSSLGALARDAMPTFRQVFMAGASGDPSAPRVRGMDLERRAYVVRKRAEHELGTKGPGQDGPGRETVYFPSLSGQTFVYKGMLTTPQLRAFYLDLQDERLTSALGIVHSRFSTNTFPSWPLAHPFRRVAHNGEINTVTGNENWMRAREALIRTDVFGTQADLDKIVPVCTPGASDTARFDEVLELLHLGGRSLPHAVLMMIPEAWERHESMDPARRDFYRYHASLMEPWDGPAAVCFTDGTVIGAVLDRNGLRPSRIWVTEDGLVVMASEAGVLDLDPSTVVQKMRLQPGRMFLVDTAQGRIVSDEEIKAELAAEHPYGEWLEAGLFQLEELPPGDYVRMPHHRVVLRQQAFGYTYEELNLLVAPMARTGAEPIGSMGTDTPVAVLSQRPRMLFDYFQQLFAQVTNPPLDAIREEVVTSLQGVIGPEGDLLNPTAESCRQIVLPQPILRNAELSKLICVDPDHEIRGHKHGMRAAVIRCLYPVNRGGQGLKEALNHVRAKVSAAIRDGARIIVLSDRESDEQMAPIPSLLSVSAVHHHLVRERTRTQVGLVVEAGDAREVHHMAALCGFGAAAINPYMAFESIEDMVDRGVITGISSDQAKANYVKAAGKGVLKVMSKMGISTLASYTGAQLFQAIGIDQTVLDEYFTGLNCPVGGIDLDDIAAEVAARHALAYLDRPDERAHRELEVGGEYQWRREGEYHLFNPDTVFKLQHSTRTGQYSVFKEYTQLVDDQSERMASLRGLLKFKDGVRQPIPIDEVEPASEIVKRFSTGAMSYGSISAEAHETLAIAMNRLGGRSNSGEGGEAVTRFDRDDNGDWRRSAIKQVASGRFGVTSHYLSNCTDIQIKMAQGAKPGEGGQLPGHKVYPWVAEVRHSTPGVGLISPPPHHDIYSIEDLAQLIHDLKNANPQARVHVKLVSENGVGTVAAGVSKAHADVVLISGHDGGTGATPLTSMKHAGAPWELGLAETQQTLLLNGLRDRIVVQVDGQLKTGRDVVIAALLGAEEFGFATAPLVVSGCIMMRVCHLDTCPVGVATQNPVLRERFNGKPEFVENFFMFIAEEVRETMAQLGFRTVNEMVGQVGVLDTTEAAEHWKAHKLDLSPVLHEPESAFMNQDLYCSSRQDHGLDKALDQQLIVMCREALDSGTPVKFSTTIANVNRTVGTMLGHEVTKAYGGQGLPDGTIDITFDGSAGNSFGAFVPQGITLRVYGDANDYVGKGLSGGRVVVRPAENAPADYVAEDNIIAGNVILFGATSGEMFLRGQVGERFAVRNSGAVAVVEGVGDHGCEYMTGGKVVILGPTGRNFAAGMSGGMAFVYDPAGALPDNLNAEMVELDALDDENVSWLHGMLQAHVDATDSAVGQRILNNWEEELKHFVKVMPRDFRRVLAAIAEAERTGADKNEAIMAAASG

SEQ ID NO: 442 - protein, 1495 aa, Bacillus sp. SG-1
MFLLKEQRTQWSPELFKDFHNGAHDACGIVASIEKNKIPARENIDRCIEALITMDHRAGFINGEGDGAGIHIDIPRAVWSEKLEAASIDSSLALSPRFTIGHFFIKGIPVNQGTQEIVDKLEKQGFQVLLTDLDSTRPDTLGPIAAQENPHFLQAALLAPENQEKTKTYKQLFELLASIEENSAIHVASLSPDHAVYKVMGAGASLPKYYKDLTNPKVASTMTLGHNRYSTNTLSNFFRVQPFSVIGHNGEINTISKLRAEAKKIDVPLVENGSDSQDLNRTIETLIGRDGYSLFEAMELVFPPIINEIKQYPGHLQDLYTYLRETWGHFAQGPAGIISRFGEEAVFSVDSLGLRPLWLMEIESAYVFASEPGVIKSSEFTGDPKPLSPGEKVGFAWENDRITKYEYKEFQSEIYSRFESRIDFKGYKSRLETLNLPKHIMMSYPTSIENGQYNAFGWEREQVQLVEQMAEKGAEPIRSLGHDAPLAAINPNRKNVTDFIKESVAVVTNPAIDRDRETEHFSTRTIIGKRPHHNSKTEKHLAVELLTPLVIEGKAGWMASETLQQPSYDGLVHLFQQENLCHFISTTFTESETIQEALTRLADEAQEAVSSGKSLLVLDDGNSHHDGNLWLDPHLVLAAIDQRLTDVSLRRDCSLLIRSAAIRSLHDVIVAYGFGADVISPYYMFLTVLEEESNEPVLNLYTSLQKGLEKVISTIGIHELRGYGRLFSAIGLSDEVAETLNIVNFFGSASLAFNYEEMKKDAIQRAADYFDEKQRIAKSFHLFPRIWKAIGDVARTGDYSGYREKITEQEETKPVTIRHLTSLKKSEKTIDPSKVDISVGEHSLPFAIASMSFGSQNEIAFRAYAEAADRLNMVSLNGEGGEIKDMIGKYPKTRGQQVASGRFGVNAELLNSSNLLEIKIGQGAKPGEGGHLPGSKVTAKIAQARNATIGSDLISPSNNHDIYSIEDLAQMIHELKTANDQAKVAVKVPVVPNIGTIAVGIAKAGADIVTLSGFDGGTGAARIHALQHVGLPVEIGVKAAHNALLEAGLRDTVEIWADGGIKSMQDVMKVMLLGANRIGFGTLSMIAIGCTTCRGCHLDTCHVGIATQIESEAQAKDHGLRRFVPRQLDLAVSGLTNLFTAFGEELKALAASIGVQRLQDAVGRSDLLEQVSGKDSMNLSTLLQPLEIGQFHKEAAASLEQPNMLQAVAGEYLDSSVDELHLSREFSGVISNQRVLGSRASGHRVRSKLQNLSSELQPVQLSYKDCSIPGNGLGAYNVDGINITVSGGAQDGLGKSSYGGTITVTKGRTKNNHFFNGSAGKGFGYGAQQGLLMVQGNADARAGIRLSGADMVIGGLITKPIPAKEYGNIGANANIKGFAFEYMTNGRGLVLGDPGPWICAGMTGGVVYLRHQPEMGLTQEALNRRIAKGAKVQLQPLNDQGLEDVTELLTNYINVLENEQPEEAESLRKLLASPGDHFLQVIPSKEQADPSVSTE

SEQ ID NO: 443 - protein, 1518 aa, Mycobacterium sp. MCS
MLYSATPGAQGLYDPEHEKDSCGVAMIADIRGRRSHSIVADGLVALEHLDHRGAAGAETNSGDGAGILLQLPVELFTEVVDFDLPQPTADGCNTFAAGICFLPQDPVARAEACRQVEALAAEEHLEVLGWRTVPVDPDGADVGATARSCMPYMAQLFVAAPEVDGARPGGIELDRRVYPLRKRAENSADVYFPSLSSRTIAYKGMLTTVQLPLYFSDLRDARCTSAIAIVHSRFSTNTFPSWPLAHPFRFVAHNGEINTVRGNRNRMHAREAMLASANIPGDLSRLSPICTPDASDSASFDEVLELLHLGGRSLPHAVLMMIPEAWENNTSMDADERAFWQFHASLMEPWDGPACVTFTDGTLVGAVLDRNGLRPGRWWRTIDDRIILASESGVLDVPPEQIVAKGRLQPGKMLLIDTAAGRIVSDDEIKLGLSKAEAYGEWLHAGLLELGTLPDRARVQPNHESVVRRQISFGYTEEELRILITPMAASGAEPLGSMGTDTPSAVLSERSRPLYDYFVELFAQVTNPPLDAIREEVVTSMARIMGPEQNLLEPTAASCRQILLKWPVLDNDELNKIVHINDDGEHPGLRATVLKALYDVERGGEGLADALDDLRTRASDAIADGARTLVISDRDSDHTRAPIPSLLAVSAVHHHLVRTKQRTKVALVVESGDAREVHHVAMLIGFGAAAVNPYLAFETIEDLIREGELTGIEATAAVRNYLKALGKGVTKVMSKMGISTVASYTAAQAFEAVGIDRDVVDEYFTGTPTQLGGIDLDVIAEEVKLRHRRAYPENPTERVHRRLEVGGEYAFRREGELHLFTPEVVFLLQHSTRTGREDVFRQYSEEVDRLSRDGGTLRGLFEFKKGARPPVPLDEVESAAEIVKRFNTGAMSYGSISAEAHETMAIAMNNLGGRSNSGEGGEDVDRLYDPRRRSAVKQVASGRFGVTSDYLVNATDIQIKMAQGAKPGEGGQLPGYKVYPNIAKTRHSTPGVGLISPPPHHDIYSIEDLAQLIHDLKNANDRARIHVKLVSSVGVGTVAAGVSKAHADVVLISGHDGGTGAAPLTSLKHAGAPWEIGLADAQQTLVLNGLRDRITVQCDGGMRTARDVMVAMLLGAEEFGFATAPLVVAGCIMMRVCHLDTCPVGVATQNPELRARFNGKPEFVENFFRFIAEDIRRYLAEMGFRSVDEAVGHAEILDTATGVEHWKSKGLDLTPIFTVPTDAHSGRTQRRKLKDQYHALDQALDQTLIQLSEGALEDAHPVTLELPVRNVNRTVGTLLGAEVTRRYGAAGLPDDTIRVKLTGSAGQSIGAFLPPGITIELTGDANDYVGKGLSGGRIIVKPADDVLFLPEDNVIAGNTLLYGATSGEVFLRGKVGERFCARNSGALAVVEGVGDHACEYMTGGRVVVLGRTGRNMAAGMSGGIAYVLGLNPARVNTAMVELQRLDPEDLVWLHDVVARHARNTGSTVATSVLSDWPRRSAQFTKIMPSDYQRVLEATRMAKAEGRDVDTAIMEASRG

SEQ ID NO: 444 - protein, 455 aa, Solanum pimpinellifolium
  misc_feature (366)..(366): Xaa can be any naturally occurring amino acid
MEAFHHPPISFHFPYAFPIPTPTTNFLGTPNSSSVNGMIINTWMDSRIWSRLPHRLIDRIIAFLPPPAFFRARVVCKRFYGLIYSTHFLELYLQVSPKRNWFIFFKQKVPRNNIYKNVMNSSNSGVCSVEGYLFDPDNLCWYRLSFALIPQGFSPVTSSGGLICFVSDESGSKNILLCNPLVGSIIPLPPTLRPRLFPSIGLTITNTSIDIAVAGDDLISPYAVKNLTTESFHIDGNGFYSIWGTTSTLPRLCSFESGKMVHVQGRFYCMNFSPFSVLSYDIGTNNWCKIQAPMRRFLRSPSLVEGNGKVVLVAAVEKSKLNVPRSLRLWALQDCGTMWLEIERMPQQLYVQFAEVENGQGFSCVXHGEYVVIMIKNNSDKALLFDFCKKRWIWIPPCPFLGNNLDYGGVGSSNNYCGEFGVGGGELHGFGYDPRLAAPIGALLDQLTLPFQSFN

SEQ ID NO: 445 - protein, 345 aa, Hypocrea jecorina
MMEYAQYPQQQHNSHAGYASSAAGASITSPTSHGINQHAVQSSPVNASQQQQQQQQQQQQQQQQQQQQQQQQQQQQQQQQQQQSQQQHQPAQAPAHGMYQPQYGVPQPSMQQVPYGIPGIQAAAMAATAAASGSGYPYMHSDPSMPHTSPRMPSAKKDGRPSPRMNSISQIPGRRMSQVTSPGVPSAPGMMNHGGPRPPPMPPAPAMQHPQSPEMPAGAVEESPLYVNAKQFHRILKRRVARQRLEEQLRLTSKGRKPYLHESRHNHAMRRPRGPGGRFLTAEEVAAMESKGGLDGKGEGSDDVSPGKSSDAPSGKRKSESGPSTSSKKPKTQSDNGEGNAEDAS

SEQ ID NO: 446 - protein, 504 aa, Idiomarina baltica OS145
MQSQSWFDNSALLTVAQWLVALFVLGIITLVVSVGVMYVVDKIQTRHTIRRNYPVVGRFRYIFERMGEFMRQYFFAMDREEMPFNRAQRSWVYRAAKNADRNVAFGSTRDLTRTGTIIFSNAPYPPLAEQSVSPQPVKIGPYCEKPYSPTSYFHISGMSYGALSPVAVKALSAGAKKAGCWLNTGEGGLSPYHLSGHCDVVFQMGTAKFGVRTKDGKLDESRLAELGRHDSVKMFEIKLSQGAKPGKGGILPGIKVNQEIAEIRGIKVGEDAISPNRHPEISNNEELLDFIDKVRTITGKPTGFKFVMGDPSWIDELVDSILSRGEEAAPDFITLDSADGGTGAAPQPLIDYVGLKLSESLPILVDKLTEAGLHKRIRIICSGKMISPADVAWAIAMGADFVVSARGFMFSLGCIQAMQCNKNTCPTGVTTDDPKLQRGLDPQDKSERVANYHKYLEYGVNIIAHSCGVTDPRQLNRRHARVIKPDGESISLAERYPLPPARRR

SEQ ID NO: 447 - protein, 552 aa, Oryza sativa
  misc_feature (476)..(476): Xaa can be any naturally occurring amino acid
MGGGQSRSPRDGSGHGRYGHSPSFQQQWGGGGGGGGGGGGGYPYGQDAHGGGYYGAPAPQGGYAAPYPAYQQPPPPMPSPAATQPPARAGGASKPRLDRRYSRIADDYHSVDQVTDALAQAGLESSNLIVGIDFTKSNEWLGKFSFHGRSLHHISNAPNPYEQAISIIGQTLSKFDEDNLIPCFGFGDATTHDQDVFCFYPDLRPCNGFSEALSRYRELVPHLRLAGPTSFAPIIEMAMTIVEQSGGQYHVLLIIADGQVTRSVDTASGQLSSQEQKTVDAIVRASELPLSIVLVGVGDGPWDMMKEFDDNFPSRAFDNFQFVNFSEIMNKNMPQSRKEAAFALSALMEIPQQYKATVELGILGRRSFKSPERVPLPPPGGSHDAYSYGSKSFSKPSTYPQSSTSSSSYPHYETAQSSSPAVPSSTYDNQVCPICLVNPKDMAFGCGHQTCCDCGQSLESCPICRSPISTRIKLYXQWQFGSFANGWHTGDHLVSHWAMDCIGCFKCNPCKAFERLADKPVKYWVCIDKDRKASNPLLQDCGAGDVSSIETH

SEQ ID NO: 448 - protein, 1502 aa, Photorhabdus luminescens subsp. laumondii TTO1
MSVSFCESRTEPREVHTMLYNKSQEKDNCGFGLIAHIEGEPSHKVVRTAIHALARMQHRGAILADGKTGDGCGLLLQKPDRFFRMVAQEQEWHLARNYAVGMLFLSQDPQIAQNCRAIIEQELQNETLSVVGWREVPINRDILGEIALSSLPHIEQIFVNAPAGWRARDLERRLFVARRRIEKRINDSDFYVCSLSNLVTIYKGLCMAADLPRFYPDLADLRLESAICLFHQRFSTNTVPRWPLAQPFRYLAHNGEINTITGNRQWARARAYKFKTPLIPDLHTAAPFVNETGSDSSSLDNMLELFLNGGMDLIRAMRLLVPPAWQNNPDMDEDLRAFFDFNSMHMEPWDGPAGIVMSDGRYAACNLDRNGLRPARYVITKDKLITCASEVGIWDYQPDEVVEKGRVGPGELIVIDTRQGRILHAEETDNDLKSRHPYKEWMDKNVKRLTPFEELLEDQAGHRDLNDQSLAVYHKQFAYSNEELDQIIRVLGENGQEATGSMGDDTPFAVLSSRPRIIYDYFRQQFAQVTNPPIDPLREAHVMSLTTCIGREMNVFCEAEGQAHRLSFKSPILLYSDFHQLITQQSPHYRAEQLDLTFNPQETNLQNALFALCDQAEQLARDGAVLLVLSDRNITPNKLPIPAPMAIGAIQHRLVEKNLRCDTNLIVETASARDPHHFTVLLGFGATAIYPYLAYESLAKMVDNGTINKPYADVMLNYRNGINKGLYKIMSKMGISTIASYRCSKLFEAVGLHSELTEFCFNGVVSRIGGANFSDFEQDLRNLSKRAWLARQPLDQGGLLKYVHNGEYHAYNPDVVSTLQAAVHSGEYNDYLKYSRLVNQRPITTIRDLLAIKTEAEPLPIEEVEPAEELFKRFDTAAMSIGALSPEAHEALAEAMNTLGGFSNSGEGGEDPARYGTKKVSRIKQVASGRFGVTPAYLVNADVIQIKVAQGAKPGEGGQLPGDKVTPYIAKLRYSVPGVTLISPPPHHDIYSIEDLAQLIFDLKQINPNALISVKLVSEPGVGTVATGVAKAYADLITIAGYDGGTGASPLSSVKYAGCPWELGLVETQQALVANGLRHKIRLQVDGGLKTGVDIIKAAILGAESFGFGTGPMVALGCKYLRICHLNNCATGVATQDEKLRRDHYHGLPERVMNYFRFIARETREIMATLGVKNLTDLIGRTDLLEVLEGISAKQSKLNLDPLLATAEPHQGKTLYCTENNPPFDNGALNKNLLTQAASYIENQQSKTFYFDIRNTDRSVGASLSGFIAARYGNQGIAAAPIKIHFNGTAGQSFGVWNAGGLELTLIGDANDYVGKGMAGGRIVIHPPVGSAFKSHQATLIGNTCLYGATGGKLFAAGRAGERFAVRNSGAITVVEGIGDNGCEYMTGGIVCILGRTGINFGAGMTGGFAYVLDENDDFRKRVNLELVEVLAVDALAIHEEHLRGLITEHVLLTGSQRGEDILANWQQWLSKFALVKPKSSDVKALLGHRSRSSAELRIQAQ

SEQ ID NO: 449 - protein, 218 aa, Vitis vinifera
MADSDNDSGGAQNNNSGGNVNSELSAREQDRLLPIANVSRIMKKALPANAKISKDAKETVQECVSEFISFVTGEASDKCQREKRKTINGDDLLWAMMTLGFEEYVEPLKVYLQKFREVEGEKTAVGRQVEKDGGGSSGDGGNGGVVNTGNFGSGYGAMQQTMMMMGHHQHHQGHVYGSGSYHQMGSGSRPTSGGSSSGGGAATGRPRLMWIMKMKMKK

SEQ ID NO: 450 - protein, 2454 aa, Arabidopsis thaliana
MSTSSQSFVAGRPASMASPSQSHRFCGPSATASGGGSFDTLNRVIADLCSRGNPKEGAPLAFRKHVEEAVRDLSGEASSRFMEQLYDRIANLIESTDVAENMGALRAIDELTEIGFGENATKVSRFAGYMRTVFELKRDPEILVLASRVLGHLARAGGAMTSDEVEFQMKTAFDWLRVDRVEYRRFAAVLILKEMAENASTVFNVHVPEFVDAIWVALRDPQLQVRERAVEALRACLRVIEKRETRWRVQWYYRMFEATQDGLGRNAPVHSIHGSLLAVGELLRNTGEFMMSRYREVAEIVLRYLEHRDRLVRLSITSLLPRIAHFLRDRFVTNYLTICMNHILTVLRIPAERASGFIALGEMAGALDGELIHYLPTIMSHLRDAIAPRKGRPLLEAVACVGNIAKAMGSTVETHVRDLLDVMFSSSLSSTLVDALDQITISIPSLLPTVQDRLLDCISLVLSKSHYSQAKPPVTIVRGSTVGMAPQSSDPSCSAQVQLALQTLARFNFKGHDLLEFARESVVVYLDDEDAATRKDAALCCCRLIANSLSGITQFGSSRSTRAGGRRRRLVEEIVEKLLRTAVADADVTVRKSIFVALFGNQCFDDYLAQADSLTAIFASLNDEDLDVREYAISVAGRLSEKNPAYVLPALRRHLIQLLTYLELSADNKCREESAKLLGCLVRNCERLILPYVAPVQKALVARLSEGTGVNANNNIVTGVLVTVGDLARVGGLAMRQYIPELMPLIVEALMDGAAVAKREVAVSTLGQVVQSTGYVVTPYKEYPLLLGLLLKLLKGDLVWSTRREVLKVLGIMGALDPHVHKRNQQSLSGSHGEVPRGTGDSGQPIPSIDELPVELRPSFATSEDYYSTVAINSLMRILRDASLLSYHKRVVRSLMIIFKSMGLGCVPYLPKVLPELFHTVRTSDENLKDFITWGLGTLVSIVRQHIRKYLPELLSLVSELWSSFTLPGPIRPSRGLPVLHLLEHLCLALNDEFRTYLPVILPCFIQVLGDAERFNDYTYVPDILHTLEVFGGTLDEHMHLLLPALIRLFKVDAPVAIRRDAIKTLTRVIPCVQVTGHISALVHHLKLVLDGKNDELRKDAVDALCCLAHALGEDFTIFIESIHKLLLKHRLRHKEFEEIHARWRRREPLIVATTATQQLSRRLPVEVIRDPVIENEIDPFEEGTDRNHQVNDGRLRTAGEASQRSTKEDWEEWMRHFSIELLKESPSPALRTCAKLAQLQPFVGRELFAAGFVSCWAQLNESSQKQLVRSLEMAFSSPNIPPEILATLLNLAEFMEHDEKPLPIDIRLLGALAEKCRVFAKALHYKEMEFEGPRSKRMDANPVAVVEALIHINNQLHQHEAAVGILTYAQQHLDVQLKESWYEKLQRWDDALKAYTLKASQTTNPHLVLEATLGQMRCLAALARWEELNNLCKEYWSPAEPSARLEMAPMAAQAAWNMGEWDQMAEYVSRLDDGDETKLRGLASPVSSGDGSSNGTFFRAVLLVRRAKYDEAREYVERARKCLATELAALVLESYERAYSNMVRVQQLSELEERIQGSKRNVEVWQALLAVRALVLPPTEDVETWLKFASLCRKSGRISQAKSTLLKLLPFDPEVSPENMQYHGPPQVMLGYLKYQWSLGEERKRKEAFTKLQILTRELSSVPHSQSDILASMVSSKGANVPLLARVNLKLGTWQWALSSGLNDGSIQEIRDAFDKSTCYAPKWAKAWHTWALFNTAVMSHYISRGQIASQYVVSAVTGYFYSIACAANAKGVDDSLQDILRLLTLWFNHGATADVQTALKTGFSHVNINTWLVVLPQIIARIHSNNRAVRELIQSLLIRIGENHPQALMYPLLVACKSISNLRRAAAQEVVDKVRQHSGALVDQAQLVSHELIRVAILWHEMWHEALEEASRLYFGEHNIEGMLKVLEPLHDMLDEGVKKDSTTIQERAFIEAYRHELKEAHECCCNYKITGKDAELTQAWDLYYHVFKRIDKQLASLTTLDLESVSPELLLCRDLELAVPGTYRADAPVVTISSFSRQLVVITSKQRPRKLTIHGNDGEDYAFLLKGHEDLRQDERVMQLFGLVNTLLENSRKTAEKDLSIQRYSVIPLSPNSGLIGWVPNCDTLHHLIREHRDARKIILNQENKHMLSFAPDYDNLPLIAKVEVFEYALENTEGNDLSRVLWLKSRSSEVWLERRTNYTRSLAVMSMVGYILGLGDRHPSNLMLHRYSGKILHIDFGDCFEASMNREKFPEKVPFRLTRMLVKAMEVSGIEGNFRSTCENVMQVLRTNKDSVMAMMEAFVHDPLINWRLFNFNEVPQLALLGNNNPNAPADVEPDEEDEDPADIDLPQPQRSTREKEILQAVNMLGDANEVLNERAVVVMARMSHKLTGRDFSSSAIPSNPIADHNNLLGGDSHEVEHGLSVKVQVQKLINQATSHENLCQNYVGWCPFW

SEQ ID NO: 451 - protein, 1513 aa, Lentisphaera araneosa HTCC2155
MDKKQLGFNTQDLGLYSPSMEKDNCGAGFICDLNGRKSNKIIHNALEILVRLTHRGAVSADGKTGDGAGILMKIPHDFFVKDCRKNEIFLPEEGRYAVGMVFLPQDNEQRRKCMGAFKRSVTEEGLNLLGWREVPVNTDALGRIAKETEPKVMQVFVGRGEEELSEEEFGIRLYISRKAVENEIRESDMCEKNFFYIPSFSTTTIIYKGLIKPEDMSEYYPDLVNEEFVTNLALVHQRFSTNTFPTWDLAQPFRYMCHNGEINTLRGNVNRMRARQELFESELFGDRVEKIKPVVIEGRSDSASLDNAVELMVNTGRSLPEVMMTLVPEAWEKHQDMSDEKKAFYEYASCIMEPWDGPASIPFTDGHCIGAILDRNGLRPSRYTVTKDGLVIMSSEIGVVDVDPANVEYHGRLEPGRMFLVDMEEGRIVDDAEIKNRVVKSQPYGDWVKDNLIHFGQIPAVEFENKVEETSLTDRKKIFGYSLEDEKIILSAMGETGKEAIGSMGTDTPLAVLSDKPRLIFDYFKQLFAQVTNPPLDGIREEVVTSLKLTIGSAHNVFEQGGLHCKKLSVETPFLTNGELEKLRSLDQEDLRAVTIPILFKANTGVNGLDQALNEIILKAINAVDAGKTLIILSDRGVNKKNAAIPVLLAASFIHHALTKFGRRSRCGIIVETAEAREIHHFATLFGYGVSAINPYMAYEVLDEMIDKGMLTVDHDKAVANYIKAAGTGLVKVMTKIGISTLHSYRGAQIFEILGLKKDFVDRFFTHTATRIEGADLSEIHKDTVKRHKQAFPTEETAGKIEVNVGGDYQWRRNGERHMFNPHTVSRLQLAVRDNLPQSYEQFAKMINDQSERLMTIRGLMVFRDQNPIPLEEVEPWTEIVKRFKTGAMSYGSISSEAHENLAIAMNRIGGKSNSGEGGENPARFEKDENGDWRRSAIKQVASGRFGVTSHYLTNADEIQIKMAQGAKPGEGGQLPGEKVFPWIAECRNSTPYVGLISPPPHHDIYSIEDLAQLIYDLKNANRTARVNVKLVSEVGVGTIAAGVAKAKADVILVSGFDGGTGASPLTSLKHCGLPWELGIAEAQQTLVMNDLRNRIVLECDGQLKTGRDVAIAALLGAEEFGFATAPLVASGCIMMRVCHLNTCPVGIATQDPELRKRFKGKPEHVVNYMRFVAEELRQIMAELGFRTISEMVGQSEKLEMRKAIDHYKAQGLDYSKILYKPEVAEGTKLFNTEVQDHELDEVIDFTLLEKTKAAIEKQEKVSFEINTCNTDRSVGAILSNEISKIYGKEGLPEDTIDMTFHGSAGQSFGAFSTKGLTMRVEGETNDYLGKGLSGAKLIIKPAKTATYVAKDNIITGNVTLYGAVTGEAYINGIAGERFCVRNSGAKAVVEGVGDHGCEYMTGGVAVILGETGRNFAAGMSGGVAYVLDPTNKFKELNCNMEMIGFEKVEVEADVTELKQLITNHFNYTNSPVAEDILNNWDAKVGQFVKVMPHDYKRALERIAREQEEAAQV

SEQ ID NO: 452 - protein, 1631 aa, Ralstonia metallidurans CH34
MCGASRSCTPLRSRCLTSSLEEARTQPSRSVCLAGCAAFTGIQPVDHSQQSSELAARPQAQGLYDPSNEHDACGVGMVAHIKGKKSHEIISQGLKILENLDHRGAVGADALMGDGAGILIQIPDQFYREEMAKQGVTLPPAGEYGVGMIFLPKEHASRLACEQELERTVRLEGQVVLGWRDVPVDANMPMSPTVRKTEPVIRQIFIGRGRDIMTTDALERKLYVIRKTASHAIQALKLKHGKEYFVPSMSARTVVYKGLLLANQVGEYYLDLLDARAVSALALVHQRFSTNTFPAWELAHPYRMVAHNGEINTVKGNVNWVNARTGAISSPVLGDDLPKLWPLIYPGQSDTASFDNCLELLTMAGYPLVHAMMMMIPEAWEQHTLMDDNRRAFYEYHAAMMEPWDGPAAICFTDGRQIGATLDRNGLRPARFYVTEDDFVVLASEAGVLPFPESRIVQKWRLQPGKMFLIDMEQGRIIDDKELKDNLANAKPYKSWIDAVRIKLDELEAKAEDVAAEKKPVARLLDRQQAFGYTQEDVKFLMAPMALAGEEATGSMGNDSPLAVLSSKNKTLYNYFKQLFAQVTNPPIDPIRENMVMSLVSFIGPKPNLLELNNINPPMRLEVSQPVLDFKDIAKIRNIEHYTGGKFRSYELNICYPVAWGKEGIEARLASLCAEAVDAVRSGYNILIVTDRRVDDGQVAIPALLATSAIHHHLVEKGLRTSAGLVVETGSAREVHHFALLAGYGAEAVHPYLAMETLADMASGLSGDLSPEKAVKNFVKAIGKGLHKVMSKMGISTYMSYTGAQIFEAIGLSRELVQKYFHGTPSNVEGIGIFEVAEEALRLHRDAFGSNPVLENMLEAGGEYAFRIRGEEHMWTPDSIAKLQHSVRADDGKGQYQTYKEYANIINDQSRRHMTLRGLFEFKVDPARAIPLEEVESAKDIVKRFASGAMSLGSISTEAHTTLAVAMNRIGGKSNTGEGGEDEKRYRNELRGIPIKQGDTLKGLLGDGVIERDLELKAGDSLRSKIKQVASGRFGVTAEYLASADQIQIKMAQGAKPGEGGQLPGHKVSDYIGKLRYSVPGVGLISPPPHHDIYSIEDLAQLIHDLKNVNPVSDISVKLVSEVGVGTVAAGVAKAKADHVVIAGHDGGTGASPLSSIKHAGTPWELGLAETQQTLMLNGLRNRIRVQADGQMKTGRDVVIGALLGADEFGFATAPLVAEGCIMMRKCHLNTCPVGVATQDPALRKKFQGKPEHVVNFFFFVAEEAREIMAQLGIRTFDELIGRADLLDMRAGIEHWKARGLDFGRIFYQPPFPADVPRYHTDVQDHGLSAEAGKALDHVLIAKARPAIDKGERVSFIQPVKNVNRTVGAMLSGVIAKQHGHEGLADDTIHIQFQGTAGQSFAAFLAHGITMDLVGDANDYVGKGLSGGRVIVRAPHEFRGDPTRNIIVGNTVLYGAIAGEAFFNGVGGERFAVRNSGATAVVEGTGDHGCEYMTGGTVVVLGGTGRNFAAGMSGGVAYVYDEDGLFDKRCNTSMVALEAVLASADQEKGQPKAQWHKFGGERTADEVILRNLIEQHFRYTGSERAKALLADWTTARRKFVKVFPTEYKRALGEMYAKEQAARDNDREAVAA

SEQ ID NO: 453 - protein, 444 aa, Pseudomonas syringae pv. phaseolicola 1448A
MSDPISNKPAPVLRESATFDRLTIQEIQRAAETGIYDIRGGGTKRKLPHFDDLLLLGASVSRYPLEGYREKCGTDVVLGNRFAKKPLYLKIPVTIAGMSFGALSANAKEALGRGATIAGTSTTTGDGGMTPEERGQSQHLVYQYLPSRYGMNPDDLRKADAIEIVLGQGAKPGGGGMLLGMKVTERVAGMRTLPVGVDQRSACRHPDWTGPDDLAIKIAEIREITDWEKPIYVKIGASRPYYDVKLAVKAGADVIVLDGMQGGTAATQEVFIEHVGIPILPAIPQAVQALQEMGMHRKVQLIVSGGIRNGADVAKAMALGADAVAIGTAALIALGDNHPRLDEELRKIGSAAGYYDDWQNGRDPAGITTQDPELSKRLDPVEGGRRLANYLRVLVLEAQTMARACGKSHLHNLDPEDLVALTVESAAMARVPLAGTSWIPGSGY

SEQ ID NO: 454 - protein, 233 aa, Glycine latifolia
METGGFHGYRKLPNTTSGLKLSVSDMNMNMRQQQVASSDQNCSNHSAAGEENECTVREQDRFMPIANVIRIMRKILPPHAKISDDAKETIQECVSEYISFITGEANERCQREQRKTITAEDVLWAMSKLGFDDYIEPLTMYLHRYRELEGDRTSMRGEPLGKRTVEYATLGVATAFVPPPYHHHNGYFGAAMPMGTYVREAPPNTASSHHHHHHHHHHARGISNAHEPNARSI

SEQ ID NO: 455 - protein, 1546 aa, Trichodesmium erythraeum IMS101
MNQSHTNLKADQGTYQGQRWLVEERDACGVGFIAHPSGKKSHEIILKALPALTCLEHRGGCSADKDSGDGAGLMTQIPWELLSENLELNPDNCGVGMIFLPQTEKKAAIVRQIIEKKIRNEGLEVVGWRVVPVVPERLGVQAKINQPQIEQIVVSSDKLQGDELERSLYLIRRNIGRVIEEEGLSWGIDTYICSFSCRTIVYKGMVRSAVLGEFYTDLKNPAYKSSFAVYHRRFSTNTMPRWPLAQPMRLLGHNGEINTLLGNINWMRAREASLSSSLWESRLDELKPFVDNQNSDSANLDNVMELMVRSGGSPLEALMIMVPEAYKNQPDLIDYPEITDFYEYYSGLQEGWDGPALLAFSDGKQVGAALDRNGLRPARYCITNNDLVIVASEAGVVEIPEKEILEKGRLGPGQMIAVDLRTNEILKNWEIKKRISGQQPYREWLKNRKQIIKQPFIANSQLESQSLLQLQTAFGYSLEDLDLIITDMANLGKEPTFCMGDDIPLAVLSGRPHLLYDYFKQRFAQVTNPPIDPLREGMVMSLNMLLGKRGNLLEVSGENARLLKVESPVLNESELKAIRDSEFATETISTIFAVADGPEGLNRAVKSLCDRAVKAVENGKEILILSDKCDGGINADFTYIPPLLAVGAVHHHLIQERLRMKASLVVETGQCWSTHHFACLIGYGASAVYPYLALESVRAWWSSSKVQNQMERGKITKITIEEAQKNYRQAVEAGLLKILSKMGISLLSSYQGAQIFEAIGIGGDLLELAFRGTTSRISGLTVPELAQEVISFHGRGFLELNIKKLENYGFVQYRPTGEYHMNSPAMAKELHKAVTAINGSNGNGKNIDLTEYDHYEVYRKYLQERPITALRDLLDFHSSSPSIPLEEVEPAAEIMKRFCTGGMSLGSLSREAHETLAIAMNRIGGKSNSGEGGEDPTRFKILNDVDNQGLSQLFPHLKGLRNDDTASSAIKQVASGRFGVTPEYLMSAKQIEIKIAQGAKPGEGGHLPGKKVSAYIAKLRGSKPGVSLISPPPHHDIYSIEDLAQLIFDLHQINPNAGVSVKLVAEIGIGTIAAGVAKANADIIQISGHDGGTGASPLSSIKHAGGPWELGLTEVHRVLMENQLRDRVLLRVDGGLKTGWDIVMAALMGAEEFGFGSIAMIAEGCIMARICHLNTCPVGVATQQEKLRNKFTGVPENVVNFFWFIAEEVRTILARLGYRSLNEILGRADLLKARENVKLVKTESLNLSCLLKLPDTRNNRGWLNHDTVHSNGPVLDDVLLDDEKIQGAICNQGIVYKTGIKVVNTDRTVGARLAGAIASRYGNTGFEGLINLTFNGSAGQSFGAFNLPGMTLVLEGEANDYVGKGMHGGEIIIKPPAEGRYNSEENVIVGNTCLYGATGGILLANGQAGERFAVRNSMAKAVIEGVGDHACEYMTGGVIVCLGKAGRNVGAGMTGGIAYFFDEDGDFPARVNNEIVSIQRVSTSAGEAQLKELISLHFGKTGSPKAKMIWANWSECLPKFYQVVPPSEADTAVAKVETGSQAVVKV

SEQ ID NO: 456 - protein, 290 aa, Arabidopsis thaliana
MGNKLGRKRQIVDERYTKPQQGLYMSKDVDIKKLKKLILESKLAPCYPGLEETPSSHHDLEECPICFLEEQRVIEAKIRMRQKEVEDDEERMQKRLESYSSSSSTSAATLDTEYGSAADHSFLAKVICTTVIRVGTLNLSGSYQVTDMWLSGKLFRDGQFDFDLEDIMVMEAIWLSMQEPGIQRNTSPDDISEKDRNEEPSTPSSSSPSGGLACAIAVLAERQQMVGVSSSNQNVNLASQNLVPDNGNNSHYNAIEQDSNHYLQGAGISYTRSDMTDDSGGETSREVTWQ

SEQ ID NO: 457 - protein, 413 aa, Arabidopsis thaliana
LVVITSKQRPRKLTIHGNDGEDYAFLLKGHEDLRQDERVMQLFGLVNTLLENSRKTAEKDLSIQRYSVIPLSPNSGLIGWVPNCDTLHHLIREHRDARKIILNQENKHMLSFAPDYDNLPLIAKVEVFEYALENTEGNDLSRVLWLKSRSSEVWLERRTNYTRSLAVMSMVGYILGLGDRHPSNLMLHRYSGKILHIDFGDCFEASMNREKFPEKVPFRLTRMLVKAMEVSGIEGNFRSTCENVMQVLRTNKDSVMAMMEAFVHDPLINWRLFNFNEVPQLALLGNNNPNAPADVEPDEEDEDPADIDLPQPQRSTREKEILQAVNMLGDANEVLNERAVVVMARMSHKLTGRDFSSSAIPSNPIADHNNLLGGDSHEVEHGLSVKVQVQKLINQATSHENLCQNYVGWCPFW

SEQ ID NO: 458 - protein, 226 aa, Glycine max
MTGTKRNQITTSPVGSPTSGNISDSSSSKEQDRFLPIANVSRIMKRALPANAKISKEAKETVQECVSEFISFITGEASDKCQREKRKTINGDDLLWAMTTLGFENYVGPLKLYLNNYRETEGEKSSMAKQEEHSPTHQTNIDGVVVEINKLHHSVAATNKAADFNTFSGGGFYSVGPQVAAPKSFTEIGGINGYRESSIAQSAVSGDHDASGNRMMPPNLRYRVEW

SEQ ID NO: 459 - protein, 335 aa, Arabidopsis thaliana
MGNKLGRKRQIVDERYTKPQQGLYMSKDVDIKKLKKLILESKLAPCYPGLEETPSSHHDLEECPICFLYYPSLNRSRCCMKSICTECFLRMKSPNSAQPTQCPFCKTSNYAVEYRGGKTKEEKSFEQIEEQRVIEAKIRMRQKEVEDDEERMQKRLESYSSSSSTSAATLDTEYGSAAEDDEEIVSSQESCLPSHHPQVTRDGQFDFDLEDIMVMEAIWLSMQEPGIQRNTSPDDISEKDRNEEPSTPSSSSPSGGLACAIAVLAERQQMVGVSSSNQNVNLASQNLVPDNGNNSHYNAIEQDSNHYLQGAGISYTRSDMTDDSGGETSREVTWQ

SEQ ID NO: 460 - protein, 396 aa, Oryza sativa
MGAFCSKQNPSGQQPHCCNHSSSSNAAPKGNNRFAKFGDDYHTLEQVTDALAHAGLESSNLIVGIDFTKSNEWTGRVSFNNQSLHSLGHISNPYEQAISIIGQTLSRFDEDNLIPCYGFGDATTHDQKVFSFYPDNKPCDGFEQALDRYREIVPQLRLAGPTSFAPMIETAIGIVDSSGGQYHVLLIIADGQVTRSVDTGNGQLSPQERETIDAIVKASDYPLSIVLVGVGDGPWDMMRQFDDNIPSRAFDNFQFVNFTEIMSRPVPASKKEAEFALSALMEIPEQFKAAINLQLLGKRRGFPHRTVLPPPVRDFQQYYGCSTVKETQSTSYGSLQKKTSAPKQDSDIGDQTCPICWLEAKNLAFGCGHQTCSDCGKDLKVCPICQREISTRIRLY

SEQ ID NO: 461 - protein, 1478 aa, Bacillus thuringiensis serovar konkukian str. 97-27
MLNKTNTWTPSLFRDYKNAEHDACGIVSVMEKRKIPTKENIDLCIQSLVKMNHRAGFINGEGDGIGIHIDVPKALWNEKLKSSGYNPTIVDHPHFIVGHFFLNKNENIVDLKNHIRTQLNNENFAILFESDNVINSDALGPLGKQEEPLFWQVALIAENEVVNIEQTLFSVTIKIEENEAIHVASLSRDHVVYKVLGAGDTLVAYYNDLQHPLIASTMTLGHNRYSTNTLPNFFRVQPFSILGHNGEINTIAKLRDQAEMIHVPLTAGGSDSQDLNRTLETLLVQYGYSLFEAMDILFPPIINEIKLYETHLQDLYTYIREAWGHFAQGPAGIISRYKDEAVFSVDSLGLRPVWKVETESSYIFSSEPGVVSPTEYVAEPKPLAPGEKVGLKWNEQDELVLYEHDDYQTQVYNRFKKKVDVTNYHLHLSIPKTKEIPDACDSMQVETKQYVAFGWDREHIQLLEQMATKGVEPIRSLGHDSPLAALDTDRRNIADFIKESVAVVTNPAIDRDREVEHFSTRTILGERPSLLSDAKKPFVVEMLSPIILEGSVAQSIAQELHTITYEQLIELFNTHSSIATISATFSQAETLQCALSRISSEAITAVNDGASLLLIDDADAHLNERLWIDPHLVTAKVHQVLSENKLRRNCSLVIRSGALRSLHDIVTLYGLGADSINPYLLFATVNDGTKTPITNLYSALNKGLEKVISTIGIHELRGYGRLYSAIGLHEEIANILQITNFLGSNDLSFSLESLAEDAQMRADDYNDPKVRIRKSFHIFPRIWKAIGDVAKGNSYDDYRDKLSELEENNPIAIRHLIQTKETKHVVPAEEVSISIQNHDLPFIISSMSFGSQNEIAFRAYAEAADQLNMISLNGEGGEIKDMIGKYPHTRGQQVASGRFGVNAELLNSSNLIEIKIGQGAKPGEGGHLPGSKVTAKIAEARNATIGSDLISPSNNHDIYSIEDLAQMITEIKTANQLAKVAVKVPVVPNIGTIAVGIAKAGADFINISGFDGGTGAARIHALQHVGLPVEIGVKAAHNALLEANMRHNIEIWADGGIRSVNDALKIMLLGANRIGFGTLSMIAIGCTTCRGCHLDTCHVGIATQIESEAQAKEHGLRRFVPRELESAVAGLLHLFTTFGEELKRLTGNLGYTNLQEIVGRSDLLEQVRGKNLLNLCNLLQTIEHPSVIKTEHVLEKQFETVHSPHSKELVGVGVEQRVMGGLESCYRVRSKLYEDTKLEPLTLKYTNGSIPGNGLGAYNSENLFIHVNGGAQDGIGKTSFGGGIYITKAKGKDGLYYNGSVGKGFGYGAQKGALYVQGNADARAGIRLSGADMIIGGRMTKPLREKEQGNIGAYSNIKGFAFEYMTNGRALVLGDPGPWICAGMTGGVVYLRHDSSLGLTEQALKRRIAKGANVTLQPISKNGVRDVNELLLDYIRVLNEHEQYEEVALLTPLLDDMQQQFFEIIPKKEQADPSISTE

SEQ ID NO: 462 - protein, 449 aa, Roseovarius nubinhibens ISM
MPKKPALARDVNRIGDSFIFPPRVMDDIHIKSELGRYRMRGFSLFKKIPHWDDLTFLPGTLTRFVIEGYREKCETKTVIGPRAKRPLELDIPVYITGMSFGALSYEAKTALARGATMAGTATCSGEGGMIPDERRYSSKWFYQCIQSRYGFNPNHLVLADACEFFIGQGCKVGLGGHLMGQKVTDQVAEMRSLPAGIDQRSPARHPDWLGPDDLALKIQEIREATDWQIPIQLKLGASRVYDDVRMAVKCDPDSIYIDGMEGGTGAGPHLATEDTGVPGMAAIRQARKAIDDLGKRGEISLVYAGGIRNGADVAKAIALGADAIAIGHSAMMALNCNKDIPEANFPEEIGAEPGYCYHCHTGRCPVGVATQDPKLRERLDPDAAAERVYNFLHTLTIEAQLFARACGKTYIHSLEPEDLAALTMEASAMAGVPLAGTNHTVGVEDYHHL

SEQ ID NO: 463 - protein, 1519 aa, Nocardioides sp. JS614
MPYSHAFPPPQGLYDPRHEHDACGVAFVATLTGVASHEIIQQGISALLNLDHRGAAGAEVNSGDGAGILIQVPDAFLRSVTAELGFELPAPHAYAVGTAFLPAEVEQAAKTRQRIEEIAAEEGLTVLGWRDVPVDPDSLGSTARAVMPSFAQLFVAGAGSRVTGMALERQAFCLRKRAEHETDAYFPSLSSRTLIYKGMLTPAQLDEVYPDLRDERMTSAMAVVHSRFSTNTFPSWPLSHPFRFIAHNGEINTVMGNRNWMRAREALLASDLIPGDLERLYPICTPGASDSASFDEVLELLHMGGRSLPHSVLMMIPEAWENHAEMDAKRRAFYAFHSALMEPWDGPACVVFTDGSQIGAVLDRNGLRPSRYWVTDDGLVVLASEVGVLDIDPAKVVRKGRLQPGRMFLVDTDEHRIIEDEEIKSQLASEHPYDEWLHAGLIHLDDVPEREHVVHTHASVTRRQQVFGYTEEELRVLLTPMANSGGEPLGSMGTDTPIAALSEKPRLLFDYFSQLFAQVTNPPLDAIREELVTSLAGTIGPESNLLQPAPASCRMVQLPFPVISNDDLAKIRHINRDGDMPGFITHVARGLYPVEGGGAAMAQRIDEICEEVSAAIADGARIIVLSDRHSTAELAPIPSLLLTGAVHHHLVREKTRTQVGLLVEAGDVREVHHVALLVGYGAAAVNPYLAMESVEDLAREGYYVKVEQELAVANLVKALGKGVLKVMSKMGVSTVASYTGAQIFEAVGLSQAVVDKYFTGTVSKLGGIELDTIAEEVALRHATAYPRGGISPAHRELPIGGEYQWRREGEPHLFDPDTVFRLQHSTRTGRYDVFKQYSTRVNEQSKRLMTLRGLFRLKDADEAGRRSIPIEEVEPVSSIVKRFSTGAMSYGSISQEAHETLAIAMNRLGAKSNTGEGGEDPDRLYDPERRSAIKQVASGRFGVTAEYLTNADDIQIKMAQGAKPGEGGQLPGNKVYPWVAKTRHSTPGVGLISPPPHHDIYSIEDLAQLIHDLKNANPQARVHVKLVSEVGVGTVAAGVSKAHADVVLVSGHDGGTGAAPLTSLKHAGGPWELGLAETQQTLLLNGLRDRIVVQTDGQLKTGRDVVVAALLGAEEFGFATAPLVVSGCIMMRVCHLDTCPVGVATQNPVLRDRFSGKAEYVVNFFEYIAEEVRELLAQLGFRSIEEAIGQVGSLDVSEAVDHWKASGLDLTPILHQPDRSAFPDQDLYCTKQQDHGLEKSLDVTELLPLVQPALESGERVRAQVAIRNVNRTVGTILGHEVTKRYAGAGLPDGTIDLTFVGSAGQSFGAFVPKGITLRLEGDANDYVGKGLSGGRIVVRPDRAATFAANEQIIAGNVIGYGATSGEVFIRGGVGERCCVRNSGAWVVTEGVGDHGCEYMTGGRVAVLGRTGRNFAAGMSGGVAWVLDLQPGRVNPELVELGPVSGAAAAELEQLVRAHLEETGSTVAEELLADWETALTRFTEIMPTDYRKSLAAKAKAEADGLDENETAHAMMEALHG

SEQ ID NO: 464 - protein, 508 aa, Zea mays
LASSAEQQDDHHQESAAARRRSPPASPHPELYEPASASLAQLWDPPPLPHLAFAPAADESSSSSSLRRRASAPLPRADEDFVVPSSAYSRPTVGVAHTHSVSAPPLRAIETRAVPSRLVTAGGKRPRLERKYSKIVDQYRSLDEVIEALAQAGLESSNLIIGIDFTKSNEWTGKNCFNGISLHNISDNPNPYEQAISIIGKTLSAFDEDNLIPCFGFGDASTHDQDVFAFYPDERPCNGFQEALARYREIVPHLRLSGPTSFAPIIDMATTIVEQSGGQYHVLVIIADGQVTRSVDTEFGQLSTQEQMTVDAIVQASQFPLSIILVGVGDGPWDMMKEFDDNIPARSFDNFQFVNFTAIMSKKISQSKKETEFALSALMEIPLQYKATLELGILGRRIGESPERIPLPPPFASYSTVSRAEPSRANSYRSVPSHPREEPAVNSTITASVTSPSAAESRVLEPQMCPVCLSKPRDMAFGCGHQTCSECGPQVTDCPICRRPIDTRVKLY

SEQ ID NO: 465 - protein, 308 aa, Arabidopsis thaliana
MQVFQRKEDSSWGNSMPTTNSNIQGSESFSLTKDMIMSTTQLPAMKHSGLQLQNQDSTSSQSTEEESGGGEVASFGEYKRYGCSIVNNNLSGYIENLGKPIENYTKSITTSSMVSQDSVFPAPTSGQISWSLQCAETSHFNGFLAPEYASTPTALPHLEMMGLVSSRVPLPHHIQENEPIFVNAKQYHAILRRRKHRAKLEAQNKLIKCRKPYLHESRHLHALKRARGSGGRFLNTKKLQESSNSLCSSQMANGQNFSMSPHGGGSGIGSSSISPSSNSNCINMFQNPQFRFSGYPSTHHASALMSGT

SEQ ID NO: 466 - protein, 1512 aa, Rhodobacter sphaeroides 2.4.1
MTIYDEAWVKAEEAKRAWLDANGLYKAEDEHASCGVGLVVSISGTPSRKVVESGIAALKAVWHRGAVDADGKTGDGAGIHVQIPVKFFYDQIRRTGHEPDMHKLVAVGQVFLPRTDLSGQERCRTIVESEVLRMGHYIYGWRHVPVDTSVLGEKANATRPEIEQILIRCEKDIDDEQFERELYIIRRRIEKAAQAGSIQGLYLCSLSCRSIIYKGMMLAEQVATFYPDLQDERFESSFAIYHQRYSTNTFPQWWLAQPFRMLAHNGEINTLKGNINWMKSHEIRMASSAFGDAAEDIKPIVPQGSSDSGALDAVFEVMVRSGRSAPMVKTMMVPEAWSKTTTDMPKAWADMYAYCNAVMEPWDGPAALAMTDGRWVCGGLDRNGLRPMRYVVTGDGMLIAGSEAGMVPVDEMNVREKGALGPGQLIAVDMAEGKLYHDAELKDTLAASQPFGDWIEKVVDLNAILADVPEQRMFAPAELRKRQIAAGFSVEEIEQVLVPMAEDGKEMIASMGDDTPPAVLSSVYRPLSHFFRQNFSQVTNPPIDSLRESRVMSLKTRFGNLKNVLDEHSSQTEILILESPFVANSEFETMLSQFGTNVATIDCTFPADHHHDALRHGLERIRAEAEDAVRSGAAHIVLTDQNQGPGAVPMPMILATSAVHSWLTRKGLRTFTSINVRSAECIDPHYFAVLIGCGATTVNAYLAQDTIADRIERGLLEGNLNDAMRRYRDAINAGLLKIMSKMGISVISSYRGGLNFEAVGLSRAMVAEYFPGMHSRISGIGTSGIQHKLEQIHAKGWLGGSDVLPIGGFYKARRSGEKHAWEASTMHMLQQACDRASYDIWKQFSATLRANPPIHLRDLLDIKTLGRPVPIEEVESITSIRKRFVTPGMSLGALSPEAHKTLNIAMNRIGAKSDSGEGGEDPAHFVPEPNGDNPSAKIKQVASGRFGVTAEYLNACEELEIKVAQGAKPGEGGQLPGMKVTELIARLRHSTPGVTLISPPPHHDIYSIEDLAQLIYDLKQINPRAKVTVKLVAASGVGTIAAGVAKAKADVILISGHNGGTGASPGTSIKYAGLPWEMGLTEAHQVLAMNNLRDRVTLRTDGGLRTGRDIVMAAMMGAEEYGIGTAALIAMGCIMVRQCQSNTCPVGVCTQDKKLREKFTGSADKVVNLITFYAQEVREILASIGARSMDEIIGRADLLTQVSRGAAHLDDLDLNPLLITVDGSNRITYDRSKPRNAVPDTLDAEIVKDGARFFEDGEKMQLSYAVRNTHRTIGTRASSHIVRKYGMRNNLQPDHLTVKLTGSCGQSLGAFAAKGLKIEVAGDANDYVAKGLSGGTIVVHPQMESPLVAAENTIIGNTVLYGATDGFLFAAGRAGERFAVRNSGAKVVVEGCGSNGCEYMTGGVAVILGRIGANFGAGMTGGMAYLYDPSGVAEDFMNLETLVTCAIGHPHWEAQLKGLIERHVRETGSRHAARILNDWETERANFLQVCPKEMLVHLPFPLSDEPQAVPAE

SEQ ID NO: 467 - protein, 1499 aa, Staphylococcus aureus subsp. aureus COL
MHNEKLIKGLYDYREEHDACGIGFYANMDNKRSHDIIDKSLEMLRRLDHRGGVGADGITGDGAGIMTEIPFAFFKQHVTDFDIPGEGEYAVGLFFSKERILGSEHEVVFKKYFEGEGLSILGYRNVPVNKDAIAKHVADTMPVIQQVFIDIRDIEDVEKRLFLARKQLEFYSTQCDLELYFTSLSRKTIVYKGWLRSDQIKKVYTDLSDDLYQSKLGLVHSRFSTNTFPSWKRAHPNRMLMHNGEINTIKGNVNWMRARQHKLIETLFGEDQHKVFQIVDEDGSDSAIVDNALEFLSLAMEPEKAAMLLIPEPWLYNEANDANVRAFYEFYSYLMEPWDGPTMISFCNGDKLGALTDRNGLRPGRYTITKDNFIVFSSEVGVVDVPESNVAFKGQLNPGKLLLVDFKQNKVIENNDLKGAIAGELPYKAWIDNHKVDFDFENIQYQDSQWKDETLFKLQRQFAYTKEEIHKYIQELVEGKKDPIGAMGYDAPIAVLNERPESLFNYFKQLFAQVTNPPIDAYREKIVTSELSYLGGEGNLLAPDETVLDRIQLKRPVLNESHLAAIDQEHFKLTYLSTVYEGDLEDALEALGREAVNAVKQGAQILVLDDSGLVDSNGFAMPMLLAISHVHQLLIKADLRMSTSLVAKSGETREVHHVACLLAYGANAIVPYLAQRTVEQLTLTEGLQGTVVDNVKTYTDVLSEGVIKVMAKMGISTVQSYQGAQIFEAIGLSHDVIDRYFTGTQSKLSGISIDQIDAENKARQQSDDNYLASGSTFQWRQQGQHHAFNPESIFLLQHACKENDYAQFKAYSEAVNKNRTDHIRHLLEFKACTPIDIDQVEPVSDIVKRFNTGAMSYGSISAEAHETLAQAMNQLGGKSNSGEGGEDAKRYEVQVDGSNKVSAIKQVASGRFGVTSDYLQHAKEIQIKVAQGAKPGEGGQLPGTKVYPWIAKTRGSTPGIGLISPPPHHDIYSIEDLAQLIHDLKNANKDADIAVKLVSKTGVGTIASGVAKAFADKIVISGYDGGTGASPKTSIQHAGVPWEIGLAETHQTLKLNDLRSRVKLETDGKLLTGKDVAYACALGAEEFGFATAPLVVLGCIMMRVCHKDTCPVGVATQNKDLRALYRGKAHHVVNFMHFIAQELREILASLGLKRVEDLVGRTDLLQRSSTLKANSKAASIDVEKLLCPFDGPNTKEIQQNHNLEHGFDLTNLYEVTKPYIAEGRRYTGSFTVNNEQRDVGVITGSEISKQYGEAGLPENTINVYTNGHAGQSLAAYAPKGLMIHHTGDANDYVGKGLSGGTVIVKAPFEERQNEIIAGNVSFYGATSGKAFINGSAGERFCIRNSGVDVVVEGIGDHGLEYMTGGHVINLGDVGKNFGQGMSGGIAYVIPSDVEAFVENNQLDTLSFTKIKHQEEKAFIKQMLEEHVSHTNSTRAIHVLKHFDRIEDVVVKVIPKDYQLMMQKIHLHKSLHDNEDEAMLAAFYDDSKTIDAKHKPAVVY

SEQ ID NO: 468 - protein, 489 aa, Saccharomyces cerevisiae YJM789
MGNVPGKIDQEDSFNDVRPDSSYNTTSSNSVIKQYDEEASSRVRTRRTTSLVNNILNGNNARTKTGSHLSSTSRRKTSREKELAKEAHAKQLVVRCSETVDGGFLAPFGCYSFEKLDYDATVVKNLIIKRKLAPFYTPLQDFDESWTRDELIKIVDGLPLHDTFDENLEEFEDVPIGNLRKSTFNELIDKSLSKKEQRRMHAKIFRARLYKKRILWQENENETFLERKLEMKRIGSKSSNVEDNTSSQPRKNYHLPSDDLKYTLYKNGSECPICFLYFPGPFNYSKCCQQPICTECFVQIKRADPHFPHDEVDPTEPQTNDSEKDPNLLTSEPANCPYCATASFSITYQPPTNRETGIGGMPADSYVYKDAAISRADGGQPNIPAITSDTIRPDWEIKLNKERARLMRRSANATAIHISNRLIDPSHSTRRNTSHSITPIHDESTSASRSPEPTINELEDQMVREAIRLSLEDQDNRKKSKNRNTSLRP

SEQ ID NO: 469 - protein, 1536 aa, Synechococcus elongatus PCC 7942
MNQHSVHSSSHPTYQGPRWLVEERDACGVGFVADQQGRASHDLVEKSLRALGCMEHRGGCSADSDSGDGAGLMTAIPTDLLKTWLGAAAPADLSSVGLGMVFLPQHGAEATIARQLIEQIVAEENLQFLGWRLVPTRPEVLGQQARANLPRIEQCFIASEQLRDDEFERQLYLVRKRVETAVKKALGTASEDFYICSLSSRTVVYKGMVRSEVLGQFYTDLTNPAYTSNFGVYHRRFSTNTMPKWPLAQPMRFLGHNGEINTLLGNINWMMARQADLQHPAWGDRIGDLLPVVDLNRSDSANLDNALELLVNSGRTPQEALMVMVPEAYQNQPALADHPEIVDFYEFYSGLQEPWDGPALLVFSDGKKVGACLDRNGLRPARYSITADGYIVFASEAGVVDLPVETIIEKGRLGPGQMIEVDLETKEVIKNWDIKKRIASQQPYGQWLQERQVLENKDFGNEQQLGDFDLLRLQTGFGYTAEDVDMVIEAMASDGKEPTFCMGDDIPLAVLSSKARLLYDYFKQRFAQVTNPAIDPLRESLVMSLSMTLGARDNLLQVGPESARLLKLDSPVLNEAELEQVKQSTLKAAELSTLYAIEQGPDGLQAAIAALCQQAEQAVQAGHQILILSDRTGAGLAPQISYIPPLLAVGAVHHHLIRQGLRMKASLVVDTAQCWSTHHFACLIGYGASAVCPWLALETVRHWWHAPKTQSLMERGKIAQVSLAGAQQNFRKAVEAGLLKILSKMGISLLPSYHGAQIFEAIGLSMEVVDLAFRGTTSRLGGLTLADIAHEVMSFHTRAFPELNQKKLENFGFVQYRPGGEYHMNSPEMSKALHKAVAAGKNYDHFEVYRKYLEERPVTALRDLLQFVSDRPAISLDEVESVEAIVQRFCTGGMSLGALSREAHETLAIAMNRLGGKSNSGEGGEDPVRYKVLGDVDAEGNSPTLPHLHGLRNGDTASSAIKQIASGRFGVTPEYLMSADQLEIKVSQGAKPGEGGQLPGKKVSPYIAFLRNSKAGVSLISPPPHHDIYSIEDLAQLIFDLHQINPKAQVSVKLVAEIGIGTVAAGVAKANADIIQVSGHDGGTGASPLSSIKHAGGPWELGLTEVHRVLMENQLRQRVLLRVDGGLKTGWDVVMAALMGAEEFGFGSIAMIAEGCIMARVCHTNNCPVGVATQQEQLRKRFTGIPEHVVNFFILIAEEVRSILAKLGYRSLTELTGRTDLLAPRPDLKLTKTAALNLDCLIKLPDTRSDRSWLVHDEVHDNGPVLDDQLLANPALTAAIANQDSVAIEQAIVNTDRSVGARLAGAIAQRYGNYGFEGQISLNFNGSAGQSFGAFNISGVSLNLVGEANDYVGKGMNGGEIIVRPEAGVRFDPSQSSIVGNTCLYGATGGSLFANGRAGERFGVRNSKAQAVVEGTGDHCCEYMTGGTIVVLGPCGRNVGAGMTGGLAYFLDEDGQFPAKVNPEIVKLQRVSTSAGEQQLKQLITAHAEKTGSPKACHILEQWEQYLPQFWQVVPPSEADTPEVNPEVADKQLTAV

SEQ ID NO: 470 - protein, 489 aa, Saccharomyces cerevisiae
MGNVPGKIDQEDSFNDVRPDSSYNTTSSNSVIKQYDEEASSRVRTRRTTSLVNNILNGNNARTKTGSHLSSTSRRKTSREKELAKEAHAKQLVVRCSETVDGGFLAPFGCYSFEKLDYDATVVKNLIIKRKLAPFYTPLQDFDESWTRDELIKIVDGLPLHDTFDENLEEFEDVPIGNLRKSTFNELIDKSLSKKEQRRMHAKIFRARLYKKRILWQENENETFLERKLEMKRIGSKSSNVEDNTSSQPRKNYHLPSDDLKYTLYKNGSECPICFLYFPGPFNYSKCCQQPICTECFVQIKRADPHFPHDEVDPTEPQTNDSEKDPNLLTSEPANCPYCATASFSITYQPPTNRETGIGGMPADSYVYKDAAISRADGGQPNISAITSDTIRPDWEIKLNKERARLMRRSANATAIHISNRLIDPSHSRRRNTSHSITPIHDESTSASRSPEPTINELEDQMVREAIRLSLEDQDNRKKSKNRNTSLRP

SEQ ID NO: 471 - protein, 1524 aa, Prochlorococcus marinus str. MIT 9215
MGESIKRIVGPYQDSYSPNGIIGEKDACGVGFIANVNGIESNWILKQSLKGLNCMEHRGGCGGDSDSGDGAGILCSIPWNYLEKDVHFKNKKEYEKGLGMVFMPHEKEKIEECKSICQEEAEKLSINKTFWRKVPVNNEILGPLAKANAPFICQWILYIDKKDHPDIERLLFQLRKRIEKKIIETFKNHVGDCEFYFASLSSQTVVYKGMVRSEVLSEFYQDLKEESFKVSFSVYHRRFSTNTLPKWPLAQPMRFLGHNGEINTLLGNINWAKASETHIDNFWGELSNEIKPIVDVNKSDSSNLDATLEINIRSGQPITDSLLKLVPEAFRDQPEIELRANIKAFYEYSASLQEAWDGPALLVFTDGNFIGATLDRNGLRPARYSITNDGFVIMGSETGVVDLVEEKIIEKGRLGPGQMLAVDFNQNRILRNWEVKSEAAQRHDYQNLLINRTIKIENNEWIKDCELKDLELLQQQTAYGFSAEDNDLILDSMASLAKEPTYCMGDDIPLAVLSSKPHILYDYFKQRFAQVTNPPIDPLREKLVMSLEMHLGERCSPFKVKDAKSFIHLKSPILNEKELFSIKKSEIKSQTISTLFEINDGIKGFEGKLHDICEQSEKAVNNGCSLIIISDKGISSTKSFIPPLLAVGAIHHYLLKKEIRLKASLIIETGQCWSTHHLACLIGYGVSAVCPWLIFESGRHWLKHPKTQKLIESKKIDSLSTDQVQTNIKKALEDGLRKILSKIGISLLSSYHGAQIFEAVGLGSDLINLGFDGTTSRIAGITLKELANESISIHTKAYPEIDLKKLEFLGFVQFRNYGEYHSNNPEMSKALHSAVKQGPGYDHFKLYKELISKRPITALRDLLSIDSNRESIPINEVESVESICKRFCTGGMSLGALSREAHEVLAVAMNRIGGKSNSGEGGEDPARFNVLNNIDENTQSATLPFIKGLKNGDTACSAIKQIASGRFGVTPEYLRSGKQLEIKMAQGAKPGEGGQLPGPKVDSYIAKLRNSKPGVALISPPPHHDIYSIEDLAQLIHDLHQVHPKAKVSVKLVSEIGIGTIAAGVSKANADVIQISGHDGGTGASPLSSIKHAGLPWELGLAEVHKSLLDNNLRDRVLLRTDGGLKTGWDVVIAALLGAEEYGFGSVAMIAEGCVMARVCHKNTCPVGVATQKEELRKRFKGLPDNVVNFFIYIAEEIRQILSTIGVKTMEEIIGNKEFLTTRNISLPKTENIDLTSLVNDEISYEDRSWIKHSNNAHSNGTVLEDSILTDAQFIDAVTTHGEFSKKIEIKNTDRSVCAKISGELAQHYGNKGFEGAINLIFNGHAGQSFGAFLLKGMIIQLIGEANDYVCKGMNGGILTIIPPRIDKNSSEQVILGNTCLYGATGGKLYALGKSGERFAVRNSGAVAVTEGAGDHCCEYMTGGKIVILGSTGRNIGAGMTGGIAFILDEKNDLDKKVNKEIVSIFEIKTPKQEQILLEIINEYRDKTQSPKAASILEDWINFKTLFKVIVPPSELEMLGLRNQ

SEQ ID NO: 472 - protein, 1616 aa, Zea mays
MATLPRAAPPTPAALLPLPRAAPPLLLAGRAAAARRSRLRARGPSAAARRSWVVASAASSSSRAVVGGVARREAPPAPQKPTQQAADLNHILSERGACGVGFVANLKNMSSFDIVRDALMALGCMEHRGGCGADSDSGDGAGLMSAVPWDLFDDWASKQGLALFDRRNTGVGMVFLPQDEKSMEEAKAATEKVFVDEGLEVLGWRPVPFNVSVVGRNAKETMPNIQQIFVKVAKEDNADDIERELYISRKLIERAAKSFSWADELYFCSLSSRTIVYKGMLRSEVLGQFYLDLQNELYKSPFAIYHRRFSTNTSPRWPLAQPMRLLGHNGEINTIQGNLNWMRSRETTLKSPVWRGREHEICPFGDPKASDSANLDSTAELLLRSGRSPAEALMILVPEAYKNHPTLSIKYPEVTDFYDYYKGQMEAWDGPALLLFSDGRTVGATLDRNGLRPARYWRTSDDFVYVASEVGVIPMDESKVVMKGRLGPGMMITVDLQTGQVLENTEVKKTVASASPYGTWLQECTRLIKPVNFLSSTIMDNETVLRHQQAFGYSSEDVQMVIESMASQGKEPTFCMGDDIPLAVLSQRPHLLYDYFKQRFAQVTNPAIDPLREGLVMSLEVNIGKRGNILEVGPENADQVALSSPVLNEGELETLLNDSKLKPKVLSTYFDIRKGLDGSLDKTIQALCEEADAAVRSGSQLLVLSDRSEAPEPTRPAIPILLAVGAIHQHLIQNGLRMSASIVADTAQCFSTHHFACLIGYGASAVCPYLALETCRQWRLSNKTLNLMRNGKMPTVTIEQAQRNFIKAVKSGLLKILSKMGISLLSSYCGAQIFEIYGLGQEVVDLAFCGSVSKIGGLTLDELGRETLSFWVKAFSEDTAKRLENFGFIQSRPGGEYHANNPEMSKLLHKAIREKRDNAYTVYQQHLASRPVNVLRDLLELKSDRAPIPIGKVESATSIVERFCTGGMSLGAISRETHEAIAIAMNRIGGKSNSGEGGEDPIRWNPLTDVVDGYSPTLPHLKGLQNGDTATSAIKQVASGRFGVTPTFLVNADQIEIKIAQGAKPGEGGQLPGKKVSAYIARLRNSKPGVPLISPPPHHDIYSIEDLAQLIYDLHQINPKAKVSVKLVSEAGIGTVASGVSKANADIIQISGHDGGTGASPISSIKHAGGPWELGLTETNQTLIQNGLRERVVLRVDGGFRSGQDVLIAAAMGADEYGFGSVAMIATGCVMARICHTNNCPVGVASQREELRARFPGVPGDLVNYFLFVAEEVRAALAQLGYEKLDDIIGRTDLLKPKHISLVKTQHIDLGYLLSNAGLPEWSSSQIRSQDVHTNGPVLDETILADPEIADAIENEKEVSKAFQIYNVDRAVCGRVAGVIAKKYGDTGFAGQLNITFNGSAGQSFGCFLTPGMNIRLVGEANDYVGKGMAGGELVVVPVDKTGFVPEDATIVGNTCLYGATGGQVFVRGKAGERFAVRNSLCQAVVEGTGDHCCEYMTGGCVVVLGKAGRNVAAGMTGGLAYILDEDDTLVPKVNKEIVKMQRVNAPAGQMQLKGLIEAYVEKTGSEKGIAILREWEAYLPLFWQLVPPSEEDSPEACAEFERVLAKQATTQLSAK

SEQ ID NO: 473 - protein, 556 aa, Acinetobacter sp. ADP1
MASPAQIIRHKLLNTFFSRHSIWFLCMFVTISIAWFHFTSTPHYLYYFISDTFLNVIWLLAAVLSVVGIHDLLQSKHSILRNYPIMGHFRFLFEDFRPEIRQYFIESDQDALPFSRMQRSLVYQRAKNENADKPFGSIIDVYQKDYRFMVHSLVPCPPSDPKTFRIQIGNTQCAQPYSSSIMNISAMSFGSLSANAIRALNKGAHMGHFYHDTGEGSLSPYHLEYGGDIVWEIASGYFGCRTEEGKFDPEKFQKQAQLPQIKMIEIKLSQGAKPGHGGILPQHKITEEIAEIRGVPRDRDCISPPKHSAFNTPIEMMHFIQQLRELSGGKPIGFKLCIGQPWQFMGIVKAMLETQIVPDFIVVDGSEGGTGAAPIEFSDYIGTPLREGLLFVHNTLVGAGLRDQIKIGASGKIISGFDIASTLALGADWVNSARGFMFAVGCIQAQSCHTNQCPVGVATQDPDRQKALHVPTKAERVFNFQKNTLHALAEIIAAAGLQHPSEIKAHHLAQRVNDREIKNYAQLHFFFKGGELLDCQQKDDENFYYRMWNMAMADRF

SEQ ID NO: 474 - protein, 1530 aa, Listeria monocytogenes EGD-e
MKQTNLPKKHGLYNPENEQDACGIGFVANIKKISSHKIVEQGIHMLCQLKHRGGEVGGDTGDGAGILLEISDSFFRRECSKLGITLPEKYHYAVGMFNFPQNKTERECLMDETEKLIASEGQMFLGWRKLPTDVTKVGAGARKTEPAIYQLFIQKNAKLDEAGFERALYLIRKQIEKFAATSKLITETFYVPSLSTRTVIFKGMLLPEQINQYYLDLADPAYVSAFALVHSRFSTNTFPSWERAHPYRYLIHNGEINTQRGNVNWMKAREKRAESGLLGEDLAKLLPIIDESGSDSATLDNALEFLVQAGRSLPHAAMMLIPEPWDKNPHMTDPKRAFYEYHSTLMEPWDGPTSISFTNGRVIGTILDRNGLRPARYYETKDHTIIYSSETGVVPVDPSEIIRKETVGAGTMLLIDLEEGRIVADAELKEELTTEKPYRAWLEAEMTEIADLAAADLHYEAMDKSERFKKQRAFGYTQDELNKILIPMVTEKKDPMGAMGYDAPLAVLSQRPQVLFNYFKQLFAQVTNPPIDGIREETVTSAMTLLGDEGNILNPTAQNANRIRLKTPILSRKEFAALEQQTKFAQPTVTLPILFKAEERDGLEARLEALFAEADEKIAAGAELLILSDEGVNADWIGIPSLLAVSGLHHHLVKAGTRTQVSIIVKTAEARDVHQCALLIGYGADAVFPSLAIDTFDGLIKEGRIKGFTLDEAESRYIEAITDGILKIMSKMGISTVQSYRGAQIFEAIGIGDDVIRNYFPGTASQIGGIPLEVIAQEAWLRHREAYHDIGYQSFTLNTGGEYQWRSNGEYHVYNPLAIHSLQQATRENDRETYNLYSDLMQNQNNAFLRGLLTFTSDRKPIPLDEVEPAEAIFKRFKSGAMSYGSISQEAHEALAIAMNRIGGKSNSGEGGENPNRFTPDENGDWRRSAIKQIASGRFGVTSHYLVNAEELQIKMAQGAKPGEGGHLPGNKVYPWISKTRGSTTGVGLISPPPHHDIYSIEDLSQLIFDLKNANQNARINVKLVSKTGIGTIAAGVAKGNADVILVSGYEGGTGAAARTSIRHAGVPWEIGLAETHQTLLLNGLRNKVVVETDGKLMTGKDVLVAAMLGAEEFGFATAPLVTLGCVMMRVCHLDTCPVGVATQNPELRKKFSGSADYVVNFFHFIVAEMREMMAELGFRSLTEIIGHKEFLTTHEKKEAHWKAKYIDFSNMLYSDDFYKNQVQYCTKQQDHKIDQTLDMRELVPLIQPALENGEKVTGTFAVRNVDRAIGTIAGSFISKKYGAAGLPEDTISLDFVGSAGQSFGAYTPLGMTLRIHGDANDYFGKGLSGGKLIVSPDAKTPIKPHDSAIVGNVTLYGATGGFAYMHGKAGARFAVRNSGATAVVEGIGDNGCEYMTGGAVVVLGDIGENFAAGMSGGVAYIYTNNKQATTAKINHELVNSRSTFSTSELTKLKQLIEQHANLTGSDFAQDILQNWEAEKANFIFVIPNEYEMMLTRITTLEQTGKTHDEAELQAFYEHKDGKLVAGVAK

SEQ ID NO: 475 - protein, 442 aa, Sinorhizobium meliloti
MSYHNPYTPPRKSATFDDYTLAEIRRAAATGIYDIRGAGTKRKVPHFDDLLFLGASISRYPLEGYREKCDTSVVLGTRFAKKPIHLKIPITIAGMSFGALSGPAKEALGRGATASGTSTTTGDGGMTDEERGHSQTLVYQYLPSRYGMNPKDLRRADAIEVVVGQGAKPGGGGMLLGQKISDRVANMRNLPKGIDQRSACRHPDWTGPDDLEIKILELREITDWEKPIYVKVGGARPYYDTALAVKAGADVVVLDGMQGGTAATQDVFIENVGMPTLACIRPAVQALQDLGMHRKVQLVVSGGIRSGADVAKALALGADAVVIGTAALVAIGDNDPHWEEEYQKLGTTAGAYDDWHEGKDPAGITTQDPELMKRLDPVAAGRRLANYLKVMTLEAQTIARACGKNHLHNLEPEDLCALTMEAAAMAQVPLAGTSWYPGKGTF

SEQ ID NO: 476 - protein, 364 aa, Populus trichocarpa
MDHNYQRRQHPTYIADNFNSLDQVISALREAGLESSNLILGIDFTKSNEWTGRHSFHRKSLHAIGSTLNPYEQAISIIGRTLSPFDEDNLIPCFGFGDASTHDKYVFSFYPDNRPCNDLEEALARYREIVPHLKLSGPTSFAAIINAAIDIVEKSGQYHVLVIIADGQVTRTPDTPPGRLSPQEQATVNSIVAASKHPLSIIFVGVGDGPWNAMQQFDDNIPQREFDNFQFVNFTKIMLDNTEASKKETAFALAALMEIPLQYRATQRLQHTDHDLVGGPRTRPLPPPREVIDHDNAVKSIPHITNFETVQPSTSVEPVCPICLTNPKDMAFGCGHLTCRDCGASLSTCPICRQPITTRLKLFT

SEQ ID NO: 477 - protein, 367 aa, Aspergillus oryzae
MEYPPQYQQPHGQHPHAPSHIAAPYQTAPQNPGSTVGSMTSPTNPQAHMQQAHPTHQASPIVPSQSHYQQAQNAPGSVHQQMNFPQSYGVTTAMPQTFGISPTQAAAMATAAASGQFYPLHQDSMAGQMQQGPRGSPRMAGVQQVKNERNPRSPPQMPGQMPSMGSQVQMQQNAQIQQRRMSHVGSPHVQAAQPVLNHVVRPSVPPPMPPPPQPAVQQSQPSPDMAVGAVEESPLYVNAKQFHRILKRRVARQKLEEQLRLTSKGRKPYLHESRHNHAMRRPRGPGGRFLTADEVANLEKKNNAGGQENVDSKPTGENPPSAQKRKSSDVNDENTNSAKKAKTSVAKTSTSAEESEHESAEPSDEDG

SEQ ID NO: 478 - protein, 1696 aa, Chlamydomonas reinhardtii
MMLSGVGPVPTKPAFKAGGDTLSRHLEELCRSGAWERRHKDGDKALLEYIEAEARDLSVEAFGRLMTDVYQRIGNMLLKGNDITRRMGGVLAIDELIDVKLSGDDAAKTARLSGLLSRVLEESEDPVLSESASHTLGHLVRSGGAMTSDIVEKEIRRSLAWCDPRNEPNESRRLTALLVLTEAAESAPAVFNVHVKSFIDAVWFPLRDAKQHIREAAVRALKACLCLVEKRETRYRVQWYYKLHEQTMRGMKRDHRTGALPSPESIHGSLLALAELLQHTGEFMLARYKEVVENVFRYKDSKEKNIRRAVIHLLPRMAAFSPERFASEYLARAIAFLLIVLKNPPERGAAFAALADMAAALARVNCAAGVSEVLVQALTQVANALPELLEDIQYQLLDLLSLVLSKRPFNSSTTQPKFAALSAAIAAGELQGNALTKLALQTLGTFDLGGIQLLEFMRDHILAYTDDPDKEIRQAAADCLRALFVGMNDESVAVRGLAIRLVGRLAERNPAHVNPALRKHLLQLLHDMEFSPDNRAREESAFLLEVLITAAARLIMPYVSPIQKALAKAAALQRDLVNENNVIKTVLSTLGALAEVSGTTFRPFISEVMPLVIEAIQDNSDGRRRVVAVKTLGFIVSSCGNVMGPYLEYPQLLSVLLRMLHEGHPAQRREVIKVLGIIGPGDDGGPGGDLLPSSGLVTSSEDYYPTVAINALMRVLRDPALASQHLAVIRALAAIFRALQLSVVLPILLGVLRGGDEALREEILASLRALVGYVRQHMRRFLPDLTQLVHEFWPAAPRTCLALIADLGMALRDDIRCVLDGHSDEQLRRDALDTICAVAVCLGPEFAIFVPTIRKACQRHRLHHEWFDRLAGKSSHRVTKEDWAEWMRNFAVELLKESPSPALRACHGLAQVHPSMARELFAAGFVSCWAELEQGLQEQLVRSLEAALASPTIPPETVTALLNLAEFMEHDDKRLPLDTRTLGALAEKCHAFAKALHYKELEFQTSPQSAIEALIHINNQLRQPEAAVGVLAYAQKHLHMELKEGWYEKLCRWDEALDAYERRLLKEAPGSMEYHTLLRYNPMNITQAGNPGYGAGSGAPHVMLAFLKHLWTQGNRTEAYNRIKDLEASRLYFGESNVEGMLNTLLPLHEMLEKAGPTTLKEIAFVQSYGRELSEAYEWLMKYKASRKEAELHQAWDLYYHVFKRINKQLHSLTTLELQYVSPALVRAQKLDNPGVIAENLASFRAATEHAPNWAKAWHQWALFNVAVSAHYSVALGQAAGDRTGNLQDILRLLTLWFNFGAYAEVRAALTEGFQLVSIDTWLLVIPQIIARIHTHNTDVRQLIHHLLVKIGRHHPQALMYPLLVATKSQSPARRQAAYSVLECIRQHSAALVEQAQLGLELAVPGTYIAGEPLVTIAAFAPQLHVISSKQRPRKLTIHGGDGAEYMFLLKGHEDLRQDERVMQLFGLVNTMLAHDRITAERDLSIARYAVIPLSPNSGLIGWVPNCDTLHALIREYRCKVEVFEYALDSTSGEDLHKSRNSEVWLDRRTNYTRSAAVMSMVGYILGLGDRHPSNLMLDRYSGKLLHIDFGDCFEASMNREKFPEKVPFRLTRMMIKAMEVSGIEGNFRTTCENVMRVLRSNKESVTAMLEAFTREKELKEAFVNLGDANEVGRLINMAVNHENLCQSYIGWCPFW

SEQ ID NO: 479 - protein, 1481 aa, Pseudomonas putida GB-1
MKTGLYHPEEFKDNCGFGLIAHMTGEPSHHLLQTAMQALTCMTHRGGINADGKTGDGCGLLMQKPDQFLRAVAQEHFAVELPKQYAVGMVFFNQDPVKAEAARANMDREILAAGLKLVGWRKVPIDTSVLGRLALERLPQIEQVFIGGEGLSDQEFAIKLFSARRRSSVANAHDSDHYICSFSHKTIIYKGLMMPRDLAAFYPDLGDERLQTAICVFHQRFSTNTLPKWPLAQPFRFLAHNGEINTITGNRNWAMARRTKFANDQIPDLEELGPLVNRVGSDSSSMDNMLELMVTGGIDLFRGVRMLVPPAWQNVETMDADLRAFYEYNSMHMEPWDGPAGIVMTEGRHAVCLLDRNGLRPARWVTTTNGYITIASEIGVWGYQPEEVLAKGRVGPGQILAVDTETGQILDTDAIDNRLKSRHPYKRWLRQHATRIQATLTDDQGVASYDADQLKQYMKMFQVTFEERDQVLRPLGEQGQEAVGSMGDDTPMAVLSQRVRSPYDFFRQQFAQVTNPPIDPLREAIVMSLEICLGAERNIFQESPEHASRVILSSPVISPAKWRSLMNLEREGFDRQLIDLNYEQGIGLEAAIRNIADQAEEAVRAGKTQLVLSDRYIAPGKLPVHASLAVGAVHHRLTEQGLRCDSNILVETATARDPHHFAVLLGFGASAVYPYLAYEVLADLIRTGEVLGDLDEVFKYYRKGISKGLLKILSKMGISTIASYRGAQLFEAIGLAEEVVGLSFKGVSSRIKGARFVDLESDQKLLAAEAWSARKPIQQGGLLKFVHGGEYHAYNPDVVNTLQAAVQQGDYAKFKEYTTLVDQRPVSMIRDLLKVKVADQPLALEQIEPLEAILKRFDSAGISLGALSPEAHEALAEAMNRLGARSNSGEGGEDPSRYGTIKSSKIKQVATGRFGVTPEYLVNAEVLQIKVAQGAKPGEGGQLPGGKVNGLIAKLRYAVPGVTLISPPPHHDIYSIEDLAQLIYDLKQVNPQALVSVKLVAEAGVGTIAAGVAKAYADLITISGYDGGTGASPLTSIKYAGAPWELGLAETHQTLRGNDLRGKVRVQTDGGLKTGLDVIKAAILGAESFGFGTAPMIALGCKYLRICHLNNCATGVATQNDKLRKDHYIGTVDMVINFFTFVAEETREWLAKLGVRSLGELIGRTDLLDVLPGDTERQQYLDLSPLLGSSHIPADKPQFCEVDKNPPFDKGELAEKMVEMALPAIRDQAGGEFDLDICNCDRSIGARISGEIAKLYGNQGMAANPITFRFKGTAGQSFGVWNAGGLNLHLQGDANDYVGKGMTGGKVTIVPPAGSPFETQHSAIVGNTCLYGATGGKLFAAGTAGERFAVRNSGAHAVVEGTGDHCCEYMTGGFVCVLGKTGYNFGSGMTGGFAYVLDMDNTFVDKLNHELVEIQRISGEAMEAYRSHLARVLAEYVEETGSEWGRELSENLDDYVRRFWLVKPKAANLKQLLSSTRANPQ

SEQ ID NO: 480 - protein, 2433 aa, Podospora anserina
MSAVKDQTATSLDQHIKEIRNRNYDENQRKRAARQIRDLVNAAKQEMGAEQFQRFFDNVNQRTNLLIQGPDTYDRLGGIYILDALVDFDGIEPALKYTRFQNYIGSILRGRDINSMQPAAVVLGKLCKPGGSLISELVDSEVQTALEWLQSDRIEERRYSAVLVLRELARNTPTLMYNYVGYVFEQIWIGLRDSRLLIRETASETVSACFKIIRERDQELKKDWMDKMLNEAIKGLKINTVEFIHASLLVLKELLEQGGMYMQAHYQEACEIVFRHKDARDPAIRKTVVLLIPDLANYAPTEFSASYLHMFMVYLGGMLKKDKDRNDAFLAIGNIANSVKSAITPYLDGVLIHIREGLSVQSRKRSSVDPVFDCISRLAVAVGQTMSKYMEALLDPIFACELTPKLTQALVDMAFYIPPVKATIQERLLDMLSKVLCGEPFRPLGAPHPNSLASIPHIPKDPKDPLAHQRTKDEVKLALNTLGSFDFQGHVLNEFVRDVAIKYVEDDDPETREAAALTCCQLYVRDPIVNQTSYHALQVVADVIERLLTVGVSDPEPKIRQTLLAALDERFDQHLAKAENIRTLFFALHDEQFAVREVAVSIIGRLARHNPAYVIPQLRKTIIQMLTELEYTDVARSKEESSRLLSLLTRHAQELVKPYVNSITQVLLPKARDPIPSVAATVLQALGELCTVGGEEMLNYKKDLMPIIIDALQDQSAPVKREAALHTLGQLASNTGYVIKPYLEYPQLLEILQSIIRGEPQRGLLRQETIKVMGILGALDPYKYQQVEDRAPRTQKQTEATQLTDVSLMMGGLTPSQEDYYPTVVINALLQILKDQSLVQWHGNVVDAIMSIFITLGLKCVQFLDRVVPAFIAVIRASSQTRLDFYFNHLSRLVGIVRQHIRVYLPDIIEVLQEYWDTTYSLQTTIMSLIESIARSLEGEFKVYLASLLPMMLGLLEKDTTTKRQPTEKIFHAFLVFGSSAEEYMHLIIPVLVRLFDNSAQPMFLRKSAIETIGKLSSMVNLNDYASKIIHPLTRVLASHEPSLRVAALDTLCALMLQLGRDYLHFEHTVHKTISTYGLQHSNYDKAVEKLKKGETLPPNLAPRFEDNAVELHASENSPPKKLDLNPMHLRQAWETKGKSTKDDWHEWFRKFSTTLLSESPNHSLRACASLASTYQPLARELFNSAFVSCWSELYEQFQEELITNIENTIKSENVPPDLLGLLLNLAEFMEHDDKALPIDIRTLGREAARCHAYAKALHYKELEFLQDHNSHAVEALIVINNQLQQSDAAIGILTKVKAYKDGITLRESWFEKLERWDEALNFYCQRERELPPDQPTPVDIVMGKMRCYHALGEWDSLASLAGKTWSNSAPEVQRMIAGLATTAAWGLGKWDSMDNYLQSMKRFSPDRAFFGAILALHRNQFREALGCIDQAREGLDTELSALVSESYNRAYQVVVRVQMLAELEELIIYKQCDAEKQASLRATWETRLKGCQRNVEVWQRMLRLRSLVLTPPENMHMWTKFANLCRKSGRMGLAEKSLRQLIGSDVPLDTVIPHWHDRPMDPDAERLASPVLYAVLKYQWEVGLQPAMRNTDRTIAERTLYCLRKFTDETAHRVESARHQIAASTQAGNGAIDGLHQASTFSEFDEAALLSPDVQRHWTEQTVLLAKCYLRQGDWMIALNKDDWQYTRRKDILSCYYKATYYHRHWYKAWHAWALANFEVVQALGSRKDLDSGVIIQYAVPAVHGFFESISLSSGSSLQDTLRLLTLWLTYGGNPDVASTVTEGFSRVSVDTWLEVIPQLIARITQPNKKVQASIHALLSDVGRAHPQALVYPLTVAMKSRQSTRRSKTASLIMETIRQHSNKLVEQAETVSRELIRTAVLWHELWHEGLEEASRLYFGDHNIKGMFDALEPLHDLLEKGPQTLREVSFTQTFGRDLGEAREWCRQYRETEDVNDLNQAWDLYYQVFRRISRQLPQMTTLELTYCSPDLLQARDLELAVPGTYRSGQEVVRIMSFDGTFTVISSKQRPRKLDIVGSDGKTYTFLLKGHEDIRQDERVMQLFGLCNTLLANDSECYKRHLNIQRYPAIPLSQNSGLLGWVPDSDTIHQLIRDYRESRKILLNIEHRIMLQMAPDYDNLTLMQKVEVFGYALDNTTGQDLYRVLWLKSKSSEAWLDRRTNYTRSLGVMSMVGYILGLGDRHPSNLMLDRITGKIIHIDFGDCFEVAMKREKYPERVPFRLTRMLTYAMEVSNIEGSFRITCEHVMRVLRDNKESVMAVLEAFIHDPLLTWRLTNPASPAGPHFNSEREQAIAGPQAARVRRPSILEAPMAPTEFLAAQAGPEGLTGARSRARTNSSAAPLPSITNDGVHGPIEIAEVQNARAVEVLDRVSQKLTGRDFKPNEELLVKDQVNKLIIEATKLENLCQHYIGWCSFW

SEQ ID NO: 481 - protein, 1487 aa, Photobacterium sp. SKA34
MSLYDPSLEKDNCGFGLIAHIEGQTSHKLVRTAISALDRMTHRGGIAADGKTGDGCGLLIKKPDNFYRIIADEKGWNLSREFAVGQIFLSQDPVLAEQARTIINEELATETLSIAGWREVPVNPAVLGPIAQESLPNIEQVFINAPAGWKPRDIDRRLYIARRRIEKRITEDSDFYICSLSTQVIVYKGLFMPSDLPKFYLDLGDIRLESSICLFHQRFSTNTQPRWPLAQPFRYLAHNGEINTITGNRQWARARGYKFSSPLLPDLKTAAPFVNETGSDSSSLDNMLELFLSGGMDLFRAMRMLVPPAWQNHPDMDPALRAFYDFNSMHMEPWDGPAGIVMSDGRYAACNLDRNGLRPARYVITKDKLITLASEVGIWDYTPDEVAEKGRVGPGELLVIDTKFGKIWHSSDIDNELMGRHPYKAWMDSHVKRLTPFEQLGDEQVGCRSLTDNELSVYHKQFGVSSEELDQVLRVVGENGQEATGSMGDDAPMAVLSSKERPITDYFRQMFAQVTNPPIDPLREKHVMSLATCIGREINVFCETDSHAQRVAFGSPVLVYSDLVQLLELDDQYYANSIIDINYNPNEKDLKQSLIDLCDEAERVVRDGAVLVVLSDRGINKDKLPIPAAMAVGAVQKRLVDNNLRCDTNIVVETATARDPHQFAVLLGFGATAIYPYLAYESLGKLIDAGAINKTYREVMSNYQNGMNKGIFKIMSKMGISTIASYRCSMLFEAIGLSNEVVELCFKGVSSRIAGADFSDFQQDLFNLSRKAWLKRKPIEHGGLLKYVHGGEFHAYNPDVVGTLQKAVKSGNYQDYLAFAKEVNERPVAAIRDLFKLKDGTTSIPVEQVEAATELYKRFDSAAMSIGALSPEAHEALAIAMNRLGGCSNSGEGGEDPRRFGNERNSRIKQVASGRFGVTPHYLVNADVIQIKVAQGAKPGEGGQLPGHKVTTEIAKLRYAVPGVTLISPPPHHDIYSIEDLAQLIFDLKQVNPSAMVSVKLVSEPGVGTIATGVAKAYADLITISGYDGGTGASPLTSVKYAGSPWELGLAETQQALVSNGLRHKIRLQVDGGLKTGLDVIKAAILGAESFGFGTAPMVALGCKYLRICHLNNCATGVATQDEKLRRDFFKGLPEQVMNYFIGVGQEVRELLAQLGVEKLTDLIGRTDLLDTLEGFTAKQAKLDLSPILVAPTPKEGKTLYCSEPNTPFDNAELNQTLVDQILPAIESRSGGDFYFDTCNTDRSIGARLSGEIAQRYGNQGMSASPVTLHLTGTAGQSFGVWNAGGLNLKLTGDANDYVGKGMTGGIITIRPPQGSAFKSSEATIIGNTCLYGATGGKLFAAGKAGERFAVRNSGTITVVEGAGDNACEYMTGGIVAILGKTGVNFGAGMTGGFAYILDEDGDFTGRVNPELVEALPLNELQIHQEHLRGLIDRHLQETGSSRAQEILANFDQWIPKFYLAKPKSADINTLLGHQSRSASELRLQAQ

SEQ ID NO: 482 - protein, 467 aa, Zea mays
MPCFPPSISPLPPQLKKRSHPRSLVHISRLPPQAHSGMGNVAASGGVQVRRRPPAVDERLTRPRRLVRELPDLDAGRLRRLIRTGDLAPCFDPAEDASAGLTEECPICFFFYPSLNRSRCCGKGICTECFLQLMPSEASKLVHCPFCKTKAYAIEYQGAQMTSGKEIKQEQWRPVELMLSLFLLLLASVGAAKARPARSDLGLGIGASGGFVLGLGGTTGSAASGSGQGPGYRRTAPGPVQVAVHTPRLATGRVRPYGLWVWLRLRLRLGWERGLSVWLWFGHVVPRLVPFTRTRVFRCWYGFRLSRSGTGGGSAGFSGGASGSAAGSGSESSSWSGSSAGSEGGAGPSGAWSSSNSGASSTTLSGSSSRPDAGAGAISNAGSSSSSSSWSGSSSGSGSSSWSSSSSGSASSSGGLGFGQVSAVGQRFGMGGGARRARSRIRVRVRSWSRRWELRLEEEAALGSSVQ

SEQ ID NO: 483 - protein, 1523 aa, Photobacterium sp. SKA34
MTDQELNVQGLYVPEMEHDACGIGFVAHLKNRKSHQIVTQALDMLARMEHRGGQGCDPCSGDGAGILLQKPHEFLLEEALTLGIKLPAFDKYGVGVVLFPKDEHKRQQCREILERNAERLDLEVIGYRVLPVDNSMIGEDPLSTEPQFEHVFITGGASLDPAVLERKLYVLRNYTVRVCLESVSNIGDDFYINSLSYKTLVYKGQLTTEQVPQYFLDLQNPTMVTALALVHSRFSTNTFPRWRLAQPFRYIAHNGEINTVRGNLNWMKAREAILESDLFSQQEINMLLPICQEGSSDSSNFDMALELLVLSGRSLPHALMMLIPEAWQENKNMDPKRRAFYQYHANIMEPWDGPASVCFTDGVQVGATLDRNGLRPSRYTVTKDDFLVMASESGVVEIEPENVQFRGRLQPGRIFVADLEQGRIISDEEVKDSIATAQPYEQWVKDNLLSLKTLPEADNMHHQPTPERLLHHQQAFGMSSEEVNDIIVPLAKTAYEPLSAMGADWPLAVLSHQSQHLSNYFKQLFAQVTNPPIDPIRERMVMSLNTYLGKDQNLLAETPAHCQKVELESPVLSNAELEKIREIDNEHLQSKTLDIVFNASGEEGKLERALKRICQYSEDAVVDGYSIIILTDRAVNSNHAAIPAMLAVGAVHHHLIRKGLRAKCDIVVETGDARETHHFATLVGYGANAINPYLVTETLVDLQRKRKLDPELPTDTLFDNYRKGVNGGLLKIFSKMGISTLQSYHGAQIFEALGISRSVVDKYFTGTVTRIQGLTIDDIAQEVLVRHRVGYPTREIPVQVLDVGGVYQWKQRGEKHLFNPETISLLQQSTREKDYAQFKQYAKAVDDQGDNAATLRSQLDFIKNPAGSIPLEEVEPTENILKRFATGAMSFGSISYEAHSTLAVAMNRIGAKSNSGEGGEDPIRFEKKGNGDWERSAIKQVASGRFGVTSYYLTNADELQIKMAQGAKPGEGGQLPGDKVDDWIGATRHSTPGVGLISPPPHHDIYSIEDLAQLIYDLKNANRAGRVNVKLVSEAGVGTIASGVAKAKADVVLIAGFDGGTGASPMSSIRHTGLPWELGLAETHQTLLKNGLRNRIVVQSDGQMKTPRDLAIATLLGAEEWGVATAALVVEGCIMMRKCHKNTCPVGIATQNKTLRERFDGRVEDVVTFFQYMAEGLREVMAELGFRTIEEMVGQSHKLKVRDNVSHWKYKNLDLSPVLYVEKPRAEDGIYNQRPQDHGLDNVLDRQLIELAQPALTEGKAVNAELPIINTDRSAGTMLSNEISKVYKDNGLPQPMNVKFFGSAGQSFGAFLAKGVKFEVEGDANDYWGKGLSGGTLVLYPDAKSDIVAEDNIVVGNVCFYGATSGESYIRGLAGERFCVRNSGAQVVVEGVGDHGCEYMTGGVAVILGQTGRNFAAGMSGGVAYVWDQFDDFETKLNSELVDLDPIEKEDQALLLNMLTKHVALTGSTVAELFLSNFEDNLKKMVKVMPRDYKAVLLKRKAEAKAQAQAQAQDKEALEAING

SEQ ID NO: 484 - protein, 466 aa, Desulfitobacterium hafniense DCB-2
MENTLFIFIFGVVVSFVGWLLLGFVFFFLGKRFFRTGVQRIFNLVVRRLLEDNYSENLMELWSATRRTSVQNIVEIALRAEQGKLIGRPLGSPKPYHNFDNLMFIPAQLVRLPVEREVPIDVSATLGPRAEKPMQLSIPLLIGGMGYGVALSEKAKVALAKAAKQVGTATNSGEGPFLAEERNAAGKFIWQISRYDYGRNPQGIAEADMLEVQMGQGSRLGAHILYPQEIKGKAQKLMGISPVVPLKGYAKLPGINSPLDWPRYVEELRQEAGGKPIGIKIMGGGRLEADLAVAIEAGFDVICIGGAQGGTAASSPTISDDFGLPSLYNLVRAQRYLIEQGVRHEVSLIASGGYDTPGKCLKAIALGADAVNLGTVPLFALVHKQIGKVMPWEPLTQLVYYNSKYKERLDVELAAQNVANVLQSFVLEMEEGIRALGKKSIHDLGPNDLVALDDWTAELTGVPRAW

SEQ ID NO: 485 - protein, 1483 aa, Neptuniibacter caesariensis
MSKGLFRPGEFKDNCGFGLMAHMQGQASHDLLDKAIEALACMTHRGGIAADGKTGDGCGLLMQKPDSFLRTVAKDELGVELGEHYAVGMIFLPRDADKAEAARAAVNKAAEAQGLEVAGWRVVPTDESCLGPIAKDTLPLIEQVFIQAKGQSERELAISLFVARRNAEIAMAADEDFYICSFSDKVISYKGLTMPVDLPVFYQDLADKRLETAVCTYHQRFSTNTAPRWPLAQPFRFLAHNGEINTVEGNRNWAKARASKFSTELLPDLDALQPIVNTTGSDSSSMDNMLEFLLVGGMDIYRAVRMIVPPAWQNVDTMDADLRAFYDYNSMHMEPWDGPAGMVMTDGRFAVCMLDRNGLRPSRWVMTKDGYICTASEIGVFTYEPKDIVAQGRVGPGQILAIDTQTGDVLHTQDVDNHLKSAKPYKKWLRENALRLEQTMNLEEESRSFPEMSADEIKTHMKMFQVTFEERDQILRPLGESGMEAIGSMGDDKPMAVLSHRVRSLYDYFRQQFAQVTNPPIDPLREAIVMSLETCIGAERNVFEETPEHARRVILTTPVLSASKFNRLRDNDEPGFEVAQIDLNYNPDQTDLKAAIESIADQAEKCVRDGKVILVLSDANIARGHLPVHAALATGAVHHRLVDKGLRCDANIVVESGTVRDPHHFAVLFGFGATAVYPYLAYRVLNDLCASGELQLQPLDSHENYRKGINKGLMKILSKMGISTVASYRGAQLFEAIGLSSEIVDLCFKGVTSRIEGARFEDFQFEQGLLAKEAWIARKPIQAGGLLKYKHDGEYHAYNPDVVRTIHEAVETGSQEAYSRYAELVNNRGYATLRDMMGLRKDVQSISIDEVEPVENIFPRFDSAAMSLGALSPEAHEALAVAMNELGGRSNSGEGGEDEARHGTIKRSKIKQVASGRFGVTPEYLSNAEVMQIKVAQGAKPGEGGQLPGGKVNSLIARLRYSVPGVTLISPPPHHDIYSIEDLAQLIFDLKQVNPEALVSVKLVSRPGVGTIACGVAKAYADLITISGYDGGTAASPMTSIHYAGSPWELGLADAHQSLRGNHLRGSVRLQTDGGLKTGLDVVKGAILGAESFGFGTMPMVALGCKYLRICHLNNCATGVATQNDKLREDHFRGTVEMVKNFFRFVAEETRQIMAQLGVRSMEELVGRVDLLEILDGETPRQKNLDLTPILTSAGDEFPNTCQVERNEPYDLAELNSKMLALAEQAIADKTGGEYELVITNCDRSVGARTSGAIAKKHGNLGMADQPITFNFKGHAGQSFGVWNAGGQNLYLEGDANDYVGKGMAGGKIVIRPFDEVTFKSNETSIMGNTCLYGATGGKLFAAGQAGERFAVRNSGVHAVVEGAGDHCCEYMTGGLVTVLGPTGYNFGAGMTGGFAYVLDMDNSFVDKYNHELVEIQRVHTENMEAYKNHLRSVIIEFTKETGSAWGQEIVDNLDDYIGRFWLVKPKAASLNDLLTSIRTRPE

SEQ ID NO: 486 - protein, 528 aa, Nitrosococcus oceani C-27
MAGGLSLIFLSLVTVSPWWLLGLTVTLPLVALGVYDWVQQCWTLTRNYPAAARIRWLFYDLRPYLRAYIVEDDLEGKPFSFDARNLVYARARGKTDTHPFGTERDLASDEYEWLCHSMAPAENPEKNPRVSIGSAQCEQPYNASLLNISAMSFGSLSARAVEALNKGARLGGFYHDTGEGGISPYHLKWGGDLVWEIGSGYFGCRDDKGNFDPGLFHESATRNEVKMIEIKLSQGAKPGYGGLLPAAKVTEEIAWVRKVPKGQDCLSPRSHSAFSTPLEMLEFAARMRQLSGGKPVGIKLCVGQVHEVLAIMKAMLKTGIHLDFIVVDGGEGGTGAAPVELSDYVGMPLTEGLMVVRNALVGTGLRDKVRLGASGKVYSGAGMARNFAIGADWCNAARAFMFSIGCIQAQRCHLGTCPTGVTTQDPGRQRGLVVDVQAKRAARFHQQTLTALGHIVAAAGLAHPRDLQPYHLIRRVGTAEAKLFDRIYPFLPENALLEGAEDTPYSEWWQAANPASFRPRIDLAAARI

SEQ ID NO: 487 - protein, 1581 aa, Mesorhizobium loti MAFF303099
MTDMTLSATNGQAAQTKAAAVKNTPRTGIGRSDIGRTGFAPRGLYDPRNEHDACGVGFIVNMKGVKSHQIVKDGLAVLENLTHRGAVGADPLVGDGAGVLVQLPDQFFREEMAAQGIELPPAGQYGVGHWFMPQDAALRAHIEDIIAESAQSEGLPLIGFRDVPVDNSSLSKAPDIVASEPFHRQVFIGRTSDIPDDEEYEARLYLLRKVISGRIYAENDNKDIGAYCVSLSARTIVYKGMFLAYQVGAYYKDLKDPRFETALILVHQRFSTNTFPSWKLAHPYRMVAHNGEINTVRGNNNWMAARQASVDSELFGNNISKLWPISYDGQSDTACFDNALEFLFQGGYSLSHAMMMLIPEAWAGNKLMDADRKAFYEYHAALMEPWDGPAAVAFTDGRQIGATLDRNGLRPARYIVTDDDRVIMASEAGVLPVPEEKIVQKWRLQPGRMLLIDLAKGRIVPDEEIKSEIATRHPYKTWLANTQLILEDLKPVEPRALRKDVSLLDRQQAFGYTQEDTKLLMSPMATTGQEAVGSMGTDTPISAMSDKSKLLYTYFKQNFAQVTNPPIDPIREELVMSLVSFIGPRPNIFDLVGNSRRKRLEVRQPILTNGDLEKIRSIGHTEDRFDTKTIDITYGSNEGAAGMQGAIDRLCERAEAAVAGGYNIIILSDRQLGPDRIAIPALLATAAVHHHLIRKGLRTSVGLVVESGEPREVHHFCCLAGYGAEAINPYLAFDTLTDMHKRGELPEEVDAYEVVSRYIKSIGKGILKVMSKMGISTYQSYCGAQIFDAIGLKTDFVEKYFTGTATLIEGVGLDEVAGETVSRHTDGFGNDPVLRNSLEVGGEYLFRMRGEAHMWSPDAVATLQHAVRQGSWETFKEYSAQIDSETARAQTIRGLFKIRLAEETGRKKVALDDVMPAAEIVKRFSTGAMSFGSISREAHTTLARAMNQIGGKSNTGEGGEEADRYLPLPGGGKNPERSAIKQVASGRFGVTAEYLVNSDVMQIKVAQGAKPGEGGQLPGHKVDATIAKVRHSTPGVGLISPPPHHDIYSIEDLAQLIYDLKNVNPAADVSVKLVSEVGVGTVAAGVAKARADHITISGYDGGTGASPLTSLKHAGSPWEMGLAETHQTLVLNGLRSRVALQVDGGLRTGRDVIIGALLGADEFGFSTAPLIAAGCIMMRKCHLNTCPVGVATQDPVLRKRFKGTPEHVINFFFYVAEEVRALLAEMGYTHIDQIIGDADLLEKRDVIQHWKAQGLDFSKMFYKPDAPHEAVHWTERQKHPIDDVLDRKLIELAKPALEAKQQVKIEVDIRNVDRSTGAMLSGEVAKRFKHKGLREDTIQVKLTGTAGQSFGAFLARGVSFELVGAGNDYVGKGLSGGRIVIRPPEEARIVAADSIIVGNTVLYGATEGEAYFAGVAGERFAVRNSGVAAVVEGVGDHGCEYMTGGVVVVIGKTGRNFAAGMSGGVAYVLDEAGDFAERCNMAMVELEPVPEEDDLMERLLHHGGDLDHKGRVDVSGDMTSHDEERLYQLISNHVHYTGSVRGREILDDWTTFRPKFRKIMPVEYRRALIEMERMRMGVAAE

SEQ ID NO: 488 - protein, 552 aa, Arabidopsis thaliana
MSNAFSKMPTLYKKAGCQFQLTTMQEFHSSKDSLPCPATSWDNSVFTNSNVQGSSSLTDNNTLSLTMEMKQTGFQMQHYDSSSTQSTGGESYSEVASLSEPTNRYGHNIVVTHLSGYKENPENPIGSHSISKVSQDSVVLPIEAASWPLHGNVTPHFNGFLSFPYASQHTVQHPQIRGLVPSRMPLPHNIPENEPIFVNAKQYQAILRRRERRAKLEAQNKLIKVRKPYLHESRHLHALKRVRGSGGRFLNTKKHQESNSSLSPPFLIPPHVFKNSPGKFRQMDISRGGVVSSVSTTSCSDITGNNNDMFQQNPQFRFSGYPSNHHVSVLMLKAIPQGPPPRVRITVLSDLTEDIPFSVGPPAYIYGTQFIGCAQSLNINLQISVLDKFQLIHTSPRENLIVCVHFRLHQLKHSILDERSEALKALRSLGPKGVVLCENNGECSRSIDFAAGFSKKLDYLWMFWIQKAQDSKKRIVKKGSEWKKRRQRKEKCYERMRKAVFAAEAFGEDAIDGAKSLLRKYDNNWEIRMDDGDTFAGLMWKGEAISFCSVWK

SEQ ID NO: 489 - protein, 2473 aa, Saccharomyces cerevisiae
MNKYINKYTTPPNLLSLRQRAEGKHRTRKKLTHKSHSHDDEMSTTSNTDSNHNGPNDSGRVITGSAGHIGKISFVDSELDTTFSTLNLIFDKLKSDVPQERASGANELSTTLTSLAREVSAEQFQRFSNSLNNKIFELIHGFTSSEKIGGILAVDTLISFYLSTEELPNQTSRLANYLRVLIPSSDIEVMRLAANTLGRLTVPGGTLTSDFVEFEVRTCIDWLTLTADNNSSSSKLEYRRHAALLIIKALADNSPYLLYPYVNSILDNIWVPLRDAKLIIRLDAAVALGKCLTIIQDRDPALGKQWFQRLFQGCTHGLSLNTNDSVHATLLVFRELLSLKAPYLRDKYDDIYKSTMKYKEYKFDVIRREVYAILPLLAAFDPAIFTKKYLDRIMVHYLRYLKNIDMNAANNSDKPFILVSIGDIAFEVGSSISPYMTLILDNIREGLRTKFKVRKQFEKDLFYCIGKLACALGPAFAKHLNKDLLNLMLNCPMSDHMQETLMILNEKIPSLESTVNSRILNLLSISLSGEKFIQSNQYDFNNQFSIEKARKSRNQSFMKKTGESNDDITDAQILIQCFKMLQLIHHQYSLTEFVRLITISYIEHEDSSVRKLAALTSCDLFIKDDICKQTSVHALHSVSEVLSKLLMIAITDPVAEIRLEILQHLGSNFDPQLAQPDNLRLLFMALNDEIFGIQLEAIKIIGRLSSVNPAYVVPSLRKTLLELLTQLKFSNMPKKKEESATLLCTLINSSDEVAKPYIDPILDVILPKCQDASSAVASTALKVLGELSVVGGKEMTRYLKELMPLIINTFQDQSNSFKRDAALTTLGQLAASSGYVVGPLLDYPELLGILINILKTENNPHIRRGTVRLIGILGALDPYKHREIEVTSNSKSSVEQNAPSIDIALLMQGVSPSNDEYYPTVVIHNLMKILNDPSLSIHHTAAIQAIMHIFQNLGLRCVSFLDQIIPGIILVMRSCPPSQLDFYFQQLGSLISIVKQHIRPHVEKIYGVIREFFPIIKLQITIISVIESISKALEGEFKRFVPETLTFFLDILENDQSNKRIVPIRILKSLVTFGPNLEDYSHLIMPIVVRMTEYSAGSLKKISIITLGRLAKNINLSEMSSRIVQALVRILNNGDRELTKATMNTLSLLLLQLGTDFVVFVPVINKALLRNRIQHSVYDQLVNKLLNNECLPTNIIFDKENEVPERKNYEDEMQVTKLPVNQNILKNAWYCSQQKTKEDWQEWIRRLSIQLLKESPSACLRSCSSLVSVYYPLARELFNASFSSCWVELQTSYQEDLIQALCKALSSSENPPEIYQMLLNLVEFMEHDDKPLPIPIHTLGKYAQKCHAFAKALHYKEVEFLEEPKNSTIEALISINNQLHQTDSAIGILKHAQQHNELQLKETWYEKLQRWEDALAAYNEKEAAGEDSVEVMMGKLRSLYALGEWEELSKLASEKWGTAKPEVKKAMAPLAAAAWGLEQWDEIAQYTSVMKSQSPDKEFYDAILCLHRNNFKKAEVHIFNARDLLVTELSALVNESYNRAYNVVVRAQIIAELEEIIKYKKLPQNSDKRLTMRETWNTRLLGCQKNIDVWQRILRVRSLVIKPKEDAQVRIKFANLCRKSGRMALAKKVLNTLLEETDDPDHPNTAKASPPVVYAQLKYLWATGLQDEALKQLINFTSRMAHDLGLDPNNMIAQSVPQQSKRVPRHVEDYTKLLARCFLKQGEWRVCLQPKWRLSNPDSILGSYLLATHFDNTWYKAWHNWALANFEVISMLTSVSKKKQEGSDASSVTDINEFDNGMIGVNTFDAKEVHYSSNLIHRHVIPAIKGFFHSISLSESSSLQDALRLLTLWFTFGGIPEATQAMHEGFNLIQIGTWLEVLPQLISRIHQPNQIVSRSLLSLLSDLGKAHPQALVYPLMVAIKSESLSRQKAALSIIEKMRIHSPVLVDQAELVSHELIRMAVLWHEQWYEGLDDASRQFFGEHNTEKMFAALEPLYEMLKRGPETLREISFQNSFGRDLNDAYEWLMNYKKSKDVSNLNQAWDIYYNVFRKIGKQLPQLQTLELQHVSPKLLSAHDLELAVPGTRASGGKPIVKISKFEPVFSVISSKQRPRKFCIKGSDGKDYKYVLKGHEDIRQDSLVMQLFGLVNTLLQNDAECFRRHLDIQQYPAIPLSPKSGLLGWVPNSDTFHVLIREHREAKKIPLNIEHWVMLQMAPDYDNLTLLQKVEVFTYALNNTEGQDLYKVLWLKSRSSETWLERRTTYTRSLAVMSMTGYILGLGDRHPSNLMLDRITGKVIHIDFGDCFEAAILREKFPEKVPFRLTRMLTYAMEVSGIEGSFRITCENVMKVLRDNKGSLMAILEAFAFDPLINWGFDLPTKKIEEETGIQLPVMNANELLSNGAITEEEVQRVENEHKNAIRNARAMLVLKRITDKLTGNDIRRFNDLDVPEQVDKLIQQATSVENLCQHYIGWCPFW

SEQ ID NO: 490 - protein, 297 aa, Arabidopsis thaliana
  misc_feature (248)..(248): Xaa can be any naturally occurring amino acid
  misc_feature (250)..(250): Xaa can be any naturally occurring amino acid
  misc_feature (259)..(259): Xaa can be any naturally occurring amino acid
  misc_feature (266)..(266): Xaa can be any naturally occurring amino acid
  misc_feature (268)..(268): Xaa can be any naturally occurring amino acid
  misc_feature (279)..(279): Xaa can be any naturally occurring amino acid
  misc_feature (281)..(281): Xaa can be any naturally occurring amino acid
  misc_feature (288)..(288): Xaa can be any naturally occurring amino acid
  misc_feature (290)..(292): Xaa can be any naturally occurring amino acid
REYVERARKCLATELAALVLESYERAYSNMVRVQQLSELEERIQGSKRNVEVWQALLAVRALVLPPTEDVETWLKFASLCRKSGRISQAKSTLLKLLPFDPEVSPENMQYHGPPQVMLGYLKYQWSLGEERKRKEAFTKLQILTRELSSVPHSQSDILASMVSSKGANVPLLARVNLKLGTWQWALSSGLNDGSIQEIRDAFDKSTCYAPKWAKAWHTWALFNTAVMSHYISRGQIASQYVVSAVTGXFXSIACAANAXKGVDDSXQXILRLLHCGHHXGXADANRLXQXXXAHWVL

SEQ ID NO: 491 - protein, 2208 aa, Arabidopsis thaliana; identical to SEQ ID NO: 274

SEQ ID NO: 492 - protein, 1762 aa, Mycobacterium abscessus
MSSEGVGDGAGVNLDLSLRFFSELTGVSDLRHGQFGVGNFFLPNDPASHAEAEQVIEQALRAQGFTILLSRDVPVNNDAIRPAAIKYQLPIRQWVFRSDSERKTHEALMAIESVAYTRPELLGLYPLSLSTRTQVLKGRLNSNEVVPYFSDLSDPRMEVHSMFFHTRFSTNTAPNATMAQPFRLMAHNGELNTDKKNRLSENAIARARNRAIIRPVGQSDSCRLDQTLQSRVLEDDLDLVTAVVAMMPPAWENDTTLSPRVTAMLEYFSLYEEKNDGPAALIFGDGNIIGARLDRLGLRPLRTVETAEYLGVMSEAGQIYFEPDSVLERGRIEAGGMRYYDHSEGRSYNTVEALEMLAARHDYPAMLAQARVNIADLPHVPPAGQGSPARYDGDLDRHQRYVAYSLNQESFKFLMDPMLATGQEKISAMGYGAAINALSNQEGGVAKYFSQRFAQVTNPPLDSIREADGMTLRVALGAKPNSGAQPAPQIVVPSPILTHLDMLKIREQGRTPVRRFGMRYRVDLTDAVSNAERIVRAIDDLCDAVEEFARETGGIAVISDRHVSSERAAMPLIIVISAINQRLIEEGLRLRVSLIAESGQLCSSHHVAAVLGFGASAVYPLAVQMRAEEKYGPDVDDAVNAFKHFAKAAEKSLMKTMGRVGLCTVESYIGGEFFEPNYLDTSDPVLRKYFPNVVSPVAGVGFSTLAAAVADWHARALAVTGEKDVPLLGLFKERAEGAGHSYGTTAVRGFVDMTEESISFGDEARPENPDMADPTYLRLLPLHQLEGAFGLDDEAYRNNSFDELPTRAIDSFDITPGYRNFVRAMNSERTRRPAALRDVLALPADVNFVRTADEFRREMGQFARLGNNDFQVRGLSCQQTDDVFVLRLAHSPERLAALASSLRTRFGREITHHEIVGDELRITATGQAADYLAQIRTAPESIPLSSVQPASEITPTLTSGAMSHGALVAPAHEAVAHGTNLVGGLSNCGEGGEHISRYGTIRGSRIKQFASGRFGVWAGYLADPMLQELEIKIGQGAKPGEGGQLPAPKVTVQIAAARGGTPGVELVSPPPHHDTYSIEDLAQLIHDCKAARVRVIVKLVSSEGIGTIAVGVAKAGADVINVAGNTGGTGAAAVTSLKYAGRSAEIGVAEVHQALCANGIRQKVVLRCSGAHQTASDVVKSALLGADSFEFGTTALMMLKCVMAKNCNIKCPAGLTTNAEVFEGDPRALAQYLLNIAHEVREILAALGMRTLREARGRSDLLHLLDHPSSIGTLDLRRMLAVAEEFVVENPVYMEKDYSVDDAFAAQFDARGAVLKPVTLTNQNKSVGGQLAIDIERSLNYQNIEGPAVATDERGRRYLLPESIAITTTGSAGQSYGVFCNDGMVLTHTGTCNDGVGKSACGGTITVRSPGGGSSEPGGNVLIGNFALFGASGGRLFVQGQAGDRFAVRNSGATAVVEGTGEFLCEYMTNGAVLNIGDFGKGVANGMSGGFLYQYDPHGQLPSKVSHDSVLVLPITDAPFHEAAAHILLQWHVAATGSTKGQALLDDWQSARDHMVYTMSRALLQYQDSDAILQGKTRKELLDELTAALAGYQVHKFKLSYRDRRDVVGGTVPAYGDTDTEGMYALLNTYTVLNMAQQLALSRMPNVTDVTDPRIGKAVRNLVLTEDFFLIQKLQKYAREAIDGYSDEDLAVLIADKRLTDYKDALSQRNVLSMDSPGTYGWILHQSAKNIDKIGRLPSFEELFAHRALPAVALSGPSLQTT

SEQ ID NO: 493 - protein, 118 aa, Candida glabrata CBS 138
MGNTTEDDIDKQIELREQDRWLPINNVARLMKNTLPETAKVSKSAKECMQECVSEFISFVTSEASDRCAQDRRKTINGEDILISLHALGFENYAEVLKIYLAKYRQQQALKNNYEEDS

SEQ ID NO: 494 - protein, 2394 aa, Vitis vinifera
MASTAQSIRFGAPAAGSSLDALNRILADLCARGPPKDGAALALKIHLEEEARDLSGEAFSRFMDQLYDRISNLLDSNDVAENMGALRAIDELIDVALGESASKVSKFSGYVRTVFEAKRDRDVLILASTVLGHLARAGGAMTADEVECQVQNALEWLRGERIEYRRFAAVLILKEMAENASTVFNVHVPEFVDAIWVALRDPTLPIRERAVEALRACLRVIEKRETRWRVQWYYRMFEATQDGLGRNAPVHSIHGSLLAVGELLRLVKMFMMSRYREVADIVITYLEHKDRLVRLSITSLLPRIAHFLRDRFVTNYLNICMNHILAVLRQPAERDSGFIALGEMAGALDGELVHYMPTIISHLRDAIAPRRGRPSLDALTCVGSIAKAMGSVMEPYVRSLLDVMFFPGLSHALIEALEQITASIPSLLPTIQDRLLDCISIALSRSHYPLARPAVAMARGSTVNTAQQVLDFSSPALVQLSLQTLAHFNFKVCVLTLSNMKLSNSFSGTTCPQFSSSRSNRTGGKRRRLVEEIVEKLLIAAIADADVTVRRSIFLSLHENGGFDEFLAQADSLSAVFAALNDEDFDVREYAISVSGRLSEKNPAYVLPALRRHLIQLLTYLEQSADSKCREESAKLLGCLIRNCERLILPYIAPIHKALVAKLAEGSGVNANNGIISGVLVTVGDLARVGGSAMRDNVTDLMPLIVEALMDGAAVTKREVAVATLGQVVQSTGYVIAPYNAYPQLLGLLLKLLNGELAWTTRREVLKVLGIMGALDPHVHKRNQQCLPGLHGEVARPASDTGQHIRSMDELPMDLWPSFATSEDYYSTVAINSLMRILRDASLSSYHQKVVGSLMFIFKSMGLGCVPYLPKVLPDLFLTVRTCEDGLKEFITWKLGTLVSIVRQHIRKYLPELLLLISELWPSFSLPSSNRPILHLVEQLCLALNDEFRTYLPLILPSCIQVLSDAERCNDYTYVLDILHTLEVFGGTLDEHMHLLLPALIRLFKVDASVAIRRAAFKTLTRLIPRVQVTGHISALVHHLKLVLDGSNDELRKDAVDALCCLAHALGGDFTIFIPSIHKLLMKHRLRHKEFEEIEGRLQRREPLILGSTAAQRLISRFPVEVTSDPLNDVNDGRLRTAGEASQRSTKEDWAEWMRHFSIELLKESPSPALRTCARLAQLQPFVGRELFAAGFVSCWAQLNDTSQKQLVRSLEMAFSSPNIPPEILATLLNLAEFMEHDEKPLPIDIRLLGALAEKCRAFAKALHYKEMEFEGARSKKMDANPVAVVEALIHINNQLHQHEAAVGILTYAQQNLDVQLKESWYEKLQRWDDALKAYTAKASQASTPHLVASYIGRMRCLAALARWEELNNLCKEYWTPAEPAARLEMAPMAANAAWNMGEWDQMADYVSRLDDGDETKLRVLGNTTASGDGSSNGTFFRAVLLVRRGKYDEAREFVERARKCLATELAALVLESYDRAYSNMVRVQQLSELEEVIDYCTLPVGNPVAEGRRALIRNMWTERIQGAKRNVEVWQVLLAVRALVLPPIEDIENWLKFSYLCRKNGRISQARSTLIKLLQYDPETSPENVRYHGPPQVMVAYLKYQWSLGEDLKRKEAFGRLQNLAIELSSANIQSATSTGLMSTSSVSVPLLARVYRRLGTWQWALSPALDEDSIQEILSAFRNATQCATKWAKAWHSWALFNTAVMSHYTLRGFPNIAAQFVVAAVTGYFHSIAFAANAKGVDDSLQDILRLLTLWFNHGATAEVQMALHKGFSYVNIDTWLVVLPQIIARIHSNNHAVRELIQSLLVRIGESHPQALMYPLLVACKSISNLRRAAAQEVVDKVRQHSGTLVDQAQLVSTELIRVAILWHEMWHEALEEASRLYFGEHNTEGMLKALEPLHEMLEEGAMRDDITAKESAFIQAYRHELLEAYECCMKFKRTGKDAELTQAWDLYYHVFRRIDKQLQALTTLDLQARCNFEFILFHRKLAVPGQYRAGSPLVTIEYFAHQLVVITSKQRPRKLTIRGSDGEDYAFLLKGHEDLRQDERVMQLFGLVNTLLENERKTAEKDLSIQRYAVIPLSPNSGLIGWVPHCDTLHHLIREYRDARKITLNQEHKYMLGFAPDYDHLPLIAKVEVFEYALQNTEGNDLARVLWLKSRTSEVWLDRRTNYTRSLAVMSMVGYLLGLGDRHPSNLMLHRYSGKILHIDFGDCFEASMNREKFPEKVPFRLTRMLVKAMEVSGIEGNFRSTCENVMQVLRTHRDSVMAMMEAFVHDPLINWRLFNFNEVPQMSTFASTHVAPVANSEESAPNRELAQPQRGAREKELLQAVNQLGDANEVLNERAVVVMARMSNKLTGRDFSTFDHGLNVKVQVQKLITQARSHENLCQNYVGWCPFW

SEQ ID NO: 495 - protein, 1481 aa, Pseudomonas fluorescens PfO-1
MKAGLYQPDEFKDNCGFGLIAHMQGEPSHTLLQTAIEALTCMTHRGGINADGKTGDGCGLLIQKPDAFLRAIAQETFSVELPKQYAVGMVFFNQDPAKAEAARENMNREILAEGLQLIGWRKVPIDTSVLGRLALERLPQIEQVYIGGEGLSDQDMAVKLFSARRRSSVANAADTDHYICSFSHKTIIYKGLMMPADLAAFYPDLGDQRLQTAICVFHQRFSTNTLPKWPLAQPFRFLAHNGEINTITGNRNWAQARRTKFTNDLMDLEELGPLVNRVGSDSSSMDNMLELMVTGGIDLFRGVRMIIPPAWQNVETMDPDLRAFYEYNSMHMEPWDGPAGVVMTDGRYAVCLLDRNGLRPARWVTTKNGFITLASEIGVWNYQPEDVLAKGRVGPGQIFAVDTETGQILDTDAIDNRLKSRHPYKQWLRKNALRIQATMEDNDHGSAFYDVDQLKQYMKMYQVTFEERDQVLRPLGEQGYEAVGSMGDDTPMAVLSQRVRTPYDYFRQQFAQVTNPPIDPLREAIVMSLEICLGAERNIFQESPEHASRVILSSPVISPAKWRSLMNLDRPGFERQIIDLNYDESVGLEAAIRNVADQAEEAVRAGRTQIVLSDRHIAPGKLPIHASLATGAVHHRLTEKGLRCDSNILVETATARDPHHFAVLIGFGASAVYPFLAYEVLGDLIRTGEVLGDLYEVFKNYRKGITKGLLKILSKMGISTIASYRGAQLFEAIGLSEEVCELSFRGVPSRIKGARFVDIEAEQKALATESWSPRKPIQQGGLLKFVHGGEYHAYNPDVVNTLQAAVQQGDYAKFKEYTSLVDNRPVSMIRDLFKVKTLDTPLDISEVEPLESVLKRFDSAGISLGALSPEAHEALAEAMNRLGARSNSGEGGEDPARYGTIKSSKIKQVATGRFGVTPEYLVNAEVLQIKVAQGAKPGEGGQLPGGKVNGLIAKLRYAVPGVTLISPPPHHDIYSIEDLSQLIFDLKQVNPKALVSVKLVAEAGVGTIAAGVAKAYADLITISGYDGGTGASPLTSIKYAGAPWELGLAETHQTLRGNDLRGKVRVQTDGGLKTGLDVIKAAILGAESFGFGTAPMIALGCKYLRICHLNNCATGVATQNEKLRKDHYIGTVDMVVNFFTYVAEETREWLAKLGVRSLEELIGRTDLLEVLEGQTAKQHHLDLTPLLGSDHIPADKPQFCGVERNPPFDQGLLAEKMVEMATSAINDLSGAEFDLDICNCDRSIGARISGEIARKHGNQGMAKAPITFRFKGTAGQSFGVWNAGGLNMYLEGDANDYVGKGMTGGKLTIVPPKGSVYKTQESAIIGNTCLYGATGGKLFAAGTAGERFAVRNSGAHTVVEGTGDHCCEYMTGGFVCVLGKTGYNFGSGMTGGFAYVLDQDNTFVDRVNHELVEIQRISGEAMEAYRSHLQNVLNEYVAETDSEWGRELAENLDDYLRRFWLVKPKAANLKSLLSSTRANPQ

SEQ ID NO: 496 - protein, 1489 aa, Xylella fastidiosa 9a5c
MVSSTRQRIEESMLYDASDERDACGFGMVAQLDDQPSRALLEIAIAALSRMTHRGGVAADGLTGDGCGLLIRKPDAFLRALAGEAGIMLGPRYAVGMVFLPGERAAAAHCRQVLEAELQRVGVRLCGWREVPINRSVCGQLARDTLPHIEQVFVDIDPKHSEDAFGVALFLARRRAERQLCDYHDFYVATLSPYAISYKGMVLPDKLPVFYPDLQRSELSSSVIVFHQRFSTNTLPRWPLAHPFRLLAHNGEINTIEGNRRWAQARSKVWQSPRFDMAEFDPVISMKGSDSQSLDNMLELLIAGGMDLLQALRILVPPATRTLEFKDADLASFYEFYGLNTEPWDGPAGIVAYDGRYAACMLDRNGLRPARWMLTADRHFLVASEAGVWELPVERVIRKGKLGPGEMMAIDLKRGDLLDSDAIDRINRARAPYKQWLQQGVTYLQTELIDPSLVEEPFSDQTLCSYQKLFQLSTEEVEQVLRPLAETEQEATGSMGDDTPMAVLSVQIRPLYDYFRQAFAQVTNPPIDPLRESIAMSLTTQLGRETNIFHAGPETVNHVILDSPVLSQRKLRQLLKMPQYLEKNRLIDLSYSVEEGLQAGLKRMCDEAEQAARDGIVMLLLSDRYPVPERPVAHALLATGAVHHHLCRVGLRCDVNLIIETGTARDPHHMACLLGFGATAVYPYLSYQTLFNLGRRGILKLQKAGEQSQIGRSYRKGIYKGLSKIISKMGICTIASYRGAQLFEIVGLDPDVVALCFPDTPARIGGVSLMQLHTEACELTARAWNDRIAPEVGGLLKYVHGGEYHMYNPDVVMTLQHATRTGDAADWRRYMDAVHTRPPSALRDLLQLKKAEIPTPLDHVAPATDVLCRFDTAAISLGALSPEAHEALAVAMNRLGGRSNSGEGGEDPARYGTERRSKIKQVASGRFGVTPEYLINAEVLQIKIAQGAKPGEGGQLPGHKVNDLIARLRYAKPGIGLISPPPHHDIYSIEDLAQLIYDLKQVNPQALVSVKLVSHVGVGTIAAGVVKAGADLITVSGHDGGTGASPISSIRYAGVPWELGVAEVHQALVANDLRERTMLQTDGGLKTGLDVVKAALLGANSFGFGTAPMIVLGCKYLRICHLNNCATGVATQDERLRANHFTGLPERVENFFRLLAEEVRQWLSYLGAMSLDDIIGRTDLLQQLEVSSREGVRVNLSRLLTNACYEGTHCAAKRLYESPDSLSVQIDSLLADAIANKTGGDYRFLIHNTDRSVGTRLSGAIARVHGNHGMEDAPLHLRFRGTAGQSFGAFNVGGLHLELEGEANDYVGKGMAGGCLVVRPPRGARFEARHTPILGNTCLYGATGGELFAAGRVGERFAVRNSGALAVIEGAGDHCCEYMTDGVVLVLGKVGLNFGAGFTGGLAYILDIERDFVDRYNHELIDIHRVSVEGFENYRQHLRHLVVRHRALTGSIWAQQILDEFRDYIGKFWFVKPKAASIESLAESLRSAA

SEQ ID NO: 497 - protein, 523 aa, Legionella pneumophila subsp. pneumophila str. Philadelphia 1
MRRQWYIGFGVILLCLFALFAMLQDIVWFFAFLIPIVILWIYDVLQTKHTILRNFPVLGHVRYFLEFLRPEIQQYFIATDESELPFNRETRSMIYQRAKNVRDTIPFGTERDILSVGYTWALHSLSPKHSSEVEPRIDVGGPDCKKPYNASRLNVSAMSFGSLSANAIMALNKGAKLGGFYHNTGEGGLSPYHLQGGDIVFQIGTAYFGCRDDKGDFDENEFIKEASRDEVKMIEIKLSQGAKPSHGGILPAAKLTEEIAKVRKVPMGKDVLSPIAHTAFDNPVGLLHFVKRLRDLSGGKPIGFKLCLGRRHEFMAICKAMLKTNILPDFITIDGAEGGTGAAPVEYTNFIGTPLEAGLVFVHNALIGTGVRDKIRVICSGKVTNGFDLLTNIALGADICNSARAMMMAIGCIQSKQCNANTCPTGVATQKKRLQYGLVVDQKKFLVANFHNNTIKSFLEMVGALGLNNPSDLKPSHIMRRIGVDEVKSFDQIYTYVKPGQFLQGDIPEDYRIHWEHANPDKF

SEQ ID NO: 498 - protein, 500 aa, Dehalococcoides sp. CBDB1
MKTFLPSKFIVDRIEDRCIKCKVCITQCSFDTHYYDADDDQIKVRNQNCVGCHRCVTFCPTGALVVRNNPLEYRQNANWTPEMIEDIFKQAETGGVLLTGMGMDKAKPIYWDKLLINASQVTNPSIDPLREPMELTTYLGRKPEKATFDKYGNIEVNVAPQVKIDVPLMFSAMSYGAISLNVHRSLAQAAKNMGTMWNTGEGGLHSSLMEFKDNTIVQVASGRYGVQNDYLNSGRIVEIKIGQGAKPGIGGHLPGEKVSADVSLTRMIPMGTDAISPAPQHDIYSIEDLSQLIYGLKEATRYRVPISVKIAAVHNVAAIASGIVRAGADIVTIDGMRGATGAAPKVIRDNVGIPIELALAAVDSRLREEGIRNQASLVISGGIRNSGDVFKAIALGADAVNIGTAALVALGCHLCQQCHTGKCSWGICTSDLALTKRINPEIGAKRLSNLLRGWSLEIKDMLGGLGVNAIESLRGNRLHLRGVGLSAEELKILGVRAAGE

SEQ ID NO: 499 - protein, 96 aa, Physcomitrella patens subsp. patens
VREQDRFLPIANVSRIMKKALPSNAKISKDAKETVQECVSEFISFITGEASDKCQREKRKTINGDDLLWAMSTLGFEDYVEPLKVYLHKYRELEGE

SEQ ID NO: 500 - protein, 1557 aa, Azoarcus sp. BH72
MDLPQKQGLYDPANEHDACGVGFIAHIKGQKNHDIVLQGLEILKNLDHRGAVGADPLQGDGAGILIQLPDALYREEMAKQGVTLPSPGNYGVGMVFMPKEQASRIACEEEMERAARAEGLAVLGWRDVPVNPDMPMSPTVKAKEPVIRQFFVGRGPDIMVTEALERKLYVARRRAANAINALNLKHGQEFYVVSMSARTVNYKGLLLATQVGEYYLDLVDPRTVSALALVHQRFSTNTFPKWNLAHPFRYIAHNGEINTVRGNYNWMRAREKGVHSPLLGDDLQKIWPLIYPGQSDSAAFDNALELLVMSGYSMAHAVMMMIPEAWESHTQMDEKRRAFYEYHAAMMEPWDGPAAVAFTDGRQIGATLDRNGLRPARYLVTDDDYVVMASESGVLPIPDSKIVKKWRLQPGKMFLIDMEQGRIIDDKEIKDSLAAVKPYTDWLTRINIKLDGLEAPADAAAPECAAPMLDRQQAFGYTQEDIKFILEPMGKSGEEGTGSMGNDSPLAVLSSKEKPLYNYFRQLFAQVTNPPIDPIREQLVMSLVSFIGPKPNLLEINEINPPFRLEVTQPVLDFGDMAKIRNIAQYTKNKFRSAELDICYPVAWGKEGVEARLASLCADAESAVLGGYSILIVSDRKVDADNVAIPALLALSAIHQHLVTKGLRTRAGLVVETGSARETHHFAVLAGYGAEAVHPYLALETLQTMAGGGEAGEKYIKHFVKGVGKGLMKVMSKMGISTYMSYTGAQIFEAVGLQQALCDRYFTGTTSQVEGIGVFDVMEETIRLHKKAFSPDPVLATMLDAGGEYAFRVRGEEHMWTPDAIAKLQHSTRSGKFDTYKEYARIINDQSKRHMTLRGLFEIKPAGPPVALDEVESAKEIVKRFATGAMSLGSISTEAHTTLAIAMNRIGGKSNTGEGGEDPMRFKPITQAMKLSQIIGESRVERDIELAAGDSLRSSIKQVASGRFGVTTEYLVNADQIQIKMAQGAKPGEGGQLPGHKVSEYIGYLRHSVPGVGLISPPPHHDIYSIEDLAQLIHDLKNANRNADISVKLVSEIGIGTVAAGVAKAKADHIVVAGHDGGTGASPWSSIKHAGSPWELGLAETQQTLVLNRLRSRIRLQVDGQIKTGRDVVVGALLGADEFGFATAPLVVEGCIMMRKCHLNTCPVGVATQDPELRKRFSGQPEHVVNFFFFIAEEVRELMAQLGIRKFDDLIGRADLLDMKKGIEHWKAKGLDYSRVFYRPNVPASVPRLHTEFQDHGLEKALDNQLIELAKPALEKGEKVEIDLPVRNINRTVGTMLAGEVARRYGHAGLPTDTIHVKLTGTAGQAFGAFLARGVTLELVGEGNDYVGKGLSGGRIIVRPQSEFRGNTGENIIVGNTVLYGATEGEVYFAGVGGERFAVRNSGATAVVEGVGDHGCEYMTGGTVVVLGQTGRNFAAGMSGGVAYVLDEDGSFGGRCNMAQVALEPLPEEVEARKGSESGDELESHGRVDIDHLTMGDELILKGLIERHARFTGSARAREIIDNWSTWRTKFVKVMPHEYRRALAEMAEQRQQQLEAA

SEQ ID NO: 501 - protein, 525 aa, Bacillus subtilis subsp. subtilis str. 168; identical to SEQ ID NO: 126

SEQ ID NO: 502 - protein, 308 aa, Arabidopsis thaliana
MQEFHSSKDSLPCPATSWDNSVFTNSNVQGSSSLTDNNTLSLTMEMKQTGFQMQHYDSSSTQSTGGESYSEVASLSEPTNRYGHNIVVTHLSGYKENPENPIGSHSISKVSQDSVVLPIEAASWPLHGNVTPHFNGFLSFPYASQHTVQHPQIRGLVPSRMPLPHNIPENEPIFVNAKQYQAILRRRERRAKLEAQNKLIKVRKPYLHESRHLHALKRVRGSGGRFLNTKKHQESNSSLSPPFLIPPHVFKNSPGKFRQMDISRGGVVSSVSTTSCSDITGNNNDMFQQNPQFRFSGYPSNHHVSVLM

SEQ ID NO: 503 - protein, 597 aa, Glycine max
  misc_feature (197)..(197): Xaa can be any naturally occurring amino acid
  misc_feature (292)..(292): Xaa can be any naturally occurring amino acid
NSARSNLRKAAAQEVVDKVRQHSGVLVDQAQLVSKELIRVAILWHEMWHEALEEASRLYFGEHNIEGMLNVLEPLHEMLEEGAMKNNVTIKERIFIEAYRQELLEAYECCMNYKRTGKDAELTQAWDIYYHVFRKIDKQLQSLTTLDLESVSPELLECRNLELAVPGSYRADAPVVTIASFARQLVVITSKQRPRKXTIHGSDGDDYAFLLKGHEDLRQDERVMQLFGLVNTLLENSPKTAEKDLSIQRYAVIPLSPNSGLIEWVPNCDTLHHLIREYRDARKITLNQEHKXWLSFAPDYDHLPLIAKVEVFEHALHNTEGNDLARVLWLKSRTSEIWLERRTNYTRSLPVLCLVGYLLGLGDRHPSNLMLHRFSGKILHIDFGDCFEASMNREKFPEKVPFRLTRMLVKAMEVSGIEGNFRSTCENVMQVLRTNKDSVMAMMEAFVHDPLINWRLFDFNEVPQMSMLTSNHVPPVVNSEESAPNRELPHPQRGARGERELLQAANQLGDPNEVLNERAVVVMARMSNKLTGRGFSTCSSVSNNSPQHAVDHSSLISGDTREVDHALSVKLQVQKLIIQASSHENLCQNYVGYGLLT

SEQ ID NO: 504 - protein, 391 aa, Antithamnion sp.
HDIYSIEDLAHVIYDLKQINPDCRVCVKLVAQSGVGTVAAGVAKAKADIILIAGGVGGTGASAQTSIKYAGLPWEMGLAEAHQVLSLNNLRDKVTLRTDGGLRTGRDIVIAAMLGAEEYGIGTASLVAMGCIMVRQCHSNTCPVGVCTQDESLRAKFTGTADKVINLMSFIAEDVRRILASLGLNSLDEAIGRTDLLAQVSRGAPHLDDLDLNPLLVQVDTATAIEYQPDRREEVPDTLDAQILRDGEPFFARGEKMQLTYEVQNVQRSIGARASSSIVRKFGERALPEGRLHVRLTGSAGQSLGAFSTQGLLLDVIGDANDYVGKGLSGATIQLRPPTDASYSAGENTIIGNTCLYGATSGHLYAAGQAGVFAVRISGAEAVVEGCGANG

SEQ ID NO: 505 - protein, 1509 aa, Cyanobium sp. PCC 7001
MAGERDACGVGFLASLKGERSHWVLQQALRGLDCMEHRGGCGGDGDSGDGAGVLCGIPWTYLEAVWPAAADSVSQHRGLGMVFLPAAAERRDEARRFCEAEAAQLGLRSLGWRPVPVDPSVLGPMARSTAPVIEQWLLAADVHGDALEGLLFRLRRRCGDRARETWGPGAGDLYFASLSNRTVVYKGMVRSEVLAAFYADLRDTRFAVSFAVYHRRFSTNTLPRWPLAQPMRLLGHNGEINTLLGNINWAKASEVNLEAVWGHAADDLRPVVNAAFSDSANLDATLELMVRSGRPITESLLTLVPEAFRDQPELADKPEIQAFYEYSACTQEPWDGPALLVFADGRSVGATLDRNGLRPARYCITSDGFVVMGSETGVVDLVESSIVEKGRLGPGQMLAVDLEQCRLLHNWDVKQEVASRHPYGAWLAEHRRTLLAQPWEDQRQLDDLELLQQQTAFGFTAEDLDLVIEDMAGAAKEPTYCMGDDIPLAVLSSKPHLLYDYFKQRFAQVTNPPIDPLREKLVMSLEMHLGRRGSPLRPEPASAAVLHLSSPILNEAELEAVGQQGLPSTTLSTLLSIEDGPAGLEGAINRLRSEAEAAVRGGSQILVLSDRGINATTTYIPPLLAVGAVHHHLLALGLRLQTSLVVDTAQCWSTHHLACLIGFGASAVCPWLTWETTRHWLAHPKTQKLIERGRLPELTAARVQANVRKALEDGLRKILSKIGISLLASYHGAQIFEAIGIGADLIDLAFRGTTSRVAGLSLADLASETLSFHAKAFPELNRTKLEFMGFVQYRTGGEFHLNSPEMAKALHAAVAAGPGYDHFSTYKTLLEHRPVTALRDLLELRPAATPLPLEQVESVESICSRFCTGGMSLGALSREAHEVLAVAMNRIGGKSNSGEGGEDPARFHVLQDVDAEGRSASLPTIRGLRNGDSACSAIKQIASGRFGVTPEYLRSGRQLEIKVAQGAKPGEGGQLPGPKVDPYIAWLRNSKAGVALISPPPHHDIYSIEDLAQLIHDLHQVHPAAKVSVKLVAEIGIGTIAAGVAKANADVIQISGHDGGTGASPLSSIKHAGTPWELGLTEVHRSLLTNGLRDRVLLRADGGLKTGWDVIIAALLGAEEFGFGSVAMIAEGCIMARVCHTNNCPVGVATQKEALRQRFTGLPEHVVNFFLYVAEEVRQLLSVLGVARLEDLIGRTELLQPRDVPLTKTRSLDLSCLIDPVADPADRSWLLHEHDAHGNGPILEDTLLADAAVMAAIEGHGTVERSLAIVNTDRSVGARLAGEIAARHGNRGFQGQLDLTFSGAAGQSFGAFLLQGMNVRLIGDANDYVGKGINGGRVTVVPQAGSRDPGSQVILGNTCLYGATGGELFALGRAGERFAVRNSGARAVVEGTGDHCCEYMTGGIVVVLGSTGRNVAAGMTGGVAFLLDESGGLADRLNPETVTLCDLTTPEQDELLRPLLEAHLQATGSTKAASILADWSSWKSRFKVLVPPSEKETVGLVEREAVAVG

SEQ ID NO: 506 - protein, 1482 aa, Spinacia oleracea
SDNDSGDGSGVMTAIPWDLFNDWGKDQGIGPFDRSHTGVGMVFLPKDDLLAEEAKKVVLDTFAQEGIEVIGWRSVPTNVSVVGRNAKETMPNIQQVFVRIIKEDSTDDIERELYICRKLIERAASSHTWASELYFCSLSNQTIIYKGMLRSEVLGMFYYDLQNERYTSPFAIYHRRYSTNTSPRWPLAQPMRFLGHNGEINTIQGNLNWMRSREPSIQSPVWRGRENEIRPYGNPKASDSANLDSAAELLIRSGRTPEEALMILVPEAYKNHPTLMIKYPEAVDFYDYYKGQMETWDGPALLLFSDGKTVGACLDRNGLAPARYWRTVDNVVYVASEVGVLPMDESKVTMKGRLGPGMMISVDLSSGQVYENTEVKKRVASSNPYGKWVKENLRSLKAVNFLSRALLENDTILRNQQAFGYSSEDVQMVIESMASQGKEPTFCMGDDIPLAVMSQKPHMLYDYFKQRFAQVTNPAIDPLREGLVMSLEVNIGKRGNILEVGPENASQVILPSPVLNEGELEALVNDPLLKAQMLPIFFDIRKGVEGTLEKRLNRLCEAADEAVRNGSQMLVLSDRSEELEPTRPAIPILLAVGAVHQHLIQNGLRMYTSIVVDTAQCFSTHQFACLIGYGASAICPYLALETCRQWRLSNKTVNLMRTGKIPTVTIEQAQNNFCKAVKSGLLKILSKMGISLLSSYCGAQIFEIYGLGKDVVDIAFQGSVSKMGGLTLDELARETLSFWVKAFSEDTAKRLENFGFIQFRPGGEYHVNNPEMSKLLHKAVRNKSESAYAVYQQHLANRPVSVLRDLLEFKSDRAPISVGKVEPATSIVERFCTGGMSLGAISRETHEAIAIAMNRLGGKSNSGEGGEDPIRWRPLTDVVDGYSSTLPHLKGLQNGDTATSAIKQVASGRFGVTPTFLVNADQIEIKIAQGAKPGEGGQLPGKKVSAYIARLRNSKPGVPLISPPPHHDIYSIEDLAQLIYDLHQINPKAKVSVKLVAEAGIGTVASGVAKGNADIIQVSGHDGGTGASPISSIKHAGGPWELGLSETHQTLISNGLRERVILRVDGGLKCGVDVMMAAAMGADEYGFGSLAMIATGCVMARICHTNNCPVGVASQREELRARFPGVPGDLVNFFLYVAEEVRGILAQLGFEKLDDIIGRTDILKPRDISLMKTQHLDLSYILASAGLPTMSSTAIRKQEVHTNGPVLDDQILSDPEIIDAIENEKIVNKTVKIFNVDRAVCGRIAGVIAKKYGDTGFAGQLNLTFEGSAGQSFAVFLTPGMNIRLVGESNDYVGKGMAGGELIVTPAENPGFRPEDATIVGNTCLYGATGGQIFVRGKAGERFAVRNSLAEAVVEGTGDHCCEYMTGGCVVILGKVGRNVAAGMTGGLAYILDEDDTLIPKVNKEIVKIQRVTAPVGQMQLKNLIEAHVEKTGSSKGASILKDWDKYLPLFWQLVPPSEEDTPEASAMFEQMTSEGASLQSA

SEQ ID NO: 507 - protein, 1561 aa, Nostoc punctiforme PCC 73102
MNNQPMNQEQKITANINSRDTYQGQKWLVEERDACGVGFIAHRQNHTSHEIVEKALAALTCLEHRGGCSADRDSGDGAGVLTAIPWDLFQQDFAQRGKEFPSTNNIAVGMIFLPQDQEAAQKARAAVEQVATEEKLIVLGWRVVPVQSDLLGVQARENQPQIEQVLLASVDKSSDELERQLYITRRRISKVATNISEEFYICSLSSRTIVYKGMVRSAVLGEFYQDLKNPVYKSAFAVYHRRFSTNTMPKWPLAQPMRLLGHNGEINTLLGNINWMMAREASLNHPVWGDRIKELKPLVHIDNSDSATLDNVLELLVCSGRTPLEALMIMVPEAYQNQPSLHESPEIVDFYEYYSGLQEAWDGPALLVFSDGKKVGATLDRNGLRPARYLITKDDYIVVASEAGVVDFPEADIVEKGRLGPGQMIAVDLVNHEVLKNWEIKQRIAKQHPYGEWLQQYRQELKSLVISHPSLVNGNGKGQMTNDSGQLTIDKQTLLQLQTAFGYTTEDVEMVIQPMAIAGSEPTFCMGDDIPLAVLSTKSHLLYDYFKQRFAQVTNPAIDPLREKLVMSLKVELGERGNLLEPKPEYARRLKLESPVLTDGELEAIKLSGFATAELSTLFAIANGPEGLKAAVESLQAQAAESVRAGAKILILSDKENDGITTEYTYIPPLLAVGAVHHHLIREGLRMKTSLIVNTAQCWSTHHFACLIGYGAGAVCPYMALDTVRDWCIDPRTQKLMGVQKIPTLTVEQALGNYRKAVESGLLKILSKMGISLLSSYQAAQIFEAIGIGKDLIELGFRGTTSRIGGLSVSELADEVLSFHVKAFPELTTKKLENLGFVQYRPGGEYHMNSPEMVKALHKALDGKNYDHYEVYKKHLQGRPVTALRDLLDFQGERTPISIEEVESVAEIVKRFCTGGMSLGALSREAHETLAIAMNRIGGKSNSGEGGEDPVRYKVLDDVDESGNSPTLPHLKGLRNGDKAFSAIKQVASGRFGVTPEYLVNAKQIEIKIAQGAKPGEGGQLPGPKVSQYIAMLRRSKPGVTLISPPPHHDIYSIEDLAQLIFDLHQINPKAKVSVKLVSEVGIGTIAAGVAKANADIIQVSGHDGGTGASPLSSIKHAGSPWELGLSEVHRVLMENSLRDRVILRVDGGLKSGWDVVIGALMGAEEFGFGSIAMIAEGCIMARICHTNNCPVGVASQKEELRKRFTGIPEQVVNFFYFIAEEVRSLLARLGYRSLSEIIGRADLLKLRPEAKLTKTRSLNLDCLLKLPDTRDNRSWLLHEEVHSNGVVLDDKFLADPDIQAAIRDQSSVKKTYPIVNTDRTVGTRLAGAIASQYGDSGFDGQINLKFTGSVGQSFGAFNLPGISLSLEGEANDYVGKGMHGGEIIIKPPTDATYNASQNVIVGNTCLYGATGGMLFANGQAGERFAVRNSKGIAVIEGAGDHCCEYMTGGVIVVLGKVGRNVAAGMTGGLAYFLDEDDSFRELVNPEIVKIQRVITEVGAKQLQELIQTHAERTGSLKAKKILQNWQEFLPKFWQLVPPSEADSPEANPEKITELSLVTSH

SEQ ID NO: 508 - protein, 1514 aa, Escherichia coli
MTRKPRRHALSVPVRSGSEVGFPQSLGEVHDMLYDKSLERDNCGFGLIAHIEGEPSHKVVRTAIHALARMQHRGAILADGKTGDGCGLLLQKPDRFFRIVAQERLAFRKNYAVGMLFLNKDPELAAAARRIVEEELQRNTLSIVGWRDVPTNEGVLGEIALSSLPRIEQIFVNAPAGWRPRDMERRLFIARRRIEKRLEADKDFYVCSLSNLVNIYKGCVCRRICRVLSGSCGPASGMAICLFHQRFSTNTVPRWPWRNRSAIWRITVKSTPSPVTANGRARTYKFQTPLIPDLHDAAPFVNETGSDSSSMDNMLELLLAGGMDIIRAMRLLVPPAWQNNPDMDPELRAFFDFNSMHMEPWDGPAGIVMSDGRFAACNLDRNGLRPARYVITKDKLITCASEVGIWDYQPDEVVEKGRVGPGELMVIDTRSGRILHSAETDDDLKSRHPYKEWMEKKVRRLVPFEDLPDEEVGSRELDDDTLASYQKQFNYSAEELDSVIRVLGENGQEAVGSMGDDTPFAVLSSQPRIIYDYFRQQFAQVTNPPIDPLREAHVMSLATSIGREMNVFCETEGQAHRLSFKSPILLYSDFKQLTTMKEEHYRADTLDITFDVTKTTLEATVKELCDKAEKMVRSGTVLLVLSDRNIAKDRLPVPAPMAVGAIQTRLVDQSLRCDANIIVETASARDPHHFAVLLGFGATAIYPYLAYETLGRLVDTHAIAKDYRTVMLNYRNGINKGLYKIMSKMGISTIASYRCSKLFEAVGLHDDVVGLCFQGAVSRIGGASFEDFQQDLLNLSKRAWLARKPISQGGLLKYVHGGEYHAYNPDVVRTLQQAVQSGEYSDYQEYAKLVNERPATTLRHLLAITPGENAVNIADVEPASELFKRFDTAAMSIGALSPEAHEALAEAMNSIGGNSNSGEGGEDPARYGTNKVSRIKQVASGRFGVTPAYLVNADVIQIKVAQGAKPGEGGQLPGDKVTPYIAKLRYSVPGVTLISPPPHHDIYSIEDLAQLIFDLKQVNPKAMISVKLVSEPGVGTIATGVAKAYADLITIAGYDGGTGASPLSSVKYAGCPWELGLVETQQALVANGLRHKIRLQVDGGLKTGVDIIKAAILGAESFGFGTGPMVALGCKYLRICHLNNCATGVATQDDKLRKNHYHGLPFKVTNYFEFIARETRELMAQLGVTRLVDLIGRTDLLKELDGFTAKQQKLALSKLLETAEPHPGKALYCTENNPPFDNGLLNAQLLQQAKPFVDERQSKTFWFDIRNTDRSVGASLSGYIAQDARRSGLAADPIKAYFNGTAGQSFGVWNAGGVELYLTGDANDYVGKGMAGGLIAIRPPVGSAFRSHEASIIGNTCLYGATGGRLYAAARARERFGVRNSGAITVVEGIGDNGCEYMTGGIVCILGKTGVNFGAGMTGGFAYVLDESGDFRKRVNPELVEVLSVDALAIHEEHLRGLITEHVQHTGSQRGEEILANWSTFATKFALVKPKSSDVKALLGHRSRSAAELRVQAQ

SEQ ID NO: 509 - protein, 442 aa, Rhizobium leguminosarum bv. viciae 3841
MSYHNPYTPPRKSATFDDYTLAEIRRAAATGIYDIRGAGTKRKVPHFDDLLFLGASISRYPLEGYREKCDTSVVLGARFAKKPIHLKTPITIAGMSFGALSGNAKEALGRGATIAGTSTTTGDGGMTDEERGHSQTLVYQYLPSRYGMNPKDLRRADAIEVVVGQGAKPGGGGMLLGQKISDRVANMRNLPKGIDQRSACRHPDWTGPDDLEIKILELREITDWEKPIYVKVGGARPYYDTALAVKAGADVVVLDGMQGGTAATQDVFIENVGMPTLACIRPAVQALQDLGMHRKVQLIISGGIRSGADVAKALALGADAVAIGTAALVAIGDNDPHWEEEYQKLGTTAGAYDDWHEGKDPAGITTQDPELMKRLDPIAAGRRLANYLKVMTLEAQTIARACGKNHLHNLEPEDLCALTMEAAAMAQIPLAGTNWYPGKGGY

SEQ ID NO: 510 - protein, 1515 aa, Vibrio fischeri ES114
MVDREQNAQGMYTPELEHDACGIGFVAHLKNRKSHDVVTQALDMLARMEHRGGQGCDPCSGDGAGILLQKPHEFLLEEAVKLSIKLPSFEKYGVGVVLFPKDEHKRQQCRDILERNAQRLDLEILGYRVLPVDNSMLGDDPLSTEPQFEHVFISGGPSMSPEELERKLYVLRNYTVRVCLESISNIGDDFYINSLSYKTLVYKGQLTTEQVPQYFLDLQNPTMVTALALVHSRFSTNTFPRWRLAQPFRYIAHNGEINTVRGNLNWMKAREAIIESDLFTQQEIDMLLPICQEGSSDSSNFDMALELLVLSGRSLPHALMMMIPEAWQENKNMDPTRRAFYQYHANVMEPWDGPASVCFTDGVQVGATLDRNGLRPSRYTVTKDDFLVMASESGVVDIAPENVEFRGRLQPGRIFVADLEQGRIISDEEVKDGIANAQPYQKWVEENLLSLNKLPEATNQFSQPSPERLLNRQQAFGVTSEEVNEIILPLAKTAYEPLTAMGADWPLAILSHQSQHLSNYFKQLFAQVTNPPIDPIRERMVMSLNTYLGKDQNLLTETPEHCQKVELESPVLSNSELEKLRAIDNEHLQAKTLDIVFQANEDAGKLERALKRICQYAEDAVIDGYSIILLTDRAVNSNHAAIPAMLAVGAVHHHLIRKGLRAKCDIVIETGDARETHHFATLVGYGANAVNPYLVIETIVELQRTKKLDPEVSTKEYFDNYRKGVNGGLLKIFSKMGISTLQSYHGAQIFEALGISKPVVDKYFTGTVSRIQGLTIDDIAKEVLIRHRVGYPTREIPVQVLDVGGVYQWKQRGEKHLFNPETISLLQESTRNKDYAQFKKYAKAVDDQGDDAATLRSQLDFIKNPAGSIPLEEVEPIENILKRFATGAMSFGSISHEAHSTLAVAMNRIGAKSNSGEGGEDPIRFEKKDNGDWERSAIKQVASGRFGVTSYYLTNADELQIKMAQGAKPGEGGQLPGDKVDDWIGATRHSTPGVGLISPPPHHDIYSIEDLAQLIYDLKNANRKGRVNVKLVSEAGVGTIASGVAKAKADVVLIAGFDGGTGASPMSSIRHTGLPWELGLAETHQTLLKNGLRNRIVVQSDGQMKTPRDLAVATLLGAEEWGVATAALVVEGCIMMRKCHKNTCPVGIATQNKTLRERFDGRVEDVVTFFQYMAEGLREVMAELGFRSIDEMVGQSHKLKVRDDIGHWKYKNLDLTPVLHIEQPRAEDGIYNQIQQQHNLEDVLDRKLIQAAIPALERGEAVTAEFDIINTDRSVGTMLSNEISKVYKDQGLPQPMNVKFNGSAGQSLGAFLAKGVKFEVEGDANDYWGKGLSGGTLVLYPDAKSTIVAEDNIVVGNVCFYGATSGESYIRGMAGERFCVRNSGAKVVVEGVGDHGCEYMTGGVAVILGSTGRNFAAGMSGGIAYVWDKSGDFESKLNPELVDLDPIEQEDKDLLLEMLTKHVEFTGSEVAQSFLDNFEANLASLAKVMPRDYKAVLQKRKAEAQQAQTEEVEAV

SEQ ID NO: 511 - protein, 1579 aa, Bordetella parapertussis 12822
MPYTKSSDSCRPVAATPIDASRIGLPAPQGLYHPHNEHDACGVGFVAHIKGRKSHSIIQQGLKILENLDHRGAVGADKLMGDGAGILIQIPDALYRDELAQQGIVLPPPGEYGVAMVFLPKETASRLACEQELERSVRAEGQIVLGWRDVPVDVEMPMSPAVRGLEPVIRQLFIGRGADVMVPDALERKLYVIRKTASHAIQNMRLAHGKEYFVPSASVRTVVYKGLLLADQVGRYYRDLADPRTVSALALVHQRFSTNTFPAWPLAHPYRMIAHNGEINTVKGNFNWLRAREGMMQSAVLGDDLKKLYPIVYEGQSDTATFDNCLELLVNSGYSLAHAMMMMIPEAWEQHTQMDESRRAFYEYHAAMMEPWDGPAAVAFTDGRQIGATLDRNGLRPARYLITDDDMVIMASEAGTLSIPENRIVKKWRLQPGKMFLIDLEQGRIIDDGEIKLQLANSRPYRQWIERLQVKLESLPAPRTASPATQTAVPLLDRQQAFGWTQEDFKFILEPMAASGEEVIGSMGNDAPLAVLSNRSKPFYNYFRQLFAQVTNPPIDPIREQMVMSLVSFIGPKPNLLDINNVNPPLRLEVTQPVLDFAAMAQIRDIDQVTGKKFRSYELDITYPTAWGSEGIEARVAALCARAVDAVQSGYNILIVSDRLVDADRVAIPALLATSAVHQHLIRAGLRTNAGLVVETGSAREVHHFALLGGYGAEAIHPYLALESLGHLADPDKAIKNYIKAIGKGLNKVMSKMGISTYMSYCGAQIFEAVGLQRALVDKYFTGTASNIEGIGIFQVAEEALRMHHAAFGNDPVLANDLDAGGEYAFRIRGEEHMWTPDSIAKLQHASRSNNYRTYKEYAQIINDQSRRHMTLRGLFEFRFDPTRAIPLDDVEPAKEIVRRFATGAMSLGSISTEAHSVLAVAMNRIGGKSNTGEGGEDELRYRAEMRSGGSAIKDGDTLASVLGNDRVEADVALRAGDSLRSRIKQVASGRFGVSAEYLSSADQIQIKMAQGAKPGEGGQLPGHKVSEYIAKLRYSVPGVGLISPPPHHDIYSIEDLAQLIHDLKNVNARASVSVKLVSEVGVGTVAAGVAKAKADHVVIAGHDGGTGASPVSSIKHAGTPWELGLAETQQTLVLNRLRSRIRVQADGQMKTGRDVIIGALLGADEFGFATAPLVVEGCIMMRKCHLNTCPVGVATQDPELRKKFQGKPEHVVNYFFFVAEEVREIMAQLGIRRFDDLIGRTDLLDMRASVEHWKAQGLDFSRVFHRIVSDADVRQTEEQDHGLAGALDHQLIERSKPALERGEKVSFIVPVRNRNRTIGAMLSGAVAARYGHDGLPDDTIHIQCNGTAGQSFGAFLAHGITMDLVGEANDYVGKGLSGGRIVVRSPNDFRGFGPDHIIAGNTVLYGALSGEAFFNGVAGERFAVRNSGAATVVEGTGDHGCEYMTGGTVVVLGTTGRNFAAGMSGGVAYVWDPDRTFRERCNSAMVELEPVLPHAEQQSANEIESWHSAQRGGERSTDETILRRLVEDHFRYTGSFRAREILGDWEASRGKFVKVMPTEYRRALGELWRAANPQQMAA

SEQ ID NO: 512 - protein, 1477 aa, Xylella fastidiosa Ann-1
MLYDASDERDACGFGMVAQLDDQPSRALLEIAIAALSRMTHRGGVAADGLTGDGCGLLIRKPDAFLRALAGEAGIALGPRYAVGMVFLPGERAAAAHCRQVLEAELQRVGVRLCGWREVPINRSVCGQLARDTLPHIEQVFVDIDPKHSEDAFGVALFLARRRAERQLCDYHDFYVATLSPYAISYKGMVLPDKLPVFYPDLQRSELSSSVIVFHQRFSTNTLPRWPLAHPFRLLAHNGEINTIEGNRRWAQARSKVWRSPRFDIAEFDPVISMKGSDSQSLDNMLELLIAGGMDLLQALRILVPPATRTLEFKDADLASFYEFYGLNTEPWDGPAGIVAYDGRYAACMLDRNGLRPARWMLTADRHFLVASEAGVWELPVERVIRKGKLGPGEMMAIDLKRGDLLDSDAIDRINRARAPYKQWLQQGVTYLQTELIDPSLVEEPFSDQTLCSYQKLFQLSTEEVEQVLRPLAETEQEAAGSMGDDTPMAVLSAQIRPLYDYFRQAFAQVTNPPIDPLRESIAMSLTTQLGRETNIFHAGPETVNHVILDSPVLSQRKLRQLLKMPQYLEKNRLIDLSYTVEEGLQAGLKRMCDEAEQAARDGIVMLLLSDRYPVPERPMAHALLATGAVHHHLCRVGLRCDVNLIIETGTARDPHHMACLLGFGATAVYPYLSYQMLFNLGRRGILKLQKAGEQSQIGRSYRKGIYKGLSKIISKMGICTIASYRGAQLFEIVGLDPDVVALCFPDTPARIGGVSLMQLHTEACELTARAWNDRIAPEVGGLLKYVHGGEYHMYNPDVVMTLQHATRTGDAADWRLYMDAVHTRPPSALRDLLQLKKAEIPTPLDQVAPATDVLCRFDTAAISLGALSPEAHEALAVAMNRLGGRSNSGEGGEDPARYGTERRSKIKQVASGRFGVTPEYLINAEVLQIKIAQGAKPGEGGQLPGHKVNDLIARLRYAKPGIGLISPPPHHDIYSIEDLAQLIYDLKQVNPQALVSVKLVSHVGVGTIAAGVVKAGADLITVSGHDGGTGASPISSIRYAGVPWELGVAEVHQALVANDLRERTTLQTDGGLKTGLDVVKAALLGADSFGFGTAPMIVLGCKYLRICHLNNCATGVATQDERLRANHFTGLPERVENFFRLLAEEVRQWLSYLGEMSLDDIIGRTDLLQQLEVSSREGVRVNLSRLLTNACYEGTHCAAQRLYESPDSLSVQIDSLLADAIANKTGGDYRFLIHNTDRSVGTRLSGAIARVHGNHGMEDAPLHLRFRGTAGQSFGAFNVGGLHLELEGEANDYVGKGMAGGCLVVRPPRGARFEARHTPILGNTCLYGATGGELFAAGRVGERFAVRNSGALAVIEGAGDHCCEYMTDGVVLVLGKVGLNFGAGFTGGLAYVLDIERDFVDRYNHELIDIHRVSVEGFENYRQHLRHLVVRHRALTGSIWAQQILDEFRDYIGRFWLVKPKAASIESLAESLRSAA

SEQ ID NO: 513 - protein, 1524 aa, Prochlorococcus marinus subsp. marinus str. CCMP1375
MPKQPHIPNWPYCDSSSPNALTGERDACGVGFLAQIEGNSNHWVLEQALRGLECMEHRGGCGGDSDSGDGAGLLCEIPWSFLESIWSEIKSRNNSQKLGLGMLFMPNNLEECTKAKNIFEKEAKTLGLTSRGWREVPVNPSVLGPLAKETAPFILQWLVEGNDQEENFESLLFRLRKRIQNQCANSFKEIDKQPYIASLSSRTVVYKGMVRSEVLADFYQDLRHKEFKISFAIYHRRFSTNTLPRWPLAQPMRLLGHNGEINTLLGNLNWAKATEVHLEEIWGESAKDLTPVVNSSFSDSANLDATLELLVRSGRPITDSLLTLVPEAFRDQPELEEQEEINAFYEYSACTQEAWDGPALLVFSDGHFIGATLDRNGLRPARYCVTKDNLVIMGSETGVVDIEDSQIIEKGRLGPGQMLAVDLQKGRLLKNWEVKKEAANRHPYQSWLSANRVIFKNQPWVEKTNLEQLDLLQKQTAFGFSAEDFDLIINTMASEGKEPTYCMGNDIPLAILSNKAHILYDYFKQRFAQVTNPPIDPLREKLVMSLEMHLGKKGSPLSPQKDGFSVISLNSPIINENDLIKLCSQGLSTKIISTLISIEEGLIGLEKVLKDICNDAELAVRNGTRVLILSDRGLNQSKTYIPPLLAVGAVHHHLLKHKLRLDVSIIIDTAQCWSTHHVACLIGYGASAICPWLAWETTRHWWKSPKTQKLIESQNLANLTIQTAQANLKKALEDGLRKILSKIGISLLASYNGAQIFEAVGIGADIIDIAFKGTTSRISGLTLKELANETLSFHSKAFPNIDLKKLEFFGFVQFRSGGEFHLNNPAMSKALHSAVRQGSNYDHFSTYQSLLESRPATSLRDLLTFKKAKKPLPIEQVESVENICKRFCTGGMSLGALSREAHEVLAIAMNRIGGKSNSGEGGEDPQRFKILTDVDEQNLSASFPNLKGLKNGDSACSAIKQIASGRFGVTPEYLRSGKQLEIKVAQGAKPGEGGQLPGKKVDTYIAKLRNSKAGVALISPPPHHDIYSIEDLAQLIHDLHQIHPKAKVSVKLVAEIGIGTIAAGVAKANADVIQISGHDGGTGASPLSSITHAGLPWELGLTEVHRVLLENGLRNRVLLRADGGLKTGWDVVMAALLGAEEYGFGSIAMIAEGCIMARICHTNKCPVGVATQQEALRKRFSGVPEHVVNFFLFVAEEVRQIMSLLGASTLEEIIGNTEMLQSRNVKLAKTKEVDLSSLLKPIPKVQDRSWLVHQIEPHSNGNVLENALLKDSEICNAIINHGNVSRIIPIANTDRSVCARISGEIAKEHGNKGFKGTLDLTFKGASGQSFGAFLLQGMNVRLIGEANDYVGKGINGGAITLIPPTINENASNQVILGNTCLYGGTGGKLFALGKAGERFAVRNSGVETVVEGAGDHCCEYMTGGIVVVLGETGRNVGAGMTGGITFLLNEDNQVNNRVNTEIVEIHSLLTTEQEDIVKPLIKEHYQKTKSFKAQKIINEWAYYKQKFKILVPPSEKLRLGLLDQ

SEQ ID NO: 514 - protein, 1492 aa, Exiguobacterium sibiricum 255-15
MSFHQIPQRQGLYDPRQEHDACGIGVYAHRTGRASHEIVQNALNMLCQMEHRGGQGSDAKTGDGAGILTQIPDRLFRQALRNVHLPRSGDYGVMMMFLPREDRLRQRLERALESIILSEGQRLIEWRTVPVTNTVIGEKARQTEPVIRQCFIEANKVEGLAFERALFLIRRLFEREAEQLGIEQYVLSSSSETIVYKGLVTTDQLGLYFDDLQDERYQSGFAIVHSRFSTNTFPSWKRAHPNRYLIHNGEINTLQGNVRAMRSRENGLAKTTYGRRGKDVLPILDESGSDSSMLDNAFEFLYLSGLTLAETALMLVPEPFEHAEVRPAKRAYYEYHSSMMEPWDGPSAIVFTNGKQIGATLDRNGLRPARYMMMRDGHFMLSSESGVLPIAEHDILFKKRLVPGELLLLDFASGQLISDEEVKRELAMRHPYAEWLAEEMITLPADVRTEEVSNLGTLQRLFGYTREDIDQYLIPLVEEKKDPLGAMGTDIPLAVLSERPQSLFRYFKQLFAQVTNPPIDALREQIVTSTMTWLGQQGELLTPNRQNCRRIRLASPVLTPAEAAALKQTKLAHKTLSTVFDGQLEEALEALLEQAVHAVRGGCELLILSDRNVRPGAVPMPILLVTSAIHHHLIREGLRTKASLIIEGGEVREVHHFAALVGYGADAIHPYLVYATLQDAVDETMPDYAERYRSAVTEGVVKVMSKMGISTVFSYRGAQIFEAVGISEEVIDRYFTGTVSQLDGLTLALIEQEALRQHEEGVKRTRLESGSVFRYRHDGEHHAFNPATIHLLQHACRTGRYDLFKTYSSRIQEEPATFLRHLMSFRETTPIPLAEVEPVSEIVKYFKTGAMSYGSLSKEAHETLAIAMNRLGGKSNSGEGGEEEERYQLDENGDSRMSRIKQIASGRFGVTSDYLVHADELQIKVAQGAKPGEGGQLPGEKVYPWIARVRASTPGVGLISPPPHHDIYSIEDLAQLIHDLKRANDRARISVKLVAKGGVGTIAAGVAKGLADVIVISGHDGGTGASPKTSIQHTGLPWELGLAETHQTLALNGLRDRVVLETDGKLLTGRDVVIAAMLGANEYGFATAPLIAVGCIMMRACHLDTCPVGVATQDPKLREKFTGSADHVVHFMEFVAEEVREYLAQLGVRRLADLVGRTDLLQSSDRLKTHWKAASLDLSRLFVMPGYSPENRQYQEHHVSASFDGRELETLITDQSFTEQQTFTFPVTNTDRAIGTNTGSRLTRLYGAMGLPTDRLTLNLTGSAGQSLGAYIPRGMTLNVSGDANDYVGKGLSGGVIAVRPQAKSSFVSSDQVIIGNVALYGATSGELYVNGQAGERFAVRNSGATAVVEGIGNHGLEYMTGGSVVILGDVGLNFAAGMSGGVAYVLPKDVTRFEARINRELVVTGAVSDPEEATRLKTFIERHVARTNSEQGHAILANWDHVLSSFIRVIPSTYQAVTTLMAGYAQQGHNTEEAMLLAFETHIGRGTGGKQ

SEQ ID NO: 515 - protein, 1615 aa, Deinococcus radiodurans R1
MTSSARGADMEKHDQRETPAAGPQTGPQQPATAQEVRRATERGLYANAEHDACGVGMVAHIGGQKSHHIIAQGLKILENLDHRGAVGADPLMGDGAGILLQIPDAFYRAEMSLQGVTLPPPGDYGVGMIFLPKEIASRRACEQELERAVIAEGQVVLGWRDVPINHAMPMSPAVKEKEPVIRQIFIGAGPDTLVPDALERKLYVIRRRASNAILGLNFTHGQEYYVPSMSCRTIIYKGLLLADQVGEYYRDLQQPEVVSALAVVHQRFSTNTFPEWRLAHPYRMVAHNGEINTVKGNFNWMRAREGILSSPVFGDDLGKLYPISYEGESDTATFDNAIELLTLAGYPMAQAAMMMIPEAWEQNALLDDRRRAFYEYHASMMEPWDGPAAMVFTDGRQVGAMLDRNGLRPARYLQTRDGLVVLASESGVLPIPESQIVKKWRLQPGKMFMIDLEQGRIVEDDELKLQFAQAKPYRQWVENTRLRLDDSEETGTVDEFAEPLLKRQQAFGYTQEDLKFLMGPMAKNGEEGIGSMGNDSPLAVLSHRSKPLYNYFRQLFAQVTNPPIDPIRESVVMSLRSFVGPRPNLLDINAVNPAMRLEVEQPILDFDDMARVRNIEAHTRGKFKAFDLDITYPAEWGARGIEAKLATINAWAVDAIESGHNIIILTDKRVDRSRAAIPALLALSSVHHHLVKKGLRMRTGLVVETGDAREVHHFAALAGYGAEAIHPYLALETITDLHTPIPGMPDLTEVTPEKAIYNYVKAIGKGLSKIMSKMGVSTYLSYCGAQLFEAVGLQADFVQKYFYGTASQVGGIGIFEVAEEAIRTHHAAFSGDPLMEKNLNAGGEYAWRAQGEEHMWTPDAVAKLQHSVRSGHAGTYAEYARIINDQSRRHMTLRGLFDFKTEGRNAVPLEEVEPASEIVKRFATGAMSLGSISTEAHATLAVAMNRIGGKSNTGEGGEDPARYERELRGEQFNEGETLASVLGGSRVEVDYPLQPGDSLRSKIKQVASGRFGVTAGYLSSADQIQIKMAQGAKPGEGGQLPGGKVSEYIGFLRHSVPGVGLISPPPHHDIYSIEDLKQLIHDLKNVNPRADISVKLVSEVGVGTIAAGVAKAKADHIVIAGHDGGTGASPWSSIKHAGTPWELGLAETQQTLVLNRLRDRVRVQTDGQLKTGRDVVIAALLGADEFGFATAPLVAEGCIMMRKCHLNTCPVGVATQDPVLRARFQGKPEHVINYFFFVAEEVRQLMASLGVRSFDDLIGRSDLLDMRAGIDHWKAQGLDFSRVFYKPEMPAEVGTRHLTGQDHELDKALDLKLIEKCRPAIEHGERVHFLQDARNVNRSVGAMLSGELVRARPGGLPDQTVFIQMEGTGGQSFGAFLAQGLTLYLIGDANDYTGKGLSGGRVVVRPSIEFRGKAENNIIIGNTALYGATSGEAYFRGVAGERFAVRLSGASAVVEGTGDHGCEYMTGGTVVVLGQTGRNFAAGMSGGVAYVYDVDGQFEKRCNLSMVGLERVQPEDEQLQSAVPHQLHNGKSDEAQLRELIENHHRWTGSSRASELLDDWDSALKKFVKVMPHEYARALRERTQADEGTVQAADTTRMQTGQPDNKFGGKGTLTK

SEQ ID NO: 516 - protein, 507 aa, Thermotoga maritima MSB8
MAKRKVPPEFVVERDDYKCIRCLACVRVCSYGANFYDENANRVYTENTKCVGCHFCEAICPTEAITVRKNDFDIRPLAHWTPEHLIGIMKQAETGGVLLTSMGNDRPYFSYFDRIVLNASQVTNPSIDPLREPMEIRTYIGRKEEKLEIEEDEDGTVKLKTEIAPQLKLEVPVMFTAMSYGSISLNAILSLARAARTVGTFFNTGEGGLPKELREFKDNMIVQVASGRFGVSADYLNAGSAVEIKIGQGAKPGIGGHLPGEKVTEPISETRMIPVGTDALSPAPHHDIYSIEDLRQLIYAIKEATRYEKPVGVKIAAVHNVAPIAAGAVRAGADYIVIDGIRGGTGAAPKITRDHVGIPIEFAVAVVDQRLREEGIRHMASIVVAGGIRNSADVIKAIALGADAVYIGTAALISLGCHLCQTCYLGKCNWGIATQDPKLTKRLNPEIGARRAANLLRAWAHEIKEILGGMGINAIESLRGNREVLRGVGLHEYELKLLGIKPAGEAW

SEQ ID NO: 517 - protein, 165 aa, Brassica napus
MADSDNDSGGHKDGGSASSREQDRFLPIANVSRIMKKALPANAKISKDAKETVQECVSEFISFVTGEASDKCQREKRKTINGDDLLWAMTTLGFEDYVEPLKVYLQKYREVEGERTTTGKQVDKEGGAGGGNGSSGGSGGGGMYGGIVTMGHPHQGHVYGGSGIN

SEQ ID NO: 518 - protein, 1508 aa, Caulobacter crescentus CB15
MAQNIDLYLKNRQALIDGHAYDPSTERDACGVGLVCAIDGQPRREVVELAIKALKALWHRGAVDADGKTGDGAGVLVSVPQDFFIDQVRRTGHALRQGPIAVGQIFLPRTDLGAQETCRTIVEAEALRFGFYIYGWRQVPVDTSVIGEKANATRPEIEQIMLAAPAGLEGEALERALFLCRKRIEKRVHAQNISDFYICSLSAKSLIYKGMFLAEAIDEFYPDLKDERFTAAVAIFHQRYSTNTFPQWRLAQPFRMLAHNGEINTIKGNINWMKSHEIKMAAQAFGEFGDDVKPVIQPGGSDSANLDNTFEVLVRAGRDAPMAKALLVPEAANPKMKDAHKALYSYCNAVMEPWDGPAALCATDGRWVVAGKDRSGLRPLRVAYTDDGLVIMGSEAGMCGVEEARITRKLAISPGRMIAIDLAEGRLYGEEEIIDELATRHPYTEWLGNMVDLEKEIGPGPEPRKFGREELTRRQAAAGYSLEDLEMILAPMVEEGKEAVGSMGDDTPLAVLSEKYRPLSHYFRQNFSQVTNPPIDPLRETGVMSLKTRFKNLGNILAQDAAQADVYVLESPVLTTGMYERIHGLLGEKNVAVIDCTMPLPAEEARAGDALRANLDRIRAEAEDAVLRGCGAIVLTDEASDAERVALPMILATGGVHAHLVAKGLRSYVSIIVRSAECLDTHYFAVLVGVGATAVNAYLAQESFQDRLERGLVGDKSLRDVCINFKTAIEGGLLKIISKMGISVISSYRGGYNFEAVGLSRAMAAEFFPGMPSRISGIGLAGIESKTVELHRKAWGAAAVTLPVGGLYKARRSGEAHAFEARLMHTLQTACDTGDYELYRRWSNGLRTQKPIQLRDLLDWRSDRNPIATDDVESVNEIRKRFVTPGMSLGALSPEAHGALNIAMNRIGARSVSGEGGEDSARYKPLPNGDNPNSAIKQVASGRFGVTAEYLNQCVELEIKVAQGAKPGEGGQLPGFKVTEMIARLRHSTPGVMLISPPPHHDIYSIEDLAQLIYDLKQINPIARVTVKLVAATGIGAIAAGVAKAKADVILVAGGVGGTGASPQTSVKYAGGPWEMGLSEANQVLTLNNLRHSVVLRADGGMRTGRDIVIAAMMGAEEFGIGTASLVAMGCIMVRQCHSNTCPVGVCTQDEALRAKFTGTPDKVINLFTFIAEEVREILAGLGFKSLQEIVGRTDLLAQVSRGGEHLDDLDLNPLLVRADPGANKPYNTVVGRNAVPDTLDAQIVRDAAPLLERGEKMQLTYTVRSTARTIGTRTSSHIVRKFGMKGLPSGHLTVQLKGSAGQSLGAFAVQGLRIELTGEANDYVGKGLSGATIVIKPARGLAAPETNTLIGNTVLFGATSGRLFAAGQAGERFAVRNSGATTVVEGCGANGCEYMTGGQVVILGPTGGNFGAGMTGGMAFVLDQHDRFEDNINPDSIVVQRLASPYWEGVLRALIAEHARETDSVFAATLLRDWDRVRDQFWQVCPKEMVSRLPQPLTAEEAVHERA

SEQ ID NO: 519 - protein, 2513 aa, Arabidopsis thaliana
MSTSSQSFVAGRPASMASPSQSHRFCGPSATASGGGSFDTLNRVIADLCSRGNPKEGAPLAFRKHVEEAVRDLSGEASSRFMEQLYDRIANLIESTDVAENMGALRAIDELTEIGFGENATKVSRFAGYMRTVFELKRDPEILVLASRVLGHLARAGGAMTSDEVEFQMKTAFDWLRVDRVEYRRFAAVLILKEMAENASTVFNVHVPEFVDAIWVALRDPQLQVRERAVEALRACLRVIEKRETRWRVQWYYRMFEATQDGLGRNAPVHSIHGSLLAVGELLRVYSLMLEFVCRNTGEFMMSRYREVAEIVLRYLEHRDRLVRLSITSLLPRIAHFLRDRFVTNYLTICMNHILTVLRIPAERASGFIALGEMAGALDGELIHYLPTIMSHLRDAIAPRKGRPLLEAVACVGNIAKAMGSTVETHVRDLLDVMFSSSLSSTLVDALDQITISIPSLLPTVQDRLLDCISLVLSKSHYSQAKPPVTIVRGSTVGMAPQSSDPSCSAQVQLALQTLARFNFKGHDLLEFARESVVVYLDDEDAATRKDAALCCCRLIANSLSGITQFGSSRSTRAGGRRRRLVEEIVEKLLRTAVADADVTVRKSIFVALFGNQCFDDYLAQADSLTAIFASLNDEDLDVREYAISVAGRLSEKNPAYVLPALRRHLIQLLTYLELSSADNKCREESAKLLGCLVRNCERLILPYVAPVQKALVARLSEGTGVNANNNIVTGVLVTVGDLARVGGLAMRQYIPELMPLIVEALMDGAAVAKREVAVSTLGQVVQSTGYVVTPYKEYPLLLGLLLKLLKGDLVWSTRREVLKVLGIMGALDPHVHKRNQQSLSGSHGEVPRGTGDSGQPIPSIDELPVELRPSFATSEDYYSTVAINSLMRILRDASLLSYHKRVVRSLMIIFKVLPELFHTVRTSDENLKDFITWGLGTLVSIVRQHIRKYLPELLSLVSELWSSFTLPGPIRPSRGLPISYGEYFASLTDNQVLHLLEHLCLALNDEFRTYLPVILPCFIQVLGDAERFNDYTYVPDILHTLEVFGGTLDEHMHLLLPALIRLFKVDAPVAIRRDAIKTLTRVIPCVQVTGHISALVHHLKLVLDGKNDELRKDAVDALCCLAHALGEDFTIFIESIHKLLLKHRLRHKEFEEIHARWRRREPLIVATTATQQLSRRLPVEVIRDPVIENEIDPFEEGTDRNHQVNDGRLRTAGEASQRSTKEDWEEWMRHFSIELLKESPSPALRTCAKLAQLQPFVGRELFAAGFVSCWAQLNESSQKQLVRSLEMAFSSPNIPPEILATLLNLAEFMEHDEKPLPIDIRLLGALAEKCRVFAKALHYKEMEFEGPRSKRMDANPVAVVEALIHINNQLHQHEAAVGILTYAQQHLDVQLKESWYEKLQRWDDALKAYTLKASQTTNPHLVLEATLGQMRCLAALARWEELNNLCKEYWSPAEPSARLEMAPMAAQAAWNMGEWDQMAEYVSRLDDGDETKLRGLASPVSSGDGSSNGTFFRAVLLVRRAKYDEAREYVERARKCLATELAALVLESYERAYSNMVRVQQLSELEEVIEYYTLPVGNTIAEERRALIRNMWTQRIQGSKRNVEVWQALLAVRALVLPPTEDVETWLKFASLCRKSGRISQAKSTLLKLLPFDPEVSPENMQYHGPPQVMLGYLKYQWSLGEERKRKEAFTKLQILTRELSSVPHSQSDILASMVSSKGANVPLLARVNLKLGTWQWALSSGLNDGSIQEIRDAFDKSTCYAPKWAKAWHTWALFNTAVMSHYISRGQIASQYVVSAVTGYFYSIACAANAKGVDDSLQDILRLLTLWFNHGATADVQTALKTGFSHVNINTWLVVLPQIIARIHSNNRAVRELIQSLLIRIGENHPQALMYPLLVACKSISNLRRAAAQEVVDKVRQHSGALVDQAQLVSHELIRVAILWHEMWHEALEEASRLYFGEHNIEGMLKVLEPLHDMLDEGVKKDSTTIQERAFIEVGNFNPGFLAYRHELKEAHECCCNYKITGKDAELTQAWDLYYHVFKRIDKQLASLTTLDLESVSPELLLCRDLELAVPGTYRADAPVVTISSFSRQLVVITSKQRPRKLTIHGNDGEDYAFLLKGHEDLRQDERVMQLFGLVNTLLENSRKTAEKDLSIQRYSVIPLSPNSGLIGWVPNCDTLHHLIREHRDARKIILNQENKHMLSFAPDYDNLPLIAKVEVFEYALENTEGNDLSRVLWLKSRSSEVWLERRTNYTRSLAVMSMVGYILGLGDRHPSNLMLHRYSGKILHIDFGDCFEASMNREKFPEKVPFRLTRMLVKAMEVSGIEGNFRSTCENVMQVLRTNKDSVMAMMEAFVHDPLINWRLFNFNEVPQLALLGNNNPNAPADVEPDEEDEDPADIDLPQPQRSTREKEILQAVNMLGDANEVLNERAVVVMARMSHKLTGRDFSSSAIPSNPIADHNNLLGGDSHEVEHGLSVKVQVQKLINQATSHENLCQNYVGYVPLHFYTPKPRLL

SEQ ID NO: 520 - protein, 2360 aa, Cryptococcus neoformans var. grubii
MSSQSDVLDNIFQRLSARSEDVRAQAGQDLAEHVVAYTQEYPGHDASKGVWAQVFHKTFEFTRSNNQLERLGAIIAISQLLQLTKDDTPDRAQQKVLRLYEYLRPLTTCGDSTVMLPASLVVEDMVRNSPTLHTDTFLGKEVGQALVMIDDSRQEVGRFSGALLLYAFARAAPGVFHQYISKVLEKIWIPLRDSRSVVRERASMLLSTCLDTLKTRGDRPSTDTYRKIFEEARLGLLKASSTESILGSLLAFNSMLQNQQLSMAEYYRSICELTFKYRDSKEVSIRKAVIALIPSMATYDSDDFEAHYLHRGMAYLLQALNRPADRDISYVALGHMAVHLGSKMKPFIDDIMRIIRDHLRMRGKKNAPYEAPIFQCLAMLATSVGPMLTRQMHEILDLMFPWGLSEPLCTALQATASHIPPLLRTIQDRLLEMLSQTLTGQSYRPLGAPAPRGGAQMDLNLLQSTTNAQSTDTLKLALRLLARFDFVGHTLSEFVRDAALPYLEHDSVEVRREAVLATTTLFMTDPICQQTSSNSVEIVNDVLSKLLTVAITDPNAGIRRTVLDHLEDKFDRHLAQAADIRCLFIALNDEVFGNRERTISIIGRLAHHNPAYVMPHLRKSLINIVTELEYSTNARQKEESAKLLCLMIGAAAGLVKSYAPTILSVLLRTASSPESSIGVQAECLKCIGELARVAGEELVPSVRAILDLVIEMLNDQSSPAKRDTALKTLGQIASNTGEVIKPYTDYPQLMGVLFKFLRMEANSSVRQETIKTIGMLGALDPFKHKTLLGDVDDPIDEGTTSRVNDIVLLNQHNSSVNDEFFQTVVIHSLVNVLHDSTYKDHYQAVEAIMMIFRTQRLRCVNFLPQIVPAFLNVIRIAHSSRTELYLKQLAQFITIVKLHIRNYLNDVFDLIHEFWNPNSTLQITIISLVEAIAKAVEGEFKAYLPKLLQQILRSFDGDLSAKHLPELKLNTLLQILKAFYVFGESIEDYLHLVLPVIVRSFENPAAPDSLRIAALRTTGQLCRKVNFSDHASQIIHPLVRTLGNSSEELRQTAMETLCVLVLQFGPDYAIFIPMVNKALVENKISHPGYEALITKLLNRERLPPDLGPVERYASDSAAEASAPEPVALKVNQQALKLAWDCSHLLNTSSRTEWISWIIGLGHEMMRESPSQAIRAARSLALSSVAFTKELFNVAFYSCWQELFESYQEDLWHNLDRAIKKDDVPGDVVNMILGATQFLEHDEKEVAIESRVLGSVAANYQALAVALHYKEQEFFLDPSKEVIEDLIDVNQKLQQSDAAWGTLEWAQTEMGMTTEVEWYEKLGRWEEALQVWNERDADASTTFSEWEITEGKVTCLHAMGEWEQLSDFVQARWANRTAEEKKLLSPLAAAASWSLKQWDLMDDYISAMKGDGADRAFFKAILAVHRNQIPAALKQISKARERLDPELTTLTGDSYGRAYDTVVRIQMLAELEEIIAYKDHADEPARQEMQRQTWKKRLAGCQRDVEVWQRILQVRSLVLKPNEDMDTWIEFADLCRTSDRLNLAEKTLTSLVGFQYPSMEDTRGRAPPPIIFAYLRMAWAKNLQIDSREERYETLQHLRDFTDQLTDDVGIGARGPNGRLMLPDQKLYGSYTKLLAQCHVELGQWQATLRESQGSADPSGILHDYCLATELDPEWYQAWHTWALANFEVITQLEVSQQGLSPVHFTTYIIPAVEGFLKSISLSPGNSLQDTLRLLTLWFTYGYSSGVTAAVSQGLPTVNIDVWLEVIPQIIARIQTPRQSIQQLIVQLLHDIGKAHPQALIYPLTVASKSTVAARRTVAQNITHKMREHSPKIVDQAELVSTELIRAAILWHEMWYDGLEEASKHYFGDHDIPGMLGVLEPLHEIVENGPQTLRETSFIQSFGHDLRIAREHLKRYRITQDGTEIQQAWDVYYSVFQRLGKQLKLLNVIELQYVSPKLMAVRDLDIAVPGTYQSGKPIIGIKNVIPTFKVIASKQKPRQCSMRGMDGKEYAYCLKGHEDLRQDERVMQLFGLVNTLLNNDHESAKRHLSIQRFSVTPLSPSAGLLGWVTHSDTIHVLIKQYRDQRKILVDIEHKLMQQMSDESYDSLPLLHKVEIFQYALDNTTGQDLYRILWLKSRNSDIWLERRTTYTRSLGLNSMVGYILGLGDRHPSNLLLDQITGKMVHIDFGDCFEVAQQRDKYPEKVPFRLTRMLIHAMEVCGITGNFSRSCEVSMEVLRDNRESLMAVLEAFVYDPLIAWRLTATDKRPGGVGEVKDLDDPAVYGKQRKNKANETEILNDVENTEVKNDKGLQVIERVRRKLTGRDFKPDVVLDVKSQVEKLVVEATKTENLCVAFLGWCSFW

SEQ ID NO: 521 - protein, 1083 aa, Cryptococcus neoformans var. neoformans
EFGTSEDLIDVNQKLQQSDAAWGTLEWAQTEMGMTTEVEWYEKLGRWEEALQVWNERDADASTTFSEWEITEGKVTCLHAMGEWEQLSDFVQARWANRTAEEKKLLSPLAAAASWSLKQWDLMDDYISAMKGDGADRAFFKAILAVHRNQIPAALKQISKARERLDPELTTLTGDSYGRAYDTVVRIQMLAELEEIIAYKDHADEPARQEMQRQTWKKRLAGCQRDVEVWQRILQVRSLVLKPNEDMDTWIEFADLCRTSDRLNLAEKTLTSLVGFQYPSMEDTRGRAPPPIIFAYLRMAWAKNLQIDSREERYETLQHLRDFTDQLTDDVGIGARGPNGRLMLPDQKLYGSYTKLLAQCHVELGQWQATLRESQGSADPSGILHDYSLATELDPEWYQAWHTWALANFEVITQLEVSQQGLSPIHFTTYIIPAVEGFLKSISLSPGNSLQDTLRLLTLWFTYGYSSGVTAAVSQGLPTVNIDVWLEVIPQIIARIQTPRQSIQQLIVQILHDIVKAHPQALIYPLTVASKSTVAARSTVAQNITHKMREHSPKIVDQAELVSTELIRAAILWHEMWYDGLEEASKHYFGDHDIPGMLGVLEPLHEIVENGPQTLRETSFIQSFGHDLRIAREHLKRYRITQDGTEIQQAWDVYYSVFQRLGKQLKLLNVIELQYVSPKLMAVRDLDIAVPGTYQSGKPIIGIKNVIPTFKVIASKQKPRQCSMRGMDGKEYAYCLKGHEDLRQDERVMQLFGLVNTLLNNDHESAKRHLSIQRFSVTPLSPIAGLLGWVTHSDTIHVLIKQYRDQRKILVDIEHKLMQQMSDESYDSLPLLQKVEIFQYALDNTTGQDLYRILWLKSRNSDIWLERRTTYTRSLGLNSMVGYILGLGDRHPSNLLLDQITGKMVHIDFGDCFEVAQQRDKYPEKVPFRLTRMLIHAMEVCGITGNFSRQCEVSMEVLRDNRESLMAVLEAFVYDPLIAWRLTATDKRPGGVGEVKDLDDPAVYGKQRKNKANETEILNDVENTEVKNDKGLQVIERVRRKLTGRDFKPDVVLDVKSQVEKLVVEATKTENLCVAFLGWCSFW

SEQ ID NO: 522 - protein, 501 aa, Thermoanaerobacter tengcongensis MB4
MSLSYLTPEFKVLRDYDKCINCKVCMRECSFEVHSYDEHLDKMVSNDMNCVNCQRCVVLCPTQALTIIKHPQTFKEHANWTYDAIRDIYRQAETGGVLLSSMGNDRPYPVYWDKMVINASQVTNPSIDPLREPIELRVYLGRKPDRIEIDENLNVKTKMPPQLKLETPIMFSAMSYGSISYNAHAALARAAEELGIFYNSGEGGLHKDFRKYGKNTIVQVASGRFGVDREYLNIAAAIEIKIGQGAKPGIGGHLPGEKVSEDISATRMIPPGSDAISPAPHHDIYSIEDLAQLIYALKEATDYQKPVGVKIAAVNNVAAIASGIARAGADYIAIDGFRGGTGAAPKRIRDNVGIPIEFAIAAVDARLRSEGIRHTISLVAAGSIRNSADIVKAIALGADAVYIGTAALIALGCHMCQKCYTGKCNWGIATQDPNLAKRLNPEIGYKRLVNLVQAWSHEIKEMLGGMGINDIESLKGNRLMLRGIGMTQKELDILGILAAGE

SEQ ID NO: 523 - protein, 1530 aa, Listeria monocytogenes str. 4b F2365
MKQTNLPKKHGLYNPENEHDACGIGFVANIKKISSHKIVEQGIHMLCQLKHRGGEVGGDTGDGAGILLEISDSFFRRECSKLGINLPEKYHYAVGMFNFPQNKTERECLMAETEKLIASEGQTFLGWRKLPTDVTKVGAGARKTEPAIYQLFIQKNAKLDEAGFERALYLIRKQIEKFAATSKQITETFYVPSLSTRTVIFKGMLLPEQINQYYLDLADPAYVSAFALVHSRFSTNTFPSWERAHPYRYLIHNGEINTQRGNVNWMKAREKRAESDLLGEDLAKLLPIIDESGSDSATLDNALEFLVQAGRSLPHAAMMLIPEPWDKNPHMTDPKRAFYEYHSTLMEPWDGPTSISFTNGRVIGTILDRNGLRPARYYETKDHTIIYSSETGVVPVDSSEIIRKETVGAGTMLLIDLEEGRIVTDAELKEELTTEKPYREWLEAEMTEIADLATADLHYEAMDKSERFKKQRAFGYTQDELNKILIPMVTEKKDPMGAMGYDAPLAVLSQRPQVLFNYFKQLFAQVTNPPIDGIREETVTSAMTLLGDEGNILNPTAQNANRIRLKTPILSRKEFAALEQQTKFAQPTVTLPILFKAEERDGLEARLESLFVEADEKIAAGAELLILSDDGVNADWIGIPSLLAVSGLHHHLVKAGTRTQVSIVVKTAEARDVHQCALLIGYGADAVFPSLAIDTFDGLIKEGRMKGFTLDEAESRYIEAITDGILKIMSKMGISTVQSYRGAQIFEAIGIGDDVIKHYFPGTASQIGGIPLEVIAQEAWLRHREAYHDIGYQSFTLNTGGEYQWRSNGEYHVYNPLAIHSLQQATRENDRETYNLYADLMQNQNNAFLRGLLTFTSDRKPIPLDEVEPAEAIFKRFKSGAMSYGSISQEAHEALAIAMNRIGGKSNSGEGGENPNRFTPDENGDWRRSAIKQIASGRFGVTSHYLVNAEELQIKMAQGAKPGEGGHLPGNKVYPWISKTRGSTTGVGLISPPPHHDIYSIEDLSQLIFDLKNANQNARINVKLVSKTGIGTIAAGVAKGNADVILVSGYEGGTGAAARTSIRHAGVPWEIGLAETHQTLLLNGLRNKVVVETDGKLMTGKDVLVAAMLGAEEFGFATAPLVTLGCVMMRVCHLDTCPVGVATQNPELRKKFSGSADYVVNFFHFIVAEMREMMAELGFRSLTEIIGHKEFLTTHEKKEAHWKAKYIDFSNMLYSDDFYKNQVQYCTKQQDHKIDQTLDMRELVPLIQPALENGEKVTGTFAVRNVDRAIGTIAGSFISKKYGAEGLPEDTISLDFVGSAGQSFGAYTPLGMTLRIHGDANDYFGKGLSGGKLIVSPDAKTPIKPHDSAIVGNVTLYGATGGYAYMHGKAGARFAVRNSGATAVVEGIGDNGCEYMTGGAVVVLGEIGENFAAGMSGGVAYLYTNNKQATTAKINHELVNSRSTLNTSELTKLKQLIEQHANLTGSNFAKDILQNWEAEKANFIFVIPNEYEMMLTRITTLEQTGKTHDEAELQAFYEHKDGKLVAGVAK

SEQ ID NO: 524 - protein, 1526 aa, Bifidobacterium longum DJO10A
MISVTFKAPLDLTVHAPDGMYDPANEHDACGVGMVTTLNKRPERKIVTDAIEVLVNLDHRGAVGAEENTGDGAGILMSMPDEFMRATVPAELPEAGHYAAGIAFLDRDIETSGQQEQAIAKIVREEGLEVLAWRVVPTNPDGLGLQALAAMPGFKTLVVASPDGALAGVDLDRKTFRIRKRVEHEVGVYFASLSARTITYKGMLTTMQLTHFFEDLNDERMKATIAIVHSRFSTNTFPSWPLAQPFRLLAHNGEINTIQGNRNWLSAREGRLSSELLGEFEPLLPITTPGYSDSGTFDECLELLHLAGRSLPHAICMMLPPAWEKNPDLDPDVRAFYEYNNTLIEPWDGPADIVFTDGTQVGALLDRNGFRPGRWQLTDDGYIVLASEAGVLPEIAQEHIVSKGRLEPGEMFLVDTAEGRIIPDEEVKRNLAAQHPYRKWVEGNSVEMSDLPRREHVSHSGQSVQRRQRAFGYTEEDLKLLLTPMANTGKEPLGSMGNDAPMPALSSRSRMLFDYFTQKFAQVTNPPLDWEREEIVTSLESAIGPEPNLLADSELHAKKILIPLPVVNSDEMAQLKRLDKARILGGYYRPYVVKGLYQVAGGGKALEERLDEIFAEIDEAIANGKNFIVLSDRESNHTWGPIPSLLLTSAVQHHLLRRHTRTQISVAVEAGDVREIHHVALLIAYGAACVNPYLAFESVEDLARNGYLKVDADTAVKNLTKALSTGVLKIMSKMGVSTIMSYRGAQLFEAVGLSQEVIDEYFTGTTSRVGGVGLDEIAEEVAIRHRVAYPNQWSASPHRNLRTGGDYKWRRTGEDHLNDPEAIFLLQQSTQRGDYQMFKKYSHHINDTSNRLMTLRGLMKFNTNRKPIDIAEVEPASEIVKRFSTGAMSYGSISQEAHETLAIAMNSIGARSNSGEGGESDDRINDPQRYSRIKQIASARFGVTSDYLVHATDLQIKLAQGAKPGEGGHLPGAKVPPWIAKVRHATPGVELISPPPHHDIYSIEDLKQLINDAKMANPKARIHVKLVSEFGVGTIAAGVAKCHADVVLISGYDGGTGAAPLNAIKHAGTPWEIGLSETQQTLILNGLRSRIVVQCDGELKTGRDVVIAALLGAEEFGFATAALIVEGCVMMRACQKNTCPQGIATQDPELRARFKGKPEYVVNFFMFIAEEVREILAQLGFRTLEEAIGHVECLDQDEAIKRWKSSGIDLSNVLKQAGPVPGTILHQTIEQNHELEKALDNKLIELAQPALEHKEPVRIEMPIRNVNRTVGTMVGYEITRRYGEEGLPDDTIDMTLHGSGGQSIGAFIPRGETMRIYGEVNDYAGKGLSGGRMIVRPEDNVTFDKHSNVIAGNVTGFGATSGQMFVAGRAGERFGVRNGGATFVVEGVGDHGCEYMTGGTVVVLGPTGRNFGAGFSGGNTYVLDLDMKKVNPGAIKSGALLFKSLDAETSKLVYALVKQHAEETGSQFAAALLEDWNETVKRFTHVVPKQFVAMTKAMEEAKTNNVDFNAPGAWEKVYEQVMEGAR

SEQ ID NO: 525 - protein, 1478 aa, Bacillus cereus E33L
MLNKTNTWTPSLFRDYKNAEHDACGIVSVMEKRKIPTKENIDLCIQSLVKMNHRAGFINGEGDGIGIHIDVPKALWNEKLKSSGYNPTIVDHPHFIVGHFFLNKNENIVDLKNHIRTQLNNENFAILFESDNVINSDALGPLGKQEEPLFWQVALIAENEVVNIEQTLFSVTIKIEENEAIHVASLSRDHVVYKVLGAGDTLVAYYNDLQHPLIASTMTLGHNRYSTNTLSNFFRVQPFSVLGHNGEINTIAKLRDQAEMIHVPLTAGGSDSQDLNRTLETLLVQYGYSLFEAMDILFPPIINEIKLYETHLQDLYTYIREAWGHFAQGPAGIISRYKDEAVFSVDSLGLRPVWKVETESSYIFSSEPGVVSPTEYVAEPKPLAPGEKVGLKWNEQDELVLYEHDDYQTQVYNRFKKKVDVTNYHLHLSIPETKEVPDACDSMQVETKQYVAFGWDREHIQLLEQMATKGVEPIRSLGHDSPLAALDTDRRNIADFIKESVAVVTNPAIDRDREVEHFSTRTILGERPSLLSGAKQPFVVEMLSPIILEGSVAQSITEELHTITYEQLIELFNTHSSIATISATFSQAETLQCALSRISSEAITAVNDGASLLLIDDADAHLNERLWIDPHLVTAKVHQVLSENKLRRNCSLVIRSGALRSLHDIVTLYGLGADSINPYLLFATVNDGTKTPITNLYNALNKGLEKVISTIGIHELRGYGRLYSSIGLHEEIANILQITNFLGSNDLAFSLESLAEDAKMRADDYNDPKVRIRKSFHIFPRIWKAIGDVAKGNSYDDYRDKLSELEENNPIAIRHLIQTKETKHVIPTEEVSISIQNHDLPFIISSMSFGSQNEIAFRAYAEAADQLNMISLNGEGGEIKDMIGKYPHTRGQQVASGRFGVNAELLNSSNLIEIKIGQGAKPGEGGHLPGSKVTAKIAEARNATIGSDLISPSNNHDIYSIEDLAQMITEIKTANQLAKVAVKVPVVPNIGTIAVGIAKAGADFINISGFDGGTGAARIHALQHVGLPVEIGVKAAHNALLEANMRHNVEIWADGGIRSVNDALKIMLLGANRIGFGTLSMIAIGCTTCRGCHLDTCHVGIATQIESEAQAKEHGLRRFVPRELESAVAGLLHLFTTFGEELKRLTGNLGYTNLQEIVGRSDLLEQVRGKNLLNLCNLLQTIEHPSVTKTEHVLEKQFETIHSPHSKELVGVGVEQRVMGGLESCYRVRSKLYEDTKLEPLTLKYTNGSIPGNGLGAYNSENLFIHVNGGAQDGIGKTSFGGGIYITKAKGKDGLYYNGSVGKGFGYGAQKGALYVQGNADARAGIRLSGADMIIGGRMTKPLREKEQGNIGAYSNIKGFAFEYMTNGRALVLGDPGPWICAGMTGGVVYLRHDSSLGLTEQALKRRIAKGANVTLQPISKNGARDVTELLLDYIRVLNEHEQYEEVALLTPLLDDIQQQFFEIIPKKEQADPSISTE

SEQ ID NO: 526 - protein, 472 aa, Moorella thermoacetica ATCC 39073
MGNRKTGNTNLWKVALGSAGLTCLGLWLFSRPLLNRIHDSFLKTVMTDPYEENFWEFVSAANRTGLQKIVETNLRAQQGKLIQRPFGSPRRFPGTDGLVFNLAQLARLPVEEGVPVDTKVTLGPRAAKPLNISMPIIISGMAYGLALSEKTKIALARGASLAGTATNTGEGPFLPSERQAARHLIVQYNRGGWNHNPRILKQADMVEIQFGQAAIGGLGHSTNYGEIPTKGRRLLGIKPGQAAVTHARMPGIKDPKKDLPPLVTRLRHLTGGVPIGAKIGAGNDLEKDLAILLEAGVDFIAIDGAGAASKGSPPIVQDDFGVPTVYAVNRAATFLKKQGVKDRVSLIAGGGLVTPGDFLKILALGADAVYIGTIALFALTHTQVLKAMPWEPPVQVVFAQGRYQDQLDEDRAAHNLANFLWSCNAEIMEGVRALGKKSVKQVDKSDLAALDPVTARALGIPLAARARSCFPS

SEQ ID NO: 527 - protein, 527 aa, Streptomyces avermitilis MA-4680
MTRIGLVVLALAAALAAGAAAGSISPWWWFAAVPLTLLGLLGTWDLLQRRHSVLRNYPVLGHARFLLERIRPELQQYFVERNFDGRPFDRDVRSIVYERAKGTDAEQPYGTEQDVYQPGYEFLIPSMAPRPVPQTPPRVRIGGPDCSRPYDMALLNVSAMSFGSLSSNAILALNGGAAAGGFAHDTGEGGLSEYHLRPGGDLVWEIGTGYFGCRTQDGEFDPKEFADKAAHEHVKCVSLKLSQGAKPGIGGVLPGPKVNSEIARVRDVPEGRTVISPPYHREFSTPRELVLFIARMRELSGGKPTGFKLCPGSRRQFLAVCKAMLEEGTAPDFIIVDGAEGGTGAAPLEFADHVGTPLTEGLLTVHNALVGAGLRDRIRIGASGKIATGTDLVKRLLQGADYGNAARAMMFAVGCIQAQRCHTNTCPTGVTTQDPRRARALDVGDKTLRVQRLQEATVASALQIMASMGVTDPSQLRPHMLHRRIDPYTERSYDELYEWLRPGQLLAEPPAAWAADWHAADPDRFTV

SEQ ID NO: 528 - protein, 363 aa, Candida albicans SC5314
MTSLEDPNGQAQATYFQESVSTTGNSTPTVTQSNDPQHHHHHQQQQQQHHHHHVGSYYQDSPSSTYTYEVEGDYLENHPNVTSTSAEQGTGTMPTYVDNDNIHGGVGVGMGVETEEEDDDDTNGASIGNGSGSGGGSGGGEQPFYVNAKQYHRILKRRIARAKLEENLKIARTRKPYLHESRHKHAMRRPRGQGGRFLTAAEIAELEKAKQQQQQQQQQQQQQNEQSNQENNNENGNEIKKENQHVDDSNKIKNGDNNINKENIIENNKEEIDPNNVIIKKENNNNEVNHEMNNIENEQSSNEDFNQNNNNNINNNNTTISNNDNENGNTISSSKSNELQESIKNDDNNNNNNGNDLQEEEER

SEQ ID NO: 529 - protein, 1624 aa, Oryza sativa
MATLPRAAAAAAPSPAAALLPLPRAAPLLAGRAAARSAARRLRARGTRAPPLAAARRGWGGVSPRAVLDLPRRREAAEKPAQKAADLNEILSERGACGVGFVANLKNEPSFNIVRDALVALGCMEHRGGCGADNDSGDGSGLMSGIPWDLFNDWANKQGLAPLDRTNTGVGMVFLPQDENSMEEAKAVVAKVFTDEGLEVLGWRTVPFNVSVVGRYAKETMPNIQQIFVKVAKEDNADDIERELYICRKLIERATKSASWADELYFCSLSSRTIVYKGMLRSEILGQFYLDLQNELYKSPFAIYHRRYSTNTSPRWPLAQPMRLLGHNGEINTIQGNLNWMRSREATLQSPVWRGREHEIRPFGDPKASDSANLDSTAELLLRSGRSPAEAMMILVPEAYKNHPTLSIKYPEVIDFYDYYKGQMEAWDGPALLLFSDGRTVGACLDRNGLRPARYWRTSDDFVYVASEVGVIPMDESKVVMKGRLGPGMMITVDLQTGQVLENTEVKKSVASANPYGSWLQQSTRSIKPVNFQSSVAMDNETVLRHQQAFGYSSEDVQMVIETMASQGKEPTFCMGDDIPLAVLSQKPHMLFDYFKQRFAQVTNPAIDPLREGLVMSLEVNIGKRRNILEVGPENADQVTLSSPVLNEGELESLLNDSKLKPKVLSTYFDIRKGLDGSLDKAIKVLCDEADAAVRNGSQLLVLSDRSEALEPTRPAIPILLAVGAIHQHLIQNGLRMSASIVADTAQCFSTHQFACLIGYGASAICPYLALETCRQWRLSNKTVNLMRNGKMPTVTIEQAQRNFIKAVKSGLLKILSKMGISLLSSYCGAQIFEIYGLGQEVVDLAFCGSVSKIGGLTLDELGRETLSFWVKAFSEDTAKRLENFGFIQSRPGGEYHANNPEMSKLLHKAVREKSDNAYTVYQQHLASRPVNVLRDLLELKSDRAPIPIGKVEPATSIVERFCTGGMSLGAISRETHEAIAIAMNRIGGKSNSGEGGEDPIRWSPLADVEDGYSPTLPHLKGLQNGDTATSAIKQVASGRFGVTPTFLVNAEQIEIKIAQGAKPGEGGQLPGKKVSAYIARLRNSKPGVPLISPPPHHDIYSIEDLAQLIYDLHQINPKAKVSVKLVAEAGIGTVASGVSKGNADIIQISGHDGGTGASPISSIKHAGGPWELGLSETHQLACLQTLIQNGLRERVVLRVDGGFRSGLDVLMAAAMGADEYGFGSVAMIATGCVMARICHTNNCPVGVASQREELRARFPGVPGDLVNYFLFVAEEVRATLAQLGFEKLDDIIGRTDILKAKHVSLAKTQHIDLKYLLSSAGLPKWSSSQIRSQDVHSNGPVLDETILADPDISDAIENEKEVSKTFQIYNVDRAVCGRVAGVIAKKYGDTGFAGQLNITFTGSAGQSFGCFLTPGMNIRLVGEANDYVGKGMAGGELVVVPVEKTGFVPEDAAIVGNTCLYGATGGQVFVRGKTGERFAVRNSLGQAVVEGTGDHCCEYMTGGCVVVLGKVGRNVAAGMTGGLAYILDEDDTLVPKVIVKVNKEIVKMQRVNAPAGQMQLKGLIEAYVEKTGSEKGATILREWEAYLPLFWQLVPPSEEDSPEACAEFERVLAKQATTVQSAK

SEQ ID NO: 530 - protein, 2470 aa, Saccharomyces cerevisiae
MEPHEEQIWKSKLLKAANNDMDMDRNVPLAPNLNVNMNMKMNASRNGDEFGLTSSRFDGVVIGSNGDVNFKPILEKIFRELTSDYKEERKLASISLFDLLVSLEHELSIEEFQAVSNDINNKILELVHTKKTSTRVGAVLSIDTLISFYAYTERLPNETSRLAGYLRGLIPSNDVEVMRLAAKTLGKLAVPGGTYTSDFVEFEIKSCLEWLTASTEKNSFSSSKPDHAKHRALLIITALAENCPYLLYQYLNSILDNIWRALRDPHLVIRIDASITLAKCLSTLRNRDPQLTSQWVQRLATSCEYGFQVNTLECIHASLLVYKEILFLKDPFLNQVFDQMCLNCIAYENHKAKMIREKIYQIVPLLASFNPQLFAGKYLHQIMDNYLEILTNAPAKKIPHLKDDKPQILISIGDIAYEVGPDIAPYVKQILDYIEHDLQTKFKFRKKFENEIFYCIGRLAVPLGPVLGKLLNRNILDLMFKCPLSDYMQETFQILTERIPSLGPKINDELLNLVCSTLSGTPFIQPGSPMEIPSFSRERAREWRNKSILQKTGESNDDNNDIKIIIQAFRMLKNIKSRFSLVEFVRIVALSYIEHTDPRVRKLAALTSCEIYVKDNICKQTSLHSLNTVSEVLSKLLAITIADPLQDIRLEVLKNLNPCFDPQLAQPDNLRLLFIALHDESFNIQSVAMELVGRLSSVNPAYVIPSIRKILLELLTKLKFSTSSREKEETASLLCTLIRSSKDVAKPYIEPLLNVLLPKFQDTSSTVASTALRTIGELSVVGGEDMKIYLKDLFPLIIKTFQDQSNSFKREAALKALGQLAASSGYVIDPLLDYPELLGILVNILKTENSQNIRRQTVTLIGILGAIDPYRQKEREVTSTTDISTEQNAPPIDIALLMQGMSPSNDEYYTTVVIHCLLKILKDPSLSSYHTAVIQAIMHIFQTLGLKCVSFLDQIIPTILDVMRTCSQSLLEFYFQQLCSLIIIVRQHIRPHVDSIFQAIKDFSSVAKLQITLVSVIEAISKALEGEFKRLVPLTLTLFLVILENDKSSDKVLSRRVLRLLESFGPNLEGYSHLITPKIVQMAEFTSGNLQRSAIITIGKLAKDVDLFEMSSRIVHSLLRVLSSTTSDELSKVIMNTLSLLLIQMGTSFAIFIPVINEVLMKKHIQHTIYDDLTNRILNNDVLPTKILEANTTDYKPAEQMEAADAGVAKLPINQSVLKSAWNSSQQRTKEDWQEWSKRLSIQLLKESPSHALRACSNLASMYYPLAKELFNTAFACVWTELYSQYQEDLIESLCIALSSPLNPPEIHQTLLNLVEFMEHDDKALPIPTQSLGEYAERCHAYAKALHYKEIKFIKEPENSTIESLISINNQLNQTDAAIGILKHAQQHHSLQLKETWFEKLERWEDALHAYNEREKAGDTSVSVTLGKMRSLHALAEWEQLSQLAARKWKVSKLQTKKLIAPLAAGARGGSGEWDMLDEYISVMKPKSPDKEFFDAILYLHKNDYDNASKHILNARDLLVTEISALINESYNRAYSVIVRTQIITEFEEIIKYKQLPPNSEKKLHYQNLWTKRLLGCQKNVDLWQRVLRIRSLVIKPKQDLQIWIKFANLCRKSGRMRLANKALNMLLEGGTILVYQIRSKPPPPVVYAQLKYIWATGAYKEALNHLIGFTSRLAHDLGLDPNNMIAQSVKLSSASTAPYVEEYTKLLARCFLKQGEWRIATQPNWRNTNPDAILGSYLLATHFDKNWYKAWHNWALANFEVISMVQEETKLNGGKNDDDDDTAVNNDNVRIDGSILGSGSLTINGNRYPLELIQRHVVPAIKGFFHSISLLETSCLQDTLRLSTLLFNFGGIKEVSQAMYEGFNLMKIENWLEVLPQLISRIHQPDPTVSNSLLSLLSDLGKAHPQALVYPLTVAIKSESVSRQKAALSIIEKIRIHSPVLVNQAELVSHELIRVAVLWHELWYEGLEDASRQFFVEHNIEKMFSTLEPLHKHLGNEPQTLSEVSFQKSFGRDLNDAYEWLNNYKKSKDINNLNQAWDIYYNVFRKITRQIPQLQTLDLQHVSPQLLATHDLELAVPGTYFPGKPTIRIAKFEPLFSVISSKQRPRKFSIKGSDGKDYKYVLKGHEDIRQDSLVMQLFGLVNTLLKNDSECFKRHLDIQQYPAIPLSPKSGLLGWVPNSDTFHVLIREHRDAKKIPLNIEHWVMLQMAPDYENLTLLQKIEVFTYALDNTKGQDLYKILWLKSRSSETWLERRTTYTRSLAVMSMTGYILGLGDRHPSNLMLDRITGKVIHIDFGDCFEAAILREKYPEKVPFRLTRMLTYAMEVSGIEGSFRITCENVMRVLRDNKESLMAILEAFALDPLIHWGFDLPPQKLTEQTGIPLPLINPSELLRKGAITVEEAANMEAEQQNETRNARAMLVLRRITDKLTGNDIKRFNELDVPEQVDKLIQQATSIERLCQHYIGWCPFW

SEQ ID NO: 531 - protein, 1477 aa, Xylella fastidiosa Dixon
MLYDASDERDACGFGMVAQLDDQPSRALLEIAIAALSRMTHRGGVAADGLTGDGCGLLIRKPDAFLRALACEAGIALGPRYAVGMVFLPGERAAAAHCRQVLEAELQRVGVRLCGWREVPINRSVCGQLARDTLPHIEQVFVDIDPKHSEDAFGVALFLARRRAERQLCDYHDFYVATLSPYAISYKGMVLPDKLPVFYPDLQRSELSSSVIVFHQRFSTNTLPRWPLAHPFRLLAHNGEINTIEGNRRWAQARSKVWQSPRFDMAEFDPVISMKGSDSQSLDNMLELLIAGGMDLLQALRILVPPATRTLEFKDADLASFYEFYGLNTEPWDGPAGIVAYDGRYAACMLDRNGLRPARWMLTADRHFLVASEAGVWELPVERVIRKGKLGPGEMMAIDLKRGDLLDSDAIDRINRARAPYKQWLQQGVTYLQTELIDPSLVEEPFSDQTLCSYQKLFQLSTEEVEQVLRPLAETEQEAAGSMGDDTPMAVLSAQIRPLYDYFRQAFAQVTNPPIDPLRESIAMSLTTQLGRETNIFHAGPETVNHVILDSPVLSQRKLRQLLKMPQYLEKNRLIDLSYTVEEGLQAGLKRMCDEAEQAARDGIVMLLLSDRYPVPERPMAHALLATGAVHHHLCRVGLRCDVNLIIETGTARDPHHMACLLGFGATAVYPYLSYQMLFNLGRRGILKLQKAGEQSQIGRSYRKGIYKGLSKIISKMGICTIASYRGAQLFEIVGLDPDVVALCFPDTPARIGGVSLMQLHTEACELTARAWNDRIAPEVGGLLKYVHGGEYHMYNPDVVMTLQHATRTGDAADWRLYMDAVHTRPPSALRDLLQLKKAEIPTPLDQVAPATDVLCRFDTAAISLGALSPEAHEALAVAMNRLGGRSNSGEGGEDPARYGTERRSKIKQVASGRFGVTPEYLINAEVLQIKIAQGAKPGEGGQLPGHKVNDLIARLRYAKLGIGLISPPPHHDIYSIEDLAQLIYDLKQVNPQALVSVKLVSHVGVGTIAAGVVKAGADLITVSGHDGGTGASPISSIRYAGVPWELGVAEVHQALVANDLRERTTLQTDGGLKTGLDVVKAALLGADSFGFGTAPMIVLGCKYLRICHLNNCATGVATQDERLRANHFTGLPERVENFFRLLAEEVRQWLSYLGAMSLDDIIGRTDLLQQLEVSSREGVRVNLSRLLTNACYEGTHCAAQRLYESPDSLSVQIDSLLADAIANKTGGDYRFLIHNTDRSVGTRLSGAIARVHGNHGMEDAPLHLRFRGTAGQSFGAFNVGGLHLELEGEANDYVGKGMAGGCLVVRPPRGARFEARHTPILGNTCLYGATGGELFAAGRVGERFAVRNSGALAVIEGAGDHCCEYMTDGVVLVLGKVGLNFGAGFTGGLAYVLDIERDFVDRYNHELIDIHRVSVEGFENYRQHLRHLVVRHRALTGSIWAQQILDEFRDYIGRFWLVKPKAASIESLAESLRSAA

SEQ ID NO: 532 - protein, 1679 aa, Vitis vinifera
MSATSGSGSVVQIRNNSGSGLVPSRKRPTFAHQFNVTPLSRFNNKSKGSSCYVSKRTNVVENKFLGTRLRGCGSERLHFWQSDGPGRSPKLRVVVRSALSQVPEKPLGLYDPSFDKDSCGVGFVAELSGESSRKTVTDAVEMLVRMSHRGACGCETNTGDGAGILVGLPHDFFKEVAQDVGFELPPPGEYAVGMFFLPTSHTRREESKNVFTKVAESLGHTVLGWRSVPTNNSGLGNSALQTEPVVEQVFLTPTPRSKADFEQQMYILRRVSMVAIRAALNLQHGGVRDFYICSLSSRTVVYKGQLKPDQVKGYYYADLGNERFTSYMALIHSRFSTNTFPSWDRAQPMRVLGHNGEINTLRGNVNWMKAREGLLKCKELGLSKNEMKKLLPIVDASSSDSGAFDGVLELLVRAGRSLPEAVMMMIPEAWQNDKNMDPDRKALYEYFSALMEPWDGPALISFTDGRYLGATLDRNGLRPGRFYVTHSGRVIMASEVGVVDIAPEDVRRKGRLNPGMMLLVDFENHVVVDDEALKQQYSLARPYGEWLKRQKIELKDIVSPTIAGVMPVSSNSSLSCQLLFLYTVEALEMLLLPMAKDGTEALGSMGNDAPLAVMSNREKLTFEYFKQMFAQVTNPPIDPIREKIVTSMECMIGPEGDLTETTEEQCHRLSLKGPLLSIQEMEAIKKMNYRGWRSKVLDITYSKNRGRKGLEETLDRLCSEAHHAIKQGYTVLVLSDRAFSSKRVAVSSLLAVGAVHQHLVQKLERTQVGLIVESAEPREVHHFCTLVGFGADAICPYLAIEAILRLQVDGKIPPKASGEFHSKDELVKKYFKASNYGMMKVLAKMGISTLASYKGAQIFEAVGLSSEVIQRCFTGTPSRVEGATFEMLAQDALELHEMAFPTRAVALPNPGDYHWRKGGEVHLNDPLAIAKLQDAARSNSVAAYKEYSKRIQELNKTCNLRGLLKFKEAEVKVPLDEVEPASEIVKRFCTGAMSYGSISLEAHTTLAIAMNRIGGKSNTGEGGENPSRLESLPDGSLNPKRSAIKQVASGRFGVSSYYLTNADELQIKMAQGAKPGEGGELPGHKVIGDIAVTRNSTAGVGLISPPPHHDIYSIEDLAQLIHDLKNANPSARVSVKLVSEAGVGVIASGVVKGHADHVLISGHDGGTGASRWTGIKNAGLPWELGLAETHQTLVANDLRGRTVLQTDGQLKTGRDVAIAALLGAEEFGFSTAPLITLGCIMMRKCHKNTCPVGIATQDPVLREKFAGEPEHVINFFFMLAEEVREIMSQLGFRTLSEMVGRADMLEVDKEVTKNNEKVQNIDLSLLLRPAADIRPEAAQYCVQKQDHGLDMALDQKLIALSKAALEKSLPVYIETPIRNVNRAVGTMLSHEVTKRYHSAGLPAETIHIKLSGSAGQSLGAFLCPGIMLELEGDSNDYVGKGLSGGKIVVYPPRQSKFDPKENIVIGNVALYGATSGEAYFNGMAAERFCVRNSGARAVVEGVGDHGCEYMTGGTVVVLGKTGRNFAAGMSGGIAYVFDVDEKFSSRCNPELVDLDKVEKEEDIMTLRMMIQQHQRHTNSQLAKEILADFDNLLPKFIKVFPRDYKRVIESMKQEEASKKALEQDTQEAEDQDEKELMEKDAFEELKKLAAASLNGKNSQVKFPLHYQFLHRASLYILLQ

SEQ ID NO: 533 - protein, 1499 aa, Staphylococcus aureus subsp. aureus MRSA252
MHNEKLIKGLYDYREEHDACGIGFYANMDNKRSHDIIDKSLEMLRRLDHRGGVGADGITGDGAGIMTEIPFAFFKQHVTDFDIPGEGEYAVGLFFSKERILGSEHEVVFKKYFEGEGLSILGYRNVPVNKDAIAKHVADTMPVIQQVFIDIRDIEDVEKHLFLARKQLEFYSTQCDLELYFTSLSRKTIVYKGWLRSDQIKKFYTDLSDDLYQSKLGLVHSRFSTNTFPSWKRAHPNRMLMHNGEINTIKGNVNWMRARQHKLIETLFGEDQHKVFQIVDEDGSDSAIVDNALEFLSLAMEPEKAAMLLIPEPWLYNEANDANVRAFYEFYSYLMEPWDGPTMISFCNGDKLGALTDRNGLRPGRYTITKDNFIVFSSEVGVVDVPESNVAFKGQLNPGKLLLVDFKQNKVIENNDLKGAIAGELPYKAWIDNHKVDFDFENIQYQDSQWKDETLFKLQRQFAYTKEEIHKYIQELVEGKKDPIGAMGYDAPIAVLNERPESLFNYFKQLFAQVTNPPIDAYREKIVTSELSYLGGEGNLLAPDETVLDRIQLKRPVLNESHLAAIDQEHFKLTYLSTVYEGNLEDALEVLGREAVDAVKQGAQILVLDDSGLVDGNGFAMPMLLAISHVHQLLIKADLRMSTSLVAKSGETREVHHVACLLAYGANAIVPYLAQRTVEQLTLTEGLQGTVVDNVKTYTDVLSEGVIKVMAKMGISTVQSYQGAQIFEAIGLSHDVIDRYFTGTQSKLSGISIDQIDAENKERQQSDDNYLASGSTFQWRQQGQHHAFNPESIFLLQHACKENDYAQFKAYSEAVNKNRTDHIRHLLEFKACTPIDIDQVEPVSDIVKRFNTGAMSYGSISAEAHETLAQAMNQLGGKSNSGEGGEDAKRYEVQVDGSNKVSAIKQVASGRFGVTSDYLQHAKEIQIKVAQGAKPGEGGQLPGTKVYPWIAKTRGSTPGIGLISPPPHHDIYSIEDLAQLIHDLKNANKDADIAVKLVSKTGVGTIASGVAKAFADKIVISGYDGGTGASPKTSIQHAGVPWEIGLAETHQTLKLNDLRSRVKLETDGKLLTGKDVAYACALGAEEFGFATAPLVVLGCIMMRVCHKDTCPVGVATQNKDLRALYRGKAHHVVNFMHFIAQELREILASLGLKRVEDLVGRTDLLQRSSTLKANSKAASIDVEKLLCPFDGPNTKEIQQNHNLEHGFDLTNLYEVTKPYIAEGRRYTGSFTVNNEQRDVGVITGSEISKQYGEAGLPENTINVYTNGHAGQSLAAYAPKGLMIHHTGDANDYVGKGLSGGTVIVKAPFEERQNEIIAGNVSFYGATGGKAFINGSAGERFCIRNSGVDVVVEGIGDHGLEYMTGGHVINLGDVGKNFGQGMSGGIAYVIPSDVEAFVENNQLDTLSFTKIKHQEEKAFIKQMLEEHVSHTNSTRAIHVLKHFDRIEDVVVKVIPKDYQLMMQKIHLHKSLHDNEDEAMLAAFYDDSKTIDAKHKPAVVY

SEQ ID NO: 534 - protein, 503 aa, Methanosarcina acetivorans C2A
MTLGSVPPKYKVSIDRDQCMDCGRCIENCSYGVYRREGDRILIESRKCTACLRCVAMCPRDAITLTEKPVDYRSHPIWTREAREDIINQARSGKIILSGMGNVRDLPIIYDRLLLDACQVTNPSIDPLREPMELRTYIGKKPAKLKFRRTESGDVELETKLAPNLKLDTPIMIGHMSFGAISLNSQLSMAKAVAETGTYMGTGEGGLHKELYPYQDHMIVQVASGRFGVNIDYLERGAAIEIKIGQGAKPGIGGHLPGEKVNEEVSRTRMIPLGSDAISPAPHHDIYSIEDLVQLVRSLKEATEWKKPVFVKIAAVHNVAPIAAGIARSSADAVVIDGFRGGTGAAPKVFRDHVGIPIEAAIASVDQKLRDQGVRNEISIIASGGIRNSADLAKSIALGADAVYIGTAALVALGCRVCGNCYRNLCPWGIATQRPDLVSRLDPEAGAAQVSNLIHGWTLELSELMGAAGINSIESLRGNRDRLRGYMLDEGMLKILDVLPAGA

SEQ ID NO: 535 - protein, 2523 aa, Chlamydomonas reinhardtii
MMLSGVGPVPTKPAFKAGGDTLSRHLEELCRSGAWERRHKDGDKALLEYIEAEARDLSVEAFGRLMTDVYQRIGNMLLKGNDITRRMGGVLAIDELIDVKLSGDDAAKTARLSGLLSRVLEESEDPVLSESASHTLGHLVRSGGAMTSDIVEKEIRRSLAWCDPRNEPNESRRLTALLVLTEAAESAPAVFNVHVKSFIDAVWFPLRDAKQHIREAAVRALKACLCLVEKRETRYRVQWYYKLHEQTMRGMKRDHRTGALPSPESIHGSLLALAELLQHTGEFMLARYKEVVENVFRYKDSKEKNIRRAVIHLLPRMAAFSPERFASEYLARAIAFLLIVLKNPPERGAAFAALADMAAALARGCLSPIYVAIREALSAPPAARAAARPRPATCYEALQCVGMLAVALGPLWRPYAAALVEAMVLTGVSEVLVQALTQVANALPELLEDIQYQLLDLLSLVLSKRPFNSSTTQPKFAALSAAIAAGELQGNALTKLALQTLGTFDLGGIQLLEFMRDHILAYTDDPDKEIRQAAVLAACPRAGAARSSLRVRSLRSGWRRAAAAVWHTRVVERCVGRLLVVAVADPSERVRKEVLRALVATTALDDYLAQADCLRALFVGMNDESVAVRGLAIRLVGRLAERNPAHVNPALRKHLLQLLHDMEFSPDNRAREESAFLLEVLITAAARLIMPYVSPIQKALVSKLRGGSGPGITVLSTLGALAEVSGTTFRPFISEVMPLVIEAIQDNSDGRRRVVAVKTLGFIVSSCGNVMGPYLEYPQLLSVLLRMLHEGHPAQRREVIKVLGIIGALDPHTHKLNQASLSGEGKLEKEGVRPLRHGGGGAGGAGGGAGGGGVGGGVAGDSNDGGMGPGDDGGPGGDLLPSSGLVTSSEDYYPTVAINALMRVLRDPALASQHLAVIRALAAIFRALQLSVVPYLPKVLPILLGVLRGGDEALREEILASLRALVGYVRQHMRRFLPDLTQLVHEFWPAAPRTCLALIADLGMALRDDIRAKPLPPLPLLPPSSPPRTPHNRQYVPELLPKFVAVFSEAERAGSWDLVRPALGALESLGSAVDDSLHLLLPSMVRLISPAASSTPAEVRRAALRSLRRLIPRMQLGGYASAVLHPLIKVLDGHSDEQLRRDALDTICAVAVCLGPEFAIFVPTIRKVRVRHRLHHEWFDRLAGKVCAVSPPCMSDAEDWEGAGGAASGAGSAGAAGGWAVEIDLLARMQAEGGGALGGQPPVPPGPDGGPSAKLPVNAAVLRRAWESSHRVTKEDWAEWMRNFAVELLKESPSPALRACHGLAQVHPSMARELFAAGFVSCWAELEQGLQEQLVRSLEAALASPTIPPETVTALLNLAEFMEHDDKRLPLDTRTLGALAEKCHAFAKALHYKELEFQTSPQSAIEALIHINNQLRQPEAAVGVLAYAQKHLHMELKEGWYEKLCRWDEALDAYERRLLKEAPGSMEYHTALLGKMRCLASLAEWENLSNLCRTEWRKSEPHVRREMALIAAHAAWHMGAWDEMAMYVDTVDNPEAVGPNSHTPTGAFLRAVLCVRANQVSGAQAHVERTRELMVADLAALVGESYERAYTDMVRVQQLAELEEVCAYKQALDRRAADPGGSEARIGFIQQLWRDRLRGVQRHVEVWQSLFSIRSLVVPMAQDVDSWLKFASLCRKSGRSRQAYRMLLQLLRYNPMNITQAGNPGYGAGSGAPHVMLAFLKHLWTQGNRTEAYNRIKDLASLNGRAFLRLGIWQWAMNDLDNPGVIAENLASFRAATEHAPNWAKAWHQWALFNVAVSAHYRCDPMRDENQAVSHVPPAVQGFFRSVALGQAAGDRTGNLQDILRLLTLWFNFGAYAEVRAALTEGFQLVSIDTWLLVIPQIIARIHTHNTDVRQLIHHLLVKIGRHHPQALMYPLLVATKSQSPARRQAAYSVLECIRQHSAALVEQAQLVSGELIRMAILWHEMWHEGLEEASRLYFGESNVEGMLNTLLPLHEMLEKAGPTTLKEIAFVQSYGRELSEAYEWLMKYKASRKEAELHQAWDLYYHVFKRINKQLRSLTTLELQYVSPALVRAQDLELAVPGTYIAGEPLVTIAAFAPQLHVISSKQRPRKLTIHGGDGAEYMFLLKGHEDLRQDERVMQLFGLVNTMLAHDRITAERDLSIARYAVIPLSPNSGLIGWVPNCDTLHALIREYREARKIPLNWEHRLMLGMAPDYDHLTVIQKVEVFEYALDSTSGEDLHKVLWLKSRNSEVWLDRRTNYTRSAAVMSMVGYILGLGDRHPSNLMLDRYSGKLLHIDFGDCFEASMNREKFPEKVPFRLTRMMIKAMEVSGIEGNFRTTCENVMRVLRSNKESVTAMLEAFVHDPLINWRLLNTTEAATEAALARTDGGGGGGGHMDGPGGHPGGRDALGGGGGGAGGGGGGDPGAMPSPPRRETREKELKEAFVNLGDANEVLNTRAVEVMKRMSDKLMGRDYAPELCVGGGSGASGMEPDSVPAQVGRLINMAVNHENLCQSYIGWCPFW

SEQ ID NO: 536 - protein, 1512 aa, Cytophaga hutchinsonii ATCC 33406
MRENNQTGLYDSSFEHDSCGIGFVANLKGRKSHETVANALHMLERMEHRGACGCETNTGDGAGILLQVPHEFFVDECVKIGIKLPAFGEYGVGMLFLPKDEKLKEECKKILSRQAEKLGLAVLGYRLVPTDDSMIGDSAIAVEPSVEQFFVKRPDSVKDVETFERKLYVLRNYSTRIVKETLNNEEVNQRFYFASFSSRTIIYKGQLMTAQVKQFYLDLQRPEMVSALAVVHSRFSTNTFPSFKLAQPFRYIAHNGEINTVKGNVNWIRAQEALLTSTVFTKEEIEMLLPICDPGNSDSAHLDNVIELLVLSGRYLPHVMMMLVPEAWDGNEAMSEVKHAFYEYHAAMMEPWDGPASISFTNGKIVGATLDRNGLRPSRWCLLEDDTVIMASEVGVIDVDPSKVVTKGRLQPGKMFVADLEQGRIISDEELKNDICTRKPYGEWLKNKIKLSEQPEPQVIYNQPDAAALLKKQQVFGYTSEDLRLIIGEIATTAYEPLGSMGIDTPLAILSDQAMHLSAYFKQLFAQVTNPPIDPIRERMVMSLVSYVGGSLNLLDESPYHCRMVELHQPVLTNNDLEKLRQIDDKHFQTKALEITFKADEMPGSLEKALTRICKYASDAVNDGYSIILLTDRKVDSGHTPIPSLLATAAVHHHLIREGQRGKVGIVVECGDAWEVHHFATLIGYGASAINPYLAFETVIGMKRSGELQTELAEEKLIYNYIKAIDNGLLKVFSKMGISTLQSYQGAQIFEALGISSEVIDKYFTNTVSRIGGLSLDGIAKEALIKHEQAYPKVPVPRPKLEVGGIYQWKRRGEFHLFNPQTIHLLQQACRKGDYQVFKKYSNLIDDQSVKAITLRGLLKFKQTRESISIDEVEPATEIYKRFATGAMSFGSISHEAHSTLAIAMNRIGGKSNSGEGGEDEIRFDRKPNGDWERSAIKQVASGRFGVTSYYLANADELQIKMAQGAKPGEGGQLPGHKVDDWIGRVRHSTPGVGLISPPPHHDIYSIEDLAQLIFDLKNSNPKARVSVKLVSEAGVGTIAAGVSKAHADLVLIAGYDGGTGASPISSIRHAGLPWELGLAEAHQTLVKNKLRSRITVQSDGQIRTGKDLVVAALLGAEEFGVATAALVSVGCIMMRKCHLNTCPVGVATQNKELRALFSGEPEHVVNMFTFLAEEMREIMAELGYRTVDEMVGQVQNLEKRTDINHWKFKDLDLSKILYKEEAGPEVGLYKTEAQDHGMDNILDLTLVRDAKAALDNKEVVKGEYKIENIDRSAGTMLSYEVSTRHKGQGLPDATIQYKFNGSAGQSFGGFLAPGIQFELEGEANDYWGKGLSGGRLILYPSKQAKFKPSENIIVGNVAFYGATSGESYIRGQAGERFCVRNSGAKAVVEGVGDHGCEYMTGGLAVILGETGRNFAAGMSGGVAYVYDKARTFPARCNMEMIEFDVLDTEDNQTLKTMIENHLKYTGSDVAQAILNNWDNAVKDFVKVMPSDYKAVLLKRKSQGNKEAVING

SEQ ID NO: 537 - protein, 533 aa, Oceanobacillus iheyensis HTE831
MEFSATNIILLATCLLVIAAIIIPIVLVGYIYLKDRKQDQHAILRNFPILGKLRYILEKSGPELRQYLFNNDRSGKPFSRKDYQNIVMPAKYQKNMLGFGSVRDFEKADFYVKNAMFPKQQDELEVDNTEEIASKVYDIQEDNLLSRKESLQDKSIKPWLLTDDNTVVIGPSSRAPFRVKSLVGMSAMSYGSLGDHAITALSKGIGMAGGAWMNTGEGGLSDYHLKGDTDIIAQIGPGLFGVRSKNGEFSWELLKEKAAIPQVKAFELKLAQGAKTRGGHVDAEKVTEEIAHIRNVEPYQEINSPNRFNEFDDVPSMFSFMEKIRNHTGLPVGMKIVVGSSDSFEEIASYMKESGMGPDFITVDGSEGGTGASFQELADRVGLPVKSAVMIVDQTLKKYGVRERTKIIASGKLFTADRIAVVLAMGADLVNVARAFMISVGCIMAQICHTNRCPVGVATTDAKLQRALVIDEKQYRALNFLVTLRESLFRISAAAGLTSPTGFNPEHISYVDEQHRVKSLDDYYLQGEYSTSR

SEQ ID NO: 538 - protein, 1554 aa, Synechococcus sp. PCC 7335
MIVNPTTFQTDVLEPLGPSWLVEERDACGVGFIADQQGRASHQLIEDTLAALTCMEHRGGCCADKYSGDGAGVMTAIPWQLLQGWAKGNATESLVPGKTGVAMVFLPQQTAEEEVARSQFQEAVEATGLAFVGWREVPVEPEKLGPLAKEFQPKIAQAVVTSNDQEWDDLERSLFLVRRRFEKAIVQLAKEKNEADAQSLLETYVCSISTRTIVYKGMVRSEVLGQFYKDLQDPSYESAFAVYHRRFSTNTLPKWPLAHPMRLLGHNGEINTLIGNINWMTARQAELSHPIWGEELALLKPVVNAENSDSANLDNAMELLVRSGREPAQALTILVPEAYQNQPELADYPEIVDYYEYYSSIQEPWDGPALIVFCDGKQIGATLDRNGLRPARYVVTKNGYVVVSSEAGVVDLPVEDIVEKGRLGPGQMLAVNFEDGHEILHNWEIKQRIAKAQPYGQWLAERRQEVSPQLFSEEMRLDPQTLLTQQTAFGFTAEDVDMIIQDMAAQAKEPTFCMGNDTPLAVLSDKPHLLYDYFKQRFAQVTNPPIDPLRERLVMSLTTQLGAQGNLLEEHPELANILKLESPVINDTELTIIKESGFEVSSLSTLYRIEGGPTGLEAAVKVLCDRAAEAVKSGSQVLILSDRIDSQNDQNETTLSPEQTYIPPLVAVGAVHHSLIASGLRMRTSLIVDTAQCWSTHHFACLLGYGATAICPYLTLESVRHWWADKKTQKQMESGKLPVSTLNGAQANYRKAVDNGLLKILSKMGISLLSSYRGAQIFEAVGIGADLKELAFRGSVSRLGGLRIEELAQETMSFHEKAFPELTRKRLENMGFIQSRPSGEYHMNNPAMTKLLHKAVETKQYDHYEIYREQLKGRPIAALRDLLDFTGDRDSIDLSEVEPVESIMQRFCTGGMSLGSLSREAHETLGIAMNRIGGKSNSGEGGEDAVRFKILDDVDGEGFSDTLPHLKGLENGDTASSAIKQVASGRFGVTPEYLMSAKQIEIKMAQGAKPGEGGQLPGKKVSEYIASLRKSKPGVTLISPPPHHDIYSIEDLAQLIFDLHQINPKAGVSVKLVAEVGIGTIAAGVAKANADVIQISGHDGGTGASPLSSIKHAGMPWELGLTEVHRSLMENGLRDRVLLRVDGGLKTGWDVIMGALMGAEEYGFGSIAMIAEGCIMARVCHTNQCPVGVATQQEALRKRFSGTPGKVVNFFYFIAEEVRSLLAKLGYRSLNEIIGRADLLVPRDDVFLAKTKALDLSAIVKLPDVKSDRGWLDHGGVNSNGNVLDDEILADAAVANAIANHTSITKAWDVVNTDRAVGARVSGAIAKQYGNTGFKGKLNLNFNGSVGQSFGAFNITGMTMTLTGEANDYVGKGMNGGEIVIKPFEKATYKAEENVIVGNTCIYGASGGTLYVNGIAGERFAVRNSKGVAVLEGAGDHCCEYMTGGVVVVLGGVGRNVGAGMTGGLGYFLDESGDFQTRVNPEIVQVQRVQSKAGEQQLKSLIEAHAERTNSEKAQRILANWQTYLSKFWQVVPPSEADSVEAGVQQEKITTTVS

SEQ ID NO: 539 - protein, 503 aa, Idiomarina loihiensis L2TR
MSGNVFSTDSLLTLAQWLAAIFVLAIITLVISIGVMYVVDKTQNKHTIRHNYPVVGRFRYLFERMGEFMRQYFFAMDREEMPFNRAQRSWVYRAAKNADRNVAFGSTRDLSRTGTIIFSNAPYPPMAEQATSPEPVIIGPYCQKPYSPVSYFHVSGMSYGALSPVAVKSLSQGAAKAGCWLNTGEGGLSPYHLMGHCDIVFQMGTAKFGVRDKEGRLDEDRLAELGRHDNVKMFEIKLSQGAKPGKGGILPGIKVNKEIAQIRGLVEGEDAISPNRHPEISNNEELLDFIEKVRKITGKPTGFKFVMGDPSWIDELVDCILTRGEEYAPDFITLDSADGGTGAAPQPLMDYVGLRVTESLPMLIDKLTEAGLHGRIRVVVSGKMITPADVAWAIAMGVDFVTSARGFMFSLGCIQAMQCNKNTCPTGVTTDDPKLMRGLDPEDKSVRVANYHKYMEYGVNIIAHSCGVTDPRRLNRRHARVIKPDGESISLAERYPLPPARRR

SEQ ID NO: 540 - protein, 2216 aa, Arabidopsis thaliana
MSAASSSSVLHLRTNQQLLSLRSLKNSTSVASQLAVTSGVSRRRSCTARCSVKKPVIPESPFLGTRVRRSGSETLQFWRSDGPGRSAKLRTVVKSSFSAVPEKPLGLYDPSYDKDSCGVGFVAELSGETTRKTVTDSLEMLIRMTHRGACGCESNTGDGAGILVGLPHDFYAEAATELGFVLPSAGNYAVGMFFLPTVESRREESKNVFTKVAESLGHSVLGWRLVPTDNSGLGNSALQTEPIIAQVFLTPTTKSKADFEQQMYILRRVSMVAIRAALNLQHGAMKDFYICSLSSRTIVYKGQLKPDQLKDYYYADLGSERFTSYMALVHSRFSTNTFPSWDRAQPMRVLGHNGEINTLRGNVNWMRAREGLLKCNELGLSKKELKKLLPIVDVSSSDSGAFDGVLELLVRAGRSLPEAVMMMIPEAWQNDKNIDPSRKEFYEYLSALMEPWDGPALISFTDGRYLGATLDRNGLRPGRFYITHSGRVIMASEVGVVDVPPEDVMRKGRLNPGMMLLVDFEKHIVVDDDALKQQYSLARPYGEWLKRQKIELKDIIESVPEAERIAPSISGVVAPSFSGVAKASNDDDSMESMGIHGLLSPLKAFGYTVEALEMLLLPMAKDGSEALGSMGNDTPLAVMSNREKLCFEYFKQMFAQVTNPPIDPIREKIVTSMECMIGPEGDLTETTEEQCHRLSLKGPLLKIEEMEAIKKMNYRGWRTKVLDITYAKERGTKGLEETLDRICDEANEAIKEGYTLLVLSDRAFSATRVAVSSLMAVGAVHHHLVKTLARTQVGLVVESAEPREVHHFCTLVGFGADAICPYLAVEAVYRLQVDGKIPPKSNGEFHSKEELVKKYYKASNYGMMKVLAKMGISTLASYKGAQIFEALGLSSEVIQKCFAGTPSRVEGATFEMLARDGLQLHELAFPTRGYAPGSAEASALTNPGNYHWRKNGEIHLNDPLAIAKLQEAARTNSVAAYKEYSKRINELNKQSNLRGLMKFKDADVKIPLDEVEPASEIVKRFCTGAMSYGSISLEAHTTLAMAMNKLGGKSNTGEGGELPSRMEPLADGSRNPKRSSIKQIASGRFGVSSYYLTNADELQIKMAQGAKPGEGGELPGHKVIGDIAITRNSTAGVGLISPPPHHDIYSIEDLAQLIHDLKNANPGARISVKLVSEAGVGVIASGVVKGHADHVLIAGHDGGTGASRWTGIKNAGLPWELGLAETHQTLVANDLRGRTVLQTDGQLKTGRDVAVAALLGAEEFGFSTAPLITLGCIMMRKCHKNTCPVGIATQDPVLREKFAGEPEHVINFFFMLAEEVREIMSGLGFRTVTEMIGRADMLELDREVVKNNDKLENIDLSLLLRPAAEIRPGAAQYCVQKQDHGLDMALDQELIALSKSALEKSLPVYIETPICNVNRAVGTMLSHEVTKRYHLTGLPKDTIHIKFTGSAGQSLGAFLCPGIMLELEGDSNDYVGKGLSGGKVVVYPPKGSSFDPKENIVIGNVALYGATSGEAYFNGMAAERFSVRNSGAKAVVEGLGDHGCEYMTGGTVVVLGKTGRNFAAGMSGGIAYVLDVDGKFNTRCNLELVDLDKVEDEEDKMTLKMMIQQHQRHTNSQLAQEVLADFENLLPKFIKVFPRDYKRVLSAMKHEEVSKQAIERASEEADETEEKELEEKDAFAELKNMAAASSKEEMSGNGVAAEARPSKVDNAVKNGGFIAYEREGVKYRDPNVRLNDWNEVMEESKPGPLLTTQSARCMDCGTPFCHQENSGCPLGNKIPEFNELVYQNRWQEALNRLLETNNFPEFTGRVCPAPCEGSCVLGIIENPVSIKSIECAIIDKAFEEGWMVPRPPLKRTGKKVAIIGSGPAGLAAADQLNKMGHLVTVYERSDRIGGLMMYGVPNMKTDKIDVVQRRVDLMTKEGINFVVNANIGKDPSYSLDGLKEENDAIVLAVGSTKPRDLPVPGRDLSGVHFAMEFLHANTKSLLDSNHEDGNYISAKGKKVVVIGGGDTGTDCIGTSIRHGCTNIVNLELLPQPPSTRAPGNPWPQWPRVFRIDYGHQEATTKFGKDPRTYEVLTKRFIGDDNGNVKGLELVRVSWEKDETGRFQFKEIEGSEEIIEADLVFLAMGFLGPEPTLAEKLGLECDNRSNFKAEYGRFSTTVEGVFAAGDCRRGQSLVVWAISEGRQAADQVDKFLTKTDDDEDAKLQQDLNQMKHNTITN

SEQ ID NO: 541 - protein, 432 aa, Zea mays
  misc_feature (370)..(370): Xaa can be any naturally occurring amino acid
MGNRIGGRRKSGVEERFTRPHGLYEHKDIDQKKLRKLILEAKLAPCYPGADDAAAGGGDLDLEECPICFLYYPSLNRSKCCSKGICTECFLQMKPTHTARPTQCPFCKTPNYAVEYRGVKTKEERSIEQFEEQKVIEAQLRMRQKELQDEEAKMKRKQSRCSSSRTVTPTTEVEYRDICSTSFSVPSYQCTEQGNECCSSEPSCSSQANMRPFHSRHNRDDNVDMNLEDMMVMEAIWRSIQQEQGHLVNPVCGSYFPVIEPPSRERQAFVPAAPLEMPHPGGYSCAVAALAEHQAPSMDFSYMSGSSTYPVFDMIRRPCNMSSGSLCGAENSSLDTWSGIAPSCSREVVRDEGECSADHWSEGAEAGTSXYAGSDIMADAGAMQPLPFAENFAMGPSHFRPESVEEQMMFSMAVSLAEAHHGRTQAQGLAWL

SEQ ID NO: 542 - protein, 1512 aa, Rhodobacter sphaeroides
MTIYDEAWVKAEEAKGAWLDANGLYKAEDEHASCGVGLVVSISGTPSRKVVESGIAALKAVWHRGAVDADGKTGDGAGIHVQIPVKFFYDQIRRTGHEPTCTKLVAVGQVFLPRTDLSGQERCRTIVESEVLRMGHYIYGWRHVPVDTSVLGEKANATRPEIEQILIRCEKDIDDEQFERELYIIRRRIEKAAQAGSIQGLYLCSLSCRSIIYKGMMLAEQVATFYPDLQDERFESSFAIYHQRYSTNTFPQWWLAQPFRMLAHNGEINTLKGNINWMKSHEIRMASSAFGDAAEDIKPIVPAGSSDSGALDAVFEVMVRSGRSAPMVKTMMVPEAWSKTTTDMPKAWADMYAYCNAVMEPWDGPAALAMTDGRWVCGGLDRNGLRPMRYVVTGDGMLIAGSEAGMVPVDEMNVREKGALGPGQLIAVDMAEGKLYHDAELKDTLAASQPFGDWIEKVVDLNAILADVPEQRMFAPAELRKRQIAAGFSVEEIEQVLVPMAEDGKEMIASMGDDTPPAVLSSVYRPLSHFFRQNFSQVTNPPIDSLRESRVMSLKTRFGNLKNVLDEHSSQTEILILESPFVANSEFETMLSQFGTNVATIDCTFPADHHHDALRHGLERIRAEAEDAVRSGAAHIVLTDQNQGPGAVPMPMILATSAVHSWLTRKGLRTFTSINVRSAECIDPHYFAVLIGCGATTVNAYLAQDTIADRIERGLLEGSLNDAMRRYRDAINAGLLKIMSKMGISVISSYRGGLNFEAVGLSRAMVAEYFPGMHSRISGIGTSGIQHKLEQIHAKGWLGGSDVLPIGGFYKARRSGEKHAWEASTMHMLQQACDRASYDIWKQFSATLRANPPIHLRDLLDIKTLGRPVPIEEVESITSIRKRFVTPGMSLGALSPEAHKTLNIAMNRIGAKSDSGEGGEDPAHFVPEPNGDNPSAKIKQVASGRFGVTAEYLNACEELEIKVAQGAKPGEGGQLPGMKVTELIARLRHSTPGVTLISPPPHHDIYSIEDLAQLIYDLKQINPRAKVTVKLVAASGVGTIAAGVAKAKADVILISGHNGGTGASPGTSIKYAGLPWEMGLTEAHQVLAMNNLRDRVTLRTDGGLRTGRDIVMAAMMGAEEYGIGTAALIAMGCIMVRQCQSNTCPVGVCTQDKKLREKFTGSADKVVNLITFYAQEVREILASIGARSMDEIIGRADLLTQVSRGAAHLDDLDLNPLLITVDGSNRITYDRSKPRNAVPDTLDAEIVKDGARFFEDGEKMQLSYAVRNTHRTIGTRASSHIVRKYGMRNNLQPDHLTVKLTGSCGQSLGAFAAKGLKIEVAGDANDYVAKGLSGGTIVVHPQMESPLVAAENTIIGNTVLYGATDGFLFAAGRAGERFAVRNSGAKVVVEGCGSNGCEYMTGGVAVILGRIGANFGAGMTGGMAYLYDPSGVAEDFMNLETLVTCAIGHPHWEAQLKGLIERHVRETGSRHAARILNDWETERANFLQVCPKEMLVHLPFPLSDEPQAVPAE

SEQ ID NO: 543 - protein, 1574 aa, Sinorhizobium meliloti 1021
MTDHSPSRQIGLNLAQDAATAVKTPAFPSGLPRKQGLYDPRNEHDACGVGFVAHLKGEKSHQIVRDGLFMLENLTHRGAVGADPLMGDGAGILVQIPDRFFREEMAKQGVTLPKAGEYAVGYLFMPRDEALIAHFKEVISEVVAEEGQIVLGFRDVPVDNSSLSKAPDIAATEPHHVQVFIGAGREAASSDESERRLFTLRKVISNRIYAEADGGDLGFYIVSLSTTTIVYKGMFLAYQVGAYYKDLADERFQSAVALVHQRFSTNTFPSWKLAHPYRMVAHNGEINTLRGNVNWMAARQASVSSPLFGDDISKLWPISYEGQSDTACFDNALEFLVRGGYSLSHAVMMLIPEAWAGNQLMSPERKAFYEYHAALMEPWDGPAAVAFTDGRQIGATLDRNGLRPARYIVTSDDRVIMASEAGVLPVAEDKIVKKWRLQPGKMLLIDMEEGRIISDEEVKSSLAGKHPYRQWLDNTQLILEELKPVEPRALRRDVSLIDRQQAFGYTHEDTKLLMSPMATTGQEAIGSMGTDTPISAMSDKPKLLYTYFKQNFAQVTNPPIDPIREELVMSLVSFIGPRPNILDHEGMAHAKRLEVRQPILTNGDLEKIRSIGHTEDRFDTKTLDFTYDISRGAEGMLEMLDRLCERAEAAVKGGYNIIVLSDRQIGPDRVAIPALLATAAVHHHLIRKGLRTSVGLVVESGEPREIHHFCLLAGYGAEAINPYLAFDTLVDMHKRGEFPKEVDEKEVVYRYIKAVGKGILKVMSKMGISTYQSYCGAQIFDAVGLSSALVGKYFFGTATTIEGIGLEEIAAETVARHKAAFGSDPVLANTLDIGGEYAFRMRGESHAWTPDAIASLQHAVRGNAEDRYREFSAMMNESASRMNTIRGLFTIKGAEEVGRKPIPIEEVEPAAEIVKRFSTGAMSFGSISREAHTTLAVAMNRIGGKSNTGEGGEESDRYLPLPDGSTNPERSAIKQIASGRFGVTTEYLVNADVLQIKVAQGAKPGEGGQLPGHKVDATVAKTRHSTPGVGLISPPPHHDIYSIEDLAQLIYDLKNVNPEADVSVKLVSEVGVGTVAAGVAKARADHITIAGFDGGTGASPLTSLKHAGSPWEIGLAETQQTLVLNGLRSRIALQVDGGLKTGRDVVIGALLGADEFGFATAPLIAAGCIMMRKCHLNTCPVGVATQDPVLRKRFKGTPEHVVNYFFFVAEEVREILASLGARRLDDIIGSSDLLDRDRMIEHWKARGLDFSRIFHKVEAPKEATYWTERQNHPIDDILDRRLIEKAKLALETKVPVAFEAAIKNVDRSAGAMLSGALAKRWGHKGLKDDTIHVTLKGTAGQSFGAFLARGITFDLVGDGNDYVGKGLSGGRIIVRPPENARIVPHQSIIVGNTVLYGAISGECYFNGVAGERFAVRNSGAIAVVEGVGDHGCEYMTGGVVVVLGGTGRNFAAGMSGGVAYVLDEEGDFARRCNMAMVELQPVPEEDDMLEKLHHHGGDLMHKGMVDVSGDMTRHDEERLYQLISNHLHYTGSVRAKEILDHWADYRPKFRKVMPVEYRRALEDMERMKMAEAAE

SEQ ID NO: 544 - protein, 1512 aa, Magnetococcus sp. MC-1
MIQSGLPKQTGLYDPSFEHDACGVGFVADLKGRKTHEIVRMGLKLLVNLTHRGAAGADPLTGDGAGILIQMPDAMLRQACRTLHIDLPELGAYGVGMVFLPKETSIRESIQRHIEKLIMDEEQVVLGWRDVPINKGARIGYTAKETEPLVRQVIVAARNKPADADPNWLERKLYIIRQRIENTVRDYGMEELSSFDVPSFSSRTLLYKGMFLADQVEDYYLDLVNPAVVSGFSLVHQRYSTNTFPTWGLAQPFRMIAHNGEINTVRGNINWMRAREAALTHPHFGDDLKKLFPVIPEGLSDSAAFDRAVEFLVLSGRSLPHAMMMLIPEAWENHKQMGDELKGFYEYHASIMEPWDGPAAVAFTDGRIIGATLDRNGLRPARYQVTKSGLCVMASEAGTVTFPPEEVLYNGRLQPGRMFVIDLEEGRIIDDTEVKKQILEGKPYRQWVEDGLINLDDMEEGDSTKEEQEKLGTLHKIFGYTEEDLHLLMGPMALGGSEPIGSMGNDAALAVLSTKNKPLFSYFKQLFAQVTNPPIDPIREDLVMSLYNQLGPAGNLLEESPEHVNHIRLLQPVIDNKQLEKIRAANVKGLHARTFSTLFLVERQCSLDDILSRLFDEVSTAVEDGVNLIILSDRGANKKQAPLPILLAAAGLHHHLIRAGTRSKVSIIVESAEVREVFHFALLVGYGTSAVNPYLAISTLSDLCGKGLFPPEITPAVAFKNYAKAVNKGLLKISSKMGISTLKSYSGAQIFEAVGLAKSLVSRYFTGTVSRIEGVDMTTLKEEILRKHRLAYAENVISINQLEVGGEYKYRHGGESHLWTPENIAKLQHSTRENNYETYKAFARTINEQSKNLCTLRSLLRLKKAAQPVPLDEVEPASEIVRRFVTGAMSYGSISKEAHETLAIAMNRIGGMSNTGEGGEDPERFKPRPNGDNARSAIKQVASGRFGVSSHYLVNSDEMQIKIAQGAKPGEGGQLPGHKVNEVIARTRNTTPGVTLISPPPHHDIYSIEDLAQLIFDLKNVNPDGRVSVKLVSEVGVGTVAAGVSKAHADMILIAGHDGGTGASPVSSIKHAGVPWELGLAETQQTLVLNDLRGRVRLQVDGQLRTGRDVIIGALLGAEEFGFATGPLVVEGCIMMRKCHLGTCPVGIATQDLELRKKFTGQPQHVVNYFFFIANEVRERMAAMGFRKMDDMIGRVDRLEAREAIDHFKAQGLDFTNILKQPDVPSRIATRYVQPQDHGIDKVLDHKLLELAGIAFETREPIQIHLPIHNTDRSVGAMLGGEISKRFGGEGLPDNTIQCHFTGVAGQSFGCFNVAGVSLHLTGAANDYVCKGMSGGRVVVKPHPGATFVAEENIIAGNTILYGAIKGEAYFRGMVGERFAVRNSGAQAVVEGTGDHGCEYMTGGTVVVLGRTGRNFAAGMSGGEAYVYDVKGNFAELCNQSMVGLESVETEEDQATLKALIEKHVKYTRSTVGKQILENWTEALSRFVKVMPREYKRVLEEMKQQQEKVANG

SEQ ID NO: 545 - protein, 442 aa, Fulvimarina pelagi HTCC2506
MTYHNPRTPPRKSWTFDDQTLAEIRRAAATGIYDIRGAGAKRKLPHFDDLLFLGASMSRYPLEGYRERCDTSVDLGTRYAKKPIRLKIPITIAGMSFGALSGNAKEALGRGASAAGTSTTTGDGGMTDEERGHSETLVYQYLPSRYGMNPTDLRRADAIEIVVGQGAKPGGGGMLLGQKISDRVAQMRTLPKGIDQRSACRHPDWTGPDDLEIKILEIREITDWEKPIYIKVGGARPYYDTALAVKAGADVVVLDGMQGGTAATQDVFIENVGQPTLACIRPAVQALQDLGMHRKVQLIVSGGIRSGADVAKAMALGADAVSIGSAAMVALGDNDPQYEEEYNRLGTTAGAYDDWHEGKDPAGITTQDPELASRLDPVAAGRRLANYLKVMTLEAQTIARACGHNDLHNLEPEDLCALTIEAAAMAQVPLAGTDWIPGKNRF

SEQ ID NO: 546 - protein, 1538 aa, Porphyra purpurea
MFNQKIIEQASGKLTGSLTKSSSLVSIEKERDACGVGFIADVNNIANHKIVVQALEALTCMEHRGACSADRDSGDGAGITTAIPWNLFQSGLKDKGIIIQKNESIGVGMLFLPTSKLQESKKIIENVLKEENLEVVGWRLVPTVEEVLGKQAYLNKPHVEQMFCRSSNLSKNELEQQLFLVRKKIERYIGINGKEWAHEFYVCSLSCYTIVYKGMMRSAVLGQFYQDLYHSEYTSSFAIYHRRFSTNTMPKWPLAQPMRFISHNGEINTLLGNLNWMRSREPLLKSPIWKNRIDELKPITNKDNSDSANLDAAVELLIASGRSAEEALMILVPEAFQNQPEFNKNTEISDFYEYYSGLQEPWDGPALVVFTDGKVIGATLDRNGLRPARYVITKDNLVIVSSESGVVQVEPSNIKSKGRLGPGQMISVDIISHKILNNKEIKTSVAGKTPYGDLLKESRQILGHQAFFSEQQVESKKLMQLQTAFGYTNEDVELVIEHMASQGKEPTFCMGDDIPLAILSEKSHILYDYFKQRFAQVTNPAIDPLRESLVMSLTIQIGHKSNLLDDQPVLAKHIKLDSPIINEGELNAILESKLSCAHINTIFKVEKGPNDFKKQIEQLCESASQAILSGNNILILSDKNDILESEKVSIPPLLAAGAVHHHLINKGLRQDASIIIETAQCWSTHHFACLIGYGASAICPYLAFETARHWWSNPKTKMLMSKGRLPACNIQEAQANYKKAVEAGLLKILSKMGISLLSSYHGAQIFEILGLGSEVVNFAFKGTTSQIGGLSMEELGQETVNIHSKAFSQVKTKKLANYGFVQYRPGGEYHINNPEMSKALHQAVRGYNPEYYNSYQRLLQNRPPTALRDLLKLKSNKQPIAIDKVESMENILHKFCTGGMSLGALSRETHETLAIAMNRIGGKSNSGEGGEDPVRFKVLNDVNESGNSDLLPHLKGLRNGDTASSAIKQIASGRFGVTPEYLMNAKQLEIKIAQGAKPGEGGQLPGKKISPYIATLRKCKPGVPLISPPPHHDIYSIEDLSQLIFDLHQINPTAKISVKLVSEIGIGTIAAGVAKGNADIIQISGHDGGTGASPLSSIKHAGSPWELGLSEVHQLLAENQLRDRVTLRVDGGLRTGSDIVLAAIMGAEEFGFGTIAMIATGCIMARICHTNKCPVGVATQREELRARFSGVPEALVNFFLFIGNEVREILASLGYKSLDEITGQNHLLIKNTDIELAKTRGIELNSLININTHTWTKFNSVHTNGPVMDDDILAIPEINDAIKLENEVAKHFKIANTNRTVGTRLSGVIAQKYGNEGFKGLIKLNFYGSAGQSFGAFLASGVNLKLMGEANDYVGKGMNGGSIIIVPPAGTTYEDNNQVIIGNTCLYGATGGYLFAQGQAGERFAVRNSLAKSVVEGVGDHACEYMTGGTIVVLGKAGRNVGAGMTGGLAYFLDEENKFIERVNSEIVKVQRVITKAGEQQLKNLIENHSAKTGSLKAHNILENWNTYLPQFWQVVPPSEANIEETNTAYSSNTITAY

SEQ ID NO: 547 - protein, 1478 aa, Bacillus cereus ATCC 14579
MLNKKNTWTPSLFRDYRNAEHDACGIVSVMEKRKIATKENIDLCIQSLVKMNHRAGFINGEGDGIGIHIDIPKTLWNEKLKSSGYNPTIVDHPHFIVGHFFLNKKENITALKDYIRTQLNNKNFTIIFESDDATNSDALGPLGKQEEPLFWQVALIAENEIINIEQTLFSVTIKIEENEAIHVASLSHDHVVYKVLGAGDTLVAYYNDLQHPLIASTMTLGHNRYSTNTLSNFFRVQPFSILGHNGEINTIAKLRDQAEMIDVPLTAGGSDSQDLNRTLETLLVQYGYSLFEAMEILFPPIINEIKLYETPLQDLYTYIREAWGHFAQGPAGIISRFKDEAVFSVDSLGLRPVWKVETESSYIFSSEPGVVSPTKYVAEPKPLAPGEKVGLKWNEQDELVLYEYDKYQIQVYNRFKKRIDTTNYHLNLSIPETKKIQGLCDSVQVETKEYVAFGWDREHIQLLEQMATKGVEPIRSLGHDSPLAALDTDRRNIADFIKESVAVVTNPAIDRDREIEHFSTRTVLGERPSLLSGAKRPFVVEMLSPIILEGSVAQPIAEELHTITYEQLIELFKTHNSIATISATFSSSETLQCALSRISSEAIAAVNNGASLLVLDDAKAHLNERLWIDPHLVTAKVHQALSENKLRRNCSLVIRSGALRSLHDIVTLYGLGADGINPYLLFATVNDGTKTPITNLYTALNKGLEKVISTIGIHELRGYGRLYSSIGLHEEIANILQITNFFGSNDLAFSLESLVEDAKIRAEDYNNPKIRMRKSFHIFPRIWKAIGDVAKGNSYDDYRDKLSELEENNPIAIRHLVQTKQTKHVVPTEEVSIGIKNHNLPFIISSMSFGSQNEIAFRAYAEAADQLNMISLNGEGGEIKDMIGKYPHTRGQQVASGRFGVNAELLNSSNLIEIKIGQGAKPGEGGHLPGSKVTAKIAEARNATIGSDLISPSNNHDIYSIEDLAQMITEIKTANQLAKVAVKVPVVPNIGTIAVGIAKAGADFINISGFDGGTGAARIHALQHVGLPVEIGVKAAHNALLEASMRHKVEIWADGGIRSVNDALKIMLLGANRIGFGTLSMIAIGCTTCRGCHLDTCHVGIATQIESEAQAKEHGLRRFVPRELESAVAGLLNLFTSFGVELKRLTGQLGYTNLQAIVGRSDLLEQVRGENLLNLRNLLQIIEHPSVTTTEGVSEKQFKTVHSADSKELVGVGVEQRVMGGLESCYRVRSKLYEATQLEPLTLKYTNGSIPGNGLGAYNSENLFIHVNGGAQDGIGKTSFGGGIYITKSKGKDGVYYNGSVGKGFGYGAQKGALYVQGNADARAGIRLSGADMIIGGRITKPLREKEQGNIGAYSNIKGFAFEYMTNGRALVLGDPGPWICAGMTGGVVYLRRDSNLGLTEQALKRRIAKGANVTLQPISKNGLKDVTELLLDYIRVLNEHEQYEEVALLTPLLDDIQNKFFEIIPKKEQADPSISTE

SEQ ID NO: 548 - protein, 1546 aa, Novosphingobium aromaticivorans DSM 12444
MGFPPVQGLYDPRNEHDACGVGFIAHIKGQKSHAIVDQALEILRNLDHRGAVGADPLLGDGAGILIQIPDQLFRRWAASEGKELPQPGDYAVAMCFLPQDEASRLFVTEFFEKFIAKEGQELIGWRDVPTTLDGLGKTVIEQMPVIRQCFIKRGPGTPDQDAFERKLLAIRKQTQNPLAAMAEKHGLPGVTQLYMPSFSTRTIVYKGLLLANQVGSFYDDLRDPDCVSALGLVHQRFSTNTFPSWKLAHPFRFIAHNGEINTVRGNVNWMNARRRTMESELLGPDLDKMWPLIPHGQSDTASLDNALELLLAGGYSLAHAVMMLVPEAWAGNPLMDSRRRAFYEYHAALMEPWDGPAAVAFTDGRQIGATLDRNGLRPARFSITRDDLICMASESGVLPFREEDIVRKWRLQPGKMLLIDMDQGKIIEDEEIKAELAGAEPYEEWLDQAQYKLKELDVIEPELAALPVETTSLLDRQQAFGYTQEDVTKFLEPMAVAGDDPIGSMGTDTPIAVLSKRSRLLYDYFKQNFAQVTNPPIDPIREELVMSLVSMIGPRPNLLGHDAGSHKRLEVDQPILTNDEIAKIRSVEAALDGAFRTATIDTTWDANAGADGLEMAIKEMCWAATEAVLADKNILILSDRAQNENRIPMPALLATAAVHHHLVRQGLRMQTGLVVETGEAREVHHFCVLAGYGAEAINPYLAFETLEAIRVDKELPLTTKEVQKNYIKAIGKGILKVMSKMGISTYQSYCGAQIFDAVGLSTDFVNAYFTGTATTIEGVGLKEIAEETVRRHATAYGDNPIYKKMLDVGGMYQLRLRGEEHAWTASNIANLQHAVRGNMPEKYKEFAQSINDQSERMLTIRGLMDLKKADQPISIDEVEPASEIVKRFATGAMSYGSISWEAHTTLALAMNRIGGKSNTGEGGEDPARFKPLPNGDSMRSAIKQVASGRFGVTAEYLVNADDVQIKMAQGAKPGEGGQLPGDKVDKTIGKTRHSTPGVGLISPPPHHDIYSIEDLAQLIHDLKNVNTGARISVKLVSEVGVGTVAAGVSKARADHVTISGYEGGTGASPLTSLTHAGSPWEIGLAETQQTLLLNNLRSRICVQADGGLRTGRDVAIAALLGADEFGFATAPLIAAGCIMMRKCHLNTCPVGVATQDPVLRARFTGQPEHVINYFFFVAEELRAIMAEMGFRTIAEMVGRVDRLDTKKAISHWKAQGVDLSKLLHKVDPVPGTTLNWSETQDHGLEAALDNDLIAASAPALEKGEPVRLERNVINVNRTVGAMLSGEVARKYGHKGLPDNTIHVAFKGVAGQSFGAFLAHGVTLDLVGDANDYVGKGLSGGRVIVRQPGHVDRDPTENIIVGNTVLYGAIAGEAYFNGVGGERFAVRNSGALAVVEGTGDHGCEYMTGGVVVVLGRTGRNFAAGMSGGVAYVYDVDGNFASLVNGAMVDVLPVSAERDEEDGAGRPQQRGTDVYDQGMGDMLRHDAERLRVLVERHHLYTGSARAREILDNWVEALPRFVKVMPRDYARALRQMEAERLEAASVAAE

SEQ ID NO: 549 - protein, 1518 aa, Mycobacterium smegmatis str. MC2 155
MLYSALPDAQGLYDPQNEADSCGVAMIADIQGRKSHRIVSDGLIALENLEHRGAAGAEASSGDGAGILIQLPVELLREVVDFELPAPTADGDNTFAAGVCFLPQDPVARSAARERIEAIAVEEGLEVLGWRKLPVDPDGAGIGATALGCMPYMAQFFVTAPETGGARPGGVDLDRLVYPVRKRAEREDVYFPTLSSRTMVYKGMLTTMQLPQYFLDLRDERCQSAIAIVHSRFSTNTFPSWPLAHPFRFVAHNGEINTVRGNRNRMHAREAKLASPLIPGDLSRLSPICSPEASDSASFDEVLELLHLGGRSLPHAVLMMIPEAWENATTMGAAERAFWQFHASLMEPWDGPACVTFTDGTVVGAVLDRNGLRPGRWWRTVDDRVILASEAGVLDVPSGEIVAKGRLQPGKMLLIDTAAGRIVPDDEIKAQLSAAEPYEEWLHAGLLDLKTLPERGVAKPNHDSVVRRQIAFGYTEEELRVLLTPMAASGNEPLGSMGTDTPTAVLSSRSRLLYDYFVELFAQVTNPPLDAIREEVVTSMARVMGPEENLLEPTAASCRQIVLRAPVIDNDDLGKIVHINDDGEHPGLRATVLRALYDVERGGEGLAEALDDLRRRASEAIADGKRILVLSDRDSDHTRAPIPSLLAVSAVHHHLVRTKERTKVALVVESGDAREVHHIALLIGFGAAAVNPYLAFESIEDLIREGELTGIEPAAAVRNYIKALCKGVVKVMSKMGISTVASYTAAQVFEAIGLDRGVIDEYFTGTTSQLGGVGLDVLADEVKMRHRRAYPENPTERVHRRLEVGGEYAFRREGELHLFTPEVVFLLQHSTRTGRRDIFAKYSEEVDRLSRKGGTLRGLFELKTGVRPPVPLEEVEPVESIVTRFNTGAMSYGSISAEAHETMAIAMNKLGGRSNSGEGGEDVDRLYDPRRRSAVKQVASGRFGVTSDYLVNATDIQIKMAQGAKPGEGGQLPGYKVYPNIAKTRHSTPGVGLISPPPHHDIYSIEDLAQLIHDLKNANSDARIHVKLVSSVGVGTVAAGVSKAHADVVLISGHDGGTGAAPLTSLKHAGAPWEIGLADTQQTLVLNGLRDRITVQCDGGLRTARDVVVAMLLGAEEYGFATAPLVVSGCIMMRVCHLDTCPVGVATQNPELRARFNGKPEFVENFFTFIAEDIRRYLAELGFRSIDEAVGHAELLDTAEGVAHWKTRGLDLDPIFAVPTDAHGAKLTQRRKLREQDHGLDQALDRTLIQLAEGALEDAHPVRLELPVRNVNRTVGTLLGSEVTRRYGAAGLPDDTIHVTLTGSAGQSIGAFLPPGITLELVGDANDYVGKGLSGGRVVVRPPDDVLFLPEDNVIAGNTLMYGATSGEVYLRGRVGERFCARNSGALAVVEGVGDHACEYMTGGRVVILGKTGRNMAAGMSGGIAFVLGLDPARVNTEMVQLQRLDPEDLEWLHHVVTDHVRYTGSTLGTSLLSDWPRRSAQFTKIMPTDYQRVLQATRMAKAEGRDVDSAIMEASRG

SEQ ID NO: 550 - protein, 1518 aa, Mycobacterium sp. JLS
MLYSATPGAQGLYDPEHEKDSCGVAMIADIRGRRSHSIVADGLVALEHLDHRGAAGAETNSGDGAGILLQLPVELFTEVVDFDLPQPTADGCNTFAAGICFLPQDPVARAEACRQVEALAAEEHLEVLGWRTVPVDPDGADVGATARSCMPYMAQLFVAAPEVDGARPGGIELDRRVYPLRKRAENSADVYFPSLSSRTIAYKGMLTTVQLPLYFSDLRDARCTSAIAIVHSRFSTNTFPSWPLAHPFRFVAHNGEINTVRGNRNRMHAREAMLASANIPGDLSRLSPICTPDASDSASFDEVLELLHLGGRSLPHAVLMMIPEAWENNTSMDADERAFWQFHASLMEPWDGPACITFTDGTLVGAVLDRNGLRPGRWWRTIDDRIILASESGVLDVPPEQIVAKGRLQPGKMLLIDTAAGRIVSDDEIKLGLSKAEAYGEWLHAGLLELGTLPDRARVQPNHESVVRRQISFGYTEEELRILITPMAASGAEPLGSMGTDTPSAVLSERSRPLYDYFVELFAQVTNPPLDAIREEVVTSMARIMGPEQNLLEPTAASCRQILLKWPVLDNDELNKIVHINDDGEHPGLRATVLKALYDVERGGEGLADALDDLRTRASDAIADGARTLVISDRDSDHTRAPIPSLLAVSAVHHHLVRTKQRTKVALVVESGDAREVHHVAMLIGFGAAAVNPYLAFETIEDLIREGELTGIEATAAVRNYLKALGKGVTKVMSKMGISTVASYTAAQAFEAVGIDRDVVDEYFTGTPTQLGGIDLDVIAEEVKLRHRRAYPENPTERVHRRLEVGGEYAFRREGELHLFTPEVVFLLQHSTRTGREDVFRQYSEEVDRLSRDGGTLRGLFEFKKGARPPVPLDEVESAAEIVKRFNTGAMSYGSISAEAHETMAIAMNNLGGRSNSGEGGEDVDRLYDPRRRSAVKQVASGRFGVTSDYLVNATDIQIKMAQGAKPGEGGQLPGYKVYPNIAKTRHSTPGVGLISPPPHHDIYSIEDLAQLIHDLKNANDRARIHVKLVSSVGVGTVAAGVSKAHADVVLISGHDGGTGAAPLTSLKHAGAPWEIGLADAQQTLVLNGLRDRITVQCDGGMRTARDVMVAMLLGAEEFGFATAPLVVAGCIMMRVCHLDTCPVGVATQNPELRARFNGKPEFVENFFRFIAEDIRRYLAEMGFRSVDEAVGHAEILDTATGVEHWKSKGLDLTPIFTVPTDAHSGRTQRRKLKDQYHALDQALDQTLIQLSEGALEDAHPVTLELPVRNVNRTVGTLLGAEVTRRYGAAGLPDDTIRVKLTGSAGQSIGAFLPPGITIELTGDANDYVGKGLSGGRIIVKPADDVLFLPEDNVIAGNTLLYGATSGEVFLRGKVGERFCARNSGALAVVEGVGDHACEYMTGGRVVVLGRTGRNMAAGMSGGIAYVLGLNPARVNTAMVELQRLDPEDLVWLHDVVARHARNTGSTVATSVLSDWPRRSAQFTKIMPSDYQRVLEATRMAKAEGRDVDTAIMEASRG

SEQ ID NO: 551 - protein, 446 aa, Mycobacterium sp. MCS
MSTWALRESATFDRATIAGIQRAADTGIYDIRGWGAKRALPHFDDLLFLGASMSRYPLEGYRERCATDVVLGGRHAKYPLHLDIPVTIAGMSFGALSGQAKEALGRGASEVGTSTTTGDGGMTPEERGQSKHLVYQYLPSRYGMNPDDLRKADAIEVVLGQGAKPGGGGMLLGQKISERVASMRTLPEGIDQRSACRHPDWTGPDDLTIKINELREITDWEKPIYVKVGATRTYYDVKLAVHAGADVVVVDGMQGGTAATQEVFIEHVGVPTLAAIPQAVQALQELGVHRKAGASGATGDGSVQLIVSGGIRTGADVAKALALGADAVAIGTAALIALGDNHPRYAAEYEKIGSAAGFYDDFQDGRDPAGITTQDPELAARLDPVEAGRRLANYLRVLTMEAQTIARACGKAHVCHLEPEDLVAVSIEAAAMARVPLAGTDWIPGR

SEQ ID NO: 552 - protein, 440 aa, Glycine max
MEGFHPSMTSPFSYTFPISDAGTSNFSTTTTGTSYSTSTPWMNSRIWSKLPQRLLDRVLAFLPPPAFFRARCVCKRWYALLFSNTFLELYLQVSPHQHWFLFFKHHKTRKSYIYKNNNNNNGSSDGCGHIGAFEGYLFDPYEMSWYRIFFALVPSGFSPASSSAGLLCWVSDEAGPKTMLLSNPLIGSLTQLPPTLRPRLFPSIGLTIRPTCIDVTVAGDDMISPYAVKNLTSESFHIDGGGFYSLWGTTASLPRLCSLESGRMVYAEGKLYCMNCSPFSILAYDITSNTWFKIQAPMRRFLRSPNLVECKGKLLLVAAVEKSKLNVPKSLRVWSLQACGTMWVESERMPQQLYVQFAELEDGNGFECVGHGEFIVIMIRGTDKALLFDICRKRWQWIPPCPYIAHDGFELHGFAYEPRLATPVTGLLDQLALPFQSFNA

SEQ ID NO: 553 - protein, 1530 aa, Vibrio cholerae O1 biovar eltor str. N16961
MHTQCGCVLNNWKDVSMVDKAQRSRGLYTPELEHDACGIGFVAHLKNRKSHQVVTQALDMLARMEHRGGQGCDPCSGDGAGILLQKPHEFLLEEAVKLGIKLPSFEKYGVGVVLFPKDEHKRAQCRDILERNAKRLDLDVIGYRVLPTNNSMLGADPLSTEPQFEHVFISGGPGMQPDELERKLYVLRNYTVRVCLESVSNIGDDFYINSMSYKTLVYKGQLTTEQVPQYFLDLQNPTMVTALALVHSRFSTNTFPKWRLAQPFRYIAHNGEINTVRGNLNWMKAREAILQSKLFTQAEIDMLLPICQEGASDSANFDMVLELLVLSGRSLPHALMMMIPEAWQENKAMDPKRRAFYQYHANVMEPWDGPASVCFTDGVQVGATLDRNGLRPSRYTVTKDDFLIMASESGVVEIDPANVEYRGRLQPGRIFVADLEQGRIISDEEVKDGIASAQPYEKWVEENLLSLKKLPDADNVHSQPSPERLLHRQQAFGVSSEEVNDIILTLAQTGYEPLGSMGADWPVAVLSHQSQHLSNYFKQLFAQVTNPPIDPIRERMVMSLNTYIGRDQNLLAETPAHCRKVELESPVISNAELEKIRAIDNEHLQAKTLDIVFRASDEPGKLERALKRICQYAEDAVIDGYSIILLTDRAVNSNHAAIPAMLAVGAVHHHLIRKGLRSKCGIVVETGDARETHHFATLLGYGANAVNPYLVVETIVDLKRQKKLDADVSVEKYFENYRKGVNGGLLKIFSKMGISTLQSYHGAQIFEALGISKAVVDKYFTGTITRIQGLTLDDIAKEVLVRHRIGYPTREIPLQVLDVGGVYQWKQRGEQHLFNPETIHLLQESTRHKNYQQFKKYAAAVDSQGDKAVTLRSQLDFVKNPAGSIPIEEVEPIESIVKRFATGAMSFGSISYEAHSTLAIAMNRLGAKSNSGEGGEDPMRFELNANGDSERSAIKQVASGRFGVTSYYLTNADEIQIKMAQGAKPGEGGQLPGDKVDEWIGATRHSTPGVGLISPPPHHDIYSIEDLAQLIFDLKNANRKGRVNVKLVSEAGVGTIASGVAKAKADVVLIAGHDGGTGASPISSIRHTGLPWELGLAETHQTLLKNGLRNRIVVQADGQMKTPRDIAIAVLLGAEEWGVATAALVVEGCIMMRKCHKNTCPVGIATQNKTLRERFAGRVDDVVTFFQYMAQGLREIMAELGFRTINEMVGQAHKLKVRDDIGHWKYKNLDLSPILFIEQPRSEDGIYCQTQQNHQLESILDRTLIQLATPALERGEAVKAELPIINTDRSTGTMLSNEICKVYKDQGLPQPMQVKFNGSAGQSFGAFLTKGVYFEVEGDANDYWGKGLSGGTLVLYPNRNATIVPEENIVVGNVCFYGATSGESYIRGLAGERFCVRNSGAKVVVEGIGDHGCEYMTGGVAVILGSTGRNFAAGMSGGVAYVWDKSGDFQSKLNAELVDLDPIEAEDRALLKEMLTKHVQFTGSEVAKAFLANFDASLATMVKVMPRDYKAVLQKRKAQEQQATLAAEAV

SEQ ID NO: 554 - protein, 1539 aa, Desulfitobacterium hafniense Y51
MQNYGLPQKQGLYDPALEHDACGMGFVVSIKGEKSHEIIDEALTVLENLNHRGASGADENTGDGAGILVQIPHDFFQRECEVLGFALPEKGNYGVGMIFAHRYADFRQIQMETFERIVIEEGQRILGWREVPIDKSTIGESAKTVMPRFIQVFIEKNPEILDVMDFERKLYTIRKRAEKIILPMCEDKGGTFYVASLSAKTIVYKGMLTAEQLRHFYLDLSDLDFVSALAMVHSRFSTNTFPSWERAHPNRYIVHNGEINTIRGNVNWMRARQKCIDSSLFEDIAKVYPIVDESGSDSAMFDNSLEFLHLTGRSLPHAVMMMIPEPWENNDFMPKEKRDFYAYNSFLMEPWDGPAAMGFTDGVVIGGVLDRNGLRPSRYYVTKDDKVILASEVGVIDIKPENVQYKGRLEPGKMLLIDTEAQRIIADEEIKAGVARKNPYGEWIEKHIVKLSSLPEAARMDRRAGSVGIVEESEESKDQGQLIQQQKAFGYTFEDITKTIQPMAVEGVDPVGAMGMDSPLAVLSEKPQMLYLYFKQLFAQVTNPPIDGIREEIVTSCTMLLGNSGNLLDPDQENTASLFLEHPILTNEQLNRIKHLQHGQFKTVTLSMLYPVAGGPKAMERALERLCREADKAIGEGANIIILSDRGVDKEQAAIPALLASSGLHHHLIRKEIRTNLGIVLESAEPREVHHFCTLVGYGVTAINPYLAYETIEDLAAKGLLDELTAQEGIKNFIKASVKGMLKVLTKMGISTMHSYHGAQIFEAVGLRKDLIDKYFTMTPSRLEGIGLEEIALENQMRHESAYDENSLYADSLEVGGYFQCKEDGEKHLYNPETIYLIQKACREGNYALFKEYTKKINEEEVYTLRHLLDFKYNAGDTIPIEEVESVDSIVKRFKTGAMSYGSISKEAHEALAIAMNRLGGKSNTGEGGEDCERFKVLANGDTKNSAIKQVASGRFGVTSNYLVNAQEIQIKMAQGAKPGEGGQLPGRKVYPWVAKTRHSTPGVDLISPPPHHDIYSIEDLAELIHDLKNANRGARINVKLVSEVGVGTIAAGVAKGKADVILISGYDGGTGASPRTSIRNAGLPWELGLAETHQTLVLNKLRDRVVVETDGKLLSGRDVVIAAMLGAEEFGFATTPLIALGCVMMRVCNLNTCPVGIATQDEELRKNFTGKPEHVENFMRFIAQEMREIMAKLGFRTINEMVGRTDRLKSKETIKNWKASQLDLSQILYQPYAGSDVSRYNTQTQKHLLEKSLDMKKLLRVCQPALENQKPIRAKLKINNVDRVVGTIIGSEISKRYGEQGLPEDTIKLTFVGSAGQSFGAFVPKGLTLELEGDANDYLGKGLSGGKIAVYPPGTADFVPEENILIGNVAFYGATSGEAYINGIAGERFCVRNSGVHAVVEGVGDHGCEYMTGGKVVILGKTGRNFAAGMSGGVAYILDFDENYCNKSMVLLENIQSEAELDEVKEMIRKHVEYTHSPQGGKVLADWESYATRFTKVIPKDYKRMLANIDKACQDGYSGDEALMAAFAEHFKTSEAAK

SEQ ID NO: 555 - protein, 500 aa, Dehalococcoides sp. VS
MKTFLPSKFIVDRIEDRCIKCKVCITQCSFDTHYYDEDDDQIKVRNQNCVGCHRCVTFCPTNALVVRNNPLEYRQNANWTPEMIEDIFKQAETGGVLLTGMGMDKAKPIYWDKLLINASQVTNPSIDPLREPMELTTYLGRRPEKAAFDNCGNVKENITPLVKIDVPVMFSAMSYGAISLNVHRSLAQAAKNMGTMWNTGEGGLHSSLMEFKDNTIVQVASGRYGVQNDYLNSGRIVEIKIGQGAKPGIGGHLPGEKVSADVSLTRMIPMGTDAISPAPQHDIYSIEDLSQLIYALKEATRYRVPISVKIAAVHNVSAIASGIVRAGADIVTIDGMRGATGAAPKVIRDNVGIPIELALAAVDSRLREEGIRNQASLVISGGIRNSGDVFKAIALGADAVNIGTAALVALGCHLCQQCHTGKCAWGICTSDLALTKRINPEIGAKRLSNLLRGWSLEIKDMLGGLGVNAIESLRGNRLHLRGVGLSAEELKILGVRAAGE

SEQ ID NO: 556 - protein, 553 aa, Bordetella pertussis Tohama I
MNWIAGRYTTFALMLIGAALTSALAVHSSRAWLWAAVPFVLLSLLGVYDLLQTRHAIRRNYPVLGNLRFLFELIRPEIRQYFLEDDTHASPFSRAQRSIVYQRAKQDIDKRPFGTQEDVYGDRYEWINHSMTPAHVADADFRVTVGGPECRQPYSMSAFNISAMSFGALSANAVLALNEGARIGDFAHDTGEGGISRYHRERGGSLVWNIGSGYFGCRDAHGAFSEEAFVKNACTPQVKMIEIKLSQGAKPGHGGILPAGKVTPEIAEARGVPAWQDCNSPSSHSAFDSPVGLLHFVARLRELSGGKPVGFKFCVGHPWEWFAIVKAMLQTNITPDFIVVDGAEGGTGAAPVEFVDHVGTPLREALRLVHNTLIGVNLRDRIKLGASGKIITAFDMARAMAMGADWCNAARGFMFAIGCIQAQACHTGKCPTGVTTQDPLRQRALVVPDKAQRVANFHGNTLHALAELLGAAGLTHPGQLRPHHIARRISSSEVRLLSALFPELAPGELLRGEFRHHVFQVGWGMAQADSFQPAMDISAALAALRPAGAPAHA

SEQ ID NO: 557 - protein, 1487 aa, Vibrio cholerae O1 biovar eltor str. N16961
MALYDPSLEKDNCGFGLIAHMEGQASHKLVRTAISALDRMTHRGGIAADGKTGDGCGLLLQKPDSYLRLIAEEQHWKLSKQYAIGMLFLSRDPHKAQLAQQIVNQELAKETLSVAGWRKVPTNPKVLGPIALDSLPDIQQVFISAPAGWRERDVERRLYIARRRIEKQITDDRDFYICSLSTQVLVYKGLCMPADLPRFYLDLADLRMESAICLFHQRFSTNTQPRWPLAQPFRYLAHNGEINTIEGNRQWARARAYKFASPLLPDLQSAAPFVNETGSDSSSLDNMLDLFLAGGMDIFRAMRMLVPPAWQNHPDMDPDLRAFYDFNSKHMEPWDGPAGIVLSDGRYAACNLDRNGLRPARYVITKDKLITLASEVGIWDYAPDEVSEKGRVGPGELLVIDTRKGKIWQSSEIDNDLKSRHPYREWMENNVHKLTPFSQLPDDKVGERSFDADLLKTYQKQFAMSNEEIDQILRVLGDMAQEAVGSMGDDTPMAVLSSKERLISDYFRQKFAQVTNPPIDPLREKHVMSLATSIGQEMNVFCETDGHAHRVTFDSPILLYSDMQQLLTLSDQHYRNTILDINFDPQEKNLKQAVLDLCDKAEQVVREGTVLVVLSDRALTADRLPIPAAMAVGAVQARLVEANLRCDANIIIETGAARDPHHFAVLIGFGATAVYPYLAYETLGKMIDDGALQKSYREVMQNYQYGINKGLYKIMSKMGISTVASYRCSQLFEAVGLHRDVVDLCFKGVTTRIQGANFDDFEQDLFNLSRKAWAKRKPLEHGGLLKYVHGGEYHAYNPDVVGTLQKAVKSGEIMDYREFAQQVNQRPVAMLRDLLRLKTSDKPLPLEHIEPASDLYKRFDSAAMSIGALSPEAHEALATAMNRLGGYSNSGEGGEDPRRFGTERNSRIKQVASGRFGVTPHYLTNADVLQIKVAQGAKPGEGGQLPGHKVTAEIAKLRYSVPGVTLISPPPHHDIYSIEDLAQLIFDLKQINPKALVSVKLVSEPGVGTIATGVAKAYADLITISGYDGGTAASPLTSVKYAGSPWELGLAETQQALVANGLRHKIRLQVDGGLKTGLDVIKGAILGAESFGFGTAPMVAMGCKFLRICHLNNCATGVATQDETLRKDYFKGLPEMVMNYFKGLAEEVRGYLAELGVEKLTDLIGRTDLLEVVEGMTAKQSKLDLSDLLEAPVSPQNLPLYCTEPNTPFDKGALNQKIVEDALAAVENQQSLELYYNVINTDRSIGARLSGEIAKRYGNLGVATSPIKVVLNGTAGQSFGVWNAGGLELYLTGDANDYVGKGMAGGKIVIRPHQGTAFVCNEATIIGNTCLYGATGGKLFAAGKAGERFAVRNSGTIAVIEGAGDNACEYMTGGIVAILGATGVNFGAGMTGGFAYVLDENGDFQGRVNDESVEAVALTDLYIHQEHLRGLIAEHLEETGSAHAERILANFDEWIPKFYLIKPQAADLRTLLGHQSRSAAELRVQAQ

SEQ ID NO: 558 - protein, 1492 aa, Thermus thermophilus HB8
MSWKDAYPDIPLGRDACGIIAMAEKSGKPSHRVVRRTLESLYRMAHRAGAIRGEGDGTGIQTDIPRELWALFLEQAGLDPGLAHNPRFFVGHFFVPKKEAGRLQEFEDLLRREGQRLGVRPVLFRRGEVVSEVLGPVGRRTEPLFLQVAGLSPDGDAPLWELGLRLEASFPVHVVSLSTHSVVYKVRGAAELLKRYYPELSRPEFKSRIALGHNRYSTNTLSTFEQVQPFGLIGHNGEINTIERLRREMDFLGIPRTGGSDSQDLNRMLEGLIYRYGLTLPEAMDLVFPPVLGEIKALPEDLQDLYMALRQRFGPLAQGPAAIVSRHGDEAVFATDAMGLRPLWQFETPYELVFSSERGVFSAEEFVSEPKPLAPGEKVYLRLTPEGAKVLPFDRHQRQVLERVAARTPVEGYRVHLTGPLRQAPPPLAGGSGVEVEEKPAPPPLGLERAFGWDRWDQAYLEALAKTGNEPIGSLGYDGPLAALNPEKPNLSEFFKETVAVVTNPAIDREREVEHFSTRTLLGRRPLPDGRGGGRVEELLLPIVLEEDQALAEAFGTLTLSEVRARFRTKTLVPQFTVEEGLLAGLKRLEEEAVKAVEEGAEVLILSDREAFQGGVWIDVGLAVAAVNRALMKRDAEGVALRRRTSLLVHSGGVRNLHDVAFLLGLGAEAVAPWLMEEKARALEGRKGLAGVLEALKKGLEKVISTMGIHELRGYGRIFSAIGLKPELAEYFGTRNFLGSEKAGYGFLELERTLLEREGFLRAEKVMPAKDFRFNPRIYKAAQEVASGKAPYAHFQEKVRALERENPVAARQLLEVRFPERSDVAPEEVDLSVGAHSLPFVISAMSFGSQGEASFRAYAEAAKRLNMLCINGEGGEIPDMLGKYTPWRGQQVASGRFGVHAYMLNSASVIEIKIGQGAKPGEGGHLPGKKVSPKVAAARNAVPGVDLISPSNNHDLYSIEDLAQLIEELKTVNPKALVSVKVPVIPGIGTIAVGIAKAGADVITLSGFEGGTGAARLHALKYAGLPVELGVRRVHRALVRAGLRDKVEIWADGGLKTAYDVLRMVLLGADRVGMATMAMVAIGCTICRGCQLDTCHVGITTQIETVEEAMAHGLKRFVPQDLDRAVEQLTRFFGAMGEALRELVAALGARSLQELRGRSDLLYQRDHLEELDLSYFFAPVEEPEWLKDTSAHVLRKPLNQLTRTITEVVMAAYAEGSKRLVFQEGPVDSTDRALGAHLAGEIARRRLYGKGFDAEVELRFDAGSVAGNGLAAFNVEGMKVVVEGGAQDGVAKSAFGGTVAVLKGKNPFGAYVDGSVGKSFAYGAIGGLLIVEGVADSRFCIRLSGADVILGGEPERPLRDDLGNLAARAQAKGFAFEYMTRGRALVLGDPGPWICSGMTGGRVYLRHWPEMGLTEEAMKRRLAKGAKVAVKPLDARGVEDVRELLSAYIRVLREAKREEKAKRLEKLLENPAEHFRMVEPVSQQVDQGVSTE

SEQ ID NO: 559 - protein, 1498 aa, Staphylococcus epidermidis ATCC 12228
MYNEKFKKGLYDYREEHDACGIGFYANMDNKRSHDIIEKSLEMLRRLDHRGGVGADGITGDGAGIMTEIPYQLFEQLTEFKVPGEGYYAVGLFFSKEKVRDSIHEEMFNQYFESEGFKVIGYRDVPVDTRAIAQHVADTMPYIQQVFVDITGVKEVEKRLFLARKQIEKYSETQSIDLYFTSLSHRTIVYKGWLRSDQIKGLYLDLQNEAYQSKLGLVHSRFSTNTFPSWKRAHPNRMLMHNGEINTIKGNVNWMRARQNKLVETLFEDEKDKVHFIVDEDGSDSSIVDNALEFLSLAMEPEKAAMLLIPEPWLYNESNDKKVRSFYEFYSYLMEPWDGPTMISFCNGDKIGALTDRNGLRPGRYTITKDNFIVFSSEVGVIDVPEENVAFKGQLNPGKLLLVDFLQNKVVENNELKTNIANELPYEQWLKDYKNKNDLDNIYYQSSDWDDQTLFRLQKQFAYTKEDINKYMTDLVINKKDPIGAMGYDAPIAVLNDKPESLFNYFKQLFAQVTNPPIDAYREKIVTSELSYLGSEGNLLCPDESVLERIQLKKPVLNEAQLSSIDHSYFNVTYLSTLYTGDLESSLNELGNRAIQAVHEGAKILVLDDTSLTHENSYAMPILLALSHVHQLLIREGLRMETSLIAQSGETREVHHVACLLGYGANAVVPYLAQRTIEQLTRQGQLSGTVAENVATYTNVLSEGVIKVMAKMGISTVQSYQGAQIFEAVGLSNSVIEKYFTGTQSKLSGISIEQIDKENKARQSDDSDYLESGSVFQWRQQGQHHAFNPRTIFLLQHACRENDYELFKKFSKTVNLKRTDHIRHLLEFKTRQSIDISRVEPASEIVKRFNTGAMSYGSISAEAHETLAQAMNQIGGKSNSGEGGEDSSRYEIQKDGSNKISAIKQVASGRFGVTSDYLQHAKEIQIKVAQGAKPGEGGQLPGSKVYPWIAETRGSTPGIGLISPPPHHDIYSIEDLAQLIHDLKNANRRADIAVKLVSKTGVGTIASGVAKAFADKIVISGYDGGTGASPKTSIQHAGLPWEIGLAETHQTLKLNDLRSRVKLETDGKLLTGKDVAYACALGAEEFGFATAPLVVLGCIMMRVCHNDTCPVGVATQNKDLRALFRGKAQHVVNFMYFIAEELREILASLGLETVEELVGRTDLLQRSTQLKPNSKAASLQIEHLIEQFDGVNTKEISQNHHLDEGFDLNYLYPDARYSIENGHSFTGNYVVNNEQRDVGVITGSAIAKQYGEEGLPEDTILAYTEGHAGQSLAAYAPRGLTIHHTGDANDYVGKGLSGGTVIVNAPNSQRENEIIAGNVNFYGASRGKAFINGKAGERFCIRNSGADVVVEGIGDHGLEYMTGGHVIILGDVGKNFGQGMSGGVSYIFPSDVEKFKKVNALETLEFSSIRFDEEKSLIKDMLEAHFKHTRSNKARQLLDQFDNIEKLAIKVIPKDYKLMMQKIDLKKRQMEREDEATLAAFYDDRETIEQELQPAVIY

SEQ ID NO: 560 - protein, 407 aa, Oryza sativa
MDPRVWRRLPQPLVDRILACLPTPSFLRLRAACRRFYHLLFSSPFLHSHLLLSPHLPFFAFVVPAAGHLLLLDPTATASWSRLPLPLPPVAGGPAAFSPAAASAGLLAFLSDASGHKTLLLANPITRLLAALPISPTPRLSPTVGLAAGPTSIIAVVAGDDLVSPFAVKNISADTFVADAASVPPSGFWAPSSLLPRLSSLDPRAGMAFASGRFYCMSSSPFAVLVFDVAENVWSKVQPPMRRFLRSPALVELGGGREGAARVALVSAVEKSRLSVPRSVRLWTLRGGGGGGGGGAWTEVARMPPEVHAQFAAAEGGRGFECAAHGDYVVLAPRGPVAQAPTSALVFDSRRDEWRWAPPCPYVVVAHHGGAGAAGFRVFAYEPRLATPAIGLLDATAPVALHGMHDG

SEQ ID NO: 561 - protein, 421 aa, Oryza sativa Indica Group
MGAKDSKPSYSYSSSYDYGNSSSGYNSRYPAYPANASSSQNTRYAPSMENYVQPETHARLQRKYSRIGDDYRSLNQVTEALAQAGLESSNLIVGIDFTKSNEWTGKLSFNRRCLHDIGNTPNPYEQAISIIGRTLSAFDEDNLIPCFGFGDASTHDQEVFSFYPENRPCNGFEEALERYREIVPTLRLAGPTSFAPMIETAIGIVDSTGGQYHVLLIIADGQVTRSVDTQSGQLSPQERDTIDAIVKASQFPLSIVLVGVGDGPWDMMHQFDDNIPARSFDNFQFVNFTDIMSKSIAADRKEAEFALSALMEIPTQYKATLDLQLLGRRQRIQPRIPLPPPMRNAYSRSTSFDQHSGVYSRSSSFGPQTSGFQQSESFKQRQPVATTAPDTYTSESSLEGRLLCAICMDKSKDLAFGCGHQ

SEQ ID NO: 562 - protein, 177 aa, Arabidopsis thaliana
MPTLYKKAGCQFQLTTMADSDNDSGGHKDGGNASTREQDRFLPIANVSRIMKKALPANAKISKDAKETVQECVSEFISFITGEASDKCQREKRKTINGDDLLWAMTTLGFEDYVEPLKVYLQKYREVEGEKTTTAGRQGDKEGGGGGGGAGSGSGGAPMYGGGMVTTMGHQFSHHFS

SEQ ID NO: 563 - protein, 215 aa, Vitis vinifera
MADSDNDSGGHNNSNANSELSAREQDRFLPIANVSRIMKKALPANAKISKDAKETVQECVSEFISFITGEASDKCQREKRKTINGDDLLWAMTTLGFEEYVEPLKIYLQKYREMEGEKSSLGGRPGEKDGSGGGGAAAGGGGAMSSGSSGGFNGGGMYGGMMMMGHHQGQAYGSGSFHHMSSSGSGGGGGGGVGKNNTGSSSGGGGGVASTVRSR

SEQ ID NO: 564 - protein, 541 aa, Bradyrhizobium japonicum USDA 110
METLLMPFSPRFIVLTICAVVTALLIGFGIADRKIFDILLIPILIFGALTLLGVRDLLQKSHAVLRNYPISAHIRFLLEEIRPEMRQYFFESEKDGMPFSRDTRAVVYQRAKMQLDKRPFGTQEDVYREGYEWMHHSVSPKAHAEEKFRVVVGGPDCKKPYSASVFNISAMSFGALSPNAVRALNAGAKKGGFAHDTGEGGFSPYHAEMGGDIIWEIGSGYFGCRHLDGSFDPEAFARVAGQDQIKMVELKISQGAKPGHGGVLPAAKVSEEISKIRGVSMGEDCISPASHRAFSTPVGMMQFIAEMRRLSGGKPAGFKLCIGHPWEFLAICKAMLETGIYPDFIVVDGNEGGTGAAPLEFMDHLGMPMREGVNFVHNALIGINARDRIKLGASGKIATAFDMARAMAIGADWCNSARGFMFSLGCIQSLSCHTDRCPTGVATQDPTRARALYVPLKIDRVHNYHHATLHSLTELIAAAGLEHPQQLRPIHFSQRRSTTQVQSFAQLYPALRPGELLEGTEDPRFRDAWRMARAETFQPAL

SEQ ID NO: 565 - protein, 423 aa, Picea sitchensis
MGGRHSKSLRPRRYSPSSYTPSAAWDSSSYGPSSEVPPETYSQPAAKQKLQRRYSRIADNYNSLDEVTAALAQAGLESSNLIVGIDFTKSNEWTGARSFNRRSLHHIGDTPNPYEQAISIIGRTLSAFDEDNLIPCFGFGDASTHDQHVFSFYPDDRLCNGFEEALRRYREIVPHLRLAGPTSFAPMIEGAIRIVEQSGGQYHVLLIIADGQVTRSVDIENGQLSTQEQNTVNAIVEASEYPLSIVLVGVGDGPWDMMRQFDDNIPARAFDNFQFVNFTEIMSKNVPQSRKETEFALASLMEIPSQYKATLDLQILGRRRGKMPDRFPLPPPLGNDNYAARQQYQRADSFQTNTPRNHCGDSFAGSAPPEFKDTQDAQMCPICLMNAKDLAFGCGHQTCYDCGQNIVTCPICRSDITTRIKLY

SEQ ID NO: 566 - protein, 405 aa, Brassica napus
  misc_feature (207)..(207): Xaa can be any naturally occurring amino acid
  misc_feature (331)..(331): Xaa can be any naturally occurring amino acid
  misc_feature (365)..(365): Xaa can be any naturally occurring amino acid
MGTGNSKEKWRQRSSSSCRSSSSPWASHQSYPQYPPPPSYAPPPEFAQPPSPSYTTQPYSQPPPSQSYGNDKKRLERKYSKISDDYSSLDQVTKALAHAGLESSNLIVGIDFTKSNEWTGARSFNRKSLHFIGNTPNPYEQAIAIIGRTLAAFDEDNLIPCYGFGDASTHDQDVFSFNPEDRFCNGFEEVLGRYKEIVPQLKLAGPXSFAPIIDMAMTIVEQSGGQYHVLVIIADGQVTRSVDTENGQLGPQEQKTVDAIVEASKLPLSIVLVGVGDGPWDMMREFDDNIPSRAFDNFQFVNFTEIMSKNKAQSFKETEFALSALMEIPQXYKATLELNLLGRRNGNIPERFPLPPPMHGGSASXQQTKAPRVPSFKPSVPPYPTESYPVRSSPAQPATTTSAFD

SEQ ID NO: 567 - protein, 1527 aa, Prochlorococcus marinus str. MIT 9313
MSQDHRRSNWPYCDSSAPTAVVGEKDACGVGFLAQIDGVASNWILQQALRALNCMEHRGGCGGDADSGDGAGLLCAIPWSYLETVWSAVESANHPCGLGMLFMPRDAARRAEARCFCEQEAESLGLRSRGWREVPVDVAVLGPLARDTAPVIEQWLVQGSQPGDALEALLFRLRRRIGDRARQAWGEHANDLYVASLSSRTVVYKGMVRSEVLAAFYADLRDPRFEVSFAVYHRRFSTNTLPRWPLAQPMRLLGHNGEINTLLGNLNWARATEVNLDSVWGVDAADLKPVVNAAFSDSANLDATLELLVRSGRPIVDSLLTLVPEAFREQPELADKPEIQAFYEYSACTQEPWDGPALLVFSDGRSVGASLDRNGLRPARYCITSDGLVVMGSETGVVELEESRIIEKGRLGPGQMLAVDLEKGRLLRNWDVKQEVAGRYPYGEWLSQNRCKLGQKSWQQDSQLGDLELLQQQTAFGFTAEDLELIIDSMAAGAKEPTFCMGDDIPLAVLSDKPHLLYDYFKQRFAQVTNPPIDPLREKLVMSLEMHLGKRGSPLKPEAAAASLIHLETPILNEAELAACGQLEFPTTTLSTLLPVHYGPSGLGDSLKRLCVEAADAVRDGSQIVVLSDRGVVASTTYIPPLLAVGAVHHHLLKQGLRLNASLVVDTAQCWSTHHLACLIGYGASAVCPWLTWETTRHWWQHPRTQKLIETGKLPALTIDQAQANVRKAQEDGLRKILSKIGISLLASYHGAQIFEAIGIGADLIELAFKGTTSRVAGLSLNDLASETLIFHAKAFPELDRTKLEFMGFVQYRSGGEFHLNTPDMSKALHAAVRAGPGYDHFSTYKNLLENRPATALRDLLTFRLAPTPLPLDQVESVESICARFCTGGMSLGALSREAHEVLAVAMNRIGGKSNSGEGGEDPARFKILDDVDLESRSETLPSIKGLRNGDTACSAIKQVASGRFGVTPEYLRSGKQLEIKVAQGAKPGEGGQLPGQKVDPYIAKLRNSKAGVALISPPPHHDIYSIEDLAQLIHDLHQVHPAAKVSVKLVAEIGIGTIAAGVAKAKADVIQISGHDGGTGASPLSSIKHAGSPWELGLTEVHRSLLENGLRDRVLLRADGGLKTGWDVVIAALLGAEEYGFGSVAMIAEGCIMARVCHTNKCPVGVATQQEGLRKRFPGVPEHVVNFFLFVAEEVRQLMSVLGVARLEDLIGRTELLEPRSLNLVKTQTLDLSCLLDPIPGAVDRAWLIHDAKAHDNGPILEDQLLADAELMAAIDSHGHIARNLAIVNTDRSVCARISGEIAERHGNKGFRGQFDLSFEGAAGQSFAAFLLQGVNVRLEGEANDYVGKGMNGGRITLVPPSSADQSGSQVILGNTCLYGATGGELFALGRAGERFAVRNSGVQAVVEGAGDHCCEYMTGGVVVVLGSTGRNVGAGMTGGVTFLLDEQGMVSDRVNKEIVEICLLTTIEQEAILKTLLEAHLAQTGSTKAKAILANWISWKALFKVLVPPSEKVNVGLTLLEKVAA

SEQ ID NO: 568 - protein, 1486 aa, Lactococcus lactis subsp. lactis Il1403
MNKKAKQAMKTTLWQPDFESDACGMGFIAQIDGKASHLLVERALTMLTRMNHRGGTGAEPETGDGAGILLALPDEFFRKIAKEHDVELPKLGDYAVGQFFLSRKENKKHQELEAIKAAVKAQGYEVLFTRTVPFNFEACGATAQGIMPSFVQVFIEKKSSEKAVSEISNFENDLFIIRRNLEKRFDEEELYICSLSSQTVVYKGMLHAYQVKLFYPDLSDEDFKSHIALTHSRFSTNTFPSWNRAQPFRFLAHNGEINTLRGAENWMKVNDIEMYNEENSDSAKLENCMEYFYRNGRELPESLLTMIPEAWGEQTGLSPELKAFYEYSTAHIAPWDGPAALVFTDGKTVGARLDRNGLRPSRYLVTKDNSIILSSESGVVDIPADEIIEKSVLGPGNMLLVNTDEGKIIRNEEVKSYYANKYPYQEFLSAGLKKLSALTESEKTNPIPSAKMNTLWKLFGYTDEVIRTVLLPMAESANEPTISMGFDAPLAVLSDQAQSLYNFFKQQFAQVTNPPIDAIREQIVIGTETYLGEDGNPAKITGENVRKLKLDSPVLSTADFEKILALKEEHYHTEIISTLYDKDDLLENALNKLFYKAESLINQGTTIIVLSDRDFAENKVPMPILLALSGLYHYMLGRHNASKFAIIVDTAEVCEVHQFAALVGYGVSGIHPYGAYATLSDWGMGAPEQLENFRHAAEKGIVKVMSRMGISTIVGYKGAQLFEAIGLSKEVVDKYFTGTSTRIGGLSLAQIEDEYRLRYEKAYGHRAQDLLETGGSFQYRADEGEHHIYDPQMIYQIQNAVRQNDFEKYKKYSQYLNDIALKTPTSLRHTWKIKSDRKSIQMSEVEPAREIVKRFKIGAMSFGSLSQEAHECIAQAMNSIGAKSNSGEGGENAKRYGTINNSKIKQVASGRFGVSAAYLMSAEEIQIKISQGAKPGEGGQLPGKKAFPWVAEVRNSTPGVSLISPPPHHDIYSIEDLSQLIFDLKKINPYAKINVKLVSSTGVGTIATGCVKAGADKVVISGYDGGTGASPRNSIRDAGLPWEMGLAEAHQTLSLNNLRDRMILETDGKVVTGRDIAIAAMLGAEEYSFGSLALVAIGCIMTRNCHLNTCPVGIATQNPRLRANFAGNPEHIVRLMEFMAEEVRELLAELGFRTINELVGHAELLQAKEDLPAKMRGLDFSRMLGHALPIATRHSDPFANPRAWKELDQFTEATLNNGSQATVHGTIKNINRTTTARMAGWIAERYGNFGLKDASVCYEYEGVAGQSFGSYATAGMEVTLIGEANDYIGKSLSGGRLIVKPPLDAAYDIENTSIVGNVSLFGAIGGEAYFRGRAGERCGVRNSGAHFVVEGTGDHGCEYMTGGIAVVLGTTGRNFAAGMSGGIAYVYDVAGNFENKVNREMVDLYALDETSGDEVLEELLKKHLNYTDSEKAKFILEHWQTEREKFVKVYPREYHHIKNVEEDLAKTGLSGEALTMTTFKKVTEVS

SEQ ID NO: 569 - protein, 1567 aa, Burkholderia pseudomallei K96243
MIDHQQPKSALPAAQGLYDPQNEHDACGVGFVAHIKGKKSHEIIEQGLKILENLDHRGAVGADPLMGDGAGILIQIPDAFYREEMARQDVTLPPAGEYGVGMIFLPKESASRIACEQELERTVKAEGQVVLGWRDVPVDHAMPISPAVKASEPVIRQIFIGRGKDVMVTDALERKLYVIRKTASHRIQALKLKHGKEYFVPSMSARTVVYKGLLLAGQVGVYYRDLQDARTVSALALVHQRFSTNTFPAWELAHPYRMIAHNGEINTVKGNVNWLNARTGAIASHVLGDDLPKLWPLIYPGQSDTASFDNCLELLVMAGYPLVHAVMMMIPEAWEQHTLMDDNRRAFYEYHAAMMEPWDGPAAIAFTDGRQIGATLDRNGLRPARYVITDDDLVIMASEAGVLPIPESKIVKKWRLQPGKMFLIDMEHGRIIDDKELKDNLANAKPYKSWIDAVRIKLDEIEPEGEDVAAERRSAAALLDRQQAFGYTQEDVKFLMAPMAQQGEEAVGSMGNDSPLAVMSNKNKTLYHYFKQLFAQVTNPPIDPIRENMVMSLVSFIGPKPNLLDTNNINPPMRLEVSQPVLDFKDIAKIRSIDRYTGGKFSAYELNICYPVAWGKEGIEARLASLCAEAVDAVKSGYNILIVSDRKTDAENVAIPALLATSAIHTHLVQQGLRTSTGLVVETGSARETHHFALLAGYGAEAVHPYLAMETLAKMAHGLPGDLSPEKAIYNFTKAVGKGLQKVMSKMGISTYMSYTGAQIFEALGLATDLVEKYFKGTASKVGGIGLFEVAEEAIRLHRDAFGENPVLADMLDAGGEYAFRVRGEDHMWTPDSIAKLQHATRGNSYQTYKEYAHLINDQTKRHMTLRGLFEFRVDPAKAIPIDEVEPAKEIVKRFATGAMSLGSISTEAHTTLAIAMNRIGGKSNTGEGGEDENRYRNELRGIPIKVGDTLKSVIGDEIVRDIPLKEGDSLRSKIKQVASGRFGVTAEYLASADQIQIKMAQGAKPGEGGQLPGHKVSEYIGKLRYSVPGVGLISPPPHHDIYSIEDLAQLIHDLKNVNPVASISVKLVSEVGVGTVAAGVAKAKADHVVIAGHDGGTGASPLSSVKHAGTPWELGLAETQQTLVLNRLRGRIRVQADGQMKTGRDIVIGALLGADEFGFATAPLVVEGCIMMRKCHLNTCPVGVATQDPVLRAKFSGQPEHVVNYFFFVAEEAREIMAQLGIAKFDDLVGRADLLDMRRGVEHWKAKGLDFSRVFYQPEGCEGIARRHVESQDHGLERALDHTLIEKAKAAIENGEHVSFIQPVRNVNRTVGAMLSGAIAKKHGHDGLADDAVHIQLKGTAGQSFGAFLAKGVTLDLVGDGNDYVGKGLSGGRIIIRPTNDFRGKSEENIICGNTVMYGALEGEAFFRGVAGERFCVRNSGATAVVEGTGDHGCEYMTGGTVVVLGETGRNFAAGMSGGIAYVYDADGTFAAKCNKSMVALDPVLQQAEQERTVDPALWHAGTTDEALLKGLVERHFQFTGSPRAKSLLENWDAARRQFVKVFPHEYKRALGEIGAKKKAGEVLAA

SEQ ID NO: 570 - protein, 425 aa, Oryza sativa Indica Group; identical to SEQ ID NO: 431

SEQ ID NO: 571 - protein, 78 aa, Gossypium barbadense
RIMKKALPANAKIAKDAKETVQECVSEFISFITSEASDKCQKEKRKTINGDDLLWAMATLGFEDYIDPLKIYLTKYRE

SEQ ID NO: 572 - protein, 205 aa, Kluyveromyces lactis NRRL Y-1140
MDTETEAEKQERHNNYLNELAEQDRWLPINNVARLMKNTLPATTKVSKDAKECMQECVSEFISFVTSEACDRCTSGKRKTINGEDILLSLHALGFENYAEVLKIYLAKYRQQQAIKNQMMYPKEDVEGSYTEEESRAEDADHVTQERQQPLHPVPSSASTTTSTEVSASEHVQSSSKSTHNPAQAQPRIVVQQPLGSRHSTADHL

SEQ ID NO: 573 - protein, 108 aa, Ostreococcus tauri
MAQSHGDLDTREQDRFLPVANISRIMKKALPANAKVAKDSKETVQECVSEFISFVTSEASDKCQREKRKTINGDDLLWAMSTLGFEDYIQPLKLYLHGYRRVMNEDAK

SEQ ID NO: 574 - protein, 2404 aa, Pichia angusta
MSTPLDNWHVDEIFTELGSKDAGRQKRAASRLRDQFVAVSREAITAEQLSVYNNYINKRIFDLINSSSVSQQLGGIEAINALVELISSSMPRIGASSTTEENSNMIARYANYLRRLITSNDLAVMRRATTTLGKLAIPGGSLTGDFVEFEVKRSIEWLVAEKVENKKHAAILIISSLAENASAMLYPYIKEVLSNIWIGLRDSKSLLREDSAICLRHCLNIVYERDLELRSYWFSKLYTEATLIFRNSPATSNGSGPVVNNNPSEFIHGSLLCYRELVLQGSSLLHSKIDDIYENLMGIKDHRSVDVRREVTKIMPILARFDRVKFVDKYMHRVLLYYISQLKIGKDRSFILLSIGDLSVEAKNNIINYLDGVVLESIKDALASKVPKTKKELVPYCFYCLAKLAISLGPPLTKFINNYELMTLILKSPINDNMLSLLKIFIDNLPSLEPMINEKLINAVSFCLSGFEFKHPGAPDFKRQMNATLAHNYRHSMYIRDGGQFGTPPVDITSLTGLPKSHYQEEPDVVIILQALKTLSYFDFRNYSLTEFVRYSVIHYIDHDSPEVRLRAALTSSKIYLSDPICLQKSLNSLKAVSEVLDKLLTVCITDPHEEIRLQVLNSLGERFDPQLSQAENVRLLFMALNDESFEIRKAAIKLVGRLSAINPAYIVPSLRKLLIQLLTTLEYGGHNSREKEDTALLLAVLISHTGDLTKPYFKPIMDVLLPASTEPGASVAAAAIAAIGELAVVVGDEMVQYIPQVMPIFIETFQDQSMSFKRDAALKTLGQIAGSSGYVIQPLLDYPQLLGLLVNILKSETSLAVRRETVRLVGILGALDPYKHREVERHGQDSQTVAEQNAPPVDMELLMKGKSPSNEDYFPTVVIKTLLRILKDASLSTHHPAVIQAIMHIFKTLGIKCVPFLDKVIPGFATVIHTCPPSLLETYFQQLADLIKIVKLHIRPHLPEIFALIEEFFHQVNLQVTIIGMIEQVSKALDDEFKIYMFQVITIFLDVLDKDDSPRKVSTLRVLKAFTVFGSNIEPYMHLVIPQIVKLFESPDEVVSKEAIETIGKLSRHVSLNDYSSRIVQPLVRILVSHSSEDIKNSVVNTICLLLLQMGTEFSVFIPGITSIMTKHKLQYPVYDQLVDKLIHGEPLPTTLLNDKTQETPSNDNFDIEATPRKLPVNAQALRYVWDCNSMRTKEDWQEWIRRLSIELLKESPSPALRACSSLATVYPPLARDLFNCAFASCWNELHIQYQGELAQALCIALSSPNNLPEIHQTLLNLAEFLEHDDKSLPIRIQTLSQYAQRSHVYAKALHYKELEFIQEPSTPTIESLISINNQLQQSDAAIGILKYAQDHHGLQLKETWYEKLQRWDDALRAYNEREKEEPNSTDITMGKMRCLHALGEWELLSELAQDKWNNSSGDIKRAIAPLAAAAAWGIGQWERMGNYISVMKVESPDKAFFNAILCLHRNNFEEAAEQISKARDLLVTEITALVSESYNRAYGVVVRVQMLAELEEIIKYKCLPQGSEKRIQIRETWNKRLLGCQRNVDIWQRMLKVRALVVKPKQDMEMWIKFANLCRKSGRLGLAEKSLNALLDEGDSGHQTSRAPPHVVYAQLKYMWARGQQREALNHLIDFASKLSRDLGVNENEAITQPLPTAIPGASDNIEKYTMLLARCYLKQGEWKIALNSNWTEMDSTGILGSFLLATHFDPKWYKAWHNWALANFEVISPQAKQLHQESADVDEKSLGGILHYVVPAVKGFFHSISLSQSNPLQDTLRLLTLWIKYGGIEEVANAMQEGFQLVKVDTWLDVIPQLISRIHQPDPVVSKSLLGLLSDLGRAHPQALIYPLTVAIKSDSVSRQRAALTIIDKMRAHSARLVDQADLVSNELIRVAVLWHEMWYEGLEDASRSYFGDQNIEKMFQILTPLHQMLEKGPETIREASFVNAFGKELNDAHQWLMNFRRTKDVAYLNQAWDLYYGVFRRISRQLPQLQNLDLQHVSPKLLAAKNLELAVPGTYVPGKEVIHIVRFEPVFSVITSKQRPRKFNVLGSDGKKYQYLLKGHEDIRQDNLVMQLFGLVNTLLANDPECFKRHMDIQQYAAIPLSPSSGMLGWVPNSDTFHVLIKEYREPRKILLDVEHRIMLQMSPDYDNLTLLEKVEVFTYALDITRGQDLYKVLWFKSKSSEAWLDRRTTYTRSLAVMSMVGYILGLGDRHPSNLMMDRITGKVIHIDFGDCFEAAILREKYPEKVPFRLTRMLSYAMEVSGIEGSFRITSENVMRVLRDNKESLMAILDAFAYDPLINWGFDFPLKQIVDNPNQHFPNANYNELLRSGQITEEEASRMEAQNKADILNARAAYVLKRITDKLTGNDFKRFRELDVPSQVDKLIQQATSVENLCQHYIGWCSFW

SEQ ID NO: 575 - protein, 1579 aa, Bordetella pertussis Tohama I
MPYTKSSDSCRPVAATPIDASRIGLPAPQGLYHPHNEHDACGVGFVAHIKGRKSHSIIQQGLKILENLDHRGAVGADKLMGDGAGILIQIPDALYHDELAQQGIVLPPPGEYGVAMVFLPKETASRLACEQELERSVRAEGQIVLGWRDVPVDVEMPMSPAVRGLEPVIRQLFIGRGADVMVPDALERKLYVIRKTASHAIQNMRLAHSKEYFVPSASVRTVVYKGLLLADQVGRYYRDLADPRTVSALALVHQRFSTNTFPAWPLAHPYRMIAHNGEINTVKGNFNWLRAREGMMQSAVLGDDLKKLYPIVYEGQSDTATFDNCLELLVNSGYSLAHAMMMMIPEAWEQHTQMDESRRAFYEYHAAMMEPWDGPAAVAFTDGRQIGATLDRNGLRPARYLITDDDMVIMASEAGTLSIPENRIVKKWRLQPGKMFLIDLEQGRIIDDGEIKLQLANSRPYRQWIERLQVKLESLPAPRTASPATQTAVPLLDRQQAFGWTQEDFKFILEPMAASGEEVIGSMGNDAPLAVLSNRSKPFYNYFRQLFAQVTNPPIDPIREQMVMSLVSFIGPKPNLLDINNVNPPLRLEVTQPVLDFAAMAQIRDIDQVTGKKFRSYELDITYPAAWGSEGIEARVAALCARAVDAVQSGYNILIVSDRLVDADRVAIPALLATSAVHQHLIRAGLRTNAGLVVETGSAREVHHFALLGGYGAEAIHPYLALESLGHLADPDKAIKNYIKAIGKGLNKVMSKMGISTYMSYCGAQIFEAVGLQRALVDKYFTGTASNIEGIGIFQVAEEALRMHHAAFGNDPVLANDLDAGGEYAFRIRGEEHIWTPDSIAKLQHASRSNNYRTYKEYAQIINDQSRRHMTLRGLFEFRFDPTRAIPLDDVEPAKEIVRRFATGAMSLGSISTEAHSVLAVAMNRIGGKSNTGEGGEDELRYRAEMRSGGSAIKDGDTLASVLGNDRVEADVALRAGDSLRSRIKQVASGRFGVSAEYLSSADQIQIKMAQGAKPGEGGQLPGHKVSEYIAKLRYSVPGVGLISPPPHHDIYSIEDLAQLIHDLKNVNARASVSVKLVSEVGVGTVAAGVAKAKADHVVIAGHDGGTGASPVSSIKHAGTPWELGLAETQQTLVLNRLRSRIRVQADGQMKTGRDVIIGALLGADEFGFATAPLVVEGCIMMRKCHLNTCPVGVATQDPELRKKFQGKPEHVVNYFFFVAEEVREIMAQLGIRRFDDLIGRTDLLDMRASVEHWKAQGLDFSRVFHRIVSDADVRQTEEQDHGLAGALDHQLIERSKPALERGEKVSFIVPVRNRNRTIGAMLSGAVAARYGHDGLPDDTIHIQCNGTAGQSFGAFLAHGITMDLVGEANDYVGKGLSGGRIVVRSPNDFRGFGPDHIIAGNTVLYGALSGEAFFNGVAGERFAVRNSGAATVVEGTGDHGCEYMTGGTVVVLGTTGRNFAAGMSGGVAYVWDPDRTFRERCNSAMVELEPVLPHAEQQSANEIESWHSAQRGGERSTDETILRRLVEDHFRYTGSFRAREILGDWEASCGKFVKVMPTEYRRALGELWRAANPQQMAA

SEQ ID NO: 576 - protein, 539 aa, Pseudomonas putida GB-1
MSLSLLSRYAFFAACVLFTLASLPFTHHEWLWPFTLTTGILSLIGVFDLLQQRHAVRRNYPILGNIRYLVEAIRPEIRQYLLESDSDALPFSRAQRSLVYARAKNEASDKPFGTLIDVYESGFEFIGHSMRPAPLADPASFRVIVGGPQCSQPYSASIFNISAMSFGSLSANAIRALNQGAKLGNFHHDTGEGSISPYHREHGGDLVWELGSGYFGCRTPDGRFDPERFAAQARTPQVRMIEIKMSQGAKPGHGGILPKHKVTQEIAETRGVLMGEDCISPSRHSAFSTPIEMMQFIAQLRELSGGKPVGFKFCLGHPWEFMGIAKAMLETGILPDFIVVDGKEGGTGAAPVEFTDHIGVPLREGLLFVHNTLVGLNLRDKIKLGASGKIVSAFDIASVLAIGADWANSARGFMFAIGCIQSQSCHTNKCPTGVATQDPLRQRALVVPDKAQRVLNFHHNTLRALAEMLAAAGLEHPAQLEAKHLVRRISATEIKLFSQIHVFLKPGELLTGEVNGQFYSRMWQLARADSFEPHSEVAA

SEQ ID NO: 577 - protein, 786 aa, Coccidioides immitis RS
MGNAATKESRSSQEHSARHSRGGSTASTAAYDHYRPSDGIHASSSRALRGGRSDFALLGLGAEREPVEHRRETRQEREARKREKENAARIKERQRSMKEEHVDGGYLVTQGVYVGTEDFNKAIVRQLMIERRLAPFWRGLNDFSESWTEHQLMAAARGMPIPAPDEVPPELEYKIPSKSSAEKQPPERNLNTLMVPITSRSQSYNSDTSSINRTISPARSPGALSPTNSFLRGRAKTLASLTTSSKTPASDMAPRELQLPKDPFVNGQPIEAYLYKDASECPICFLYYPPYLNKTRCCDQPICSECFVQIKRPDPHPPEHHDPNNSETTHPDEPEGQLVSEPAACPFCVQPEFGVMYTPPPFRRGLAYAASPGVHALANSSAASSASSLVSGGANPGTRRRAVSISADSPSVITTDRVRPDWATKLAAARAQAARRSAAATALHTAAYMMNNPGGPGEPRRRGMLRRTAGQDSPGGRTAPSHVNAMAYLAERRVVTDRDNASPVDSTTNLAPPRASSRRSRIDELEEMMMMEAIRLSLAAEEERRKKEEKETRKEAKRREKEAKKAEKSAKKAGLDSQNPSNLTSSTSSANSAVQTAGGANSELDMSANKGKGVDRSEPRPGVSTEAGSSTEPPKITIKDLKGEQFSSMLEGSSKNMHLRHVSSASSSNSSLVESAFGESIGSGTPHNGSSSSLAAIHGFRSLAAMIDDTPSGDSGESMNRPGSTNEQVQGAPAVKEPSENSAPNEPDQVTLLSSSPSLEQKDTLGKEVHMSSAEVLPQSSLGTAS

SEQ ID NO: 578 - protein, 2449 aa, Oryza sativa Japonica Group
MVKGIEEGINPITSFDDLIAKEHGFNIAAYISSGADVIAAALRKHVEEEARDLSGEAFLRFMEQLYEQICSLLQSNDVAENLLALRAIDALIDMPFGEGASKVSKFANFLRTVFEVKRDPEVLVPASAVLGHLAKAGGAMTADEVERQIKTALGWLGGDRVEYRRFASVLILKEMAENASTVFNVHVPEFVDAIWVALRDPKQAVRERAVEALRACLHVIEKRETRWRVQWYYRMCEAAQVGLGKNASVHSIHGSLLAVGELLRNTGEFMMSRYREVADIVLNYLRHRDQLVRRSITSLLPRIAHFLRDRFVTNYLKICMDHILFVLRTPDERASGFVALGEMAGALGAELVPYLPLITSHLHDAIAPRRGRPSLEAISCVGSFAKAMGPAMEPHIRGGLLDAMFSAGLSDKLVEALESISTSIPSLLPTIQERLLDCISQALPKSSVRPGAAVGRGSRSSSLQQFVDSGGPVLVQLALGTLANFNFKGHELLEFARESVILYLEDEDCSTRKAAATCCCKLVAHSLSASSSSQFSSNRPNRMGGAKRRRLVEEIVEKLLMAAVADADVGVRSSVFKALYRNPSFDDFLAQADIMTSIFVALNDEEYHVRELAISVAGRLSEKNPAYVLPALRRYLIQLLTYLDQSMDSKCREESARLLGCLIRSCARLILPYIAPIHKALVARLREGTGPNANNALAAGVLATVGELAKVGGFAMRQYLPELMPLVVDALLDGGAVSKREVAVATLGQVIQSTGYVISPYNEYPPLLGLLLKLLNGELEWSTRLEVLKVLGIMGALDPHAHKRNQHKLPGQHREVLRPTMETAQHIVSMEELPTDFWPSFSASEDYYSTVAISSLMRILHDPSLSSYHQMVVGSLIFIFKSMGLGCVPYLPKVLPELFRAVRMCEDGGLKEFITWKLGTLVSIVRQVLHLVEQLCLALNDEFRMYILHILPSCIQVLGDAERCNDYYYVPDILHTLEVFGGNLDEHMHLVAPVLVRLFKVELVDIRRRAIVTLTKLIPTVQLCITRLLICLSVARNNDDLRKDAAEALCCLAHALGEDFTIFVSSIHKLLVKHHMRYRKWDEIENRLLRREPLISENLSVQKYTQCPPEVISDPLDDFGGVPSEEADETQRQPRSHQVNDVRLRSAGEASQRSTREDWAEWMRHFSIALLKESPSPALRTCARLAQLQPSVGRELFAAGFASCWAQMNETSQEQLVRSLKTAFSSQNIPPEILATLLNLAEFMEHDEKPLPIDTRLLGALAEKCRAFAKALHYKEMEFEAVCSKKMGANPVTVVESLIHINNQLHQHEAAIGILTYSQQHLEVQLKESWYEKLHRWDEALKAYKAKSSQASGPLQNLDATLGRMRCLAALARWEDLSALCREQWTGSEPSARLEMAPMAANAAWHMGEWDHMAEYVSRLDDGDENKLRILGNTTASGDGSSNGAFFRAVLSVRCKKYEEARVYVERARRCLATELAALVLESYERAYNNMVRVQQLSELEEVIDYCTLPMESPIADSRRELIRNMWNERIKGTKRNVEVWQALLAVRELVLPPNEDRDTWIKFAKLCWKSGRISQAKSTLVKLLQFDPESSPELTLYHGHPQVVLAYLKYQYAVGDELKRRDAFCRLQDLSVQLATATNSYSGTLASQVATSNAGVPLIARVYLTLASWKRALSPGLDDDSIQEILVSYKNATLNAKDWGKAWHLWALFNTEVMSRYTLRGRPDIAGKYVVAAVTGYFYSIACASTTKGVDDSLQDILRLLTLWFNHGATSEVQMALQKGFSLVNIEMWLVVLPQIIARIHSNNKIVRELIQSLLVRIGKDHPQDMSSIKRNNLEKILKIEGTEFIAQALMYPLLVACKSISILRQRAAQEVVDKIRQHSGGLVDQAQLVSKELIRVAILWHEMWHEALEEASRMYFGEHNIEGMLAVLEPLHAMLERGPETIKENTFIQAYGHELLEAHECCLKYRATGEDAELTKAWDLYYHVFRRIDKQLPSLTTLDLHSVSPELLECRKLELAVPGTYSADAPLVTIEYFVPQLIVITSKQRPRKLTIHGSDGNDYAFLLKGHEDLRQDERVMQLFGLVNTLLENSRKTSEKDLSIQRYAVIPLSPNSGLIGWVPNCDTLHALIREYRDARKIFLNQEHRCMLSFAPDYDHLPLIAKVEVFQHALENSEGNDLAKVLWLKSRTSEVWLERRTNYTRSLAVMSMVGYLLGLGDRHPSNLMLDRYSGKILHIDFGDCFEASMNREKFPEKVPFRLTRMLVKAMEVSGIEGTFRTTCENVMQVLRTNKDSVMAMMEAFVHDPLINWRLFNFNEVPQVTNYGNAHSHTVVNSEEAANRELMQPPRGARERELLQAVNQLGDANEVLNERAVAVMARMSHKLTGRDFSSGSSLSGAGSSTQHGNEHLASGDTREVEPGLSVKVQVQRLILQATSHENLCQNYVGWCPFW

SEQ ID NO: 579 - protein, 1490 aa, Xanthomonas campestris pv. campestris str. ATCC 33913
MAPRTRQGLDDYGLYNSARDERDACGFGMVAQLDDQPSRSLVDTAIAALSRMTHRGGVAADGLTGDGCGLLIRKPDAFLRGLARDAGITLGTRYAAGVVFLPLDEADAARCRSELETQLQIAGVQFRGWRVVPTDDSVCGQLARDTLPRIEQVFVDAGVEQTEDGFTLALFLARRRAEQALREVDNFYVTTLSPNGISYKGMVLPDKLSTFYPDLQRSDLSSSAIVFHQRFSTNTLPRWPLAHPFRLLAHNGEINTIEGNRRWAQARSKVWQTPRFDIAEFDPVISMHGSDSQSLDNMLELLIAGGMDLLQALRILVPPATQSLEFKDADLAAFYEFYGLNTEPWDGPAGIVACDSRYAACMLDRNGLRPARWMLTSDRHFLVASEAGVWELPAERITRKGKLGPGEMMAIDLKRGDLLDSDAIDRINRARAPYKQWLQQGVTYLQTELIDPSLVEEPFSEQTLRSYHKLFQLSTEEVEQILRPLAETEQEATGSMGDDTPMAVLSRQTRPLYDYFRQAFAQVTNPPIDPLREGIAMSLTTQLGKETNIFHAGAETVNHVILNSPVLSQRKLRQLLKMEQYVARNRLIDLSYSVEEGLKAGLERICQEVEAAARDGAVMLLLSDRYPVPDRPMAHALLATGAVHHHLCKVGLRCDVNLIIETGTARDPHHMACLLGFGATAVYPYLAYQTLFDLGRRGILQLSKGGEQSQIGRRYRKGIYKGLSKIISKMGICTIASYRGAQLFEIVGLDPDVVELCFTETPARIGGVSLSRLDTEARELTARAWNDQLKPEVGGLLKYVHGGEYHMYNPDVVMTLQRATRTGDASDWQKYVDAVHSRPASTLRDLVQLKRADTPTPLDEVAPAADVLRRFDTAAISLGALSPEAHEALAIAMNRLGGRSNSGEGGEDPARYGTEKRSKIKQVASGRFGVTPEYLVNAEVLQIKVAQGAKPGEGGQLPGHKVNELIARLRYAKPGIGLISPPPHHDIYSIEDLAQLIYDLKQVNPTALVSVKLVAHAGVGTIAAGVVKAGADLITVSGHDGGTGASPVSSIRYAGVPWELGVAESHQALVANDLRDRTILQTDGGLKTGLDVVKAALLGADSFGFGTAPMIVLGCKYLRICHLNNCATGVATQDERLRANYFTGLPERVEHFFRLLAEEVRQWLSYLGVRSLDEIVGRTDLLEQLEVSPRPGVKVDLSRLLTHAQYDGSHCAAQRLYESPDSLATQMDGLLADAIANKTGGDHRFLIHNTDRSIGARLSGTIARAHGNHGMSDAPLNLRFRGTAGQSFGAFNAGGLQLELEGEANDYVGKGMAGGRLVVRPPRGARFEARNTPIVGNTCLYGATGGELFAAGRAGERFAVRNSGALAVVEGAGDHCCEYMTDGVVLVLGKVGLNFGAGFTGGLAYVLDIERDFVDRYNHELIDIHRVSAEGFENHRQHLHTLISRHRELTGSIWAQQILDEFRDYIGKFWLVKPKAASIESLTESLRRAA

SEQ ID NO: 580 - protein, 1552 aa, Chlamydomonas reinhardtii
MEAVATVVANEPKVADMEEILAERDACGVGFIANLKNVQSHTVVKQALTALGCMEHRGACSADDDSGDGAGLMTQIPWKLLKKEMPALNETTTGVGMVFMPNDDALEAQCKQILEQVCAKEGVKVVGWRKVPVNHDIVGRFAKVTEPRIWQVLIEGKSGQVGDELERELFLVRKLVEKAKNAALPAEFAPDFYICTLSSRTIVYKGMLRSAVVGTFFRDLENPDFESAFAIYHRRFSTNTTPKWPLAQPMRVLGHNGEINTLQGNLNWVASREHELSNPIWKGREAELTPLCNAAQSDSANLDNVAELLVRTGTDPQDALMLLVPEAYRNHPDLMKEYPEVVDFYEFYEGLQEGWDGPALLVFSDGKRVGARLDRNGLRPARFWQTKDDMIYVASEVGVLGDAITNAENIVAKGRLGPGQMVCADLEKGIFSETSAISKLVAGRKPYKEWLAASLRRLTDLGESTFLNEPMYDAATMLRLQSAIGMDAENAQMVVESQAQTGVEPTYCMGDDIPLAVLSDKPHMLYDYFKQRFAQVTNPPIDPLREGLVMSLEMRLGARGNLLNPGADSYKQVLLDSPILLESEMQAISTDKVLGSKTFKLFFEAGKPGAMEAALKKLCSDVEAAVKAGCQCVVLSDRPDGGMDAGKAPIPALLATGAVHHHLIRTSLRSDTSIVVDTATCYSTHHAAMLIGFGAHAICPYLGYETSRQWRLSARTQSLIKAGKVPDISVKVAQKNFKKSLEKGVLKILSKMGISLLSCYHGAQIFEAYGLGKDVMDMCFKGTVSRIGGMSLADLQRESESLWAKGFPEKAMTKLEDYGFIQSKPKGEFHSNNQTMAKLLHKAIGLGNGSAADKDAYKAYQQHFADSPVAVLRDCLEFKSDRGPISIDQVEPAAAIMERFCTGGMSLGAISRETHETIAIAMNRIGGKSNSGEGGEDPIRWLHLSDVDGEGKSATASYLRGLRNGDTATSKIKQVASGRFGVTPEYIMNAEQMEIKIAQGAKPGEGGQLPGQKVSPYIAQLRRSKPGVPLISPPPHHDIYSIEDLAQLIYDLHQVNPRAKVSVKLVAEAGIGVVASGVAKANADIIQVSGHDGGTGASPISSIKHAGGPMEMGLAETHQTLVRNELRERVVLRVDGGVRNGRDVLMGALMGADEFGFGTVAMIATGCIMARVCHTNNCPVGVASQREELRARFPGAPEDLVNYFHFVAEEVRAELANMGYRSLDEVIGRADLLKQRSVKLAKTEGLDLSFLTTFAGASGKSSTRRAQEVHDNGPQLDDRILAEPEVMAAIKDHKTVSKAFEIVNVDRSSLGRVAGVIAKHHGDSGFQGKVKLTLTGSGGQSFGCFCVKGLEVKLVGEANDYVGKGMNGGEIAIVPPANSPFKPEEASLVGNTCLYGATGGRLFVNGRAGERFAVRNSLAEAVVEGAGDHCCEYMTGGCVIVLGSVGRNVAAGMTGGLGYFLDEDGSFTDKVNTEIVSVQRVITKAGEAQLRGLLEAHVAHTGSAKAKSLLANWEASLGKFWQLVPPAEKNTAEVNPSVAQPAAAGAKVAVSA

SEQ ID NO: 581 - protein, 523 aa, Legionella pneumophila str. Paris
MRRQWYIGFGVILLCLFALFAMLQDIVWFFAFLIPIVILWIYDVLQTKHTILRNFPVLGHVRYFLEFLRPEIQQYFIATDESELPFNRETRSMIYQRAKNVRDTIPFGTERDILSVGYTWALHSLSPKHSSEVEPRIDVGGPDCKKTYNASRLNISAMSFGSLSSNAIMALNKGAKLGGFYHNTGEGGLSPYHLQGGDIVFQIGTAYFGCRDDKGDFDENEFIKEASRDEVKMIEIKLSQGAKPSHGGILPAAKLTEEIAKVRKVPMGKDVLSPIAHTAFDNPVGLLHFVKRLRDLSGGKPIGFKLCLGRRHEFMAICKAMLKTNILPDFITIDGAEGGTGAAPVEYTNFIGTPLEAGLVFVHNALVGTGVRDKIRVICSGKVTNGFDLLTNIALGADICNSARAMMMSIGCIQSKQCNANTCPTGVATQKKRLQYGLVVDEKKFLVANFHNNTIKSFLEMVGALGLNNPSDLKPSHIMRRIGVDEVKSFDQIYTYVKPGQFLQGDIPDDYRVHWEHADPDKF

SEQ ID NO: 582 - protein, 1550 aa, Synechocystis sp. PCC 6803
MPCHEGLHPLVPNFCTVTSPMNSSHLAPQVQGLYDPQNEHDACGVGFIVQMKGKVSHDIVEQGLQMLVNLEHRGACGCEPNTGDGAGILIQVPHKFIQKIAGAEGITIPAPGQYAVGNIYGSPDPLARAEARQKFNDIVAQEGLKVLGWRDIPTQNEPLGETAIASEPFMQQVYIARPEGLTDDLDFERKLYVIRKLTHGAIRSPKIDTYWYVASLSARTLVYKGMLTTAQVGQYYPELHDPDMESALALVHSRFSTNTFPSWERSHPYRYIAHNGEINTMRGNVNWMQARQALFESSLFGEDMAKVQPVINIDGSDSTIFDNALELLYLAGRSLPHAVMMMIPEPWSAHESMSQEKKAFYKYHSCLMEPWDGPASIAFTNGKMMGAVLDRNGLRPSRYYVTKDDLVIMASEAGVLPIEPERVAKKGRLQPGRMFLVDMEQGRIIADEEIKQEIVSQHPYGEWLAANLKSLEQLPSPGNVPGTDAESLRQRQMAFGYTFEELRILLAPMGRDGVEAIGSMGADTPLAVLSDKPKLLYNYFQQLFAQVTNPPIDSIREEIITSAETTIGGEGNLLDPRPESCRLIELKTPILTNEDLAKLKALDDDEFKSVTLDILFDPNQGEAGLKTALDNLFTEADQAISQGANLIILSDRQVSAEKAAIPALLAVSGLHHHLIRNGSRTKVGLVLESGEPREVHHFAVLLGYGCGAINPYLAFETLDGMIAEGLLVNVDHKTACKNYIKAATKGVIKVASKIGISTIQSYRGAQIFEAVGLNQSVIDEYFCRTSSRIQGSDLGVIAQEAILRHQHAFAPRPGDLHTLDVGGEYQWRKDGEEHLFSPQTIHLLQRAVREGNYELYKQYAALVNEQNQKFFTLRGLLDFQDRESIPLEEVEPIEAIMKRFKTGAMSYGSISKEAHESLAIAMNRIGGKSNTGEGGEDPERFTWTNDQGDSKNSAIKQVASGRFGVTSLYLSQAKEIQIKMAQGAKPGEGGQLPGKKVYPWIAKVRHSTPGVGLISPPPHHDIYSIEDLAELIHDLKNANREARINVKLVSEVGVGTIAAGVAKAHADVVLVSGYDGGTGASPQTSIKHAGLPWELGLAETHQTLVLNNLRSRIVVETDGQMKTGRDVAIAALLGAEEFGFSTAPLVSLGCIMMRACHLNTCPVGIATQNPELRAKFTGDPAHAVNFMTFIATELREVMAQLGFRTINEMVGRTDILEPKKAVAHWKAKGIDLSTILHQPEVGDDVGRYCQIPQDHGLQHSLDITQLLDLCQPAIAKGEKVTATLPITNINRVVGTIVGNEITKRHWEGLPEDTVHLHFQGSAGQSFGAFIPKGMTLELEGDANDYLGKGLSGGKIIVYPPKGSSFIASENIIAGNVCLYGATAGEVYISGMVGERFCVRNSGVNTVVEAVGDHGCEYMTGGKVVVLGQTGRNFAAGMSGGVAYIFDETGDFATRCNSAMVGLEKLEDPEEIKDLKELIQNHVNYTDSAKGKAVLADWEASIPKFVKVMPRDYKRVLQAIKKALEAGLSGDDALNAAFEENAKDVARIGGS

SEQ ID NO: 583 - protein, 1482 aa, Shewanella sp. ANA-3
MSLYHPSFERDNCGFGLIAQMDGEASHRIVRTAIHGLDRMKHRGGIASDGRTGDGCGLLMQLPLQFFEAIAAENDWHLSRKFAVGMLFLSQDEELADQAKFILERELERETLSIAGWRKVPVNPEVLGEIGKSSLPQIYQVLINAPIGWREKDLERRLYMARRRLEQQITDDKDFYVASLSGQVIVYKGLMMPADLPAFYPDLADIRLKSSICLFHQRFSTNTSPKWPLAQPFRYLAHNGEINTITGNRQWARARAYKFNSPLLPDLQQAAPFVNETGSDSSSLDNMLEMLLSGGMDLYRAMRLLIPPAWQSNPEMDDELKAFYDFNSMHMEPWDGPAGIVMTNGRHAACAVDRNGLRPSRYVITKDRILTLASEVGIWDYAADEVIEKGRVGPGELLVLDTLNGRLYQSFEIDNDLKRRHPYKEWMAKNSRTLVPAEQLATEQHGASELSPEQLLQYQKQFGYTREELEQVIWVLAKQGEEATGSMGDDTPMAVLSKKSRSLYDYFRQKFAQVTNPPIDPLREKHVMSLATCIGREQNLFNETTGHAYRVMFNSPILLFSDFNQLLGLDSTYYRANIVDLNYDPKEGLEHAIRRITSEAERLARSGTTLLILSDRAIDKSAQVIPAAMAVGAVQQMLVSKSLRCDTNIIVETASARDPHHFAVLLGFGATAIYPYLVYESISDLAKRHQLTDTTALMLNFRYGIEKGLRKIMSKMGISTVGSYRCSQQFEAIGIASDVIELCFKGVVSRIEGASFEDIAQDQALLHKAAYRAHVPLPQGGLLKYVDGGEYHCFNPDVVNTLQASLIDKNFATYKKFAELVDNRPVATLRDLIGIKADQAAIELDKVEAASQLFPRFDSAAMSIGALSPEAHEALAIAMNRLGGRSNSGEGGEDARRFNTERNSAIKQIASARFGVTAHYLVNADVLQIKVAQGAKPGEGGQLPGHKVSVEIAGLRHARPGVTLISPPPHHDIYSIEDLAQLIFDLKQINTKALISVKLVSEPGVGTIATGVAKAYADMITISGYDGGTGASPITSVKYAGSPWELGLAEVHQSLVENGLRHKIRLQVDGGLKTGTDVIKAALLGAESFGFGTVPMIALGCKYLRICHLNNCATGVATQDKKLRDNHYHGLPERVMTYFEFVAEEVREWMATLGVSKFEDLVGRSEWLHTLEGQTDKQRGLDLAPILYQPKVRASTSRTWQETNPPADLGLLNQHLLNECQSAVDKGECFDAAYSINNTDRSVGARLSGYIATTLGVKGTKAPIKLSFNGSAGQSFGVWNSPGLELKLCGDANDYVGKGMSGGKIVIYPPLGSPFQSERSAIVGNTCLYGATGGRFFAAGQAGERFAVRNSGAIAVVEGLGDNGCEYMTSGIVVVLGKTGVNFGAGMTGGFAYIFDQFGRFNRRVNNELVDTQKLESPIHQQHLKGLIEEHVAETGSEHAKMILSDFANWLDCFVLVKPKNIAVADLLKLEQSSPELAVKAG

SEQ ID NO: 584 - protein, 746 aa, Oryza sativa Japonica Group
EFGTSSEDTAKRLENFGFIQSRPGGEYHANNPEMSKLLHKAVREKSDNAYTVYQQHLASRPVNVLRDLLELKSDRAPIPIGKVEPATSIVERFCTGGMSLGAISRETHEAIAIAMNRIGGKSNSGEGGEDPIRWSPLADVEDGYSPTLPHLKGLQNGDTATSAIKQVASGRFGVTPTFLVNAEQIEIKIAQGAKPGEGGQLPGKKVSAYIARLRNSKPGVPLISPPPHHDIYSIEDLAQLIYDLHQINPKAKVSVKLVAEAGIGTVASGVSKGNADIIQISGHDGGTGASPISSIKHAGGPWELGLSETHQTLIQNGLRERVVLRVDGGFRSGLDVLMAAAMGADEYGFGSVAMIATGCVMARICHTNNCPVGVASQREELRARFPGVPGDLVNYFLFVAEEVRATLAQLGFEKLDDIIGRTDILKAKHVSLAKTQHIDLKYLLSSAGLPKWSSSQIRSQDVHSNGPVLDETILADPDISDAIENEKEVSKTFQIYNVDRAVCGRVAGVIAKKYGDTGFAGQLNITFTGSAGQSFGCFLTPGMNIRLVGEANDYVGKGMAGGELVVVPVEKTGFVPEDAAIVGNTCLYGATGGQVFVRGKTGERFAVRNSLGQAVVEGTGDHCCEYMTGGCVVVLGKVGRNVAAGMTGGLAYILDEDDTLVPKVNKEIVKMQRVNAPAGQMQLKGLIEAYVEKTGSEKGATILREWEAYLPLFWQLVPPSEEDSPEACAEFERVLAKQATTVQSAK

SEQ ID NO: 585 - protein, 529 aa, Cytophaga hutchinsonii ATCC 33406
MDKLDMKEVVEVIGSIPWWAYIFLFIGVIAIKDIFFNRRHTIKHNFPIVGHFRYLLEKIGPELRQYIVANNREELPFNRRQRSWIYASSKQENNYQGFGTDQDQNSPGFVFIKPSMFSYAVKEGHPNKKKPDFVPCAKIMGAYNKRRRPYRPYSIINISGMSYGSLSARAVESLNKGALKAGCYQNTGEGSLAPHHKHGADIMFHFGTGYFGVRDEHGNFSMSKLKALVEANPCIRAIDLKLSQGAKPGKGGVLPASKITQEIADIRGLPMGKDVISPAYHSVFSNVPEMMDFIENIAQETGLPVGFKSAVGKMEMWVELADRMLEKGYGPDFITIDGGEGGTGAAPPAFADHVSLPFVYAFSNVYKIFAERGLTDRIVFAASGKLGFPESSLMAFALGADVIHVAREAMMSIGCIQAQVCHNNTCPSGVATQNKWLQSGIDVPLKADRLYNYIKNLRKEVLEITHACGYEHPSQMTMTDIDISMGDNNLTMPLVDAYKYNKIPVNFESMQKLADCKYLGKANPEIIFK

SEQ ID NO: 586 - protein, 468 aa, Ustilago maydis 521
MQSYSHLYEPMSHPSGSSSPHPTSPGGFNVPYTGSPSASHLGATASASSNMAQNPLSFGTFYFQQPTSSQSNHGPLASHPPQHLDSYSSTSHTPHQHFSPSADHHSSSSASVAALSNSGRLSWANSPADSYHGVTSNATTHSSGADSHASLVNNKYPWDINPASMRSDTGHIGSPYSASDLLHPATASALGFDDDSGSGGNVRPRARKRTRAEEEPRSRLSSSSRSRTRPRIPSALSNANSPASDFHHSISSYHADPEDTDITAWINAGDAEDLGTSHVADTEHSRLWSSFGPGFPTEASHASPYHGSATAPALPASLSNSRAQSVVGSEDFAYHASPAIHSGSTNLGLSVSLHDHDAVDVKPGSAQLVQDDSAPAEDEPLYVNAKQYQRILKRRATRARIEEQRKKDFLAYMQTRDKARKEGNGLDEDGKKPYLHESRHRHAVRRPRGPGGRFLTKAEMAQSAASAS

SEQ ID NO: 587 - protein, 1169 aa, Oryza sativa Japonica Group
RHELRPARYWRTSDDFVYVASEVGVIPMDESKVVMKGRLGPGMMITVDLQTGQVLENTEVKKSVASANPYGSWLQQSTRSIKPVNFQSSVAMDNETVLRHQQAFGYSSEDVQMVIETMASQGKEPTFCMGDDIPLAVLSQKPHMLFDYFKQRFAQVTNPAIDPLREGLVMSLEVNIGKRRNILEVGPENADQVTLSSPVLNEGELESLLNDSKLKPKVLSTYFDIRKGLDGSLDKAIKVLCDEADAAVRNGSQLLVLSDRSEALEPTRPAIPILLAVGAIHQHLIQNGLRMSASIVADTAQCFSTHQFACLIGYGASAICPYLALETCRQWRLSNKTVNLMRNGKMPTVTIEQAQRNFIKAVKSGLLKILSKMGISLLSSYCGAQIFEIYGLGQEVVDLAFCGSVSKIGGLTLDELGRETLSFWVKAFSEDTAKRLENFGFIQSRPGGEYHANNPEMSKLLHKAVREKSDNAYTVYQQHLASRPVNVLRDLLELKSDRAPIPIGKVEPATSIVERFCTGGMSLGAISRETHEAIAIAMNRIGGKSNSGEGGEDPIRWSPLADVEDGYSPTLPHLKGLQNGDTATSAIKQVASGRFGVTPTFLVNAEQIEIKIAQGAKPGEGGQLPGKKVSAYIARLRNSKPGVPLISPPPHHDIYSIEDLAQLIYDLHQINPKAKVSVKLVAEAGIGTVASGVSKGNADIIQISGHDGGTGASPISSIKHAGGPWELGLSETHQTLIQNGLRERVVLRVDGGFRSGLDVLMAAAMGADEYGFGSVAMIATGCVMARICHTNNCPVGVASQREELRARFPGVPGDLVNYFLFVAEEVRATLAQLGFEKLDDIIGRTDILKAKHVSLAKTQHIDLKYLLSSAGLPKWSSSQIRSQDVHSNGPVLDETILADPDISDAIENEKEVSKTFQIYNVDRAVCGRVAGVIAKKYGDTGFAGQLNITFTGSAGQSFGCFLTPGMNIRLVGEANDYVGKGMAGGELVVVPVEKTGFVPEDAAIVGNTCLYGATGGQVFVRGKTGERFAVRNSLGQAVVEGTGDHCCEYMTGGCVVVLGKVGRNVAAGMTGGLAYILDEDDTLVPKVNKEIVKMQRVNAPAGQMQLKGLIEAYVEKTGSEKGATILREWEAYLPLFWQLVPPSEEDSPEACAEFERVLAKQATTVQSAK

SEQ ID NO: 588 - protein, 1567 aa, Burkholderia sp. 383
MNDHQQPLAAVPAAQGLYDPQNEHDACGVGFVAHIKGKKSHEIIQQGLKILENLDHRGAVGADPLMGDGAGILIQIPDAFYREEMAKQGVNLPPAGEYGVGMIFLPKENASRLACEQELERTVKAEGQVVLGWRDVPVDHAMPISPTVKASEPLIRQIFIGRGKDIMVTDALERKLYVIRKTASHRIQALKLKHGKEYFVPSMSARTIVYKGLLLAGQVGVYYRDLQDTRVVSALALVHQRFSTNTFPAWELAHPYRMIAHNGEINTVKGNVNWLNARTGAIASHVLADDLPKLWPLIYPGQSDTASFDNCLELLVMAGYPLVHAVMMMIPEAWEQHTLMDENRRAFYEYHAAMMEPWDGPAAIAFTDGRQIGATLDRNGLRPARYIVTDDDLVIMASEAGTLPIPESKIVKKWRLQPGKMFLIDMEHGRIIDDKELKDNLANAKPYKSWIDAVRIKLDEIEPKAEEVAAGRTQGAALLDRQQAFGYTQEDLKFLMAPMAQQGEEAVGSMGNDSPLAVMSNKNKTLYHYFKQLFAQVTNPPIDPIRENMVMSLVSFIGPKPNLLDTNNINPPMRLEVSQPVLDFKDIAKIRAIDQYTGGKFSAYELNICYPVAWGKEGIEARLASLCAEAVDAVKSGYNMLIVSDRKTDAEHVAIPALLATSAIHSHLVQQGLRTSTGLVVETGSARETHHFALLAGYGAEAVHPYLAMETLAKMAEGLPGDLSPEKAVYNFTKAVGKGLQKVMSKMGISTYMSYTGAQIFEALGLSSDLVEKYFKGTASKVGGIGLFEVAEEAIRLHRDAFGDNPVLRDMLDAGGEYAYRVRGEDHMWTPDSIAKLQHATRSNSYQTYKEYAHLINDQTKRHMTFRGLFEFKVEPTKAIPIDDVESAKDIVKRFATGAMSLGSISTEAHATLAVAMNRIGGKSNTGEGGEDQKRYRNELRGIPIKAGETLKSVIGDEIVSDIPLQDGDSLRSKIKQVASGRFGVTAEYLASADQIQIKMAQGAKPGEGGQLPGHKVSEYIGKLRYSVPGVGLISPPPHHDIYSIEDLAQLIHDLKNVNPSSSISVKLVSEVGVGTVAAGVAKAKADHVVIAGHDGGTGASPLSSVKHAGTPWELGLAETQQTLVLNRLRGRIRVQADGQMKTGRDVVIGALLGADEFGFATAPLVVEGCIMMRKCHLNTCPVGVATQDPVLRAKFKGQPEHVVNYFFFVAEEVREIMAQLGVAKFDDLIGRADLLDTRKGIEHWKAKGLDFSRVFYQPEECEDVAPRHVDVQDHGLERALDHVLIEKAKAAIENGEHVSFIQPVRNVNRTVGAMLSGVIAKKHGHDGLADDAVHIQLKGTAGQSFGAFLAKGVTLDLVGDGNDYVGKGLSGGRIIIRPTNDFRGKSEENIICGNTVMYGAIEGESFFRGVAGERFCVRNSGATAVVEGTGDHGCEYMTGGTVVVLGETGRNFAAGMSGGLAYIYDPEGTFAAKCNKSMVALEPVLQQAEQERTVDRALWHAGTTDEALLKGLVERHFQFTGSPRAKSLLENWDAARRQFVKVFPHEYKRALGEIGAKKAAKEELAA

SEQ ID NO: 589 - protein, 224 aa, Oryza sativa Japonica Group
MPDSDNESGGPSNAGEYASAREQDRFLPIANVSRIMKRALPANAKISKDAKETVQECVSEFISFITGEASDKCQREKRKTINGDDLLWAMTTLGFEDYIDPLKLYLHKFRELEGEKAIGAAGSGGGGAASSGGSGSGSGSHHHQDASRNNGGYGMYGGGGGMIMMMGQPMYGSPPASSAGYAQPPPPHHHHHQMVMGGKGAYGHGGGGGGGPSPSSGYGRQDRL

SEQ ID NO: 590 - protein, 449 aa, Lotus japonicus
MEGFHPSMTMASPFPYTFPISAGGIGVGVVGVGSSNLTTPTPTATGTYNNTPWMNSRIWSKLPQKLLDRVIAFLPTPAFFRARSVCKRWYSLLFSNTFLELYLHLSPRRHWFIFFKHKTRKNYIYKNNNNNIITGSAGTASCEGYLFDPAEMAWYRISFAMIPPGFSPASSSAGLLCWASDEAGPKTMLLSNPILGSLTQLPPTLRPRLFPSIGLTITPTCIDVTVAGDDMISPYAVKNLTSESFHIDGGGFYSMWGTTSPLPRLCSLESGRMVCAEGKFYCMNCSPFSVLAYDIASTTWFKIQAPMRRFLRSPNLVECREKLMLVAAVEKSKLNVPRSLRVWTLQACGTMWVESERMPQQLYIQFAEIEGGNGFECVGHGEFVVIMIKGTDKALLYDLVRKRWQWIPPCPYAGYDGFELHGFAYEPRLATPVTALLDQLALPFQSYNA

SEQ ID NO: 591 - protein, 442 aa, Triticum aestivum
  misc_feature (170)..(170): Xaa can be any naturally occurring amino acid
MGQKDSKPSYNSADYGNSSNGYNSRYANTPSSYSPRYASSAGNNVQQPEAQARLQRKYSRIGDDYRSVSQVTEALAQAGLESSNLIVGIDFTKSNEWTGKISYNRRCLHDIGNTPNPYEQAISIIGRTLSAFDEDNLIPCFGFGDASTHDQEVFSFYPENQPCNGFEEAXLERYREIVPTLRLAGPTSFAPIIETAIGIADSTGGQYHVLLIIADGQVTRSVDTQSGQLSPQERDTIDAIVKASHFPLSIVLVGVGDGPWDMMHKFDDNIPARSFDNFQFVNFTEIMSKSIAADRKEAEFALSALMEIPTQYKATLDLQLLGRRQGIPPRVPLPPPTRTPYSRSTSFDQQSGVYSRSSSFGQQTSGFQQSDSFKQRQHGATRRPDSYSSEKSSESTLSCAICMDKSKDLAFGCGHQTCYDCGKNLVRCPMCQQHITTRIRLY

SEQ ID NO: 592 - protein, 1382 aa, Ostreococcus tauri
  misc_feature (818)..(824): Xaa can be any naturally occurring amino acid
MCMLPTDAAAAANAKKLLEESCVAEGLEVLGWRAVPVDSSVVGPLAKMTCPVHEQILVAGAGVTGEELERKLFIARKTCEKKAAAAGMEESFYICTMGSRTIVYKGMLRSAVLGKYYKDLEDPDYETQFSIYHRRFSTNTTPKWPLSQPMRFLGHNGEINTLQGNLNWMASKEADMANPIWGGREPEFRPICSPAASDSANLDRVAELLVQTGREPTETMMLLVPEAHRNHPELDRTFPEVHDFYDYYAGMQEAWDGPALLVFSDGKKLGARLDRNGLRPARFWRTSDDYIYVASEVGVLGDVISNASNVVSKGRLGPGMMIVADLETGDFKENTQIAKEVAARHPYGEWMKSIERFKGIKPSTANTLEPIQLIECQARAGYAAEDITMIIESMAAEGIEPTWSMGDDTPLPVLSSRPRMLYDYFKQRFAQVTNPPIDPLREGLVMSLEMTLGAKGNLLDTQGKESPPVMLDTPVLFDSELDAVKNHPKLKTATIPARYAAGGGAGALKAGLDKLCEDAAAAIRAGSQCVVITDRPDQGPDSPAIPSLLAVGTVHHYLIAQGLRTRASIVVESASAFSTHHFATLIGYGAHAVCPWLALETCRSWRMSPKIENAIKRGKMGDVSVEGVQTNFKAAINKGLKKILSKMGICAITSYQGAQIFECYGLGPEVIGTAFKGTVSRIGGLTLDEVAKETHMFIQSSFPGEAEEMAKVEARGMFQVKPGLEYHGNNQDMSKLLHKAVGLGGGEKNDEFWSAYQEHRNDRPYTCLRDQLEIKSDRKPISIDEVESVADICTRFCTGGMSLGAISQECHESIAVAXXXXXXXMSANQTEIKVAQGAKPGEGGQLPGKKVSPYIAWLRRSKAGVPLISPPPHHDIYSIEDLAQLIYDLHMVNKDSKVSVKLVAQAGIGTVASGVAKANADVIQISGGDGGTGASPLSSIKHCGGPLEMGLVETHRTLVENGLRERVILRADGGCRSGLDVIQTALMGADEYGFGTVAMIATGCVMARICHTNNCPVGVASQREELRARFPGAPSDLVNFFQYAAQEVREILASMGYRSLDEVIGRNDLLSQIDKAPSKTGSLDLSFLTTSSGECGASSDRINQPVHNDGVVLDDKILSDPEVIKCIETEGTLVKKVEIVNIDRAATARVAGQIAKRYGDNGFAGSLTLDIEGSSGQSFGAFVVGGMKVRLVGEANDYVAKSMSGGEIAIMPPSNSPFAPDSASIAGNACLYGATGGQVFISGRAGERFAVRNSLGEAVVEGTGDHCCEYMTGGCVVVLGPVGRNVGAGMTGGIGYFLDEDGAFQAKVNGEIVAMQRVCTPAGEAQLKGLISAHAEKTNSPKAKAILADWASYLPKFWQLVPPSEANTPEATSTPTEVATTA

SEQ ID NO: 593 - protein, 195 aa, Triticum aestivum
AYGGFWLSIQDQEALGNSGCVSTTPSSIPSRPFDGAMTTTPEAASSGGFAFAVAALAEQQHMHGESSSASACQTPRFDILSRSDRSSTEDLSVVGSSSSDSRVEEPSSSSTHRTIEGSEYSNSNGRWSEVAEAGTSIAEADVIVEAGVGNSSTSVGSNIGSSSVPDSFEEQMMLAMALSLVDARSRAGSPGLAWR

SEQ ID NO: 594 - protein, 162 aa, Coprinopsis cinerea okayama7#130
MPNSNMTDLQPLLAARDPANPDVLIAPQQPSTEQVPITEQEVGEYREQDRFLPIANVARIMKSSVPPTAKIAKDAKECVQECVSEFISFITSEAAEKCQLEKRKTIGGEDILQAMSTLGFDNYVQTLKIHLAKLRQNGASAAVTAAQREQQQQAEQRIEEEE

SEQ ID NO: 595 - protein, 1472 aa, Azospirillum brasilense
CGVGFIAAIDGKPRRSVVEKGIEALKAVWHRGAVDADGKTGDGAGIHVAVPQKFFKDHVKVIGHRAPDNKLAVGQVFLPRISLDAQEACRCIVETEILAFGYYIYGWRQVPINVDIIGEKANATRPEIEQIIVGNNKGVSDEQFELDLYIIRRRIEKAVKGEQINDFYICSLSARSIIYKGMFLAEQLTTFYPDLLDERFESDFAIYHQRYSTNTFPTWPLAQPFRMLAHNGEINTVKGNVNWMKAHETRMEHPAFGTHMQDLKPVIGVGLSDSGSLDTVFEVMVRAGRTAPMVKMMLVPQALTSSQTTPDNHKALIQYCNSVMEPWDGPAALAMTDGRWVVGGMDRNGLRPMRYTITTDGLIIGGSETGMVKIDETQVIEKGRLGPGEMIAVDLQSGKLYRDRELKDHLATLKPWDKWVQNTTHLDELVKTASLKGEPSDMDKAELRRRQQAFGLTMEDMELILHPMVEDGKEAIGSMGDDSPIAVLSDKYRGLHHFFRQNFSQVTNPPIDSLRERRVMSLKTRLGNLGNILDEDETQTRLLQLESPVLTTAEFRAMRDYMGDTAAEIDATFPVDGGPEALRDALRRIRQETEDAVRGGATHVILTDEAMGPARAAIPAILATGAVHTHLIRSNLRTFTSLNVRTAEGLDTHYFAVLIGVGATTVNAYLAQEAIAERHRRGLFGSMPLEKGMANYKKAIDDGLLKIMSKMGISVISSYRGGGNFEAIGLSRALVAEHFPAMVSRISGIGLNGIQKKVLEQHATAYNEEVVALPVGGFYRFRKSGDRHGWEGGVIHTLQQAVTNDSYTTFKKYSEQVNKRPPMQLRDLLELRSTKAPVPVDEVESITAIRKRFITPGMSMGALSPEAHGTLNVAMNRIGAKSDSGEGGEDPARFRPDKNGDNWNSAIKQVASGRFGVTAEYLNQCRELEIKVAQGAKPGEGGQLPGFKVTEMIARLRHSTPGVMLISPPPHHDIYSIEDLAQLIYDLKQINPDAKVTVKLVSRSGIGTIAAGVAKANADIILISGNSGGTGASPQTSIKFAGLPWEMGLSEVHQVLTLNRLRHRVRLRTDGGLKTGRDIVIAAMLGAEEFGIGTASLIAMGCIMVRQCHSNTCPVGVCVQDDKLRQKFVGTPEKVVNLFTFLAEEVREILAGLGFRSLNEVIGRTDLLHQVSRGAEHLDDLDLNPRLAQVDPGENARYCTLQGRNEVPDTLDARIVADARPLFEEGEKMQLAYNARNTQRAIGTRLSSMVTRKFGMFGLQPGHITIRLRGTAGQSLGAFAVQGIKLEVMGDANDYVGKGLSGGTIVVRPTTSSPLETNKNTIIGNTVLYGATAGKLFAAGQAGERFAVRNSGATVVVEGCGSNGCEYMTGGTAVILGRVGDNFAAGMTGGMAYVYDLDDSLPLYINDESVIFQRIEVGHYESQLKHLIEEHVTETQSRFAAEILNDWAREVTKFWQVVPKEMLNRLEVPVHL

SEQ ID NO: 596 - protein, 1499 aa, Staphylococcus aureus subsp. aureus Mu50
MHNEKLIKGLYDYREEHDACGIGFYANMDNKRSHDIIDKSLEMLRRLDHRGGVGADGITGDGAGIMTEIPFAFFKQHVTDFDIPGEGEYAVGLFFSKERILGSEHEAVFKKYFEGEGLSILGYRNVPVNKDAIAKHVADTMPVIQQVFIDIRGIEDVEKRLFLARKQLEFYSTQCDLELYFTSLSRKTIVYKGWLRSDQIKKLYTDLSDDLYQSKLGLVHSRFSTNTFPSWKRAHPNRMLMHNGEINTIKGNVNWMRARQHKLIETLFGEDQHKVFQIVDEDGSDSAIVDNALEFLSLAMEPEKAAMLLIPEPWLYNEANDANVRAFYEFYSYLMEPWDGPTMISFCNGDKLGALTDRNGLRPGRYTITKDNFIVFSSEVGVVDVPESNVAFKGQLNPGKLLLVDFKQNKVIENNDLKGAIAGELPYKAWIDNHKVDFDFENIQYQDSQWKDETLFKLQRQFAYTKEEIHKYIQELVEGKKDPIGAMGYDAPIAVLNERPESLFNYFKQLFAQVTNPPIDAYREKIVTSELSYLGGEGNLLAPDETVLDRIQLKRPVLNESHLAAIDQEHFKLTYLSTVYEGDLEDALEALGREAVNAVKQGAQILVLDDSGLVDSNGFAMPMLLAISHVHQLLIKADLRMSTSLVAKSGETREVHHVACLLAYGANAIVPYLAQRTVEQLTLTEGLQGTVVDNVKTYTDVLSEGVIKVMAKMGISTVQSYQGAQIFEAIGLSHDVIDRYFTGTQSKLSGISIDQIDAENKARQQSDDNYLASGSTFQWRQQGQHHAFNPESIFLLQHACKENDYAQFKAYSEAVNKNRTDHIRHLLEFKACTPIDIDQVEPVSDIVKRFNTGAMSYGSISAEAHETLAQAMNQLGGKSNSGEGGEDAKRYEVQVDGSNKVSAIKQVASGRFGVTSDYLQHAKEIQIKVAQGAKPGEGGQLPGTKVYPWIAKTRGSTPGIGLISPPPHHDIYSIEDLAQLIHDLKNANKDADIAVKLVSKTGVGTIASGVAKAFADKIVISGYDGGTGASPKTSIQHAGVPWEIGLAETHQTLKLNDLRSRVKLETDGKLLTGKDVAYACALGAEEFGFATAPLVVLGCIMMRVCHKDTCPVGVATQNKDLRALYRGKAHHVVNFMHFIAQELREILASLGLKRVEDLVGRTDLLQRSSTLKANSKVASIDVEKLLCPFDGPNTKEIQQNHNLEHGFDLTNLYEVTKPYIAEGRRYTGSFTVNNEQRDVGVITGSEISKQYGEAGLPENTINVYTNGHAGQSLAAYAPKGLMIHHTGDANDYVGKGLSGGTVIVKAPFEERQNEIIAGNVSFYGATGGKAFINGSAGERFCIRNSGVDVVVEGIGDHGLEYMTGGHVINLGDVGKNFGQGMSGGIAYVIPSDVEAFVENNQLDTLSFTKIKHQEEKAFIKQMLEEHVSHTNSTRAIHVLKHFDRIEDVVVKVIPKDYQLMMQKIHLHKSLHDNEDEAMLAAFYDDSKTIDAKHKPAVVY

SEQ ID NO: 597 - protein, 1533 aa, Synechococcus sp. WH 8102
MADLTRPTVWPYSDSAAPEAVAGEKDACGVGFLAQLSGETSHWVLQQALRGLGCMEHRGGCGGDGDSGDGAGVLCQIPWTYLKAVWPEAASARGLGMMFMPQDSEGRELARRFCKEEAEALGLTSAGWRVVPVDSSVLGPMARDTAPVIQQWSLAGGPDGDAFEALLLRLRRRIGARARQAWGFEGSRDLYVASLSSRTVVYKGMVRSEVLAQYYADLRDPRFEVSFAVYHRRFSTNTLPRWPLAQPMRLLGHNGEINTLLGNLNWAEASEASLADVWGEAADDLNPVVNPAFSDSANLDATLELMVRSGRSITDSLITLVPEAFRNQPDLEDRPEVTAMYEFNAGIQEPWDGPALLVFADGKRVGATLDRNGLRPARWCTTADGFVIMGSETGVVDLSGKTVVQKGRLGPGQMVAVDLENGQLLDNWTVKEDAAGRFPYGDWLQHHRRGVEAQPWTQDRQIGELDLLRLQTAMGFTAEDFDLVIEDMAGLGKEPTYCMGDDIPLAVLSDKPHLLYDYFKQRFAQVTNPPIDPLREKLVMSLEMHLGERRPALKPQPEAAAVIHLDTPVLNEAELAAISKQGLPVVTLSTQVAVEACAGGLSSALQGLCEAAEEAVRGGAQVLVLSDRVDGSGAAAQLTAISVAMPALLAVGAVHHHLLRQKLRLRCSLVIDTAQCWSTHHLACLIGYGASAVCPWLTWETTRHWLAHPKTQKRIEQGKLPALDADQVQANVRVSLENGLRKILSKIGISLLASYHGAQIFEAIGLGADVIDTAFSGTTSRVAGMTLAELANETLSLHAKAFPELNRSKLEFMGFVQYRTGGEYHLNSPDMAKALHAAVKTGPGYDHFSTYKTLLENRPVTALRDLLEFKLAPTPLPLDQVESAESLCKRFCTGGMSLGALSREAHEVLAVAMNRIGGKSNSGEGGEDPARFQVLHDVDAEGRSQAFPSIGGLRNGDTACSAIKQIASGRFGVTAEYLRSGKQLEIKVAQGAKPGEGGQLPGPKVDDYIAWLRNSKPGVALISPPPHHDIYSIEDLAQLIHDLHQVHPKAPVSVKLVAEIGIGTIAAGVAKANADVIQISGHDGGTGASPLSSIKHAGSPWELGLTEVHRSLLENGLRDRVLLRADGGLKTGWDVVIAALLGAEEYGFGSVAMISEGCIMARVCHTNNCPVGVATQKEALRKRFTGVPEHVVNFFWYVAEEVRQLLSLLGVAKLEDLIGRSDLLQPRAVQLAKTQGVDLSSLLAPIQSSEERSWLRHSAEAHGNGPILEDQLLADAELMAAVESHGSLNRTIAIINTDRSVGARLAGEIAQRHGNRGFKGQLNLTFQGAAGQSFGAFLVQGMNVRLEGEANDYVGKGMNSGRISLVPADGCANPGDQVILGNTCLYGATGGELFAHGRAGERFGVRNSGARTVVEGAGDHCCEYMTGGVVVVLGSTGRNVGAGMTGGVTFLLDEGDRVTARVNTEIVAVCSLTTSQQEETLKELLEAHVAATGSSKASALLADWAAAKGRFKVLIPPSERAAMGLVDQQAVAA

SEQ ID NO: 598 - protein, 340 aa, Arabidopsis thaliana
MMHQMLNKKDSATHSTLPYLNTSISWGVVPTDSVANRRGPAESLSLKVDSRPGHIQTTKQISFQDQDSSSTQSTGQSYTEVASSGDDNPSRQISFSAKSGSEITQRKGFASNPKQGSMTGFPNIHFAPAQANFSFHYADPHYGGLLAATYLPQAPTCNPQMVSMIPGRVPLPAELTETDPVFVNAKQYHAIMRRRQQRAKLEAQNKLIRARKPYLHESRHVHALKRPRGSGGRFLNTKKLLQESEQAAAREQEQDKLGQQVNRKTNMSRFEAHMLQNNKDRSSTTSGSDITSVSDGADIFGHTEFQFSGFPTPINRAMLVHGQSNDMHGGGDMHHFSVHI

SEQ ID NO: 599 - protein, 115 aa, Zea mays
  misc_feature (18)..(18): Xaa can be any naturally occurring amino acid
  misc_feature (82)..(82): Xaa can be any naturally occurring amino acid
YYPSLNRSKCCSKGICTXCPFCKTPNYAVEYRGVKTKEERSIEHFEEQKVIEAQLRMRQKELQDEEAKMRRKQGRCSSSRTXPSYQCTEQGNECCSSEPSCSSQANRRPFHSRHN

SEQ ID NO: 600 - protein, 282 aa, Zea mays
MQPRGPDQRKGRRGGGKAQRAGNSFGKTVNDHLRSTLSFDNKQPPFASQNFDYGQTIACISYPYNRSRSGDVWAAYESRTSTATVLHLKQFRSQIAGGGSSTRIPLPLELAENEPIYVNPKQYHGILRRRQLRAKLEAQNKLVRARKPYLHESRHLHAMKRARGSGGRFLNTKQLQQSHTALTRSTTTSGTSSSGSTHLRLGGGAAAAGDRSVLAPKTMASQDSSKKAVSSALAFTATPMLRRDDGFLQHPSHLFSFSGHFGQASAQAGVHNGSQHRVPVMR

SEQ ID NO: 601 - protein, 1350 aa, Oryza sativa Japonica Group
MRYRKWDEIENRLLRREPLISENLSVQKYTQCPPEVISDPLDDFGGVPSEEADETQRQPRSHQVNDVRLRSAGEASQRSTREDWAEWMRHFSIALLKESPSPALRTCARLAQLQPSVGRELFAAGFASCWAQMNETSQEQLVRSLKTAFSSQNIPPEILATLLNLAEFMEHDEKPLPIDTRLLGALAEKCRAFAKALHYKEMEFEAVCSKKMGANPVTVVESLIHINNQLHQHEAAIGILTYSQQHLEVQLKESWYEKLHRWDEALKAYKAKSSQASGPLQNLDATLGRMRCLAALARWEDLSALCREQWTGSEPSARLEMAPMAANAAWHMGEWDHMAEYVSRLDDGDENKLRILGNTTASGDGSSNGAFFRAVLSVRCKKYEEARVYVERARRCLATELAALVLESYERAYNNMVRVQQLSELEEVIDYCTLPMESPIADSRRELIRNMWNERIKGTKRNVEVWQALLAVRELVLPPNEDRDTWIKFAKLCWKSGRISQAKSTLVKLLQFDPESSPELTLYHGHPQVVLAYLKYQYAVGDELKRRDAFCRLQDLSVQLATATNSYSGTLASQVATSNAGVPLIARVYLTLASWKRALSPGLDDDSIQEILVSYKNATLNAKDWGKAWHLWALFNTEVMSRYTLRGRPDIAGKYVVAAVTGYFYSIACASTTKGVDDSLQDILRLLTLWFNHGATSEVQMALQKGFSLVNIEMWLVVLPQIIARIHSNNKIVRELIQSLLVRIGKDHPQALMYPLLVACKSISILRQRAAQEVVDKIRQHSGGLVDQAQLVSKELIRVAILWHEMWHEALEEASRMYFGEHNIEGMLAVLEPLHAMLERGPETIKENTFIQAYGHELLEAHECCLKYRATGEDAELTKAWDLYYHVFRRIDKQLPSLTTLDLHSVSPELLECRKLELAVPGTYSADAPLVTIEYFVPQLIVITSKQRPRKLTIHGSDGNDYAFLLKGHEDLRQDERVMQLFGLVNTLLENSRKTSEKDLSIQRYAVIPLSPNSGLIGWVPNCDTLHALIREYRDARKIFLNQEHRCMLSFAPDYDHLPLIAKVEVFQHALENSEGNDLAKVLWLKSRTSEVWLERRTNYTRSLAVMSMVGYLLGLGDRHPSNLMLDRYSGKILHIDFGDCFEASMNREKFPEKVPFRLTRMLVKAMEVSGIEGTFRTTCENVMQVLRTNKDSVMAMMEAFVHDPLINWRLFNFNEVPQVTNYGNAHSHTVVNSEEAANRELMQPPRGARERELLQAVNQLGDANEVLNERAVAVMARMSHKLTGRDFSSGSSLSGAGSSTQHGNEHLASGDTREVEPGLSVKVQVQRLILQATSHENLCQNYVGWCPFW

SEQ ID NO: 602 - protein, 441 aa, Bradyrhizobium sp. ORS278
MSAPPHRTPPRFSATFNPSVIAEIQRAAATGIYDIRGGGAKRALPHFEDLLFLGASVSRYPLEGYREKCGTDVTLGTRFAKKPIKLKIPVTIAGMSFGSLSGPAKEALGRGASAAGTSTTTGDGGMTPEERGHSSILVYQYLPSRYGMNPDDLRKADAIEIVIGQGAKPGGGGMLLGQKISPRVAKMRTLPEGIDQRSACRHPDWTGPDDLEIKIEELREITDWEKPIYVKVGASRPYYDTALAAKSGADVIVLDGMQGGTAATQDVFIEHVGLPTLAAIRPAVQALQDLGLHRKLQLIVSGGIRTGADVAKALALGADAVSIGTAALIALGDNDPQWEAEYQKLGTTAGAYDDWQEGLDPAGITTQDPALAARLDPVKAGRRLANYLSVLTLEAQTIARACGKSHLHNLEPEDLVALTIEAAAMAGVPLAGTNWIPGLDK

SEQ ID NO: 603 - protein, 187 aa, Arabidopsis thaliana
RDRDSGGGQNGNNQNGQSSLSPREQDRFLPIANVSRIMKKALPANAKISKDAKETMQECVSEFISFVTGEASDKCQKEKRKTINGDDLLWAMTTLGFEDYVEPLKVYLQRFREIEGERTGLGRPQTGGEVGEHQRDAVGDGGGFYGGGGGMQYHQHHQFLHQQNHMYGATGGGSDSGGGAASGRTRT

SEQ ID NO: 604 - protein, 1548 aa, Nocardia farcinica IFM 10152
MTQLPGHRSPGPIGLYDPANEHDACGVAFVVDMHGRRSRDIVDKAITALLNLEHRGAAGAEPNSGDGAGILIQIPDRFFRAIVDFELPPEGSYASGIAFLPQARREAARAAYGVEKIVKEEGLEVLGWREVPIDDSSLGALSRDAMPTFRQIFIASPRTGAEQLSGMDLERRAYVIRKRVEHELGTQGAGEGATGRETVYFPSLSGQTFVYKGMFTTPQLRAFYLDLQDDRVESALGIVHSRFSTNTFPSWPLAHPFRRVAHNGEINTVTGNENWMRAREALLNSDVFGTDAAGKNRLEKIFPVCTPGASDTARFDEVLELLHLGGRSLPHAVLMMIPEAWERHDSMDPQLRAFYEYHSMLMEPWDGPASVCFTDGTVVGAVLDRNGLRPSRIWVTDDGLVVMASEVGVLDIDPAKVVRKARLQPGRMFLVDTSQGRIVDDHEIKTQLAAEHPYQQWLDEGVTRLADLPDRPHVHMSHDRVLIRQQIFGYTTEELSLLISPMAKTGGEALGSMGTDTPIAVLSSRPRLLFDYFSQLFAQVTNPPLDAIREEVVTSLKRNLGSEADLLHPGPESCKQIAIEQPILDNDELAKLVHINDDGSQPDLRSVVVRGLYPVKKGGKGLRKALQAINTQVSAAIEGGARIIVLSDRESNEKLAPIPSLLLTSSVHHHLVRERTRTKVGLIVEAGDAREVHHMAMLVGFGAGAINPYMAFETIEDMLERGALDLGTGDLASDYRKAVANYIKAAGKGVLKVMSKMGISTLASYNGAQLFQVIGLSQELVDEYFTGLRSHLDGIGLDEIADDVAARHRIAFLENRNERAHRELEVGGEYQWRREGEYHLFNPDTVFKLQHATRTGQYSIFKEYTKLVDDQSERLASLRGLFKFKKGERAPIPIDEVEPASEIVKRFSTGAMSYGSISAEAHETLAIAMNRLGGRSNSGEGGEHPARFEVEENGDWRRSAIKQVASGRFGVTAHYLTNCTDIQIKMAQGAKPGEGGQLPAHKVYPWVAEVRHSTPGVGLISPPPHHDIYSIEDLAQLIHDLKNANPQARIHVKLVAEPGVGTVAAGVSKAHADVVLISGHDGGTGASPLTSLKHAGGPWELGLAETQQTLLLNGLRDRIVVQVDGQMKTGRDVMIAALLGAEEYGFATAPLVVSGCVMMRVCHLDTCPVGVATQNPVLRERFTGKPEFVENFFLFIAEEVRELLAQLGFRTLDEAIGRVDLLDTSKAKQHWKASKLDLSPILDDIETAFMFQDRRCTKSQDHGLDRALDQQLITEAREALERGKPVKIDTKITNVNRTVGTMLGHEVTKLYGGAGLPDDTIDITFTGSAGNSFGAFVPAGITLRVQGDANDYVGKGLSGGHLVVRPAPNAPAEFVADQNIIAGNVILFGATSGKAFISGVVGERFAVRNSGATAVVEGVGDHGCEYMTGGRVVILGETGRNFGAGMSGGVAFVYDPNGTFAARVNPEQRDALEPLAGDDFTWLRDIIAEHRDKTGSAVADRILSDWSQQVNHFVKVMPREYKKVLLAISEAEKSGKDVDEAIMEAARG

SEQ ID NO: 605 - protein, 2515 aa, Arabidopsis thaliana
MSTSSQSFVAGRPASMASPSQSHRFCGPSATASGGGSFDTLNRVIADLCSRGNPKEGAPLAFRKHVEEAVRDLSGEASSRFMEQLYDRIANLIESTDVAENMGALRAIDELTEIGFGENATKVSRFAGYMRTVFELKRDPEILVLASRVLGHLARAGGAMTSDEVEFQMKTAFDWLRVDRVEYRRFAAVLILKEMAENASTVFNVHVPEFVDAIWVALRDPQLQVRERAVEALRACLRVIEKRETRWRVQWYYRMFEATQDGLGRNAPVHSIHGSLLAVGELLRVYSLMLEFVCRNTGEFMMSRYREVAEIVLRYLEHRDRLVRLSITSLLPRIAHFLRDRFVTNYLTICMNHILTVLRIPAERASGFIALGEMAGALDGELIHYLPTIMSHLRDAIAPRKGRPLLEAVACVGNIAKAMGSTVETHVRDLLDVMFSSSLSSTLVDALDQITISIPSLLPTVQDRLLDCISLVLSKSHYSQAKPPVTIVRGSTVGMAPQSSDPSCSAQVQLALQTLARFNFKGHDLLEFARESVVVYLDDEDAATRKDAALCCCRLIANSLSGITQFGSSRSTRAGGRRRRLVEEIVEKLLRTAVADADVTVRKSIFVALFGNQCFDDYLAQADSLTAIFASLNDEDLDVREYAISVAGRLSEKNPAYVLPALRRHLIQLLTYLELSSADNKCREESAKLLGCLVRNCERLILPYVAPVQKALVARLSEGTGVNANNNIVTGVLVTVGDLARVGGLAMRQYIPELMPLIVEALMDGAAVAKREVAVSTLGQVVQSTGYVVTPYKEYPLLLGLLLKLLKGDLVWSTRREVLKVVLGIMGALDPHVHKRNQQSLSGSHGEVPRGTGDSGQPIPSIDELPVELRPSFATSEDYYSTVVAINSLMRILRDASLLSYHKRVVRSLMIIFKVLPELFHTVRTSDENLKDFITWGLGTLVSIVRQHIRKYLPELLSLVSELWSSFTLPGPIRPSRGLPISYGEYFASLTDNQVLHLLEHLCLALNDEFRTYLPVILPCFIQVLGDAERFNDYTYVPDILHTLEVFGGTLDEHMHLLLPALIRLFKVDAPVAIRRDAIKTLTRVIPCVQVTGHISALVHHLKLVLDGKNDELRKDAVDALCCLAHALGEDFTIFIESIHKLLLKHRLRHKEFEEIHARWRRREPLIVATTATQQLSRRLPVEVIRDPVIENEIDPFEEGTDRNHQVNDGRLRTAGEASQRSTKEDWEEWMRHFSIELLKESPSPALRTCAKLAQLQPFVGRELFAAGFVSCWAQLNESSQKQLVRSLEMAFSSPNIPPEILATLLNLAEFMEHDEKPLPIDIRLLGALAEKCRVFAKALHYKEMEFEGPRSKRMDANPVAVVEALIHINNQLHQHEAAVGILTYAQQHLDVQLKESWYEKLQRWDDALKAYTLKASQTTNPHLVLEATLGQMRCLAALARWEELNNLCKEYWSPAEPSARLEMAPMAAQAAWNMGEWDQMAEYVSRLDDGDETKLRGLASPVSSGDGSSNGTFFRAVLLVRRAKYDEAREYVERARKCLATELAALVLESYERAYSNMVRVQQLSELEEVIEYYTLPVGNTIAEERRALIRNMWTQRIQGSKRNVEVWQALLAVRALVLPPTEDVETWLKFASLCRKSGRISQAKSTLLKLLPFDPEVSPENMQYHGPPQVMLGYLKYQWSLGEERKRKEAFTKLQILTRELSSVPHSQSDILASMVSSKGANVPLLARVNLKLGTWQWALSSGLNDGSIQEIRDAFDKSTCYAPKWAKAWHTWALFNTAVMSHYISRGQIASQYVVSAVTGYFYSIACAANAKGVDDSLQDILRLLTLWFNHGATADVQTALKTGFSHVNINTWLVVLPQIIARIHSNNRAVRELIQSLLIRIGENHPQALMYPLLVACKSISNLRRAAAQEVVDKVRQHSGALVDQAQLVSHELIRVAILWHEMWHEALEEASRLYFGEHNIEGMLKVLEPLHDMLDEGVKKDSTTIQERAFIEVGNFNPGFLAYRHELKEAHECCCNYKITGKDAELTQAWDLYYHVFKRIDKQLASLTTLDLESVSPELLLCRDLELAVPGTYRADAPVVTISSFSRQLVVITSKQRPRKLTIHGNDGEDYAFLLKGHEDLRQDERVMQLFGLVNTLLENSRKTAEKDLSIQRYSVIPLSPNSGLIGWVPNCDTLHHLIREHRDARKIILNQENKHMLSFAPDYDNLPLIAKVEVFEYALENTEGNDLSRVLWLKSRSSEVWLERRTNYTRSLAVMSMVGYILGLGDRHPSNLMLHRYSGKILHIDFGDCFEASMNREKFPEKVPFRLTRMLVKAMEVSGIEGNFRSTCENVMQVLRTNKDSVMAMMEAFVHDPLINWRLFNFNEVPQLALLGNNNPNAPADVEPDEEDEDPADIDLPQPQRSTREKEILQAVNMLGDANEVLNERAVVVMARMSHKLTGRDFSSSAIPSNPIADHNNLLGGDSHEVEHGLSVKVQVQKLINQATSHENLCQNYVGYVPLHFYTPKPRLL

SEQ ID NO: 606 - protein, 229 aa, Glycine max
WTEIICKSFSYYFTSQAHTAFHFAEPCFSGLLAAPFVPQSNIHHAQLLGMTPARIPLPLDLSEEPMYVNAKQYHAILRRRQYRAKLEAQNKLIKERKPYLHESRHLHALKRARGSGGRFLNAKKLQELKLTSANRGLDVSGCTQLNLSGNMSESKVQAVENLNYRNGASTTTCSDVISTSNSDDVFQQHESDFRLCGYPSHIGRNMQGYSADIGGGGGGGNQHRLSVLM

SEQ ID NO: 607 - protein, 1629 aa, Arabidopsis thaliana
MALQSPGATGASSSVSRLLSSAKLSSTKTIFSVDFVRSYCISKGTKRRNELSGFRGYSPLLKSSLRSPFSVKAILNSDRAAGDASSSFSDLKPQVAYLEDIISERGACGVGFIANLENKATHKIVNDALIALGCMEHRGGCGSDNTSGDGSGLMTSIPWDLFNEWAEKQGIASFDRTHTGVGMLFLPRDDNIRKEAKKVITSIFEKEGLEVLGWRDVPVEASIVGHNAKQTMPNTEQVFVRIVKDDKVDDVERELYICRKLIERAVASESWASELYFSSLSNQTIVYKGMLRSEVLGLFYPDLQNDLYKSPFAIYHRRFSTNTSPRWHLAQPMRFLGHNGEINTIQGNLNWMTSREASLRSPVWHGRENDIRPISNPKASDSANLDSAAELLIRSGRTPEESLMILVPEAYKNHPTLMIKYPEAVDFYDYYKGQMEPWDGPALVLFSDGKTVGACLDRNGLRPARYWRTSDNVVYVASEVGVLPMDESKVTMKGRLGPGMMISVDLENGQVYENTEVKKRVASYNPYGKWVSENLRNLKPSNYLSSAILETDETLRRQQAFGYSSEDVQMVIESMAAQGKEPTFCMGDDTPVAVLSQKPHMLYDYFKQRFAQVTNPAIDPLREGLVMSLEVNIGKRGNILEVGPQNVSQVVLSGPVLNERELEGLLGDPLLKSQILPTFFDIRRGIEGSLKKGLLKLCEAADEAVRNGSQVLVLSDRSDNPEPTRPAIPMLLAVGAVHQHLIQNGLRMSASIIADTAQCFSTHHFACLIGYGASAICPHLALETCRQWRLSNKTVNMMRNGKMPTVTMEQAQKNYRKAVNTGLLKVLSKMGISLFSSYCGAQIFEIYGLGNEVVEFSFRGSASQIGGLTLDELARETLTFWVRAFSEDTAKRLENFGFIQFRPGGEYHGNNPEMSKLLHKAVREKSETAYAVYQQHLANRPITVFRDLLEFKSDRNPIPVGKVEPASSIVERFCTGGMSLGAISRETHETIAIAMNRLGGKSNSGEGGEDPIRWKPLTDVVDGYSSTLPHLKGLRNGDTATSAIKQVASGRFGVTPTFLVNADQLEIKVAQGAKPGEGGQLPGKKVSAYIARLRNSKPGVPLISPPPHHDIYSIEDLAQLIFDLHQVNPKAKVSVKLVSETGIGTVASGVAKANADIIQISGYDGGTGASPISSIKHAGGPWELGLAETQKTLIGNGLRERVIIRVDGGFKSGVDVLIAAAMGADEYGFGTLAMIATGCIMARICHTNNCPVGVASQREELRARFPGLPGDLVNFFLYIAEEVRGILAQLGYEKLDDIIGRTDLLKARDISLVKTHLDLSYLLSSVGLPKRSSTSIRKQEVHSNGPVLDDTLLQDPEIMDAIENEKTVHKTMSIYNVDRSVCGRIAGVIAKKYGDTGFAGQLNLTFTGSAGQSFACFLTPGMNIRLVGEANDYVGKGMAGGEVVILPVESTGFRPEDATIVGNTCLYGATGGLLFVRGKAGERFAVRNSLAQAVVEGTGDHCCEYMTGGCVVILGKVGRNVAAGMTGGLAYILDEDNTLLPKMNKEIVKIQRVTSPVGQTQLKSLIQAHVEKTGSSKGAMIVEEWDKYLAMFWQLVPPSEEDTPEANSDHILKTTTGDEEQVSSTLAEK

SEQ ID NO: 608 - protein, 526 aa, Rhodococcus sp. RHA1
MIRWLVIAGAWVLGSASLLLVFFVSAWWLLGTVIVAAIAMVGAWDLLQRRHSVLRNYPVIGHARFMLERIRPEIQQYFIERSTDGTPFDRDTRTTVYERAKGTKDVEPFGTERDVTATGYEFVTHSLRAHPASDDTPHVRIGGPQCTMGYDIALYNVSAMSFGALSGNAIEALNGGAARGGFAHDTGEGGISPYHLAQVGDLIWEIGSGYFGCRDADGHFDPGEFAAKAALPQVKCISIKLSQGAKPGLGGVLPAAKVSPEIARTRGVPVGQSVISPPSHSAFCTPLELIDFITTLRALSGGKPIGFKLCVGSRTEFLAICKAMIETGITPDFIIVDGSEGGTGAAPLEFEDHVGMPLTEGLMLVHNALVGTGLRDRIKIGASGKVANGIDIIKRLIQGADFTLAARAMMFAVGCIQAQRCHTNRCPVGVTTQDARRARALNVPDKTTRVYNLQRSTVASAQQILASMGLDDFCDLDPSMLHRRIQGHRTMTYADLHEWLQPGDLLTEDPPTSWLRDWTNADSSRF

SEQ ID NO: 609 - protein, 331 aa, Syringa vulgaris
VYTNSTGNSGTSSRPNYEGYLFDPYDVRWFRITFPLIPSGFSPASSSGGLSCWVSEEAGSKSILLCNPLLGSLIQLPSTLRPRLFPSIGLTITNSSIDMAFAGDDLISPYAVKNLTSESFHIDEGGFYSIWGTTASLPRLCSLESGQMVPVKGRFYCMNYSPFSVLAYDIALNNWCKIQAPMHRFLRSPSLVESRGKLILIAAVEKSKLNTPKSLRLWALQECGTMWVEIERMPQQLYIQFSEVEGGQGFNCVAHGEFVVILIQKSEKALLFNFSRKKWLWIPTCPYNVNGVGNAAENGNELQGFAYEPLLATPIAAILEQLTLPFQPFSA

SEQ ID NO: 610 - protein, 1506 aa, Leuconostoc mesenteroides subsp. mesenteroides ATCC 8293
MKQSKLREQMVKNAPLWDESLEHDACGMGFIAQRYGQFSHELVERAITLLTRMNHRGGTGSEPDTGDGAGLLMSIPDKFFRKVARIEGITLPQSGEYAVAMLFLPFDTVAKNKVLDKIITEISADGFEYIFDRDVPFDFDACGPTAQQAMPGFRQIFIKKPQHVALGRDFDDALYTLRRHLEDTISDEDMYIVSLSAKTITYKGMLHAYQVGQFFLDLHDEDVEAKIALTHSRFSTNTFPSWDRAQPFRFLAHNGEINTLQGDVNWMKTHGVAIYNEENSDSAMMENTMEHLYRHGRSIPQSLLMLVPEAHSKEANVSDELAAFTEYNESFMAPWDGPAAVVFTDGNIVGARLDRNGLRPSRYLVTDDGYVILSSESGVVDVPANSIIEKGVLGPANMILVDTTTGTFTRNEELKHHFATQYPYRQWLDEYQETLQDLPNQNLLEQRLNDKERLTLFKRFGYTQEVIDGAVLKMANTGQEPTVAMGYDSPLAILSDRPQGLFTFFKQQFAQVTNPPIDALREHLVIATQMYLGREVDFQRDLPENASKLKIDSPILSPADFAKIAHISNSKQKVALIKLAYNLTGLANGRLERALIGINQQADAAIASGATILILSDREVTKNQLTVPALLAVSSLKNYLAANGNATNASIVLNTAEAIETHHFATLVGYGAAAIYPRGAYRILEAYDMNDATHQENYRVAAEKGIVKIMAKMGISTIQGYYGAQLFEAIGLSKNVVDTYFTGTHSRIGGLDLNQIEEEYLKRYTTAYDESQDDPIPSGGAYSLREDGEYHLYNQMMMYKFQTAVRTGNEELFKEYVADIHEAEHEHPGTIRSMWEIVPNRQPIDIHEVERIENIVKRFKVGAMSFGALSQEAHETIAEAMNRLGAKSNSGEGGENRKRFHTIKNSKIKQVASSRFGVNAEYLMSAEEIQIKMAQGAKPGEGGQLAGNKVFPWIAETRGSTPGVRLISPPPHHDIYSIEDLKQLIFDLKAVNPYAKINVKLVSSTGVGTIATGAVKAGADTVTVSGYDGGTGAAPRNSIRDAGLPWELGLAETHQILSANKLRQRMTLETDGKLLTGRDIAIAAMLGAEEFSFATLSMVAIGCIMMRVCHLNTCPVGITSQNPLLRSRFQGKPEDIINMMTFLAQDLRELMAELGFRTLEEMVGHTELLKTRFTTNKKYKSLDFSNMIGQVIPIARKTKDPFIAKRQWPELDMAAKAAIDNTQTLTMSAPIDNVSRAVGARMGGWIAERYGNTKLSPGLLRYTYTGSAGQSFAAYTTQGMELKVIGEANDYVGKSLSGARLIVTPPKDAGYDTNNSPIIGNVACFGGFAGEAYFHGRAGERFFVRNSGVCGVVEGVGDHGCEYMTGGVAVILGKIGRNFAAGMSGGIAYIYDPDHQAAANINLEMVDLFEINQTHGDDVLYSLLQSHAAYTDSQKAKDILAHFEDEKANFIKVYPTEYHQVLNIMNKYETEGFSGLTKELKAFNELMPEYERVPETEEELETLLSK

SEQ ID NO: 611 - protein, 1477 aa, Cyanidioschyzon merolae strain 10D
MRLPSPLPKNLTYCLTQFHGYAWLSKERDACGVGFICDLNAKPTHSILERALEALTLMEHRGACSADGESGDGAGLLTQIPWKMLRKQYSNLPNQVALGMVFLPHYAAEEAKHLLNHVISQNHSQVLHWRKVACVPEVLGPMAAQYVPQIEQVIITYESEFQLYLLRKQIEKAVSGLSWASDFSICSLSSQTVVYKGMVKAAVLSQFYQDFRHPDFETTFAIFHRRFSTNTMPKWSLAQPMRMLAHNGEINTLLGNLKWMHAQERRIQMSVTNPALSDSANLDAAAELITHLAGHSCAESLMKLIPEAFPPATSVADFYKYYEAIQEPWDGPALIVFSDGNQVGATLDRNGLRPARYWITHDDHLVLASEVIPYSKYRIHSRLAPGEMITVDVTTGQLKLNQELKTQIAQTRDYTRLIEQGLLQLKTYNFQNDLNWSSSKLLQWQTCFGYTSEDVELIIEHMASQGKEPTFCMGDDIPLAVLSGKPHVLYDYFKQRFAQVTNPPIDPLRENLVMSLNTYLGKKPPVWETKTYRILQLTSPILNEHQLEQIHQLFPTSILSTCFDAQISLRQAIEQLCEKAAKASETCEILVLSDREFQSESKSESTSQDTYIPPLLALGAVHQHLIRKGCRMEVSLIVDTAQCWSTHHFACLLGYGAEAVCPYLALETVRHWWHEPTTNTLMSSGKLVSYNLHEVQHNYIKAVQNGLLKILSKMGISCVSSYCGAQIFEIIGLHAEVVNLAFEGSVSRIGGLTLEELQAEVLQLSGATVSKKLPNVGFVQYRPGGEYHVNNPQMAKALHKAVRQWDSHAYEAFKNLMLNRPATALRDLLRIESDRTPIPLDEVEPIEKITSRFCTGGMSLGALSRETHETLAIAMNRLGGKSNSGEGGEDVLRYKPLTDVDETGHSPTFPHLKGLKNGDSLSSAIKQVASGRFGVTPEYLVNAKQLEIKIAQGAKPGEGGQLPGKKVSGYIAKLRGCKPGVPLISPPPHHDIYSIEDLAQLIYDLHQINPNAQVSVKLVAEAGIGTIAAGVAKAKADIIQISGHDGGTGASPLSSIKHAGVPWELGLVEVHQTLVENQLRDQVLLRVDGGLRTGHDVIMAALLGAEEFGFGTVAMIASGCIMARICHTNSCPVGVATQKEELRARYPGVPEAVVNYFRFVAEEIRFELARLGYKSLEQILGRSDLLRVNTTSSVKTSHLQLEWLCQKPAKWKTHKHVHTNGKGLDHELWQMTKDTVEQQAQFTAHLSITNTNRSVGAYLAGRIASKYGNEGFQGQIQVNFYGVAGQSFGSFLVKGLNFRLVGEANDYVGKGMNGGEIVIVSNAKVVLGNTCLYGATGGYLFARGCAGERFAVRNSNAIAVVEGVGDHGCEYMTGGLVVVLGECGRNFAAGMTGGLAYVLDEDLENKINGEIVKIQRIVTEAARVQLKHLISLHAYKTGSPKAQQILEQENWEKFWQVVPPSESNLPETNPEIMIKLS

SEQ ID NO: 612 - protein, 359 aa, Chelone glabra
FLELYLEASPHLHMFLFFKQHKGSSSYNIFKSNNTSGGSTVAYHDHHQSEEGYLFDPQNLKWYRLSNFFPSIPPGFSPVSSSGGLICWVSSSELGSKTILLSNPLMGSVTHQLPSTLMPRLCPSIGLSITNSSIDLVFAGDDLISPYAVKNLTSESFHIDGGGFYSIWGTTASLPRLCSLESGRMVHVGNRFYCMNYSPFSVLSYDISANQWCKIQAPMRRFLRSPSLVENRGKLILVAAVEKSKLNVPKSLRLWALQECGTMWVEIERMPQQLYIQFADIEGGRGFNCLAHGDFVVILIREKTLLLFDFTTKRWAWIPPCPSGDEDHELHGFAYEPRLAVPITALLQQLTLPFHPFTA

SEQ ID NO: 613 - protein, 596 aa, Bacillus cereus G9241
IGKYPHTRGQQVASGRFGVNAELLNSSNLIEIKIGQGAKPGEGGHLPGSKVTAKIAEARNATIGSDLISPSNNHDIYSIEDLAQMITEIKTANQLAKVAVKVPVVPNIGTIAVGIAKAGADFINISGFDGGTGAARIHALQHVGLPVEIGVKAAHNALLEANMRHKVEIWADGGIRSVNDALKIMLLGANRIGFGTLSMIAIGCTTCRGCHLDTCHVGIATQIESEAQAKEHGLRRFVPRELESAVAGLLHLFTTFGEELKRLTGNLGYTNLQEIVGRSDLLEQVRGKNLLDLCNLLQTIEHPSVTKTEHVPEKQFETIHSPHSKELVGVGVEQRVMGGLESCYRVRSKLYEDTKLEPLTLKYTNGSIPGNGLGAYNSENLFIHVNGGAQDGIGKTSFGGGIYITKAKGKDGLYYNGSVGKGFGYGAQKGALYVQGNADARAGIRLSGADMIIGGRMTKPLRKKEQGNIGAYSNIKGFAFEYMTNGRALVLGDPGPWICAGMTGGVVYLRHDSSLGLTEQALKRRIAKGANVTLQPISKNGVQDVTELLLDYIRVLNEHEQYEEVALLTTLFDDIQQQFFEIIPKKEQADPSISTE

SEQ ID NO: 614 - protein, 524 aa, Bacillus cereus ATCC 14579
MSETLLVIISILLFLMLLLIVFFIITFFIKKRTHHSILKLHPYLGRMRYLLEKIGPEFRQYWFDHDTDGKPFSRYDFQSVMFLAKYRSEILGFGSKRDFEASGYYIANTLFPILTEELSVNLTQEREGKKYVIHKEGLFSRREKLTADTTNLWLYEEDDAIIVGENRKYPWKLHGMFGASATSYGAIGENYILASGLGAKMAGGSWINTGEGGVIPEHLHTGANIVAQIGPGLFGYRDEDGNFSMGKFMEKVKESNIRAFELKFGQGAKIRGGHLEGQKVNEKIAFVRNVRKGETINSPNRFSFLKNAADTLYFIQQLQESGGKPVGMKIVIGQQKPLEDLIKTMKELNIYPDFITIDGSEGGSGATYKSMADCMGLPLIPALLTFIDTANHYGVRNKFKVFASGKLITPDKVAIALAIGADAVSSARGFMMASGCIMALQCNSGQCPSGVATTNPHYQKALDPYEKKWRVMNYIISMRYSLFSLAAAAGVKSPRHLNREHIVFKDEVGRVVPLSELFPIVNQT

SEQ ID NO: 615 - protein, 1500 aa, Robiginitalea biformata HTCC2501
MEKQGLYLPEFEHDNCGAGFICSLKGKKSNDIIHKALEILEKLEHRGAVSADGKTGDGAGILIDIPHEFFTEVCSFELPEPGTYAVGNVFLPQKENQRDYCTTLFGENLEAQGLRLLGWRDVPVNRRVPGRIAAETEPFVKQVFVGKAAEDQDDFAFERKLFVARKKTEHAIIASKLSERGFFYLPSLSTRIIIFKGLLMPMDIKLYYKDLMDPRVVTRLALVHQRFSTNTFPTWDLAQPFRYMCHNGEINTLRGNVSRMHSRESLFQSDLFGEEIKEILPVILPGKSDSATMDMVVELLLMTGRSLPEVMMMLVPEAWEKNPDMSEAKRAFYEFNSCLMEPWDGPASIPFTDGNYIGAVLDRNGLRPSRYSVTRDGYVVMSSETGVLELEPENIAFHGRLEPGKMFLVNMEEGRIVNDEEIKEAIAGKHPYAKWLKKNLVHLRDIPYNDCPLFLDEETLEKRKAAFGYTLEDINTIILPMAKAAKEPIGSMGSDTPIAVLSERPQLIYNYFKQLFAQVTNPPLDGIREELICDISLTLGTDHNLFDISPLQCRKLKIQNPVISKEDLDKIKNYDSSPDYKVVSIPILYEISKGLNGLENALEAVLTKASRAIDQGANIIILSDRNVSKDMAPIPALLACSYVNSGLQRLGRRSKLSIIVESAEPREVHHFALLFGFGASAINPYLVNEIIAEQIEEHDIQDVSREEAIRNYNKAIGKGILKVMNKIGISTLNSYRGSQLFECIGLNTQMVEKYFPNTPTRIQGIGLYEMEKEIALRHHKAFDRKELAANLDLEIGGEYRWRRDGEKHMFNPLSIAKLQKAVRLNEPSTYKEYAELVNEQTKSLMTIRGLFEFSNYDPIPIEEVEPWTEIVKRFKTGAMSYGSISKEAHENLAIAMNRIGGKSNSGEGGEDAERFYRSQTGDWRNSAIKQVASGRFGVTSNYLTNAREIQIKMAQGAKPGEGGQLPGPKVNPAIAKTRNSTPYVGLISPPPHHDIYSIEDLSQLIYDLKSANREARINVKLVSEVGVGTVAAGVSKAKADVILISGHDGGTGASPLTSLKHAGLPWELGISEAQQTLVMNDLRNRVVLECDGQLKTGRDVAVACLLGAEEFGFATAPLVASGCIMMRVCHLNTCPVGIATQNPELRKKFEGKPEHVVNYMYFVAEELREIMAKLGFRTVDEMVGQVQKLDRRKAIDHYKARGIDLSPILHQVPVPIGTKFYNTVKQDHNIEKSIEFEIIEKAHLALFRKEKTSLDFPIHNTDRAVGAIISNEISKIYGAEGLPENTLRLNFTGSAGQSFGAFATRGLTMIVNGNTNDYLGKGLSGARLIIKVPGGSTIRPEENIITGNVCLYGATSGEAYINGKAGERFCVRNSGARAVVEGIGDHGCEYMTGGVAVILGEVGRNFGAGMSGGIAYVLDRNKTFERNCNKEALNLLKVEEDQDIAELRGMIEDHYNATFSPLAQEVLEKWETYLPQFIKVFPEEYRQALIRLENEKLETI

SEQ ID NO: 616 - protein, 542 aa, Herminiimonas arsenicoxydans
MRDFPLRYLALMIAGCVFAVSLIMALQFDRGWWLVILSGALTTVGIADLSQSKRALLRNYPILAHFRYMFESVRPEIRQYFLEDDAAPNPFSRNQRSLVYQRAKQAIDKRPFGTQMDVYQDNYEWINHSIMPAKLASHDFRITIGAERAQPYSASVFNISAMSFGALSANAIRALNQGAQKGGFMHDTGEGSISRYHQPENAVDTGGDLMWEIGSGYFGCRSEDGSFSAEKFAVNANLPQVKMIEVKLSQGAKPGHGGMLPGAKVSIEIATARDIPEGVDCISPSSHSAFDTPTGLLQFIEQLRNLSGGKPTGFKLAIGHPWEFFGIVKAMLHTGITPDFIVIDGGEGGTGAAPVEFTDHVGVPLQEALLLAHNTLVGTKLRDKVKIGASGKIITAFDIVRTIALGADWCNSARGFMFALGCIQSQSCHTDRCPTGIATQDALRQRALVVPDKAERVANFHKNTLKALAELIAAAGLHHPSELKPHHLVRRVSANQVKLASALLPYLESGQLLSEAQATSELPEVFAKYWPIAQAESFHPIR

SEQ ID NO: 617 - protein, 369 aa, Verbena officinalis
IFSNTFLALYLHSSPHRHWFLFFEQKSLKSHIYRNNTTVNNGSTDRANYEGYLFDPENVKWYLISFPLIPPGFSPSSSSGGLICWVSEDSGSKNILLCNPLVGSLIQLPSTLRPRLCPSIGLTITNTSIDLAFAGDDLISPYAVKNLTSESFHIDGGGFYSIWGTTSSLPRLCSLESGRMVHVEGRFYCMNYSPFSVLAYDISVNQWCKIQAPMRRFLRSPSLVESRGKLILVAAVEKSKLNVPKSLRLWTLQDCGSMWVEIERMPQQLYNQFADIEAGRGFNCVAHGDFVVILIKGSDKALLFDFVGKRWVWIPPCPYINGGGCGGDGVGGEYIGRDELHGFAYEPRLAVPITALLEQLTLPFNSFTA

SEQ ID NO: 618 - protein, 2979 aa, Physcomitrella patens subsp. patens
MATATNLHTIFHNVLHKVELSFEVLSQMPIEEETFRSVKFHGDLKKLLATLKEKDFTPPLAKLQEMKKKRTDLKRRRRRRRRILKESCHEGETPRSRPPMLTAHSTHSEAGLPACLARHPNPQENQCDGDGRTDGRMPKNEQTNERAINGASSTTTTTNASDRWLSRGRSIRINPCRARVSGDHVAVVAYSNSTPVGSTAGGGGEGGAWQPGKGKGKGRAAPGLGGEFLRRRPPLHPSTPLYPGSAVLWSAGGEQSSRPFRVGEEEELEEKEHGRRRLRPRLDIKEEEQEQEDEEEEGGERKKKGGERKKKGGERKEKGGGGGEGGLGRGGGAAADGGYGDDGGICNGVFHVEGTVGMGPHRAPDSLRRLLEGSSQNLAKHVEEEARDLGGEAFTRFMDNLYDKIQTLAESDEVRDNLACVRAIRELIDLQLGEIATKIAKFASNLRHIFEHKTDSEVLVNASRALGHLAATGGALTADVVEYQLQKLDDSSTLLSYLNPNHSAHCTNLLNKRLATLDAYVKVERRVTYTCLQVKKSLEWLQEPRVENHRFAAVLILKACNFTCSALSFFPGSAWLAHLEMAENAPTVFNVHVSDFIEAVWVALRDPKMQVREAAVKALRACLCVIEKRETRWRVQWYYRMFERTQDGLGPSASVESIHGSLLAVGELLRNTGEFMMSRYKEVASFVLKYREIRNPLVRQSITALLPRIAHFLRDRFVSSYLKICMDHLLNVMRKADERESGFHALAEMASAVGKELKEYLPIIMSILKDAINPPRRGRPSLEAVACVGALADAIGPDMKPYVEGLLDSMFALGLTPTLVHALKQISSRIDSLLPVIQERLLDSISFVLAKTPYRTTRGVTPVVRPLKNAWMPSTMDISGPALTQLALNTLTNFDLRGHELLEFAREAVIVYLEDDDAATRREAAECCSHLVEHSSKIVELIAITPVVVNTRSGRTTGVGIRRRRLLIEEILEKLLVAAVADPDVGVRKTVFLSLHKYHSFDEYLAQADSLRAIFIALTDEAYEVRELTITMAGRLADHNPAYVLPALRRHLVQLLTDLRHSADSKSREESAKLLGCLIKACERLMGPYIDPVLRTLLEKLQEGSVGTGNNGVIAGVLATVGDLAKVGGCTLRRYMPDLMRPIVEALMDGTSFSKREVAVATLGKVVESTGYVVRPYTEFPHLLGLLLRLLNSDLSDSARREVLKVLGIIGALDPHQHKRNQQFLPGPHGEGARVNGAESGTHNAQSLEEVPVELLQSGGLLTTNEDYFPTVAIKALLRVLRDPTLSSYHHRVVGSLMYILKSMGLSCVPYLPKVLPELFFTIRNCEDVLREFSFWQLASLVSIVRQHIRKYLGEILKLVHEYWNLLMLPLSPRTGPSMLHTNAKAGNISPVLNLVEQLSLALNDEFRGYLPEFLRLCVTVLTDAERTGDYKKVPPVLHTFEVLGGSVDEHMYLILPALVRLFRPDVSNAPLEIRRAAIKTLGRLLPCVQVSGLVSSVLLPLTRVLDGSINELRKDAVDTICALAVAMGADFAYYVPSVRKPMLRHHHPQFDALETRLNRREPAYMDVHSTPPATVPPVVAYGSIPSSPSFHNLNWDGEVCDGENFDSSGNSRPLTVNEGALRIAWESSQRSTKEDWTEWMRHFSVELLKESPSRPLRTCAGLAQLQPFVARELFAAGFVSCWSQLNLQHQEQLVRSLVIAFSSPNIPPEILASLLNLAEFMEHDEKPLPIDIRTLGQLAEKCHAYAKALHYKEMEFEGAQSMDSDAIQALTVETQPQPVSAVEALIHINNQLNQHEAAMGILTYARKHLRVDLKESWYEKLQHWELALEAYKKKALQCQSNPDELQSATLGLYLGASLARWEELSILCRDSWNPVEVSRCHEMAPMAASAAWNMGNWKEMEKYVTLLEDGTNTQVHLPTLNTSGSGNGASDGAFFKAVLCVRRSVDAKRQSDAVDPNSPRYRELIAGFNREINESMQEASQCVQKARNCLATELAALVLESYDRAYSNMVRVQQLSELEEVMEYLSLPSPKEPRADLIRKMWRDRMHGTKRKVEVWQSLLAVRTLVLPRTEDTETWLKFASLCRKSGRDRQARSTLVKLLQYDPETSPPDDLPFASAPQVMLAYYKYQWSLGDETQRRDAFLRLQEIAADLTEQNVAEVSGLFMPNASSDVSSTVGGVPLLARVHLKLGAWRWHLNPSLDDETVRGILKDLSSATQYASKWAKAWHKWALFNTALIVSYTSRGQHAAAGRHVVLAISAYFRSIANGAADNGRDGCLQDILRLLTLWFYHGASRDVQDALQKGFDLVPVETWLAVLPQIIARIHSNTPAVRTLIQQLLVRIGRSHPQALMYPLLVACKSISTLRQKSAQYVVDQVRHHSGTLVEQAQLVSKELIRVAILWHEMWHEALEEASRLYFGERNVDAMFNCLQPLHALLEREGPVTVKEQQFVQNYGRELAEANECCTKYKRTGKEAELTQAWDLYYHVFKRINKQLPSLTTLELQTVSPELLEARNLELAVPGTYRAAAPLVKIAGFSHQLVVITSKQRPRRLTIQGDNGKNYDFLLKGHEDLRQDERVMQLFGLVNTLLGNSRLTAEKDLSIQRYDVIPLSPNSGLIGWVPNCDTLHHLIREYRDARKVLVNAEHRTMLGFAPDYERLTLMAKVEVFEHALDNSLGNDLAKVLWLKSRSSEVWLDRRTNYTRSLAVMSMVGYLLGLGDRHPSNLMLDRHSGKILHIDFGDCFEASMNREKFPEKVPFRLTRMLVKAMEVSGIEGNFRSTCENVMQVLRTNKDSVMAMMEAFVHDPLINWRLFTLPEPPHITGQGRAGGHGNTEEGNRTSNIPSPPQRGARERELLQALGQLGDANEVLNERAVAVMARMSNKLTGHDFMPTSTASHLLEPRGDGRELEPGLSVKTQVQKLITQAMSHENLCQSYVGLQKFGYTVLSVTLFGPECTLHGRLNGALRMSPTSEAHTSTLCRDA

SEQ ID NO: 619 - protein, 1521 aa, Myxococcus xanthus DK 1622
MSAFRPGRYGLYEPDTEHDACGVGFVAHLRGERSRGIVEDALELLNRLSHRAAAGRDPRTGDGAGILVQLPHRFFERESPKLPFALPPRRHYGVGQVFLPPEPEARAACEAAFEEVVVQEGQRVLGWRDVPVNPEHLGPVAREAAPVIRQLFVARRRMVPSAFERKLYRIRKLTENLIQARGVDPKGRFHVASLSSETLVYKGLMLPVDLPRFYSDLQQPDFVSALGLVHSRFSTNTFPTWELAQPFRFIAHNGEINTMRGNRNWMTARRGLLQTARLGGSLEALQPIIVPGKSDSAQFDNMVELLYLGGRTLPHALMMMIPEAWEGDALMSDERRAFYEYSSALLEPWDGPAAIAFTDGQLIGATLDRNGLRPARYLVTEDDRIILASEMGVIDVPPSQVRRKGRLTPGRMLLVDTTEGRILEDEDVKRDITTRWPYRRWLQRNVYTFDNLPSVAAPVRLRGEELWRAQRAFGYTAEDVRSVLTPMAETGKEPVGSMGTDTPLAVLSDHAPSLFSYFHQLFAQVTNPPIDPLRESLVMTLATALGPESNTFEETPEQCHRLSLPGPILTNGQLARLAAINDEGLFETRRLSLLYALDGGEGALEAAVEKLCNEAVDAVDAGASILLLSDRGVDAAHAAIPALLAMSAVHQRLVRDGIRMYTGLLLETAEAREVHHFACLFAYGAAAVNPYLALDTLRALADSGELAVDAEKAQDRFIRAVEEGLLKVMSKMGISTLQSYRGAQLFEAVGLQRSLVERHFTDTASRVEGVGLPELGREVAERHARGFGAEADAEAGMLPVGGQYRWRRLGERHKWNPATIAKLQAAVRANDAATFAEYSRLADDETREHSNLRGLLEIAHEGRTPVPLDEVEPALSIARRFVTGAMSFGSISAEAHETLAIAMNRLGGRSNSGEGGEESRRYTRDENGDLRRSAIKQVASARFGVTTEYLVNADELQIKVAQGAKPGEGGQLPGHKVDERIARVRWSTPGVTLISPPPHHDIYSIEDLAQLIYDLQSVNPAARVSVKLVSEVGVGTIAAGVAKAGASCVVISGYEGGTGASPLSSIQHAGLPWELGLAETQQVLVHNGLRSRIRVQADGGMRTARDVLVATLLGAEEFGMATASLVAVGCIMLRKCHLNTCSAGIATQDAGLRERFQGKPEDVVNFFLLIAEDLRQRMAALGARSLQELVGRVDLLRQRPAVDHWKAKRVDLSGLLAAPAAPDSEPRHCTEPRIKDVSDHLDHALLRDASAVLDGGPPMLLNVPVANTHRAVGALLSGEIARRHGGQGLPDGRLHVRMKGSAGQSFGAFVVKGVTLELEGDANDYVGKGLSGGRIIVYPPQASRFTAEDNVLVGNTALYGATAGEVYLRGLAGERFAVRNSGAQAVVEGVGDHGCEYMTGGAVVVLGPTGRNFAAGMSGGIAYVLDREQSFRQRCNLEMVDLESLVDESEIWLVHGMVERHLHHTGSALARRVLDNWELMVPRFVKVMPTDYKRVLQARRAARRPPEPTSAALPQSAAGRA

SEQ ID NO: 620 - protein, 510 aa, Methanocaldococcus jannaschii DSM 2661
MIPSYVPPKYKVEVDPNRCMLCERCTIECSWGVYRREGDRIISYSNRCGACHRCVVMCPRDAITIKENAISWRSHPLWDVDARVDIYNQAKTGCILLSGMGNAKEHPIYFDKIVLDACQVTNPSIDPLREPMELRTYIGKKPKQLEFEFVEEEIDGKKIKKAKLKTKIAPNLKLDTPIMIAHMSYGALSLNAHLSFAKAVKECGTFMGTGEGGLPKALYPYADHIITQVASGRFGVNEEYLMKGSAIEIKIGQGAKPGIGGHLPGEKVTAEISATRMIPEGSDAISPAPHHDIYSIEDLAQLVRSLKEATRWKKPVFVKIAAVHNAPAIAVGIATSDADAVVIDGYKGGTGAAPKVFRDHVGIPIEMAIAAVDQRLREEGLRNEISIIASGGIRCSADVFKAIALGADAVYIGTAAMVALGCRVCGRCYTGLCAWGIATQRPELVKRLDPEVGARRVANLIKAWTHEIKELLGAAGINSIESLRGNRDRLRGVGLNEKELEVLGIKAAGE

SEQ ID NO: 621 - protein, 352 aa, Salvia coccinea
FSTAFIELYLQVSPSRHWFIFFKQQGIKNCIYKNAASAAASGGGEAFLFDPENLKWYRLGIPMIPAGVTPASASGGLVCFVSEESGSKSIVLCNPVMGNLIQLPSTLRPRLCPSIGLTITNSSIDLIFAGDDLISPYAVKNLTSESFHIDGGGFYSIWGTTAALPRLCSLESGRMIHVAGRFYCMNYSPFSVLAYDVVSNQWSKIQAPMRRFLRSPSLVESRGRAVLVAAVEKSKLNVPKSLRLWALQECGAAWVEIERMPQQLYNQFAEVEWGRGFDAVAHGDYVVVVIKGSERALLFDFGGKRWSWICPCPYGSGGGEEELRGFAYEPRLAVPITGLLEQLTLPFNSFAA

SEQ ID NO: 622 - protein, 1532 aa, Synechococcus sp. WH 5701
MPFHRRSVWPHCDSPAPREVAGEKDACGVGFLAQLSGEPSHWLLEQALRGLGCMEHRGGCGGDGDSGDGAGVLCGIPWSYLEEVWPESALAAEGRRGLGMVFLPVAEPKRQEYKRLCEQAASLVGLRSLGWRDVPVEPSVLGPLALQTAPRIEQWLVEGPEPGDALESLLFRCRRRAVDLVRAAPGGDPNDLYFASFSGRTLVYKGMVRSEVLAAFYADLRDPRFAVSFAVYHRRFSTNTLPRWPLAQPMRTLGHNGEINTLLGNINWAQAAESHLDAVWGEAASDLKPVVNAAFSDSANLDAMLELMVRSGRPITDSLLTLVPEAFRQQPELEARPDVRAFYEYSACLQEPWDGPALLVFSDGRTVGATLDRNGLRPARYCITSDGLVVMGSETGVVEIEESRIVEKGRLGPGQMLAVDLEQGRLLQNWQVKEEVASRYPYAAWLQEHRRSLEPQPWRTEHQLGDLDLLRHQTAFGFTAEDLDLVIEEMAAQGKEPTYCMGDDIPLAVLSDKPHLLYDYFKQRFAQVTNPPIDPLREELVMSLEMHLGRRGSALRPDPSAASVLHLATPVLNESDLEALPSQGLATTTLTTLYGLDQGPAGLEAAVQRLCQAAEQAVQNGSQILVLSDRAAEGLSATTTFIPALLAVGAVHQHLLRLGVRLHCSLVIDTAQCWSTHHLACLIGFGASAVCPWLTWETTRHWLDHPKTRSLMERGKLPAIDAAKAQANVRKALEAGLRKILSKIGISLLASYHGAQIFEAIGIGADLIDLAFRGTTSRVAGLSLRDLANETLAFHAKAFPELNRTKLEFMGFVQYRSGGEFHLNSPEMAKALHAAVAAGPGYDHFATYRTLLENRPVTGLRDLLELRPAPTPLPIEQVESVESICSRFCTGGMSLGALSREAHEVLAVAMNRIGGKSNSGEGGEDPARYHPLTDVDADGRSATLPTLRGLVPGDSACSAIKQVASGRFGVTPEYLRSGQQLEIKVAQGAKPGEGGQLPGPKVDAYIGWLRNSKPGVALISPPPHHDIYSIEDLAQLIHDLHQVHPAAKVSVKLVAEIGIGTIAAGVVKANADVIQISGHDGGTGASPLSSIKHAGSPWELGLSEVHRSLLANGLRNRVLLRADGGLKTGWDVLMAALLGAEEYGFGSVAMIAEGCIMARVCHTNNCPVGVATQKEALRKRFTGLPEHVVNFFLYVAEEVRQLLSVLGVARLEDLIGRVELLHPRQVALAKTSALDLTCLLAPLPGSDDRSWLRHDSQAHGNGVILEDQLLVDPEVLAAIEQHGQVVRRLPIVNTDRSVGARLAGEVAARHGNKGFKGLLDLCFEGAAGQSFGAFNLQGMNLRLEGDANDYVGKGINGGRITVVPYAATRDPGNQVILGNTCLYGATGGELFALGRAGERFAVRNSGARTVVEGCGDHCCEYMTGGVVVVLGSTGRNVAAGMTGGVAFLLDEEDALAGLLNPEIVSVHPLETPEQEQLIKPLLEAHLELTGSRKAAEILANWPQWRSRFKVLVPPSEVATVGLLEREKLAMAS

SEQ ID NO: 623 - protein, 1557 aa, Synechocystis sp. PCC 6803
MSFQYPLLAPMTNSSVATNSNQPFLGQPWLVEERDACGVGFIANLRGKPDHTLVEQALKALGCMEHRGGCSADNDSGDGAGVMTAIPRELLAQWFNTRNLPMPDGDRLGVGMVFLPQEPSAREVARAYVEEVVRLEKLTVLGWREVPVNSDVLGIQAKNNQPHIEQILVTCPEGCAGDELDRRLYIARSIIGKKLAEDFYVCSFSCRTIVYKGMVRSIILGEFYLDLKNPGYTSNFAVYHRRFSTNTMPKWPLAQPMRLLGHNGEINTLLGNINWMAAREKELEVSGWTKAELEALTPIVNQANSDSYNLDSALELLVRTGRSPLEAAMILVPEAYKNQPALKDYPEISDFHDYYSGLQEPWDGPALLVFSDGKIVGAGLDRNGLRPARYCITKDDYIVLGSEAGVVDLPEVDIVEKGRLAPGQMIAVDLAEQKILKNYQIKQQAAQKYPYGEWIKIQRQTVASDSFAEKTLFNDAQTVLQQQAAFGYTAQDVEMVVVPMASQGKEPTFCMGDDTPLAVLSHKPRLLYDYFKQRFAQVTNPPIDPLRENLVMSLAMFLGKRGNLLEPKANPRRTIKLRSPLVNEVELQAIKTGQLQVAEVSTLYDLDGVNSLETALDNLVKTAIATVQAGAEILVLTDRPNRRNIGLRIKVFIPPLLAVEAVHHHLIRAGLRLKASLIVDTAQCWSTHHFACLVGYGASAICPYLALESVRQWWLDEKTQKLMENGRLDRIDLPTALKNYRQSVEAGLFKILSKMGISLLASYHGAQIFEAIGLGAELVEYAFAGTTSRVGGLTIADVAGEVMVFHGMAFPEMAKKLENFGFVNYRPGGEYHMNSPEMSKSLHKAVAAYKVGGNGNNGEAYDHYELYRQYLKDRPVTALRDLLDFNADQPAISLEEVESVESIVKRFCTGGMSLGALSREAHETLAIAMNRLGAKSNSGEPPEDVVRYLTLDDVDSEGNSPTLPHLHGLQNGDTANSAIKQIASGRFGVTPEYLMSGKQLEIKMAQGAKPGEGGQLPGKKVSEYIAMLRRSKPGVTLISPPPHHDIYSIEDLAQLIYDLLQINPEAQVSVKLVAEIGIGTIAAGVAKANADIIQISGHDGGTGASPLSSIKHAGSPWELGVTEVHRVLMENQLRDRVLLRADGGLKTGWDVVMAALMGAEEYGFGSIAMIAEGCIMARVCHTNNCPVGVATQQERLRQRFKGVPGQVVNFFYFIAEEVRSLLAHLGYRSLDDIIGRTDLLKVRSDVQLSKTQNLTLDCLLNLPDTKQNRQWLNHEPVHSNGPVLDDDILADPDIQRKAINHQTTATKTYRLDNTDRTVGTRLSGSIAKKYGNNGFEGNITLNFQGAAGQSFGAFNLDGMTLHLQGEANDYVGKGMNGGEIVIVPHPQASFAPEDNVIIGNTCLYGATGGNLYANGRAGERFAVRNSVGKAVIEGAGDHCCEYMTGGVIVVLGPVGRNVGAGMTGGLAYFLDEVGDLPEKINPEIITLQRITASKGEEQLKSLITAHVEHTGSPKGKAILANWSDYLGKFWQAPPSEKDSPEANGDVSLTGEKTLTSV

SEQ ID NO: 624 - protein, 176 aa, Ashbya gossypii ATCC 10895
MDANSDQRDKHNQYIAELREQDRWLPINNVARLMKNTLPVTTKVSKDAKECMQECVSEFISFVTSEASDRCASDKRKTINGEDVLISLHALGFENYAEVLKIYLAKYRQQQALKNQMIFQRREDGADGLDGAADDGSDDAGEEEGEHGAGAAAGAPGAGALPEQDQFINQDGSLYI

SEQ ID NO: 625 - protein, 513 aa, Flavobacteria bacterium BBFL7
MIDFILNLAWYWWLVIIVVLVGIYDIFNKKHIILRNFPVVGHFRYWLESVGPELRQYIVANNREELPFNRIERGWIYASAKNENNYEGFGTDRDIYAHQYIFINNSMMPYKVEKDHISHTEPTFLPCAKVIGAAKKRRRPFRPASVINISAMSYGSLSAKAVDAMNNGAKQVHAYHNTGEGGLSPYHKRGADVVFHIGTGYFGVRDKDGNFSMDMLKKLVKDNPQVRAIELKLSQGAKPGKGGVLPGSKITKEISEIRNVPMGEDVLSPPTHSAFEGIQGLVDFVEEIAQETGLPTGIKAAIGKLEQWEELADIMKATGKGPDFITVDGGEGGTGAAPPSFADHVSLPWVYGFKDLYQVFQNREMTEELVFIASGKLGFPAKAAMAFSMGADVVNVAREAMISIGCIQAQACHNNSCPTGIATQNKWLQRGIVVPEKAGRLASYFKKFNKELLEITHAAGYEHPCQFDMRDVDVSIGDTNMTQTLEYTYKYQKTPVPFESMQSLKDCVHLGGK

SEQ ID NO: 626 - protein, 442 aa, Arabidopsis thaliana
MDSTVFINNPSLTLPFSYTFTSSSNSSTTTSTTTDSSSGQWMDCRIWSKLPPPLLDRVIAFLPPPAFFRTRCVCKRFYSLLFSNTFLETYLQLLPLRHNCFLFFKHKTLKSYIYKRGGTNDDDSNKAEGFLFDPNEIRWYRLSFAYIPSGFYPSGSSGGLVSWVSEEAGLKTILLCNPLVGSVSQLPPISRPRLFPSIGLSVTPTSIDVTVAGDDLISPYAVKNLSSESFHVDAGGFFSLWAMTSSLPRLCSLESGKMVYVQGKFYCMNYSPFSVLSYEVTGNRWIKIQAPMRRFLRSPSLLESKGRLILVAAVEKSKLNVPKSLRLWSLQQDNATWVEIERMPQPLYTQFAAEEGGKGFECVGNQEFVMIVLRGTSLQLLFDIVRKSWLWVPPCPYSGSGGGSSGGGSDGEVLQGFAYDPVLTTPVVSLLDQLTLPFPGVC

SEQ ID NO: 627 - protein, 161 aa, Arabidopsis thaliana
MADSDNDSGGHKDGGNASTREQDRFLPIANVSRIMKKALPANAKISKDAKETVQECVSEFISFITGEASDKCQREKRKTINGDDLLWAMTTLGFEDYVEPLKVYLQKYREVEGEKTTTAGRQGDKEGGGGGGGAGSGSGGAPMYGGGMVTTMGHQFSHHFS

SEQ ID NO: 628 - protein, 159 aa, Yarrowia lipolytica CLIB122
MEYQEGFASREYDNGLVYQLPNAQQVPRQQPGGPQLQQQHHSPGDTPPQMVTKYHTQIDVAAAAAAAAASEPDPEPETEQPFYVNAKQYHRILKRRVARAKLEESLKVARGRKPYLHESRHKHAMRRPRGQGGRFLTAAEIAEKERQEAEEAQAQGENK

SEQ ID NO: 629 - protein, 525 aa, Staphylococcus aureus subsp. aureus COL
MTFLTVMQFIVNIIVVGFMLTVIVIGLIWLIKDKRQSQHSVLRNYPLLARIRYISEKMGPELRQYLFSGDNEGKPFSRNDYKNIVLAGKYNSRMTSFGTTKDYQDGFYIQNTMFPMQRNEISVDNTTLLSTFIYKIANERLFSREEYRVPTKIDPYYLSDDHAIKLGEHLKHPFILKRIVGQSGMSYGALGKNAITALSKGLAKAGTWMNTGEGGLSEYHLKGNGDIIFQIGPGLFGVRDKEGNFSEGLFKEVAQLSNVRAFELKLAQGAKTRGGHMEAEKVNEEIAKIRNVEPYKTINSPNRYEFIHNAEDLIRFVDQLQQLGQKPVGFKIVVSKVSEIETLVRTMVELDKYPSFITIDGGEGGTGATFQELQDGVGLPLFTALPIVSGMLEKYGIRDKVKLAASGKLVTPDKIAIALGLGADFVNIARGMMISVGCIMSQQCHMNTCPVGVATTDAKKEKALIVGEKQYRVTNYVTSLHEGLFNIAAAVGVSSPTEITADHIVYRKVDGELQTIHDYKLKLIS

SEQ ID NO: 630 - protein, 439 aa, Cleome spinosa
MGSLGKSSDSGTIVACSPSTRSGISGNEESSRQQVSPMRTVGSRNTSPSGRVGSRNTSPSRKKVVKTKPRGLDEEETVATFGKPAHPDVQMEDSIWAMLPEDLLNEILARVPPFMIFRLRSVCKRWNSILQDSSFLKFHSQVPSHGPCLLTFWKNSQISQCSVFSLPLKSWYKVPFSFLPPWAFWLVGSSGGLVCFSGLDGLTFKTLVCNPLTQEWRALPSMHYNQQRQLIMVVDRSDRSFKVIATSDIYGDRSLPTEVYDSKTDRWSIHQIMPAVNLCSSKMAYCDSRLYLETLSPLGLMMYRLDTGKWEHIPAKFPRSLLDGYLVAGTQKRLFLVGRIGLYSTLQSMRVWELDHAKITWVEISRMPPKYFRALLRLSAERFECFGQDNLICFTSWNQGKGLLYDVDKKVWSWIAGCALQSCNSQVCFYEPRFDASVQ

SEQ ID NO: 631 - protein, 228 aa, Picea sitchensis
MAENYGSPDSSPRSENESGGGHMGGSDFSVKEQDRFLPIANVGRIMKKALPANGKVSKDAKETVQECVSEFISFITGEASDKCQREKRKTINGDDLLWAMTTLGFEDYVEPLKIYLHKYREMEGEKVSMAKQGDQIPSKEGNTSINGSSIENSNANAYSGMNPSSYNRVQSQSLPHMQQQAAYGQPPGGMVYGHHGHMIGAYNMAAPNSSGGNSSGQQQQQQAPRGQW

SEQ ID NO: 632 - protein, 2141 aa, Kluyveromyces lactis NRRL Y-1140
MISSGKYDPLEESYDGGCSLDERPLSKKAHVYKSWANVIPDKQGLYDPEFEKDACGVGFVANIKGVSSHKIVSDARFLLCNMTHRGAVSSDGNGDGAGILTGIPHEFMQREFKLDVGIDIPDQSQYAVGNVFFKKDSPEALVNSKRTFEQLADSLDLKVLGWRVVPHDSSILGAVALSREPEILQPLVVLKELFSESSSSSSISKDEFQSTCETKFKTSLYILRKQASTSIGLQNWFYVCSLDNKTIVYKGQLTPSQVYNYYHDLTNAHFKSHMALVHSRFSTNTFPSWDRAQPLRWLAHNGEINTLRGNKNWMRAREGVMASEVFGEQLDKLYPIVEEGGSDSAALDNVLELLMMNGVLSLPEAIILMVPEAYHKDMDSDLKAWFDWASCLMEPWDGPALLTFTDGRFTGATLDRNGLRPCRYYITSDDRVICGSEVGVIPVENSLVIQKGKLKPGDMLLVDTESGEMVDTKQLKHKFAKRKDFKSWLSKVIKVEDVLEKTSKFLPPSFISDYNLKAQTDPRLLALGYTYEQVSMILVPMALGGKEALGSMGNDAPLACLNEDPVLLYDYFRELFAQVTNPPIDPIREANVMSLECFVGPQGNLLEMHPSQCDRLVLKSPILHWDEFEALKNIEKAHPTWSTSNIDITFPKEEGLLGYTATIDRITQEASDAIDQGKKILFISDRLLSADRVSISSLIAIGAIHHHLVRNKQRSQVALILETGEAREVHHFCVLLGYGCDGIFPYLAMETLVRMNHEGLVRNVNNDDSSIDDKTLLDNYKHAVDGGIFKVMSKMGISTLASYKGAQIFEALGIDNSVVDLCFAGTASRIKGVTFEYLAQDSFSMHERGFPSRLTIQKSVNLPESGEYHWRDGGYKHINDPTAIAALQDSVRNKNEDAWEMYVKKEMEAIKDCTLRGLLELDYSDSESIPLEQVEPWTEIARRFATGAMSYGSISMEAHSTLAVAMNRLGAKSNCGEGGEDPERSIVNSNGDTMRSAIKQVASARFGVTSFYLSDADEIQIKIAQGAKPGEGGELPAHKVSKEIAKTRHSTPYVGLISPPPHHDIYSIEDLKQLIYDLKCSNPRAGISVKLVSEVGVGIVASGVAKAKADHILVSGHDGGTGASRWTGIKYAGLPWELGLAETHQTLVLNDLRGNVVVQTDGQLRTGFDIAVAILLGAESFTLATVPLIAMGCIMLRKCHLNACAVGIATQDPVLRDKFKGQPEHVINFFYYLIQDLRRIMAKLGFRTVDEMVGHSEKLRKRDNVKTKALNIDLSPILTPAHLIRPGVATKFTKKQDHKLHTRLDNKLIDEAEITLDKGLPVTIDANIINTDRALGSTLSYRVSKRFGENGLPQDTVVVNISGSAGQSFGAFLTAGLTFILDGDANDYVGKGLSGGRLVIRPPKDSRFKSDENVIVGNTCFYGATSGYAFISGCAGERFAVRNSGATVVVERIKGNNAFEYMTGGRAVVLSQMESLNAFSGATGGIAYCLTSDYDDFVGKINHDTVEMQSLVDPVEIAFVKNLIQEHYNYTKSDLAKKILNKFNHYLNNFVKVIPTDYKKVLENEAKEKVKAEKQSTADFLKKFNSSTDSAVDATNGEVDLLRSSVSHKSTLAEPKVLDLEDAVQDTNNLKKAEEKLEKIRGFMKYKMKHEKYRSPAARTKDWKELSNAITKKDARQQTARCMDCGVPFCTSDTGCPISNIIPKFNELVFKNQWKLALDKLLETNNFPEFTGRVCPAPCQGSCTLAIIDDPVGIKSVERLIIDNAFKEGWIKPCPPEVRTGKIVAVIGSGPAGMACADQLNRAGHSVVVYERADRCGGLLMYGIPNMKLDKSIVQRRLDLLAAEGVQFITNTEVGKDISVEELKSKFDAIVYTVGSTIPRDLRIPGRELKNIDFAMTLLKSNTQALLDRDLETIKKQIKGKKVIVIGGGDTGNDCLGTSVRHGAASVLNFELLPQPPNERSKDNPWPQWPRIMRIDYGHAEVKEHYGRDPREYCILSKEFIGNENGEVKAIKTVRVEWKKSQSGVWQMVDVPGSEQIFEADIVLLSMGFVGPEVIEDPTFVKSKRGTITTLSDSSYSVDGDKVFAAGDCRRGQSLIVWAIQEGRKCATAIDTFLMGSTNLPGNGGIVKRDYKLLEELASTI

SEQ ID NO: 633 - protein, 446 aa, Oryza sativa Japonica Group
MGGGQSRSPRDGSGHGRYGHSPSFQQQWGGGGGGGGGGGGGYPYGQDAHGGGYYGAPARAGGASKPRLDRRYSRIADDYHSVDQVTDALAQAGLESSNLIVGIDFTKSNEWLGKFSFHGRSLHHISNAPNPYEQAISIIGQTLSKFDEDNLIPCFGFGDATTHDQDVFCFYPDLRPCNGFSEALSRYRELVPHLRLAGPTSFAPIIEMAMTIVEQSGGQYHVLLIIADGQVTRSVDTASGQLSSQEQKTVDAIVRASELPLSIVLVGVGDGPWDMMKEFDDNIPSRAFDNFQFVNFSEIMNKNMPQSRKEAAFALSALMEIPQQYKATVELGILGRRSFKSPERVPLPPPGGSHDAYSYGSKSFSKPSTYPQSSTSSSSYPHYETAQSSSPAVPSSTYDNQVCPICLVNPKDMAFGCGHQTCCDCGQSLESCPICRSPISTRIKLY

SEQ ID NO: 634 - protein, 1579 aa, Fulvimarina pelagi HTCC2506
MTKMTPSLELGASSAPTALTVNLPMPAVIADFDRTRPTRAGLYDPRNEHDACGVGFIAHMKNEKSHSIVAKGLEILENLTHRGAVGADPLMGDGAGMLVQIPHEFFKAVMSEQGVELPEPGHYGVAHIFMPRDEAMRARILDIVEESVATEGQSILGWRDVPVSNDSLSTAPEIVATEPVHQQLFIRRSDDVATEDDFERKLYILRKVISNRVQAEEDGRDHGFYPVSFSCRTIVYKGMFLAYQLGRYYSDLKDERFTSALALVHQRFSTNTFPSWKLSHPYRMIAHNGEINTLRGNVNWMAARQASVDSELFGNDISKLWPISYEGQSDTACFDNALEFLVEGGYPLAHAMMMLIPEAWAGNKQMAPETQAFYEYHAALMEPWDGPAAVAFTDGRQIGATLDRNGLRPARYIVTDDDLVIMASEAGTLAIDDSKVVKKWRLQPGRMLLIDLEKGRIVSDEEIKKEMAEAHPYADWVKNTQIILENLKPVAPRASRSDVSLLDRQQAFGYTLEDTRALMAPMATTGQEGIGSMGTDTPISAMSGEAKLLYTYFKQNFAQVTNPPIDPIREELVMSLVSFIGPRPNIFDLEGMSRKKRLEVRQPILTNGDLEKIRNIGHTEDRFDTKTIDMTYPAAQGSDGMEGALERLCERAEAAVVGGYNIIILSDRQVGPDRLPIPALLACAAVHHHLIRKGLRTAAGLVIESGEPREVHHFACLAGYGAEAINPYLAFDSLLAMHQRGDFPPEVDSNEVVTRYIKAIGKGILKVMSKMGISTYQSYCGAQIFDVVGLNTEFVEKYFTRTATTIEGIGLAEVAKESEQRHSAAFSDDPVLARSLAVGGEYAYRIRGEKHMWTPDNVATLQHAVRTDSWERYQEYAAQVNDATTEQQTIRGLFRIKNAEEQGRKPIPIDEVEPAKDIVRRFVTGAMSFGSISREAHTTLARAMNRIGGKSNTGEGGEEPDRFQPLRDGTSNPERSAIKQIASGRFGVTTEYLVNGDMLQIKIAQGAKPGEGGQLPGHKVDATIAKVRFSTPGVGLISPPPHHDIYSIEDLAQLIYDLKNVNPAADVSVKLVSEVGCGTVAAGVAKARADHVTISGYDGGTGASPLTSIKHAGSPWEMGLAETQQTLVLNGLRSRICLQVDGGLRTGRDVLIGALLGADEFGFSTAPLIAAGCIMMRKCHLNTCPVGVATQDPVLRQRFKGAPEHVVNYFFYVAEEVRMLMAEMGVKSLADLIGQSDWLDKREVIEHWKARGLDFTNVFFKPKAEKEEMRWTKLQKHPIDDVLDRKLIKEAEAALTARQKVEIETKIINVDRSAGAMLSGEVCKRFGLKGLRDDTIHVKLTGTAGQSFGAFLAHGITFELSGEANDYVGKGISGGRLIVKPGENSRVVPEESIIVGNTVLYGAISGECYFRGVAGERFAVRNSGAIAVVEGAGDHGCEYMTGGVVVILGKTGRNFAAGMSGGVAYVFDELGDFSERCNMAMVDLEPVPEEDDLLEKLHHHGGDLQHKGRVDVSSDMTRHDDERLFQLISNHLHYTGSTRAKEMLDNWEHYRPKFVKVMPVEYRRALQEMERMKIGVAAE

SEQ ID NO: 635 - protein, 1481 aa, Pseudomonas aeruginosa PAO1
MKAGLYHPETFKDNCGFGLIAHMQGEPSHQLLQTAIEALTCMTHRGGINADGKTGDGCGLLIQKPDLFLRAVAREAFSVDLPEQYAVGMVFFNQDPVKAEAARENMNREIVAAGLELVGWRKVPIDTSVLGRLALERLPQIEQVFIGGAGLSDQDFAIKLFSARRRSSVANAADSDHYICSFSHKTIIYKGLMMPADLAAFYPDLGDERLQTAICVFHQRFSTNTLPKWPLAQPFRFLAHNGEINTITGNRNWAQARRTKFTNELIPDLEELGPLVNRVGSDSSSMDNMLELMVTGGMDLFRGLRMIIPPAWQNVETMDADLRAFYEYNSLHMEPWDGPAGVVLTDGRYAVCLLDRNGLRPSRWVTTKNGYITLASEIGVWDYKPEDVIAKGRVGPGQILAVDTETGQVLHSDDIDNRLKSRHPYKQWLRQNALRIQATLDDDHGVASYDADQLKQFMKMFQVTFEERDQVLRPLGEQGQEAVGSMGDDTPMAILSRRIRSPYDYFRQQFAQVTNPPIDPLREAIVMSLETCLGVEQNIFEEAPHHANQAILTTPVISPAKWRTIMTLDRPGFDRHFIDLNYDESMGLEAAVRNIADQAEEAVRGGKVLLILSDRHIAPGKLPVHAALAVGAVHHRLVQTGLRCDSNILVETATARDPHHFAVLIGFGASAVYPFLAYEVLADLIRTGEVLGDLYEVFKYYRKGISKGLMKILSKMGISTVASYRGAQLFEAVGLSDEVTDLCFTGVASRIQGARFVDIENEQKLLAAEAWSNRKPIQQGGLLKFVYGGEYHAYNPDVVNTLQAAVQQGDYEKFKEYTALVDQRPVSMIRDLLQVKTAAQPLALDEVEPLEAIFKRFDAAGISLGALSPEAHEALAEAMNTLGGRSNSGEGGEDPARYGTLKSSKIKQVATGRFGVTPEYLVNAEVLQIKVAQGAKPGEGGQLPGGKVNGLIARLRYAVPGVTLISPPPHHDIYSIEDLAQLIFDLKQVNPQALVSVKLVSEPGVGTIAAGVAKAYADLITISGYDGGTGASPITSIKYAGSPWELGLAETHQTLRGNDLRGKVRVQTDGGLKTGLDVIKAAILGAESFGFGTAPMIALGCKYLRICHLNNCATGVATQNDKLRKDHFIGTTAMVINFFTFIATETREWLARLGVRSLGELIGRTDLLEILPGETAKQQNLDLAPLLGSELIPADKPQFCEVEKNPPFDQGLLAEKMVELSKAAIEGLSGGEYELDICNCDRSIGARVSGEIARLHGNQGMAKAPVVFRFKGTAGQSFGVWNAGGLHLYLEGDANDYVGKGMTGGKLVITPPKGSPFKTQESAIVGNTCLYGATGGKLFAAGTAGERFAVRNSGSHAVVEGTGDHCCEYMTGGFVCVLGKTGYNFGSGMTGGFAYVLDMDNTFVDRVNHELVEIQRISGEAMEAYRSHLRKVLVEYVNETASEWGANILENLDDYLRRFWLVKPKAASLGSLLTSTRANPQ

SEQ ID NO: 636 - protein, 453 aa, Physcomitrella patens subsp. patens
MGNSGSSSSSSSFNNDPRRVSRSRGYEGSSSQAYGGYSHPSSSRYGDAYEEPPSEPPYVPRPVPKKPLKREFSFIRDNYSSVEEVQNALGQAGMESSNLIVGIDFTKSNEWTGKNSYGGRSLHAIGGEPNPYEKALSIIGRTLPKFDDDNLIPCFGFGDSTTHDKYVFSFNADHRPCEGFEEVFSRYRTIVPHLRLAGPTSFAPIINAAIDIVEESGGQYHLLIIIADGQVTRSVDVAYGQQSPQEAATIRAIVNASSYPLSIVLVGVGDGPWDMMREFDDNLPERSFDNFQFVNFTEIMNSRNLNAHQKEAKFALNALMEIPLQYRATLELSMLGNQVGTSPGIKPLPPPPKVLQNDGIYPGPPPSSTRDYHPHSPHHSFDSYPSFNNHNYSTQPSAPASSVDGSNMDCPVCLTDRKDMAFNCGHQTCRQCGVGLLNCPMCRQLITTRIHLY

SEQ ID NO: 637 - protein, 509 aa, Geobacter sulfurreducens PCA
MLYKSVTESFNEFIVDRSDAKCIRCKVCIRQCAYEVHSYAEAIDTLTEDHTLCIGCRRCSALCPTGAITIRSNEEVFKRNESWSNGHIRNLYAQADTGGILLAAMGNPAKYPIYWDHLLLDASQVTNPSIDPLREPMELRTYLGKKPHSIEIVRDEQTGKPKLATKLTPQIRMEYPFIFSAMSYGALNLNAHRAMAMAASELGTLYNTGEGGLHKDLYRYGANVMVQVASGRFGVSEQYLNAGVAIEIKVGQGAKPGIGGHLPGEKVNDQISETRMIPVGSDAISPAPHHDIYSIEDLRQLIFALKEATNYEKPVSVKIAAVHHVAAIASGVARAGADIITIDGFRGGTGAAPQVIRDNVGLPMELALASVDARLRDEGIRNQVAIVVGGGVRSSGDAIKAIALGADAINLGTSTLLALGCTLCQRCYTGKCPWGITTNNPYLAKRLNPELGAERLVNLVHAWGHEMKEILGGMGLNALESLRGNRYKLRAVGLGEKDMNILGVMPAGE

SEQ ID NO: 638 - protein, 256 aa, Pedicularis groenlandica
RHWFLFFKQHKHSSLVRSNNNNNNLNARLQECYLFDPETLTWYRLPVPSSIPANFSPASASGGLICHVSDEPGSKNILLSNPLVGSCIQLPSTLRPRLCPSVGMSITDTSIDMSFAGDDMISPYAVKNLTSESFHIDSGGFYSVWGTTSALPRLCSLESGRMVHVGSRFYCMNYSPFSVLCYDVGSNSWGKIQAPMRRFLRSPSLVESRGRLVLVAAVEKSKLNVPRSLRLWALQECGTTWVEIERMPQQLYNQFA

SEQ ID NO: 639 - protein, 1472 aa, Wolinella succinogenes DSM 1740
MDLLHSFRDNCGFGLLANIKNRSSHDTLVSAITALERMMHRGAIAADGKSGDGSGLLLSMPEKFMHKVAHQEGVSLPQQYAVAMLFIKEESHKERFKELCAKNDLKVLLFREVPVDTEALGTLALETLPVIIQAFVAPASLIATKRFEALLYLARKEIEHALKEDPDFYIASFSSKTISYKGLVMPTYIRAFFEDLRDPDFEISFALFHQRFSTNTLPKWRLAQPFRTIAHNGEINSVEANRYNALAKTEAVASQIFTREEMDRILPLLERGVSDSASLDNMFEFLIANGTDFFKAARSLIPAPWQNSPHMDSKLRAFYEYTSGRFEAWDGPAAVSLTDGRYIGCILDRNGLRPAKYVITKEDQIIISSEYGVMDIAPEKVLERGRLQSGEMIGVDLKSGRIFKNEDINDYLKDSNPYMEWLNENLIYLQEHMDSTFVDFSDYAREDLREKQRYFNITHEVIEQVIEPMSKDGKEAVGSMGDDTPLAAFSKEQRPFSDFFRQKFAQVTNPPIDPYREKVVMSLNTGFGAIPNILKEDPSYKRLKTVSPILMKENFEVLLAHGDQEKPHYKECFHNRFFPTLFKGDLKNSLETLVQKIIQSVKEEGIKIVILDDRGVDANHQSIPMAMLIGRLNQALLEAKVRSQVSIVAVSGEVYDSHSAAILIAYGANAIYPYMLYSTVYGLAKEKEKSNAEIKQQLRDTRSAMNAGILKIMSKMGISTVASYRNSALFDVIGLSREILKDCFSDSHGALFGLGYKEIEARIQKAHHHAFFEDKNDLFPIRVGGFYKYVHGDEYHDFRPDIIFGIHKVSLTGKKEDFLELKKGIDGRDKKFIRDFFEIKTDKKPLPLEKIESKESIFKRFDTAAMSLGSISPEAHETLAEVMNELGGRSNSGEGGEKEERSRGPKNSKIKQIASGRFGVTPFYLRSAEEIQIKVAQGAKPGEGGQLPGNKVTPLIAELRYTIPGVTLISPPPHHDIYSIEDLAQLIFDLKQINPEAKICVKLVSTLGVGTIAAGVAKAYADKIIISGCDGGTGAAPLSSIKFAGNPWELGLSEAHNALKVNHLREFVHLQTDGGLKTGLDVVKAALLGAESFAFGTSMLAVLGCKMLRVCHQNRCTVGIATQEARLREHFVGTKERLKNYFTLLAEDVREILAKMGYSTIEEIVGRSDLLQVIDDEMAKKFDFSSILLRLEGGNICKKPSNEPFDKNEFETNILAEVYDTIKNDKNKIVLEKTICNTNRSFGAKISGEIAKYYGNKGLSDGAIKIHLEGVAGQSFGAFLIHGVSLYLTGAANDYVGKGMHGGKIVITPEIKRNKIACAGNTCLYGATGGKLFVAGEVGERFGVRNSGALAIVEGTGDHACEYMTGGVVVILGETGINFGAGMTGGIAFVYDKKHDFIDHVNQELIEIKRIDTDELDEARHYLKKLLKQHINETGSEKAKNILAYFRDEVRNFWIVLPKNMKKAPLNPEDGD

SEQ ID NO: 640 - protein, 424 aa, Hordeum vulgare subsp. vulgare
MGNRIGGRRKAGVEERYTRPQGLYEHRDIDQKKLRKLILETKLAPCYPGADDAAGADLEECPICFLYYPSLNRSKCCSKGICTECFLQMKPTHTARPTQCPFCKTPNYAVEYRGVKTKEERSIEQFEEQKVIEAQMRMRQQALQDEEDKMRRKQSRCSSSRTIAPTTEVEYRDICSTSYSAPPYRCTEQETECCSSEPSCSAQANMRSFHSRHTRDGNIDMNIEDMMVMEAIWRSIQEQGSIGNPACGSFMPFEQPTRERQAFVAASPLEIPHPGGFSCAVAAMTEHQPSSMDFSYMTGSSAFPVFDMFRRPCNIAGGSLRAVESSLDSWSGIAPSGTRREMVREEGECSIDHWSEGAEAGTSYAGSDIMADAGTMPPLPFADNYSMAASHFRPESIEEQMMYSMAVSLAEAHGRTHTQGLTWL

SEQ ID NO: 641 - protein, 2385 aa, Emericella nidulans
MAQAGPITDVTQRLFIELKSKNEETRVRAAYELYENVLAISRDWPPEKFIEFYNAVSQRIAQLVVTGSDAHERIGGLLALDRLIDFDGVDNAQKTTRFASYLRSALRSSDNAVLVYAARALGRLAKPGGALTAELVESEIQSALEWLQSERQEGRRFAAVLVIRELAKGSPTLLYGFVPQIFELIWVALRDPKVLIRETAAEAVSECFEIIAARDIQVRQLWFARIYEEALQGLKSNNVDWIHGSLLVLKELLLKGAMFMNEHYRNACEIVLRLKDHRDPKIRTQVVLTIPILASYAPVDFTETYLHRFMVYLQAQLKKDKERNAAFIAIGKIANAVGVAIAQYLDGIIVYIREGLALKAKNRAAINEAPMFECISMLSLAVGQALSKYMESLLDPIFACGLSESLTQALVDMAHYIPPIKPTIQVKLLDMLSLILDGTPFRPLGCPESRLPPLPSFAKDFTLQELHSDAEIALALHTLGSFDFSGHILNEFVRDVAIHYVENDNPEIRKAAALTCCQLFVHDPIINQTSSHSIQVVSEVIDKLLTVGVGDPDPEIRRTVLWSLDRKFDRHLARPENIRCLFLAVNDEVFAVREAAICIIGRLSSVNPAYVFPPLRKLLVNLLTGLGFASTARQKEESAQLISLFVSNATKLIRSYVDPMVTTLLPKAVDANHGVASTTLKAVGELASVGGSDMKAYLPKLMPIVLDALQDLSSHAKREAALRTLGQIASNSGYVIDPYTDHPHLLAVLIGIIKTEQAGSLRKETIKVLGILGALDPYKYQQISETAPDVHHINEVQVVSDVSLIMQGLAPSNEEYYPTVVIHTLMQNILRENSLAQYHSAVIDAIVTIFKTLGLKCVPFLGQIIPGFISVIRGSPSSRLESYFNQMAILVNIVRQHIRAFLPEIIEVIREFWDTSYQVQATILSLVDAIAKSLEGEFKKYLANLIPPMLDTLEKDNTPRRQPSERILHSFLVFGSSGEEYMHLIVPSIVRLFDRSQNPASIRKSAIDSLTKLSRQVNVSDFASLIVHSLSRVVAGNDRMLRQAAMDCICSLIFQLGQDFNHYIHLLNKVLKHHQVNHVNYQILVTKLQKGDPLPQDLNPDESYAPLADDANYAEIGQKKMVVNQQHLKNAWDASQKSTREDWQEWIRRFSVELLKESPSPALRACASLAGIYQPLARDLFNAAFVSCWTELYDQYQEELVRSIEKALTSPNIPPEILQILLNLAEFMEHDDKALPIDIRTLGKYAAKCHAFAKALHYKELEFEQDQNSGAVEALITINNQLQQSDAAIGILRKAQAYRDVELKETWFEKLQRWEEALAAYKRREKIDPDSFGITMGKMRCLHALGEWKVLSDLAQEKWNQASLEHRKSIAPLAAAAAWGRGQWELMDSYLGVMKEQSPDRSFFGAILAIHRNQFDEAIMYIEKARNGLDTELSALLGESYNRAYNVVVRVQMLAELEEIITYKQNVGDPERQEAMRQTWNRRLLGCQQNVEVWQRMLKVRALVTTPRENLDMWIKFANLCRKSNRMGLAERSLASLETVIPDGNGGTRTISPPEVTYARLKFSWATGRQREALHMLREFTANLTEDFTRFNALVASQSDHNGINGVNGIAEGNHTDIMALRERVGDVNKFRKLLAKSYLRLGEWQTALQRGDWRPEHVREVLNAYSAATRYNRDSYKAWHSWALANFEVVTTIASQASKDGGNLALVPGHIVTEHVIPAIRGFFRSIALSSTSSLQDTLRLLTLWFNHGGDQEVNSVVTEGFTAVNIDTWLAVTPQLIARINQPNFRVRSAVHRLLAEVGKAHPQALVYPLTVAMKSNVARRSQSAGNIMESMRTHSANLVEQADLVSHELIRVAVLWHELWHEGLEEASRLYFGDHNVDGMFATLAPLHEMLDKGAETLREVSFAQAFGRDLAEAKHYCMLYRETEEIGDLNQAWDLYYTVFRKISRQLPQLSTLDLKYVSPKLKDCVDLDLAVPGTYQSGRPIIRIISFDPILHVLQTKKRPRRMTLKGSDGSSYMYVVKGHEDIRQDERVMQLFGLVNTLLDNDSESFKRHLTVQRFPAIPLSQNSGIIGWVTNSDTLHALIKEYRETRRILLNIEHRIMLQMAPDYDNLTLMQKVEVFGYAMDNTTGKDLYRVLWLKSKSSEAWLERRTNYTRSLGVMSMVGYILGLGDRHPSNLLLDRVTGKVVHIDFGDCFEVAMHREKYPERVPFRLTRMLTFAMEVSNIEGSYRITCEAVMRVIRENKDSLMAVLEAFIHDPLINWRLGIRESPDRMPFNAERRQSIVSNVNLEHGVQPSNFSRHRRPSILEGGILDAQEGVPNEAREAQNARALQVLARVREKLTGRDFKPSEELNVSDQVDKLLAQATSVENICQHWIGWCSFW

SEQ ID NO: 642 - protein, 362 aa, Paulownia tomentosa
IFSNTFLELYLQVSPHRHWFLFFKQRSLKNYIYRNNTSANNGTDRANYEGYLFDPDNLKWYRLSIPLIPPGFSPASSSGGLICWVSEDAGSKNILLCNPLLGSLIQLPSTLRPRLCPSIGLTITNSSIDLAFAGDDLISPYAVKNLTSESFHIDGGGFYSIWGTTASLPRLCSLESGRMVHVEGRFYCMNYSPFSVLAYDISMNQWCKIQAPMRRFLRSPSLVESRGKLILVAAVEKSKLNVPKSLRLWTLQECGTMWVEIERMPQQLYNQFAEIEGGHGFNCVAHGKFVVILIKGSDKALLFDFLVKRWVWIPPCPYINSGCGGREDGFDELHGFAYEPRPVIPITALLEQLTLPFNSFSA

SEQ ID NO: 643 - protein, 1482 aa, Shewanella oneidensis MR-1
MSLYHPSFERDNCGFGLIAQMDGEASHRIVRTAIHGLDRMKHRGGIASDGRTGDGCGLLMQLPLQFFEAVAAENDWHLSRKFAVGMLFLSQDEELADQAKFILERELERETLSIAGWRKVPVNPDVLGEIGKSSLPQIYQVLINAPIGWREKDLERRLYMARRRLEQQITDDKDFYVASLSGQVIVYKGLMMPADLPAFYPDLADIRLKSSICLFHQRFSTNTSPKWPLAQPFRYLAHNGEINTITGNRQWARARAYKFNSPLLPDLQQAAPFVNETGSDSSSLDNMLEMLLSGGMDLYRAMRLLIPPAWQSNPEMDDELKAFYDFNSMHMEPWDGPAGIVMTNGRHAACAVDRNGLRPSRYVITKDRILTLASEVGIWDYAADEVIEKGRVGPGELLVLDTLNGRLYQSFEIDNDLKRRHPYKEWMAKNSRTLIPAEQLTTEQHGASELSPEQLLQYQKQFGYTREELEQVIWVLAKQGEEATGSMGDDTPMAVLSKKSRSLYDYFRQKFAQVTNPPIDPLREKHVMSLATCIGREQNLFNETTGHAYRVMFNSPILLFSDFNQLLGLDSTYYRANIVDLNYEPKEGLEQAIRRITSEAERLARSGTTLLILSDRAIDKSAQVIPVAMAVGAVQQMLVSKSLRCDTNIIVETASARDPHHFAVLLGFGATAIYPYLVYESISDLAKRHDLTDTTALMLNFRYGIEKGLRKIMSKMGISTIGSYRCSQQFEAIGIASDVIELCFKGVISRIEGASFEDIANDQALLHKAAYRAHVPLPQGGLLKYVDGGEYHCFNPDVVNTLQASLIDKNFATYKKFAELVDNRPIATLRDLIGIKAGQTAIELNNVEAASNLYPRFDSAAMSIGALSPEAHEALAIAMNRLGGRSNSGEGGEDARRFNTERNSAIKQIASARFGVTAHYLVNADVLQIKVAQGAKPGEGGQLPGHKVSVEIAGLRHARPGVTLISPPPHHDIYSIEDLAQLIFDLKQINTKALISVKLVSEPGVGTIATGVAKAYADMITISGYDGGTGASPITSVKYAGSPWELGLAEVHQSLVENGLRHKIRLQVDGGLKTGTDVIKAALLGAESFGFGTVPMIALGCKYLRICHLNNCATGVATQDKKLRDNHYHGLPERVMTYFEFVAEEVREWMATLGVSKFEDLVGRSEWLHTLEGQTDKQRGLDLAPILYQPNVRASTSRTWQETNPPADLGLLNQHLLNECQSAVDKGESFDAAYSINNTDRSVGARLSGYIATTLGVKGSKAPIKLSFNGSAGQSFGVWNSPGLELKLCGDANDYVGKGMSGGKIVIYPPLGSPFQSERSAIVGNTCLYGATGGRFFAAGQAGERFAVRNSGAIAVVEGLGDNGCEYMTSGIVVVLGKTGVNFGAGMTGGFAYVFDQFGRFNRRVNSELVDTQKLESPIQQQHLKGLIEEHVAETGSEHAKMILSDFANWLDCFVLVKPKNIAVADLLKLEQSSPELAVKAG

SEQ ID NO: 644 - protein, 481 aa, Symbiobacterium thermophilum IAM 14863
MLRLIEKWLRAAIDETVDRALARVVRDEYPESIGEMVGALRKVGGLNALEITMRAAQGAPAPRPLGSPLRLSPWDKLLFNPVHLCRFPTPENVPIDTAVTIGPRARRPLTVAIPVLIAGMSFGGALSKRAKIALARAATAVGTATNTGEAPLLEEERAAARLLIGQYNRGGWLNRPEQYRRVDAIEIQPGQGAQGSTPQRTSARNIGPDFRAAFGLEPGQDAVIHSRLPGVNSQADFIRLVRRLRAETGVPVGVKLAATHHLERELAVALEAGVDFVTVDGAEGGTHGGAPTLQDDVGLPTLYAVARARDFLVRQKAAGDVSLIAAGGLITPGQMLKAMALGADAVYTGTAALMTLIGEQAAEALPFEPPTSLVVYTGKRTGELDVDRAARSLQRFLNACVREMEMVAVTLGRTALSEIGRSDLCTLDPVLARATGVQLGLVAPDRQHRLFPEVAPDRRLPGWAEPPGPPAAEPFSAEPVH

SEQ ID NO: 645 - protein, 451 aa, Mimulus lewisii
MDPFHSNTPMSIPIPYGFMTSNIPMSNTTTFSSSSMITHCTMSPRMDPRIWSRLPQRLIDRIIACLPPPAFFRARSVCKRWYSLIFSTTFLEFYLQVSPHRHWFLFFKQQSLKNYILKNNNSCTNNNNIGRAHCEGYLFDPDTFKWYRLSFPLIPTGFSPASSSGGLVCWVSEEGGSKSILLCNPLIGSLIQLPSTLRPRLCPSIGLTITNSSIDLAFAGDDMISPYAVKNLTSESFHIDGGGFYSIWGTTASLPRLCSLESGRMVHVGGRFYCMNYSPFSVLAYDISTNQWSKIQAPMRRFLRSPSLVESRGKLILVAAVEKSKLNVPKSMRLWTLQECGSMWVEIERMPQQLYSQFAEIEYGRGFSSVAHGEFVVIQLKGWADKALLFDFVGKKWSWIPPCPYIVNSGCVGVGGGREDELHGFPYDPRLAVPITALLEQLTLPFNSFAA

SEQ ID NO: 646 - protein, 443 aa, Mimulus guttatus
MDPFHTSPISIPNIPYGFMNSIPITTNTSIMNPPRMDCRIWSRLPHRLIDRIIACLPPPAFFRARSVCKRWYSLIFSNTFLELYLQVSPHRHWFLFFKQQSLKNHILKNNSTTTSNNNNNTCCRAHCEGYLFDPDNLKWYRISFPLIPTGFSPASSSGGLICWVSEEGGSKSILLCNPLINSLVQLPSTLRPRLCPSIGLTITNSSIDLAFAGDDLISPYAVKNLTSESFHIDGGGFYSIWGTTASLPRLCSLESGRMVHVEGRFYCMNYSPFSVLGYDISMNEWSKIQAPMRRFLRSPSLVESRGKLILVAAVEKSKLNVPKSMRLWTLQECGSMWVEMERMPQQLYNQFAEIEDGRGFNSVAHGQFVVIQVKGSADKALLFDFVGKKWAWIPPCPYINMSSGGGGGGREDELHGFPYEPRLAVPITALLEQLTLPFTNFTA

SEQ ID NO: 647 - protein, 460 aa, Rubrobacter xylanophilus DSM 9941
MSVGREVVFNQNGQIVSFEESHLYNRNVQQWIYNAAERGIYDIRGLGAKRRVPHFDDLTFLTASLTRYPLEGYREKCSTKTILGTRYAKKPIELDIPITFAGMSFGSLSANVKEALGRAATAMGTSTTTGDGGMTEEERQSSKTLVYQCLPSRYGFNPDHLRKADAIEVVVGQGAKPGGGGMLLGQKISERVAKMRTLPPGIDQRSACRHPDWTGSDDLTIKIEELREITDWEIPIYVKFGATRVKDDVKLAVKAGADVVVVDGMQGGTAATQDVFIEHAGIPTLAAITQAVEALEEMDVKGKVQLIISGGIRTGADVAKALALGADAVSIGQGAMFALGCNSPVWYDKNGKPISAVKDYEKLGTKPGFCHHMQSGKCPVGITTQDPDLEQRMQPEWGARRLRNYLQVLNFELTTMARACGKSDVHHLEREDLVALTVEAAAMAKIPLAGTNWIPGSSGL

SEQ ID NO: 648 - protein, 720 aa, Xylella fastidiosa Ann-1
MQLHTEACELTARAWNDRIAPEVGGLLKYVHGGEYHMYNPDVVMTLQHATRTGDAADWRLYMDAVHTRPPSALRDLLQLKKAEIPTPLDQVAPATDVLCRFDTAAISLGALSPEAHEALAVAMNRLGGRSNSGEGGEDPARYGTERRSKIKQVASGRFGVTPEYLINAEVLQIKIAQGAKPGEGGQLPGHKVNDLIARLRYAKLGIGLISPPPHHDIYSIEDLAQLIYDLKQVNPQALVSVKLVSHVGVGTIAAGVVKAGADLITVSGHDGGTGASPISSIRYAGVPWELGVAEVHQALVANDLRERTTLQTDGGLKTGLDVVKAALLGADSFGFGTAPMIVLGCKYLRICHLNNCATGVATQDERLRANHFTGLPERVENFFRLLAEEVRQWLSYLGAMSLDDIIGRTDLLQQLEVSSREGVRVNLSRLLTNACYEGTHCAAQRLYESPDSLSVQIDSLLADAIANKTGGDYRFLIHNTDRSVGTRLSGAIARVHGNHGMEDAPLHLRFRGTAGQSFGAFNVGGLHLELEGEANDYVGKGMAGGCLVVRPPRGARFEARHTPILGNTCLYGATGGELFAAGRVGERFAVRNSGALAVIEGAGDHCCEYMTDGVVLVLGKVGLNFGAGFTGGLAYVLDIERDFVDRYNHELIDIHRVSVEGFENYRQHLRHLVVRHRALTGSIWAQQILDEFRDYIGRFWLVKPKAASIESLAESLRSAA

SEQ ID NO: 649 - protein, 577 aa, Xanthobacter autotrophicus Py2
MHRAQEPFAAAPKTEKPVPAPLIPAPPSRRLISPSLAALLARYSVFIALVAGALVSLVLSFTDQSAWLIVFCVLFPLVLVGVFDITQSEHSLLRNYPVIGSARWMFEALRPYLRQYLMEDDLSERPFNREERSIVYARAKNQEDRQPFGTELDTYSAEYEWMTHSLAPAPVAHEPFRVAVGGPACAKPYSASVLNISAMSFGSLGRNAIEALNLGAKTGGFYHDTGEGGFSPYHRVHGGDIVWELGSGYFGARNRDGTFSPERFAERAADPQVKMVEIKLSQGAKPGHGGVLPAAKVTAEIAETRGIAMGEDCISPARHSAFSTPAQMMEFVAQLRDLSGGKPVGLKLCVGHPSEVFALAKAMLKTGIRPDFIVVDGAEGGTGAAPPELADHLGMPLREGLILVRNALVGTGLRREVRLAASGKVTSGFSMAANMAIGADWCNAARAFMFSLGCVMSMRCHTGTCPTGVTTNDPHLQRGLVVPEKAERVESFHRHTVHALAELVAAAGLSHPGELLPHHVWHRVSPIEVKPLDRLYPFLAAGALLEAPDETSYGADWQAADADSFAPRSAVGPRRAA

SEQ ID NO: 650 - protein, 358 aa, Physcomitrella patens subsp. patens
MSSRYSVIHDNYKSLEEVQRALRDNGLESSNLIVGIDFTKSNEWTGRTSFGGRSLHVIGHEQNPYEKAISIVGTTLSPFDEDNLIPCFGFGDSTTHDKHVFSFFADHRPCDGMKEALVRYRAIAPHVRLAGPTSFAPIINKAVDIVEESGGQYHVLVIIADGQLEGPQERATVDAIVNASYYPLSIVLVGVGDGPFEMMKQFDDNLPNRVFDNFQFVNFTEIMQRWLPQQQKEAKFALAALMEIPLQYKATVELGLLGVKRGQSPGFRSLPPPSWGLQMDGQAYDPRTGAPQSQSFSRMDSQNYGQTPDAEDMECPVCLLENKDMAFNCGHQTCGQCAQSLTHCPTCRQPITTRIRLY

SEQ ID NO: 651 - protein, 155 aa, Oryza sativa
  misc_feature (37)..(37): Xaa can be any naturally occurring amino acid
  misc_feature (83)..(83): Xaa can be any naturally occurring amino acid
LLQFYPSLNRSKCCAKGICTECFLQMRTPTSCRPTQXLSPILVDFFVLFSLDVLQCYYSLLMLGILRACHVLCVILFGYSLTXRCPYCKMASYAVEYRGVKTKEEKGTEQIEEQRVVEAQIRMRQQELQDDAERMKKKPGCCFDRCGNNCTSRTL

SEQ ID NO: 652 - protein, 514 aa, Bdellovibrio bacteriovorus HD100
MSASTQFIRREGLEAEMRREFYIAFAVAVGLNVLFYLYWTPGLYSLFLFVPFFLLGFRDLHQNRHAIKANFPVFGHFRYILESIRPEINQYFIESNTDGKPFNREQRSVVYQRAKKVLDTVPFGTQHNVYAQGYEFVTHSMYPKHVDRKDLRVTIGTDLCKQPYSMSLLNISAMSFGSLSTASILALNGGAKDGGFAHNTGEGGISPYHLEPGGDLIWQIGTGYFGCRTHDGDFDPELFKKNAAHPQVKMIEIKLSQGAKPGHGGMLSGKKVTQEIANIRNVPMGKDVISPPGHKAFSDSRGMLAFITKLRELSGGKPIGIKLCLGHRNEFEELVSLMSVEKIYPDFIVVDGAEGGTGAAPLEFTNYIGMPGMDALVIVVDTLKKAGLKDKIKVIATGKITTAFDIIKLLCLGADATYAARSMLLALGCIQALRCNNNKCPTGVATQDPNLVRGLHIPTKRVRVKNFHQETLESVAHVIGAMGVARHQDLNRSHLYKRVEDDTIKTYAEIHPGV

SEQ ID NO: 653 - protein, 1481 aa, Saccharophagus degradans 2-40
MSTGLYRLDEFKDNCGFGLIAHLKGQASHKLLQTGIEALTCMTHRGGIAADGKTGDGCGLLIQKPDSFLRTVAAELNFTLADTYGVGAVMLSKDSKAAEAAKTVVEEELARQGLTEILWREVPTNSECLGPIALESEPSIYHLLVNGADADLQAFNSKLFVARRKSEIRLAKDEAFYIASLSSSVLSFKGLMMPVDLPRYYLDLADARLETGICVFHQRFSTNTMPRWPLAQPFRMLAHNGEINTIMGNRNWSVARTKKFQTDLLPNVDEIVPLVNRTGSDSSSLDNMFELLLTGGMELHRAVRMLVPPAWQNVEHMDDELKAFYEYNSMHIEPWDGPAGLVLTDGRHAVCTLDRNGLRPSRWVITKDDCITVASEIGVYDYKPEDVVAKGRLGPGQILSVDTFTGELHHTKDIDEMLKKGQPYQKWLQDNALRIESKLAGDVAENGLTADEVKTAMKMFQVSFEERDQVLRPLAEAGQEAVGSMGDDTPMAVLSAKERSLYDYFRQQFAQVTNPPIDPLREAIVMSLETCIGRELSVFDETEDHANRVILSSPVLSPAKFRALLDLNRKGYDAKRFDLNYDASTLNLKQAIELLLEKIVVAVKQGTALVILSDIELKEGTLPIHALLATGAVHHRLTREGLRCDANIIVESGTIRDSHHAATLIGYGATAVYPYLSYYVLNNLIESGELLMDTGDAYRNYQKGLDKGLLKILSKMGISTVASYRGAQLFEAIGLDEDVIDTCFVGTPSRIKGAGFVDLEADQKAIAVDAWKKRKPIAPGGLLKYVHGQEYHAFNPDVVQTLQKAVKSGNYSEWRDYAELVNNRPVATLRDLIGLRGGTTPIPLDEVEPVSEIVRRFDSAAMSLGALSPEAHEALAEAMNTLGGRSNSGEGGEDPIRFGTLKMSKIKQIASGRFGVTPHYLVNADVLQIKVAQGAKPGEGGQLPGGKVNALIARLRYSVPGVTLISPPPHHDIYSIEDLAQLIFDLKQVNPHALVSVKLVSRPGVGTIAAGVAKAYADLITISGYDGGTAASPLTSIRYAGSPWELGLSETHQTLRANGLRGKVRVQTDGGLKTGLDVIKAAILGAESFGFGTAPMVALGCKYLRICHLNNCATGVATQQDKLRRNHYIGTKEMAINFFSFVAEETREWMAKLGVRTLEELIGRVELLELLDGKTSKQQKLDLSPIIYTDEYLQTKPQFCGVDRNRPFDEGLLAERMVEEVLPAIEAKQGGEFNFHITNCDRSVGARISGEIAKRYGNQGMADKPITLKLTGIAGQSFGVWNAGGLNMYLEGDANDYVGKGMAGGKLVIRPPKGSTFASQNTSIMGNTCLYGATGGKVFAAGGAGERCGVRNSGAHVVVESAGDHCCEYMTGGVVTVLGETGVNFGAGMTGGFAYVLDENNNFVDRYNHELVDITRVNTEALEAHRNHLRSVIEEFVEETESEWGKTLLANFNDYVGKFWLVKPKAAGLDSLLVSVKKRGE

SEQ ID NO: 654 - protein, 147 aa, Zea mays
MGNVAASGGVQVRRRPPAVDERLTRPRRLVRELPDLDAGRLRRLIRTGDLAPCFDPAEDASAGLTEECPICFFFYPSLNRSRCCGKGICTECFLQLMPSEASKLVHCPFCKTKAYAIEYQGAQMTSGKEIKQEGEPNVNETKPSVYI

SEQ ID NO: 655 - protein, 500 aa, Carboxydothermus hydrogenoformans Z-2901
MANLIPPRFKVVIDYERCRKCKRCVINCGFGVYSFADRVIPDHKKCVSCQRCVAFCPEEAITIIENPNVFRPNSYWTMEDRINIMKQASSSGMLLTGMGNDRPYKNYFDHLLIDACQVTNPSIDPLREPMELTTYLGKKPDAVKVKVENGKVKLDTQIAPQIKLDTPIIFSPMSYGSISLNAHKALARAAKECGILMNTGEGGLHKELYPYKDWIIVQVASGRFGVNQEYLDHSAVVEIKIGQGAKPGIGGHLPGEKVNREVSETRMIPEGTDALSPAPHHDIYSIEDLAQLIYALKEATHYEKPVSVKIAAVHNVAAIASGIARAGADIIYIDGFRGGTGAAPTVIRDHIGIPIELAIAAVDDRLRAEGIRNSVSIVAAGGIRHSGDVAKAIALGADAVAIGTAALIAMGCHVCQMCHTGNCSWGIATQRPELTQRLDPDWAAQQLINLVKSWSLELKEILGALGLNAIESLRGSRERLRGIGLTDTELAILGVKHAGR

SEQ ID NO: 656 - protein, 1560 aa, Thauera sp. MZ1T
MDLPQKQGLYDPANEHDACGVGFIAHIKGEKRHDIILQGLEILKNLDHRGAVGADPLQGDGAGILIQIPDQLYREEMAAQGVTLPLPGEYGVGMVFMPKEAASRLACEQEIERAVVAEGQVVLGWRDVPVNRDMPMSPTVKAMEPMIRQIFIGRGPDVMVTEALERKLYVVRRRSANAIGALKLKHAKEFYMVSCSARTVNYKGLLLADQVGEYYPDLLDKRAVSALSLVHQRFSTNTFPKWNLAHPFRYIAHNGEINTLRGNYNWMRAREKGVHSPLLGDDLQKIWPLIYPGQSDSASFDNALELLVMSGYSLAHAMMMMIPEAWESHTQMDEKRRAFYEYHAAMMEPWDGPAAVAFTDGRQIGATLDRNGLRPARYLITDDDLVVMASESGVLPIADSKIVKKWRLQPGKMFLIDMEQGRIIGDQEIKESLAHAKPYADWLRRINIKLDTLEAPAVLDTAAADERVAPLLDRQQAFGYTQEDIKFILEPMGKAGEEGTGSMGNDSPLAVLSSKNKPLFNYFRQLFAQVTNPPIDPIREQMVMSLVSFIGPRPNLLEINEINPPFRLEVSQPVLDFEGMAKIRNIARYTQNKFRSAELDICYPAEWGNEGVEARLASLCADAENAVLAGTNILIVSDRKLAADRVAIPALLALSAIHQHLVEKGLRTRTGLVVETGSAREVHHFAVLAGYGAEAVHPYLALETLAHLADDAETAAKYVKHFVKAIGKGLMKVMSKMGISTYMSYTGAQIFEAVGLKQALLDKYFTGTTSQVEGIGVFEVMEESIRLHKAAFGTDPVLHDMLDAGGEYAFRIRGEEHMWTPDAIAKLQHATRSGKADTYKEYAKIINDQSRRHMTLRGLFELKAALTPVPLDEVEPAKEIVKRFATGAMSLGSISTEAHTTLAVAMNRIGGKSNTGEGGEDPMRFKPLTEAIKLSQVIGEKRIARDLDLNAGDSLRSAIKQVASGRFGVTTEYLINADQIQIKMAQGAKPGEGGQLPGHKVSEYIGFLRHSVPGVGLISPPPHHDIYSIEDLAQLIHDLKNTNPAASISVKLVSEIGIGTVAAGVAKAKADHIVVAGHDGGTGASPWSSIKHAGSPWELGLAETQQTLVLNRLRGRVRLQVDGQIKTGRDVVIGALLGADEFGFATAPLVVEGCIMMRKCHLNTCPVGVATQDPVLRARFSGQPEYVVNYFFFVAEEVRELMAQLGVRTFDELIGRADLLDMKKGIAHWKAQGLDYSRIFYLPNVPAEVPRLHRETQDHGLDKALDKQLVVLAKPALEKGEKVNIDLPVRNINRTVGAMLSGEVAKRYGHAGLPNDTIHIRLNGTAGQSFGAFLARGVTLELVGEGNDYVGKGLSGGRIIVRPKAEFRGDTPQNIIVGNTVLYGATEGEVYFAGVAGERFAVRNSGATAVVEGVGDHGCEYMTGGTVVVLGETGRNFAAGMSGGVAYVLDEDGTFEQRCNMAQVALEPLPEEIAARKGSESGDELESHGRVDIDHLTMGDELILKGLIERHVRFASSVRAREILNNWGLWRKKFVKVFPHEYRRALTEMAQQREAEKEAA

SEQ ID NO: 657 - protein, 374 aa, Arabidopsis thaliana
MQLFGLVNTLLENSRKTAEKDLSIQRYSVIPLSPNSGLIGWVPNCDTLHHLIREHRDARKIILNQENKHMLSFAPDYDNLPLIAKVEVFEYALENTEGNDLSRVLWLKSRSSEVWLERRTNYTRSLAVMSMVGYILGLGDRHPSNLMLHRYSGKILHIDFGDCFEASMNREKFPEKVPFRLTRMLVKAMEVSGIEGNFRSTCENVMQVLRTNKDSVMAMMEAFVHDPLINWRLFNFNEVPQLALLGNNNPNAPADVEPDEEDEDPADIDLPQPQRSTREKEILQAVNMLGDANEVLNERAVVVMARMSHKLTGRDFSSSAIPSNPIADHNNLLGGDSHEVEHGLSVKVQVQKLINQATSHENLCQNYVGWCPFW

SEQ ID NO: 658 - protein, 1620 aa, Oryza sativa Indica Group
MATLPRASAAAAPSPAAALLPLPRAAPLLAGRAAARSAARRLRARGTRAPPLAAARRGWGGVSPRAVLDLPRRREAAEKPAQKAADLNEILSERGACGVGFVANLKNEPSFNIVRDALVALGCMEHRGGCGADNDSGDGSGLMSGIPWDLFNDWANKQGLAPLDRTNTGVGMVFLPQDENSMEEAKAVVAKVFTDEGLEVLGWRTVPFNVSVVGRYAKETMPNIQQIFVKVAKEDNADDIERELYICRKLIERATKSASWADELYFCSLSSRTIVYKGMLRSEILGQFYLDLQNELYKSPFAIYHRRYSTNTSPRWPLAQPMRLLGHNGEINTIQGNLNWMRSREATLQSPVWRGREHEIRPFGDPKASDSANLDSTAELLLRSGRSPAEAMMILVPEAYKNHPTLSIKYPEVIDFYDYYKGQMEAWDGPALLLFSDGRTVGACLDRNGLRPARYWRTSDDFVYVASEVGVIPMDESKVVMKGRLGPGMMITVDLQTGQVLENTEVKKSVASANPYGSWLQQSTRSIKPVNFQSSVAMDNETVLRHQQAFGYSSEDVQMVIETMASQGKEPTFCMGDDIPLAVLSQKPHMLFDYFKQRFAQVTNPAIDPLREGLVMSLEVNIGKRRNILEVGPENADQVTLSSPVLNEGELESLLNDSKLKPKVLSTYFDIRKGLDGSLDKAIKVLCDEADAAVRNGSQLLVLSDRSEALEPTRPAIPILLAVGAIHQHLIQNGLRMSASIVADTAQCFSTHQFACLIGYGASAVCPYLALETCRQWRLSNKTVNLMRNGKMPTVTIEQAQRNFIKAVKSGLLKILSKMGISLLSSYCGAQIFEIYGLGQEVVDLAFCGSVSKIGGLTLDELGRETLSFWVKAFSEDTAKRLENFGFIQSRPGGEYHANNPEMSKLLHKAVREKSDNAYTVYQQHLASRPVNVLRDLLELKSDRAPIPIGKVEPATSIVERFCTGGMSLGAISRETHEAIAIAMNRIGGKSNSGEGGEDPIRWSPLADVEDGYSPTLPHLKGLQNGDTATSAIKQVASGRFGVTPTFLVNAEQIEIKIAQGAKPGEGGQLPGKKVSAYIARLRNSKPGVPLISPPPHHDIYSIEDLAQLIYDLHQINPKAKVSVKLVAEAGIGTVASGVSKGNADIIQISGHDGGTGASPISSIKHAGGPWELGLSETHQLACLQTLIQNGLRERVVLRVDGGFRSGLDVLMAAAMGADEYGFGSVAMIATGCVMARICHTNNCPVGVASQREELRARFPGVPGDLVNYFLFVAEEVRATLAQLGFEKLDDIIGRTDLLKAKHVSLVKTQHIDLKYLLSSAGLPKWSSSQIRSQDVHSNGPVLDETILADPDISDAIENEKEVSKTFPIYNVDRAVCGRVAGVIAKKYGDTGFAGQLNITFTGSAGQSFGCFLTPGMNIRLIGEANDYVGKGMAGGELVVVPVEKTGFVPEDAAIVGNTCLYGATGGQVFVRGKTGERFAVRNSLGQAVVEGTGDHCCEYMTGGCVVVLGKVGRNVAAGMTGGLAYILDEDDTLVPKVNKEIVKMQRVNAPAGQMQLKGLIEAYVEKTGSEKGATILREWEAYLPLFWQLVPPSEEDSPEACAEFERVLAKQATTVQSAK

SEQ ID NO: 659 - protein, 1482 aa, Marinobacter sp. ELB17
MTTGLYQLGEFKDNCGFGLIAHTKGEASHQLLQTAIESLTCMTHRGGIAADGKTGDGCGLLLQSPDSFLRKVARAQFGKEPGDLFAVGQVFLSSEEGQAAAAKAVLERRLCEQGLEVMGWRDVPVDTSCLGPMALDCMPRIEQVFVLPAGKPESNFAISLFVGRRFAERDLADDSEFYICSLSHRTLAYKGLMMPADLANFYRDLDDPDLQTAICVFHQRFSTNTMPRWPLAQPFRYLAHNGEINTIDGNRNWAIARAAKFSSPRLPDLKTLQPLVNLTGSDSSSMDNMLELLLAGGVDLFRAARMMVPPAWQNVDTMDADLRAFYEYNSMHMEPWDGPAGLVLTDGRYALCMLDRNGLRPARWVHTKNDFLTVASEIGTYGYKPDDVVAKGRVGPGQMLAIDTETGEILHTRDIDQRLKTAQPYKRWLRENALRVESTLHQDAPDFELLGADELLIHQKMFNVSFEERDQILRPLGENGQEAVGSMGDDTPMAVLSSKVRHLADYFRQKFAQVTNPPIDPLREAIVMSLETCLGAERNVFEEAAEHADRVILNTPVLSPAKFQRMLVSDRPGFAVEAIALSYVPEEGLQQAIRRVCATAEQAVRDGKSQILLRDSVLQQGHLPVNALMATGAVHHHLVAQGLRCDSNIVVETGWARDPHHFAVLFGFGATAVYPYLAYQVLNDLIRTGEMLVDPIDAKNNYRKGINKGLLKILSKMGISTIASYRGAQLFEAIGLADEVADLCFKGVPCRIQGADFYDFQHDQEQLAKLAWKPRKPLSPGGILKYVHGQEYHAFNPDIVAKLQDAVTSGDYRQYQEYAGLVNHRPVATLRDLLGFREGIQPVDLAEVEPVEQIFTRFDSAGMSLGALSPEAHEALAVAMNTLGGRSNSGEGGEDPARYGNEKRSKIKQVASGRFGVTAEYLRSADVMQIKIAQGAKPGEGGQLPGGKVNALIARLRYSVPGVTLISPPPHHDIYSIEDLAQLIFDLKQVNPQALVSVKLVSEPGVGTIAAGVVKAYADLITVSGYDGGTAASPLTSIRYAGSPWELGLAETQQALRANDLRGRVRLQTDGGIKTGLDVVKAAILGAESFAFGTTPMVALGCKFLRICHLNNCATGVATQNEQLRDEHFKGTVGMAMNFFRFVAEETREWMARLGVRSLQELVGRTDLLVRLPGDTERQRKLDLNRLLNNDQIPADKPQTCQVPRNEPFDKGTLAEKMLSDVRSAIDNKSGGAWSYRVTNCDRSIGARLSGEIAALHGNQSMADAPITLDLTGTAGQSFGVWNVAGLNLILEGDANDYVGKGMTGGKLVLYPPRGSVFKARETAIIGNTCLYGATGGNLFAAGTAGERFAVRNSGAHSVVEGAGDHCCEYMTGGLVTVLGQTGHNFGAGMTGGFAYVLDQDNTFVDKYNHELVEIQRISSESMEAYRNHLRSIIRGHIAETASEWGQHLLANFDDYIGRFWLVKPKAANLRSLLANTRARPE

SEQ ID NO: 660 - protein, 1487 aa, Alcanivorax sp. DG881
MQQNSTLVRGLTEPGEFRDNCGFGLIAHMEGQASHELLQTAIEALTCMTHRGGINADGKTGDGCGLLLKKPDSFFRKVAEEQSITLPDNYGVGMVFTHPDADQSEQQKSAINAALEAQGVAVLGWREVPTDPSCLGDLARASLPGFWQVMVAADGNSEQELNRRLFFARRHAEKAIENDGYFYICSLSASVMSYKGLMMPVDLPVFFPDLGDSAMETAIVVFHQRFSTNTLPQWPLAQPFRYLAHNGEINTVQGNRNWALARENKFQNELLPGLEELSPLVNRTGSDSSSMDNMLEILLAGGMDLFRAVRMMIPPAWQNVETMDADLRAFYEYNSMHMEPWDGPAGLVMTDGRYAVCMLDRNGLRPARWVVTKNGFITLASEIGVYSYKPEDVVAKGRVGPGQILAIDTETGEVLHTKDIDNRLKVRHPYRDWLKSNALRIEADYDHEVGRTDEVDPQDLLSYQKFFQISFEERDQVLRPLAESGQEATGSMGDDTPMAVLSRRERSLFDYFRQQFAQVTNPPIDPLREAIVMSLETCVGAERNVFEETADHADRAILSTPVLSHSKFTNLINIERPGYQTARLSLHYDAETGLKQAVLDLCEQAAKAVRDGSAILVLTDHGIAQDKLTIHAAMATGAVHHSLTEKGLRSDANIIVETATVRDSHHFAVLFGFGATAVYPYLAYDVIADMVRSGELLGDAVELQKNFRKGINKGLMKILSKMGISTITSYRGAQLFEAIGINSDVVEVCFRGVPSRIQGAGFEDFQEDQQNLAKDAWKQRKPIDAGGILKYIHGKEYHAFNPDVIYALHRATQDSDYDAYKEYAELVNKRPVATLRDLFALRDDVDAIDVDQVEPLENILLRFDSAGMSLGALSPEAHEAIATAMNRLGGRSNSGEGGEDPARFGTERVSKIKQIASGRFGVTPHYLVNAEVLQIKVAQGAKPGEGGQLPGGKVNALIARLRHSVPGVTLISPPPHHDIYSIEDLSQLIFDLKQVNPDAQVSVKLVSEPGVGTVASGVAKAYADLITISGYDGGTAASPLTSIRYAGSPWELGLAEAHQALRGNDLRDKIRLQTDGGLKTGLDVIKAAILGAESFGFGTVPMIVLGCKYLRICHLNNCATGVATQREDLRKEHFIGAPELLINYFTFVAQEVRELLALLGVKSIPELIGRTDLLKVLEGETARQGKLDLTPILRNDLVPADKPTHCQVTRNEPFDKAVLSQKMVDDMGTAIESKSGGSFHYEITNCDRSVGARVSGEIAKQHGNLGMETAPIKVRFTGTAGQSFGVFNAGGLHMYIEGDANDYVGKGMAGGKLVIRPPNGSPFKSQETAIIGNTCLYGATGGKLYAAGTAGERFGVRNSGAHAIVEGAGDHCCEYMTGGSITVLGRTGHNFGAGMTGGFAFVLDEDNDFFDRINPELIELHRISSEATESHRSHLRGVIADYVEETGSEWGQYILDNFDAMSRKFWLVKPKAASLENLLQSTRANPA

SEQ ID NO: 661 - protein, 1541 aa, Thermosynechococcus elongatus BP-1
MQQSTVSSPVHPVGYHGQPWLVAERDACGVGFVAHRKGVASHRILTQALEGLTCLEHRGGCSADRDSGDGAGIMTAIPWELLPEFGIPRQRIGVGMIFLPQGAATAAAKAIVEKVLSENELRLLGWRPVPVNPSVLGVQAKQNQPQIEQLFVASSKASGDELERQLYLTRKRIERAIAHTKADWQRDFYICSFSTRTIVYKGMVRSVVLAQFYDDLRNPKYITPFALYHRRFSTNTMPKWPLAQPMRMLGHNGEINTLLGNINWMRARSAQLSHPYWGEAFTDLLPIVNAENSDSANLDNVLELLVQSGRQPLQAMMMLVPEAYQNQPDLADHPEVVDFYEYYSGLQEAWDGPALVAFSDGKIVGATLDRNGLRPARYILTSDDLVIVASEAGTIQIDEARVIAKGRLGPGQMIAVDLEHQELLTNWEIKQRVAQQQPYGEWLKAYRQELAPQPYGEAPTLDPQTCLQQQMAFGFSAEDVEMIIEAMAKEGKEPTFCMGDDIPLAVLSQQPHLLYDYFKQRFAQVTNPAIDPLREKLVMSLVTRLGKRGNLLVESPEHARLLQLNSPLINEAELEEILKAPFGATRLSTQFAIAQGPAGLEAAVDRLCEQAAAAVKGGAEILVLSDRHNLAGEPHLLDAETSYIPPLLAVGAVHHHLIAQGIRRRASLVVETAQCWSTHHFACLIGYGAGAVCPYLTWETIRQWWHSDRTQSLMAKGKLPQLTLQQVQANYRKAVEEGLLKILSKMGISLIASYRGAQIFEAIGIGDDLLNKAFIGTTSRVGGLTLQDLAQETIAFHHKAFPELTAKKLENFGFVQFRPGGEYHMNNPEMAKALHKAVSSNSYDHYEIYRRQLTGRVPTALRDLLDFQSDRPSIPLEAVEPASEIVKRFCTGGMSLGALSREAHEVLAIAMNRLGAKSNSGEGGEDPIRFQVLTDVDAEGHSPQFPHLRGLRNGDTASSAIKQVASGRFGVTPEYLINAQQIEIKIAQGAKPGEGGQLPGSKVSPYIAMLRRSKPGVSLISPPPHHDIYSIEDLAQLIFDLHQINPQAQVSVKLVAEIGIGTIAAGVAKANADVIQISGHDGGTGASPLSSIKHAGSPWELGLTEVHRVLLENQLRDRVILRVDGGLKCGWDVVMGALMGAEEFGFGSVAMIAEGCIMARICHTNNCPVGVATQKEDLRKRFPGLPEHVVNFFLFIAEEVRSILAKLGYRTLNEIIGRADLLVPRQNVTLTKTGPLNLACLTKLPDTRSDRRWLQHEPVHSNGTVLDDAILARPEVQAAIEKQQTVELELPIANTDRTVGARIAGVIAKKYGNTGFEGQITLNFRGSAGQSFGAFNLPGMILKLTGEANDYVGKGMHGGEIIIQPPANAPYAAADNVIIGNTCLYGATGGFLFANGRAGERFAVRNSKAYAVVEGTGDHCCEYMTGGVVVVLGTTGRNVAAGMTGGLAYILDEAGNFPAKVNPEIVKLQRVTSAIGAAQLKQLIIAHHERTGSAKAATILERWEQYLPLFWQVVPPSEANTPEVVGEAAPQTDSKVLSPLS

SEQ ID NO: 662 - protein, 537 aa, Triticum aestivum
MSGFLAVAGKIVTFLLWVLFLVLQTATKVVGGLLQVAPPAEPQEEPQPEAAPRPRSPPAARNRAGGGPADPYGPQSQLWDPPPPPHTAPVTDEYHSSSIYRRRVSAPQAAEDLVVSSSSYSHSAVAAAPASPAHAVSVPPVSRTIKTPAVASKRPKLERKYSKIVDQYRSLDEVIEALAQAGLESSNLIIGIDFTKSNEWTGKSSFNGVSLHHIGDAPNPYEQAISIIGQTLSAFDEDNLIPCYGFGDASTHDQDVFAFNPDERPCYGFQEALARYREIVPHLRLSGPTSFSPIIEMATTIVEQSGGQYHVLVIIADGQVTRSVNTEFGQLSTQEQMTVDAIVQASEFPLSIILVGVGDGPWDMMNEFDDNIPARSFDNFQFVNFTGIMSKKISQSNKETEFALSALMEIPLQYKATLQLGILGRRLAKSPERVPLPPPFASYNTTSRAAPSWANNFRSVPSNLREEATLDSTITPSVTPPPAADARASELQFCPVCLAKPRDMAFGCGHQTCSGCGPQVVDCPICRRPIDTRVKLY

SEQ ID NO: 663 - protein, 182 aa, Zea mays
NFTVYASSFFPSIILWCNSFGKTVNDHLRSTLSFDNKHPPFASQNFDYGQTIACFSYPYNRSRSGDVWAAYESRTSTATVQFRSQIAGGGSSTRIPLPLELAENEPIYVNPKQYHGILRRRQLRAKLEAQNKLVRARKPYLHESRHLRAMKRARGSGGRFLNTKHLQQSHTALTRSTTTSGT

SEQ ID NO: 664 - protein, 308 aa, Thermotoga neapolitana
GGVLLTSMGNDRPYFSYFDRIVLNASQVTNPSIDPLREPMEIRTYIGRKEAKLEIEEDGEGNVALKTEIAPQLKLEVPVMFTAMSYGSISLNALLSLARAARTIGTFFNTGEGGLPKELREFKDNMIVQVASGRFGVSADYLNAGSAVEIKIGQGAKPGIGGHLPGEKVTEPISETRMIPVGTDALSPATHHDIYSIEDLRQLIYAIKEATRYEKPVGVKIAAVHNVAPIAAGMVRAGADYIVIDGIRGGTGAAPKVTRDHVGIPIEFAIAVVDQRLREEGIRHMASIVVAGGIRNSADVIKAIALGA

SEQ ID NO: 665 - protein, 153 aa, Glycine max
  misc_feature (66)..(66): Xaa can be any naturally occurring amino acid
QPFVGRELFAAGFVSCWAQLNETSQKQLVRNLEMAFSSPNIPPEILATLLNLAEFMEHDEKPLPIXLRLLGALAEKCRAFAKALHYKEMEFEGARSKKMDANPVAVVEALIHINNQLHQHEAAVGILTYAQQHLDFQLKESWYEKLQRWDDAL

SEQ ID NO: 666 - protein, 308 aa, Thermotoga sp. RQ7
GGVLLTSMGNDRPYFSYFDRIVLNASQVTNPSIDPLREPMEIRTYIGRKEAKLEIEEDGEGNVALKTEIAPQLKLEVPVMFTAMSYGSISLNALLSLARAARTIGTFFNTGEGGLPKELREFKDNMIVQVASGRFGVSADYLNAGSAVEIKIGQGAKPGIGGHLPGEKVTEPISETRMIPVGTDALSPAPHHDIYSIEDLRQLIYAIKEATRYEKPVGVKIAAVHNVAPIAAGMVRAGADYIVIDGIRGGTGAAPKVTRDHVGIPIEFAIAVVDQRLREEGIRHMASIVVAGGIRNSADVIKAIALGA

SEQ ID NO: 667 - protein, 345 aa, Arabidopsis thaliana
MMHQMLNKKDSATHSTLPYLNTSISWGVVPTDSVANRRGPAESLSLKVDSRPGHIQTTKQISFQDQDSSSTQSTGQSYTEVASSGDDNPSRQISFSAKSVVSLGSEITQRKGFASNPKQGSMTGFPNIHFAPAQANFSFHYADPHYGGLLAATYLPQAPTCNPQMVSMIPGRVPLPAELTETDPVFVNAKQYHAIMRRRQQRAKLEAQNKLIRARKVPYLHESRHVHALKRPRGSGGRFLNTKKLLQESEQAAAREQEQDKLGQQVNRKTNMSRFEAHMLQNNKDRSSTTSGSDITSVSDGADIFGHTEFQFSGFPTPINRAMLVHGQSNDMHGGGDMHHFSVHI

SEQ ID NO: 668 - protein, 553 aa, Bordetella parapertussis 12822
MNWIAGRYTTFALMLIGAALTSALAVHSSRAWLWAAVPFVLLSLLGVYDLLQTRHAIRRNYPVLGNLRFLFEFIRPEIRQYFLEDDTHASPFSRAQRSIVYQRAKQDIDKRPFGTQEDVYGDRYEWINHSMTPAHVADADFRVTVGGPECRQPYSMSAFNISAMSFGALSANAVLALNEGARIGDFAHDTGEGGISRYHRERGGSLVWNIGSGYFGCRDAHGAFSEEAFVKNACTPQVKMIEIKLSQGAKPGHGGILPAGKVTPEIAEARGVPAWQDCNSPSSHSAFDSPVGLLHFVARLRELSGGKPVSFKFCVGHPWEWFAIVKAMLQTNITPDFIVVDGAEGGTGAAPVEFVDHVGTPLREALRLVHNTLIGVNLRDRIKLGASGKIITAFDMARAMAMGADWCNAARGFMFAIGCIQAQACHTGKCPTGVTTQDPLRQRALVVPDKAQRVANFHGNTLHALAELLGAAGLTHPGQLRPHHIARRISSSEVRLLSALFPELAPGELLRGEFRHHVFQVGWGMAQADSFQPAMDISAALAALRPAGAPAHA

SEQ ID NO: 669 - protein, 308 aa, Thermotoga maritima
GGVLLTSMGNDRPYFSYFDRIVLNASQVTNPSIDPLREPMEIRTYIGRKEAKLEIEEDGEGNMALKTEIAPQLKLEVPVMFTAMSYGSISLNALLSLARAARTIGTFFNTGEGGLPKELREFKDNMIVQVASGRFGVSADYLNAGSAVEIKVGQGAKPGIGGHLPGEKVTEPISETRMIPVGTDALSPAPHHDIYSIEDLRQLIYAIKEATRYEKPVGVKIAAVHNVAPIAAGMVRAGADYIVIDGIRGGTGAAPKVTRDHVGIPIEFAIAVVDQRLREEGIRHMASIVVAGGIRNSADVIKAIALGA

SEQ ID NO: 670 - protein, 1517 aa, Shigella flexneri 2a str. 301
MTRKPRRHALSVPVRSGSEVGFPQSLGEVHDMLYDKSLERDNCGFGLIAHIEGEPSHKVVRTAIHALARMQHRGAILADGKTGDGCGLLLQKPDRFFRIVAQERGWRLAKNYAVGMLFLNKDPELAAAARRIVEEELQRETLSIVGWRDVPTNEGVLGEIALSSLPRIEQIFVNAPAGWRPRDMERRLFIARRRIEKRLEANKDFYVCSLSNLVNIYKGLCMPADLPRFYLDLADLRLESAICLFHQRFSTNTVPRWPLAQPFRYLAHNGEINTITGNRQWARARTYKFQTPLIPDLHDAAPFVNETGSDSSSMDNMLELLLAGGMDIIRAMRLLVPPAWQNNPDMDPELRAFFDFNSMHMEPWDGPAGIVMSDGRFAACNLDRNGLRPARYVITKDKLITCASEVGIWDYQPDEVVEKGRVGPGELMVIDTRSGRILHSAETDDDLKSRHPYKEWMEKNVRRLVPFEDLPDEEVGSRELDDDTLASYQKQFNYSAEELDSVIRVLGENGQEAVGSMGDDTPFAVLSSQPRIIYDYFRQQFAQVTNPPIDPLREAHVMSLATSIGREMNVFCEAEGQAHRLSFKSPILLYSDFKQLTTMKEEHYRADTLDITFDVTKTTLEATVKELCDKAEKMVRSGTVLLVLSDRNIAKDRLPVPAPMAVGAIQTRLVDQSLRCDANIIVETASARDPHHFAVLLGFGATAIYPYLAYETLGRLVDTHAIAKDYRTVMLNYRNGINKGLYKIMSKMGISTIASYRCSKLFEAVGLHDDVVGLCFQGAVSRIGGASFEDFQQDLLNLSKRAWLARKPISQGGLLKYVHGGEYHAYNPDVVRTLQQAVQSGEYSDYQEYAKLVNERPATTLRDLLAITPGENAVNIADVEPASELFKRFDTAAMSIGALSPEAHEALAEAMNSIGGNSNSGEGGEDPARYGTNKVSRIKQVASGRFGVTPAYLVNADVIQIKVAQGAKPGEGGQLPGDKVTPYIAKLRYSVPGVTLISPPPHHDIYSIEDLAQLIFDLKQVNPKAMISVKLVSEPGVGTIATGVAKAYADLITIAGYDGGTGASPLSSVKYAGCPWELGLVETQQALVANGLRHKIRLQVDGGLKTGVDIIKAAILGAESFGFGTGPMVALGCKYLRICHLNNCATGVATQDDKLRKNHYHGLPFKVTNYFEFIARETRELMAQLGVTRLVDLIGRTDLLKELDGFTAKQQKLALSKLLETAEPHAGKSLYCTENNPPFDNGLLNAQLLQQAKPFVDERQSKTFWFDIRNTDRSVGASLSGYIAQTHGDQGLAADPIKAYFNGTAGQSFGVWNAGGVELYLTGDANDYVGKGMAGGLIAIRPPVGSAFRSHEASIIGNTCLYGATGGRLYAAGRAGERFGVRNSGAITVVEGIGDNGCEYMTGGIVCILGKTGVNFGAGMTGGFAYVLDESGDFRKRVNPELVEVLSVDDLAIHEEHLRGLITEHVQHTGSQRGEEILANWSTFATKFALVKPKSSDVKALLGHRSRSAAELRVQAQ

SEQ ID NO: 671 - protein, 429 aa, Methanopyrus kandleri AV19
MNAKGPLTRSTPSPVCGGTSRLWWREYVKEIQRKAETGEYAVRGFGTSRKVPHFDDLVILPAQVSRPPIDKYREPCNTKTVLGDRFAEKPLKLDTPVLVGAMSFGALSKEAKVAIARGTAMVGTATNTGEGGMLPEEREEAKWLIAQYASGRFGVSAEYLNAADAIEIKIGQGAKPGMGGHLMGEKVTKEIAEIRGIPKGSDALSPARHMDIVGPEDLKMKIEQLREITDWKIPIIVKYSPGRVKEDVKIAAKAGADIIAIDGMQGGTGASPEIATENAGIPTIAALVQAVEALNEIGMRDEVDIIISGGIRDGADVAKALALGADAVYVCTSVLIAMGCTACAQCHSGRCPVGICTQDPELRKKLDVDEAAERVANYLKVVTEECKMLAQLAGKTDVHNLEKEDLRALSEDVARITGVKMAGSDVELA

SEQ ID NO: 672 - protein, 469 aa, Candida glabrata CBS 138
MGNVPAKLDQDASSYTGRSTYTDSSSASGVGAFRGAGGTMDETRARGRRTSSLVGNILNGPTSSRNDPTGEVSKKQLSAAKKRGTKERELLKEENAKKLVIKYNETVDGGYLAPHGCYSLDKMDYDSDIVRKLIIERKLAPFYIPLQDFDDSWTKDEVKKIVDALPLHAPFNEHVEEYEDVPVGDLNEPHFDYLIDKKLSKKEQKKMHALIFKARLYRKRLRWQESENNAYLEEKLQNRDNDIPKNSFLPNDDLKYDLYAQGSECPICFLYLPMPLNYSKCCQQPICSECFVQIKRSEPHFPHDEVDPSQPQKDENEKDPNLLISEPANCPYCATPNFSITYTPPTGRKVGIGGQAPNLYKPLGTAGNAPPTYTVSSDDIRPDWETKLNKERVRLARRSANATAIHVSNRLIGPQRTGSFANEDSPGVAGSTDSRSAGVANSTLEELEKQMIDEAIRLSLQDEKRKAKR

SEQ ID NO: 673 - protein, 438 aa, Rhodococcus sp. RHA1
MTTPNPALRESATFDRGVISEIQRAAETGIYDIRGWGAKRKLPHFDDLLFLGASMSRYPLEGYREKCDTDVVLGDRNAKFPLHLDIPITIAGMSFGALSGQAKEALGRGASEVGTSTTTGDGGMTPEERGQSKNLVYQYLPSRYGMNPDDLRKADAIEIVLGQGAKPGGGGMLLGQKITERVAGMRTLPMGVDQRSACRHPDWTGPDDLAIKIIELREITNWEKPIYIKVGATRTYYDVKLAVKAGADVVVVDGMQGGTAATQDVFIEHVGIPTLAAIPQAVQALQELGVHRKVQLIVSGGIRSGADVAKAMALGADAVAIGTAALIALGDNSPRYAKQYEELGSAAGFYDDFQAGKDPAGITTQDPELSKNLDPVEGGRRLANYLRVLTMEAQTLARACGKSHLRNLEPEDLVALTVEASAMARVPLAGTTWIPGTL

SEQ ID NO: 674 - protein, 550 aa, Burkholderia cenocepacia J2315
MAVFQDSYGVPMLSRRYLAMWCAVLLLIAAAALASIHVLSWLWIILPVALVALGLYDLNQDRHAILRNYPLWGHFRFLFEFIRPEIRQYFVEDDTDEKPFSRAQRSLVYQRAKNVADNRPYGTELNVKAVAHEWISHSLAPTKLPNHDFRIRVGASRAQPYDISIFNISAMSFGSLSANAIRSLNLGAKKGGFAHDTGEGSLSKYHREHGGDIIWEIASGYFGCRNDDGTFNPDKFAKQAADPQVKMIEVKLSQGAKPGHGGVLPAAKITPEIAETRGVPMGKDCISPATHSEFSTPRGLLEFVERLRTLSGGKPTGFKLCIGHPWEFFGIAKAMLETGIVPDFIVVDGAEGGTGAAPLEFTDHVGVPLQEGLLLVHNTLVGIGVRDRVKLGASGKIITAFDIARTLAIGADWVNSARGFMFAVGCIQAQHCHTDRCPTGVATQDPVRQRALVVPDKAERVYNFHRNTLHALQELVQAAGLAHPSELRAHHIVQRVAPHEVRLMSQLLKYLKPGALLDGQTCGFSLYDKWWPIARSDSFTLGEAVYASIE

SEQ ID NO: 675 - protein, 1515 aa, Azospirillum brasilense
MTTELNQGEQFVADFRANAAALTTANAYNPEDEHDACGVGFIAAIDGKPRRSVVEKGIEALKAVWHRGAVDADGKTGDGAGIHVAVPQKFFKDHVKVIGHRAPDNKLAVGQVFLPRISLDAQEACRCIVETEILAFGYYIYGWRQVPINVDIIGEKANATRPEIEQIIVGNNKGVSDEQFELDLYIIRRRIEKAVKGEQINDFYICSLSARSIIYKGMFLAEQLTTFYPDLLDERFESDFAIYHQRYSTNTFPTWPLAQPFRMLAHNGEINTVKGNVNWMKAHETRMEHPAFGTHMQDLKPVIGVGLSDSGSLDTVFEVMVRAGRTAPMVKMMLVPQALTSSQTTPDNHKALIQYCNSVMEPWDGPAALAMTDGRWVVGGMDRNGLRPMRYTITTDGLIIGGSETGMVKIDETQVIEKGRLGPGEMIAVDLQSGKLYRDRELKDHLATLKPWDKWVQNTTHLDELVKTASLKGEPSDMDKAELRRRQQAFGLTMEDMELILHPMVEDGKEAIGSMGDDSPIAVLSDKYRGLHHFFRQNFSQVTNPPIDSLRERRVMSLKTRLGNLGNILDEDETQTRLLQLESPVLTTAEFRAMRDYMGDTAAEIDATFPVDGGPEALRDALRRIRQETEDAVRGGATHVILTDEAMGPARAAIPAILATGAVHTHLIRSNLRTFTSLNVRTAEGLDTHYFAVLIGVGATTVNAYLAQEAIAERHRRGLFGSMPLEKGMANYKKAIDDGLLKIMSKMGISVISSYRGGGNFEAIGLSRALVAEHFPAMVSRISGIGLNGIQKKVLEQHATAYNEEVVALPVGGFYRFRKSGDRHGWEGGVIHTLQQAVTNDSYTTFKKYSEQVNKRPPMQLRDLLELRSTKAPVPVDEVESITAIRKRFITPGMSMGALSPEAHGTLNVAMNRIGAKSDSGEGGEDPARFRPDKNGDNWNSAIKQVASGRFGVTAEYLNQCRELEIKVAQGAKPGEGGQLPGFKVTEMIARLRHSTPGVMLISPPPHHDIYSIEDLAQLIYDLKQINPDAKVTVKLVSRSGIGTIAAGVAKANADIILISGNSGGTGASPQTSIKFAGLPWEMGLSEVHQVLTLNRLRHRVRLRTDGGLKTGRDIVIAAMLGAEEFGIGTASLIAMGCIMVRQCHSNTCPVGVCVQDDKLRQKFVGTPEKVVNLFTFLAEEVREILAGLGFRSLNEVIGRTDLLHQVSRGAEHLDDLDLNPRLAQVDPGENARYCTLQGRNEVPDTLDARIVADARPLFEEGEKMQLAYNARNTQRAIGTRLSSMVTRKFGMFGLQPGHITIRLRGTAGQSLGAFAVQGIKLEVMGDANDYVGKGLSGGTIVVRPTTSSPLETNKNTIIGNTVLYGATAGKLFAAGQAGERFAVRNSGATVVVEGCGSNGCEYMTGGTAVILGRVGDNFAAGMTGGMAYVYDLDDSLPLYINDESVIFQRIEVGHYESQLKHLIEEHVTETQSRFAAEILNDWAREVTKFWQVVPKEMLNRLEVPVHLPKAISAE

SEQ ID NO: 676 - protein, 208 aa, Zea mays
MPCFPPSISPLPPQLKKRSHPRSLVHISFHTCTGDAHAQAAQHNCCCREAKNPSALLPRLPPQAHPGMGNIAASGGVQVRRRPPAVDERLTRPRRLVRELPDLDAGRLRRLIRTGDLAPCFDPAEDASAGLTEECPICFFFYLSLNRSRCCGKGICTALALAIATRYCPTVREGGDFRLAVAGSRDRARFCRQDSLVVLRIPMPAQLA

SEQ ID NO: 677 - protein, 526 aa, Bacillus pumilus SAFR-032
MTTPFIVIVALLVIFFIIPIILFIWIWMRDEKQEEHSVLRNYPVIGKLRFIFEKIGPELRQYLFLNDREELPFSRREYEQAVMSGKYKSRTMGFGSKRDFDKPGYYIRNVLFPKQRDELRIDQSEKIQTKVYQIDQDNLLRRSEHTKEVEAKPYYLHQDDVQVIGEHTCQKPFRVKGLIGQSAMSYGSLGDRAITALSSGLKMAGGTWMNTGEGGLSPYHLKGGADIICQIGPGLFGVRTEDGAFSFEEFKKKSEHEEVKAFELKLAQGAKTRGGHIDGEKVTEEIANIRKLPPHQSIDSPNRFEMFHSIPDMFDFIEQLRSIGGKPVGIKLVVGHKENIEELAAYMKKSGKHPDFITVDGGEGGTGASFHELADSAGLPIFTALPMVHQILKEYGVRDQVKLFASGKLLSPDKIAIALSMGADFVNIARGLMFSVGCIRAQVCHTNKCPVGVATTDPKLQKGLSIEEKKYRVCNYILSLREGLFNLSAAAGIESPIHFNEKHIVYRQENGQTSEVPIFSGTQPSV

SEQ ID NO: 678 - protein, 1538 aa, Chlorobium tepidum TLS
MPENMKAKHEGGLYDPQFEHDACGVGFVANIKGVKSHQIIKQGLQVLVNMKHRGATGYEKNTGDGAGILIQIPDKFMRKVCAQRNIELPEPGKYGVGMVFLPPDLTQRRAIEDICRQMVQAEGQKYLGLRKVPTDNSTLGQTARSQEPVVKQIFVGRGNDNMSDLEFERKLYIIRRRIFKRVRFTSGLLGSSFFYISSFSARTIVYKGMLNPEQVEEFYPELRDPDMESAIAMVHSRFSTNTFPSWDRAHPYRFLSHNGEINTLRGNVNWMKAREKNMQSSIFKGALEEIKPILLEEGSDSATLDNAFELLVMCGRSMAHAAMMLIPEPWSGNESMDPDKRAFYEYHSCLMEPWDGPASVVFTDGIQIGAVLDRNGLRPSRYYITSDDLVVMASEVGVLDIDPEKIIKKDRLQPGRMFLVDTKEGRIISDEEIKKSIASEKPYTEWIERNVIDLASLPERERMKNPDEDNYSITARQKAFGYTNEDLTLQIRPMAQNGTECIGSMGNDTPLAVLSNRPRLLYDYFKQLFAQVTNPPIDSIREEIVTSTTVMLGAEGNLLESDEINCRRIRIPHPILTDEDLEKIRGIDKPGFKAITLPIFYNVAEGGRGIQETMQDLYRQAEKAINQEGVNIIILSDKGELEKSRAPIPVLLALAGFHHFLISAGLRTKVGLIVESGEPRTVHHFSMLIGYGAGAINPYLAFETIRQQVAQGRITHDEKKAIKNYVKAAVKGVVKTMAKMGISTVQSYRGAQIFEAVGLNTEVVDTYFTKTPSRIEGIGLDTLADEVRKRHEAAFPPGGNKVNRGLEAGGDRKWRHDGEFHLFNPETIHYLQHSCRTGDYELFKKYEKLIDDQSEHYCTIRGLMDIRFSEKPIPIDEVEPVEAIVKRFKTGAMSYGSISKESHETLAIAMNRLGGKSNTGEGGEEPDRFVRDANGDSRMSAIKQVASGRFGVTSEYLTNAEEIQIKMAQGAKPGEGGQLPGTKVYPWIAKTRHSTPGVGLISPPPHHDIYSIEDLAQLIFDLKNANRSARINVKLVSTVGVGTIAAGVAKAHADVVLISGHDGGTGASPISSIMHAGMPWELGLAETHQTLMLNNLRSRIVVEADGQLKTARDIVIAAMLGAEEFGFATTALVVMGCIMMRCCQDDSCPVGIATQNPELRKNFKGKPEHVENFMRFLAQGVREYMAKLGIRTLNELVGRSDLLATSRTIKHWKAKGVDLSKILHQVDTGDNDTPYCTITQDHGIEESLDMRVLMAICEPAIKRGEKVSTTLPIKNTNRAAGTIVGHEVTKAYGSKGLPDDTIHLKFIGSAGQSLGAFIPKGMTIELVGDANDYIGKGLSGGRIIAYPPKSSKFVPEENIIVGNVAFYGATSGEAFIRGMAGERFCVRNSGMEAVVESVGDHGCEYMTGGKVVILGKTGRNFAAGMSGGVAYVYDVDGAFTGRCNLEMVSLSAVEAEDELEWLRSKIEQHVEVTGSELGKGLLATWPNASQRFVKVLPNDYKRAIDAMKEVEAMGMTGDEAVMAAFEKNVHDPSRASGN

SEQ ID NO: 679 - protein, 480 aa, Clostridium difficile 630
MSIYKCSVCGYIYDESKNDKTWDELSEDWECPVCTKGRSYFGKISTVYYEEDEKIAEDIVEDESKLNTEKEGDLNYLSTYLRRDDEVEKHMDIIHEMAVTGKSIIEPMRTKLPVISWDDILIMGAQLNPLPLNEHDEVNTTTIIGKKAKKPMIIENPVYISHMSFGALSKELKIALAKGAAQNKTAMCSGEGGILPEEKEASYKYIFEYVPNKYSVTEENLKNSDAIEIKIGQGTKPGMGGHLPGEKVTEEIAKVRNKPVGQDVISPSCFEEIQSKEDLKKLVDELREVSEGRPIGVKISAGHIEKDMEFIAYAKPDFVTIDGRGGATGASPKLLKDATSIPTIFALYRARKYIDTHGLDIDLVITGGLRISTDFAKAIAMGADAVAIASSALMAAACQQYRICGSGKCPVGVATQDEELRKRLHIENSANRVANFLNVSLEELKTFARISGHKDIHDLSVDDLYTVNSEISNYTNIQHV

SEQ ID NO: 680 - protein, 534 aa, Rhodococcus sp. RHA1
MAARAYGEFMKRWNALAIPAAAAAAIASYDLVQRRHALLRNFPVVGHGRYLLESLGPELRQYITTGNDEERPFTRDQRRWVYASSKRVTDTFGFGTDNDIEFTDGYTIIKHRTFSEIPPSAMPHADEHLAIPSAKVLGAARGRAHAFRPRSIVNISGMSFGALSSAAVVALNRGAAATDCLHNTGEGGISRYHRNGADLIFQIGTAYFGCRDEDGRFDLARLRALVESAPVRAIEIKLSQGAKPGLGGLLPGAKVTPEIAEIRGVPEGRDCISPSRHTAFRDVDSMLDWVELLAAETGLPVGIKSAVGDPTFWDLLVEAMSNSGRGVDFVTIDGGEGGTGAAPLVFTDAVSLPFRSGFARVYAKFAEAGLTDGITFIGSGKLGLPDNAVAAMSLGCDLINVAREPMLAVGCIQAQKCHTDRCPTGVATQNPWLAHGLDAGIKSVRAANYLRALRRDVFKVAEACGVAHPGLITASDVEVADGNRHSITLADLYGYRLGWGLPGDADRAEITRLMTEAAAVPAGETGSPGAKTAP

SEQ ID NO: 681 - protein, 1830 aa, Rhodococcus sp. RHA1
MNTSATESGLYDRTLDKSSCGVGFITRKDGIQTHDVLIRGHEALCAVPHRGGMSAEGVGDGAGVCVDLSVPFFRTLTGQDDLEAGRFGVGNFFLPTDVAFHGDAEAVIERALADQGFHVLLERDVPVDATVLRPAAIRHQLPIRQWVFTAPDACADETEFDRRIHDALLAIEAVAYTQPDLAGLYPLSLSARTQVLKGRLNSNEVMPYFQDLVDPAHAIHTLYFHTRFSTNTDPHPTMAQPFRLMAHNGELNTDKKNRLSETALARARNREIVRPHGQSDSCRLDQTLQSRVVEDGLDLVTAVVSMMPPAWENDSTLSPEVRAMLEYFSLYEEKNDGPAALIFGDGTVVGARLDRLGLRPLRSVETDEYLCVTSEAGQIDFDPETVVHRGRIEAGGMLYFDHREGRSYSTDEALELLASRNDYPTLVAEARRTIEALPEVEAEPGPLRYNGDLERTQRYVAYSHNQESFKFMMDPMLASGQEKISAMGYGNAINALSDQEGGVAKYFSQRFAQVTNPSLDSIREADGMTLRVALGAKPNSGAQSAPQIVVPSPILTHMDMLRIRKQSETPVQRFPMLYTPVHGDSAANAAALEAAVDGLCDEVEAFAREQGGIAIVTDRHVATDRAALPMIVAISAVNQRLIEEGLRLRVSVVAESGQISSSHHVAAALGFGAAAIYPLAVRLRAEEKFADEADVAFKRFAKAAEKSLMKTMGRVGLCTAESYIGGEFFEPNYLDTDDRVLRRYFANVKTPVGGVGFAVIAQAVADWHQRALTVTGEKDVPLLGLFKERAEGAGHSYGTAAVRGFVDLTEEPISFDTAGTQDHTESLRLLPLNRLEDAFGLDDDAYRNAGFQKLTPEAIDCFEITPGYRAFARTMAEERTRRPAALRDVLDLPADVTFLTTAAEFRKQMGRFSRKGNNSFAVRGLESEAIGEDRFRLRLTGPHAGESRVLAALGESLVMRFGDDLLDHSVDGDALVVSTSGEALRCLSLLRTAPASVPIGQVQKASEITPFLTSGAMSHGALNSNAHEAVAHGTNMVGGMSNSGEGGEHISRYGTIRGSRIKQFASGRFGVWAGYLADPMLEELEIKIAQGAKPGEGGQLPAPKVTVEIAAARGGTPGVELVSPPPHHDTYSIEDLAQLIHDCKAARVRVIVKLVSSEGIGTIAVGVAKAGADVINVAGNTGGTGAAAVTSLKYAGRSAEIGVAEVHQALCANGLRQKVLLRCSGAHQTASDVVKSALLGADSFEFGTTALMMLKCVMAKNCNIKCPAGLTTNPELFDGDPRAMAQYLLNIAHETREVLAELGMSSLREARGRSDLLQLLDHPSSVGQLDLRAMLAVVEEVTIGDPVYLEKDYTLDDGWLVQLRAALVEQGEATVELGDGVHLSNRNKSVGAQLAVDIERMLNHELTDVELPAVLRDERGRGYLRDGSVRIATSGSAGLSYGAFCNDGMTLVHTGTANDGVGKGANGGSIVVRSPGGGSDRHGGNVLIGNFALFGATGGRTFVEGQAGDRFAVRNSGATAVVEGVGDFACEYMTNGAVLNLGSFGKGVGNGMSGGFVYQYDPEGKLPGKASADSILLGSITGDDEHAALHRQAVHVLLGWHLEATGSAKAAWLLENWETEQHHFVYGMPRALLQYQDSDEILKAKPRKELADELAAALVAHQVRKFKLDYRDGHAVLDGAVPGYGEADTEAMFALLNNYTVLNAAQEMALSKLPGVADPSDPAVDKAVRNLLLTEDFFLMQRLQRYAREALKDYSDEDLAVMVAAKRLADYKDALRRRNVRSIDAPGTYGWILHQDAKNVDKIGRLPGFEELFAQHALPDLIPTRDVVPS

SEQ ID NO: 682 - protein, 1615 aa, Oryza sativa
MATLPRAAAAAAPSPAAALLPLPRAAPLLAGRAAARSAARRLRARGTRAPPLAAARRGWGGVSPRAVLDLPRRREAAEKPAQKAADLNEILSERGACGVGFVANLKNEPSFNIVRDALVALGCMEHRGGCGADNDSGDGSGLMSGIPWDLFNDWANKQGLAPLDRTNTGVGMVFLPQDENSMEEAKAVVAKVFTDEGLEVLGWRTVPFNVSVVGRYAKETMPNIQQIFVKVAKEDNADDIERELYICRKLIERATKSASWADELYFCSLSSRTIVYKGMLRSEILGQFYLDLQNELYKSPFAIYHRRYSTNTSPRWPLAQPMRLLGHNGEINTIQGNLNWMRSREATLQSPVWRGREHEIRPFGDPKASDSANLDSTAELLLRSGRSPAEAMMILVPEAYKNHPTLSIKYPEVIDFYDYYKGQMEAWDGPALLLFSDGRTVGACLDRNGLRPARYWRTSDDFVYVASEVGVIPMDESKVVMKGRLGPGMMITVDLQTGQVLENTEVKKSVASANPYGSWLQQSTRSIKPVNFQSSVAMDNETVLRHQQAFGYSSEDVQMVIETMASQGKEPTFCMGDDIPLAVLSQKPHMLFDYFKQRFAQVTNPAIDPLREGLVMSLEVNIGKRRNILEVGPENADQVTLSSPVLNEGELESLLNDSKLKPKVLSTYFDIRKGLDGSLDKAIKVLCDEADAAVRNGSQLLVLSDRSEALEPTRPAIPILLAVGAIHQHLIQNGLRMSASIVADTAQCFSTHQFACLIGYGASAICPYLALETCRQWRLSNKTVNLMRNGKMPTVTIEQAQRNFIKAVKSGLLKILSKMGISLLSSYCGAQIFEIYGLGQEVVDLAFCGSVSKIGGLTLDELGRETLSFWVKAFSEDTAKRLENFGFIQSRPGGEYHANNPEMSKLLHKAVREKSDNAYTVYQQHLASRPVNVLRDLLELKSDRAPIPIGKVEPATSIVERFCTGGMSLGAISRETHEAIAIAMNRIGGKSNSGEGGEDPIRWSPLADVEDGYSPTLPHLKGLQNGDTATSAIKQVASGRFGVTPTFLVNAEQIEIKIAQGAKPGEGGQLPGKKVSAYIARLRNSKPGVPLISPPPHHDIYSIEDLAQLIYDLHQINPKAKVSVKLVAEAGIGTVASGVSKGNADIIQISGHDGGTGASPISSIKHAGGPWELGLSETHQTLIQNGLRERVVLRVDGGFRSGLDVLMAAAMGADEYGFGSVAMIATGCVMARICHTNNCPVGVASQREELRARFPGVPGDLVNYFLFVAEEVRATLAQLGFEKLDDIIGRTDILKAKHVSLAKTQHIDLKYLLSSAGLPKWSSSQIRSQDVHSNGPVLDETILADPDISDAIENEKEVSKTFQIYNVDRAVCGRVAGVIAKKYGDTGFAGQLNITFTGSAGQSFGCFLTPGMNIRLVGEANDYVGKGMAGGELVVVPVEKTGFVPEDAAIVGNTCLYGATGGQVFVRGKTGERFAVRNSLGQAVVEGTGDHCCEYMTGGCVVVLGKVGRNVAAGMTGGLAYILDEDDTLVPKVNKEIVKMQRVNAPAGQMQLKGLIEAYVEKTGSEKGATILREWEAYLPLFWQLVPPSEEDSPEACAEFERVLAKQATTVQSAK

SEQ ID NO: 683 - protein, 1622 aa, Arabidopsis thaliana
MAMQSLSPVPKLLSTTPSSVLSSDKNFFFVDFVGLYCKSKRTRRRLRGDSSSSSRSSSSLSRLSSVRAVIDLERVHGVSEKDLSSPSALRPQVANWEDILSERGACGVGFIANLDNIPSHGVVKDALIALGCMEHRGGCGADNDSGDGSGLMSSIPWDFFNVWAKEQSLAPFDKLHTGVGMIFLPQDDTFMQEAKQVIENIFEKEGLQVLRWREVPVNVPIVGKNARETMPNIQQVFVKIAKEDSTDDIERELYICRKLIERAVATESWGTELYFCSLSNQTIVYKGMLRSEALGLFYLDLQNELYESPFAIYHRRYSTNTSPRWPLAQPMRFLGHNGEINTIQGNLNWMQSREASLKAAVWNGRENEIRPFGNPRGSDSANLDSAAEIMIRSGRTPEEALMILVPEAYKNHPTLSVKYPEVVDFYDYYKGQMEAWDGPALLLFSDGKTVGACLDRNGLRPARYWRTSDNFVYVASEVGVVPVDEAKVTMKGRLGPGMMIAVDLVNGQVYENTEVKKRISSFNPYGKWIKENSRFLKPVNFKSSTVMENEEILRSQQAFGYSSEDVQMVIESMASQGKEPTFCMGDDIPLAGLSQRPHMLYDYFKQRFAQVTNPAIDPLREGLVMSLEVNIGKRGNILELGPENASQVILSNPVLNEGALEELMKDQYLKPKVLSTYFDIRKGVEGSLQKALYYLCEAADDAVRSGSQLLVLSDRSDRLEPTRPSIPIMLAVGAVHQHLIQNGLRMSASIVADTAQCFSTHHFACLVGYGASAVCPYLALETCRQWRLSNKTVAFMRNGKIPTVTIEQAQKNYTKAVNAGLLKILSKMGISLLSSYCGAQIFEIYGLGQDVVDLAFTGSVSKISGLTFDELARETLSFWVKAFSEDTTKRLENFGFIQFRPGGEYHSNNPEMSKLLHKAVREKSETAYAVYQQHLSNRPVNVLRDLLEFKSDRAPIPVGKVEPAVAIVQRFCTGGMSLGAISRETHEAIAIAMNRIGGKSNSGEGGEDPIRWKPLTDVVDGYSPTLPHLKGLQNGDIATSAIKQVASGRFGVTPTFLVNADQLEIKVAQGAKPGEGGQLPGKKVSAYIARLRSSKPGVPLISPPPHHDIYSIEDLAQLIFDLHQINPNAKVSVKLVAEAGIGTVASGVAKGNADIIQISGHDGGTGASPISSIKHAGGPWELGLTETHQTLIANGLRERVILRVDGGLKSGVDVLMAAAMGADEYGFGSLAMIATGCVMARICHTNNCPVGVASQREELRARFPGVPGDLVNYFLYVAEEVRGILAQLGYNSLDDIIGRTELLRPRDISLVKTQHLDLSYLLSSVGTPSLSSTEIRKQEVHTNGPVLDDDILADPLVIDAIENEKVVEKTVKICNVDRAACGRVAGVIAKKYGDTGFAGQVNLTFLGSAGQSFGCFLIPGMNIRLIGESNDYVGKGMAGGEIVVTPVEKIGFVPEEATIVGNTCLYGATGGQIFARGKAGERFAVRNSLAEAVVEGTGDHCCEYMTGGCVVVLGKVGRNVAAGMTGGLAYLLDEDDTLLPKINREIVKIQRVTAPAGELQLKSLIEAHVEKTGSSKGATILNEWKKYLPLFWQLVPPSEEDTPEASAAYVRTSTGEVTFQSA

SEQ ID NO: 684 - protein, 1615 aa, Oryza sativa
MATLPRAAAAAAPSPAAALLPLPRAAPLLAGRAAARSAARRLRARGTRAPPLAAARRGWGGVSPRAVLDLPRRREAAEKPAQKAADLNEILSERGACGVGFVANLKNEPSFNIVRDALVALGCMEHRGGCGADNDSGDGSGLMSGIPWDLFNDWANKQGLAPLDRTNTGVGMVFLPQDENSMEEAKAVVAKVFTDEGLEVLGWRTVPFNVSVVGRYAKETMPNIQQIFVKVAKEDNADDIERELYICRKLIERATKSASWADELYFCSLSSRTIVYKGMLRSEILGQFYLDLQNELYKSPFAIYHRRYSTNTSPRWPLAQPMRLLGHNGEINTIQGNLNWMRSREATLQSPVWRGREHEIRPFGDPKASDSANLDSTAELLLRSGRSPAEAMMILVPEAYKNHPTLSIKYPEVIDFYDYYKGQMEAWDGPALLLFSDGRTVGACLDRNGLRPARYWRTSDDFVYVASEVGVIPMDESKVVMKGRLGPGMMITVDLQTGQVLENTEVKKSVASANPYGSWLQQSTRSIKPVNFQSSVAMDNETVLRHQQAFGYSSEDVQMVIETMASQGKEPTFCMGDDIPLAVLSQKPHMLFDYFKQRFAQVTNPAIDPLREGLVMSLEVNIGKRRNILEVGPENADQVTLSSPVLNEGELESLLNDSKLKPKVLSTYFDIRKGLDGSLDKAIKVLCDEADAAVRNGSQLLVLSDRSEALEPTRPAIPILLAVGAIHQHLIQNGLRMSASIVADTAQCFSTHQFACLIGYGASAICPYLALETCRQWRLSNKTVNLMRNGKMPTVTIEQAQRNFIKAVKSGLLKILSKMGISLLSSYCGAQIFEIYGLGQEVVDLAFCGSVSKIGGLTLDELGRETLSFWVKAFSEDTAKRLENFGFIQSRPGGEYHANNPEMSKLLHKAVREKSDNAYTVYQQHLASRPVNVLRDLLELKSDRAPIPIGKVEPATSIVERFCTGGMSLGAISRETHEAIAIAMNRIGGKSNSGEGGEDPIRWSPLADVEDGYSPTLPHLKGLQNGDTATSAIKQVASGRFGVTPTFLVNAEQIEIKIAQGAKPGEGGQLPGKKVSAYIARLRNSKPGVPLISPPPHHDIYSIEDLAQLIYDLHQINPKAKVSVKLVAEAGIGTVASGVSKGNADIIQISGHDGGTGASPISSIKHAGGPWELGLSETHQTLIQNGLRERVVLRVDGGFRSGLDVLMAAAMGADEYGFGSVAMIATGCVMARICHTNNCPVGVASQREELRARFPGVPGDLVNYFLFVAEEVRATLAQLGFEKLDDIIGRTDILKAKHVSLAKTQHIDLKYLLSSAGLPKWSSSQIRSQDVHSNGPVLDETILADPDISDAIENEKEVSKTFQIYNVDRAVCGRVAGVIAKKYGDTGFAGQLNITFTGSAGQSFGCFLTPGMNIRLVGEANDYVGKGMAGGELVVVPVEKTGFVPEDAAIVGNTCLYGATGGQVFVRGKTGERFAVRNSLGQAVVEGTGDHCCEYMTGGCVVVLGKVGRNVAAGMTGGLAYILDEDDTLVPKVNKEIVKMQRVNAPAGQMQLKGLIEAYVEKTGSEKGATILREWEAYLPLFWQLVPASEEDSPEACAEFERVLAKQATTVQSAK

SEQ ID NO: 685 - protein, 1527 aa, Mycobacterium marinum M
MTPKRVGLYNPAFEHDSCGVAMVVDMHGRRSRDIVDKAITALLNLEHRGAAGAEPRSGDGAGILIQVPDAFLREVVDFELPAPGSYATGIAFLPQSSKDAAAACAAVEKIAEAEGLQVLGWRNVPTDDSSLGALSRDAMPTFRQVFLAGASDMTLERRCYVIRKRAEHELGTKGPGQDGPGRETVYFPSLSGRTFVYKGMLTTPQLKAFYLDLQDDRLTSALGIVHSRFSTNTFPSWPLAHPFRRIAHNGEINTVTGNENWMRAREALIKTDVFGTEANVEKLFPICTPGASDTARFDEVLELLHLGGRSLAHAVLMMIPEAWERHASMDPSRRAFYQYHSSLMEPWDGPASMTFTDGTIIGAVLDRNGLRPSRIWVTEDGLVVMASEAGVLDLDPSTVVQRMRLQPGRMFLVDTAQGRIVSDEEIKAELAAEHPYQEWLDNNLVPLEKLPSGEYARMAHERVVLRQLVFGYTYEELNLLVAPMVRTGAEPIGSMGTDTPIAVLSRRPRMLYDYFQQLFAQVTNPPLDAIREEVVTSLQGTTGGERDLLNPDENSCHQIQLPQPILRNHELAKLINLDPETVINGRPHGLKSKVVRCLYPVAEGGAGLAAALNEVRAQASAAIADGARIIVLSDRESDERMAPIPALLAVAGVHHHLVRERSRTKVGLVVESGDAREVHHMAMLLGCGAAAVNPYLAFESIEDMLDRGVIDGIDRNTALSNYVKAAGKGVLKVMSKMGISTLASYTGAQLFQAVGVSEEVLNEYFSGLTCATGGITLDDIAADVATRHTLAYLDRPDERAHRELEVGGEYQWRREGEYHLFNPETVFKLQHSTRTGQYKIFKEYTRLVDDQSERMASLRGLLKFRAGVRPPIPLDEVEPASEIVKRFSTGAMSFGSISAEAHETLAIAMNRLGGRSNSGEGGEDVGRFEQDPNGDWRRSAIKQVASARFGVTSHYLTNCTDIQIKMAQGAKPGEGGQLPGHKVYPWVAKVRHSTPGVGLISPPPHHDIYSIEDLAQLIHDLKNANPSARVHVKLVSENGVGTVAAGVSKAHADVVLISGHDGGTGATPLTSMKHAGAPWELGLAETQQTLLLNGLRDRIVVQVDGQLKTGRDVMIATLLGGEEFGFATAPLVVAGCIMMRVCHLDTCPVGVATQNPLLRERFNGKPEFVENFFMFIAEEVREYMAQLGFRTINEAVGQAGALDTTLARAHWKAHRLDLTPVLHEPESAFMNQDLYCSSSQDHGLDKALDQQLIVMSREALDSGKPVRFATTISNVNRTVGTMLGHEVTKAYGGQGLPDGSIDITFEGSAGNSFGAFVPKGITLRIYGDANDYVGKGLSGGRIVVRPSDNAPPGYVAEDNIIGGNVILFGATSGEVFLRGVVGERFAVRNSGAHAVVEGVGDHGCEYMTGGRVVILGQTGRNFAAGMSGGIAYVYDPDGELPDNLNTEMVDVETLDDDDSEFVHGIVQAHVDATDSAVGQRVLADWPQQQRHFVKVMPRDYKRVLQAIAEAERDGVDIDKAIMAASHG

SEQ ID NO: 686 - protein, 499 aa, Moritella sp. PE36
MQPEFRSQIDILLYGLDIMTGLFILILFGGIISVIYMYIVDKRQTKQAIRHNYPVIGRFRYLFEKQGEFFRQYFFAQDREEMPFNRAERSWVYRAAKNVDRTIAFGSTRNLDQVGTIMFMNCAFPTLAEDAIPPQKVTIGPNCAQPYATSSIFHISGMSYGAISKPAVLALSHGAKEAGCWLNTGEGGLSPHHLAGGADLVYQIGTAKYGVRDDNGQLSDEKLKSLAEIEQIKMFEIKLSQGAKPGKGGILPGKKVTAEIAEIRGIPIGEDSISPNAHPEIKNVGDILDMVEHIRQVTGKPVGFKFVLGHSQWLDDLLTEVNKRGASSAPDFMTLDSADGGTGAAPQPLMDYVGLTLKESLPLLTNILEKYNLRKQIKVIASGKLITPSKVAWALAVGADFIVSARGNMFALGCIQALQCNKNTCPTGITTHNPKLQQGLDVKDKAQRVANYNKYIHYGVGLIAHSCGVNEPRQLRRDHVRVVTENGLSIALDKLYPIE

SEQ ID NO: 687 - protein, 1478 aa, Bacillus anthracis str. Ames
MLNKTNTWTPSLFRDYKNAEHDACGIVSVMEKRKIPTKENIDLCIQSLVKMNHRAGFINGEGDGIGIHIDVPKALWNEKLKSSGYNPTIVDHPHFIVGHFFLNKNENIVDLKNHIRTQLNNENFAILFESDNVINSDALGPLGKQEEPLFWQVALIAENEVVNIEQTLFSVTIKIEENEAIHVASLSRDHVVYKVLGAGDTLVAYYNDLQHPLIASTMTLGHNRYSTNTLSNFFRVQPFSILGHNGEINTIAKLRDQAEMIHVPLTAGGSDSQDLNRTLETLLVQYGYSLFEAMDILFPPIINEIKLYETHLQDLYTYIREAWGHFAQGPAGIISRYKDEAVFSVDSLGLRPVWKVEIESSYIFSSEPGVVSPTEYVAEPKPLAPGEKVGLKWNEQDELVLYEHDDYQTQVYNRFKKKVDVTNYHLHLSIPKTKEIPDACDSMQVETKQYVAFGWDREHIQLLEQMATKGVEPIRSLGHDSPLAALDTDRRNIADFIKESVAVVTNPAIDRDREVEHFSTRTILGERPSLLSDAKKPFVVEMLSPIILEGSVAQSIAQELHTITYEQLIELFNTHSSIATISATFSQAETLQCALSRISSEAITAVNDGASLLLIDDADAHLNERLWIDPHLVTAKVHQVLSENKLRRNCSLVIRSGALRSLHDIVTLHGLGADSINPYLLFATVNDGTKTPITNLYNALNKGLEKVISTIGIHELRGYGRLYSSIGLHEEIANILQITNFLGSNDLAFSLESLAEDAQMRADDYNDPKVRIRKSFHIFPRIWKAIGDVAKGNSYDDYRDKLSELEENNPIAIRHLIQTKETKHVIPTEEVSISIQNHDLPFIISSMSFGSQNEIAFRAYAEAADQLNMISLNGEGGEIKDMIGKYPHTRGQQVASGRFGVNAELLNSSNLIEIKIGQGAKPGEGGHLPGSKVTAKIAEARNATIGSDLISPSNNHDIYSIEDLAQMITEIKTANQLAKVAVKVPVVPNIGTIAVGIAKAGADFINISGFDGGTGAARIHALQHVGLPVEIGVKAAHNALLEANMRHNVEIWADGGIRSVNDALKIMLLGANRIGFGTLSMIAIGCTTCRGCHLDTCHVGIATQIESEAQAKEHGLRRFVPRELESAVAGLLHLFTTFGEELKRLTGNLGYTNLQEIVGRSDLLEQVRGKNLLNLCNLLQTIEHPSVIKTEHVLEKQFEPIHSPHSKELVGVGVEQRVMGGLESCYRVRSKLYEDTKLEPLTLKYTNGSIPGNGLGAYNSENLFIHVNGGAQDGIGKTSFGGGIYITKAKGKDGLYYNGSVGKGFGYGAQKGALYVQGNADARAGIRLSGADMIIGGRMTKPLREKEQGNIGAYSNIKGFAFEYMTNGRALVLGDPGPWICAGMTGGVVYLRHDSSLGLTEQALKRRIAKGANVTLQPISKNGVRDVNELLLDYIRVLNEHEQYEEVALLTPLLDDMQQQFFEIIPKKEQADPSISTE

SEQ ID NO: 688 - protein, 1582 aa, Ralstonia solanacearum GMI1000
MEQHSFPAAPQSAESTTHQGVPAPQGLYDPSNEHDACGVGFVAHIKGKKSHDIVQQGLRILHNLDHRGAVGADPLMGDGAGILLQIPDQYYREEMARQGVHLPPAGEYGVGMIFLPKEHASRLACEQELERTVRLEGQVVLGWRDVPVDKTMPMSPTVQKTEPVIRQIFIGRGRDIMTTDALERKLYVIRKTASHAIQALKLKHGKEYFVPSMSARTIVYKGLLLCEQVGRYYQDLADPRTVSALALVHQRFSTNTFPAWELAHPYRMVAHNGEINTVKGNVNWINARTGGISSPVLGEDLPKLWPLIYPGQSDTASFDNCLELLTMAGYPLAQAMMMMIPEAWEQHALMDDNRRAFYEYHAAMMEPWDGPAAICFTDGRQIGATLDRNGLRPARYYVTDDDMVVMASEAGVLPIPESRIVKKWRLQPGKMFLIDMEQGRIIDDKELKDNLANAKPYKSWIDAVRIKLDELEAKAEDVAAETKPAAKLLDRQQAFGYTQEDVKFLMAPMAVNGEEATGSMGNDSPLAVLSSKNKTLYHYFKQLFAQVTNPPIDPIRENMVMSLVSFIGPKPNLLELNNINPPMRLEVSQPVLDFKDMAKIRHIEHYTGGKFMAYELNICYPVAWGKEGIEARLASLCAEAVDAVRSGYNILIVSDRAVDEKQAAIPALLATSAIHHHLVEKGLRTSTGLVVETGSAREVHHFALLAGYGAEAVHPYLAMETLAEMASGLGVSVEKAVYNFTKAIGKGLQKVMSKMGISTYMSYTGAQIFEAIGLSRELVDKYFHGTASNVGGIGIFEVAEEALRLHRDAFGDAPVLASMLEAGGEYAFRIRGEEHMWTPDSIAKLQHATRANSYQTYKEYANLINDQSRRHMTLRGLFEFRVEPARAIALDEVEPAKEIVKRFATGAMSLGSISTEAHTTLAVAMNRIGGKSNTGEGGEDERRYRNELRGIPIKQGTKVSDVIGRDVIERDLELQEGDSLRSKIKQVASGRFGVTAQYLVSADQIQIKMAQGAKPGEGGQLPGHKVTDYIGKLRYSVPGVGLISPPPHHDIYSIEDLAQLIHDLKNVNPRSDVSVKLVSEVGVGTVAAGVAKAKADHVVIAGHDGGTGASPWSSIKHAGTPWELGLAETQQTLMLNGLRNRIRVQADGQMKTGRDVVIGALLGADEFGFATAPLVVEGCIMMRKCHLNTCPVGVATQDPVLRKKFSGKPEHVVNYFFFVAEEVREIMAQLGIRTFNELIGRADLLDTKAGIEHWKARGLDFARIFYQPAKKDAEPCYQVDVQDHGLDRALDHQLIEKAKAALEKGERVSFIQPVRNVNRTVGAMLSGEVAKRYGHEGLPDDSIHIQLQGTAGQSFGAFLAHGVTLDLVGDGNDYVGKGLSGGRVIVRPPHEFRGEPTANIIVGNTVLYGALAGEAFFNGVAGERFAVRNSGATAVVEGTGDHGCEYMTGGTVVVLGATGRNFAAGMSGGVAYVYDEDGLFDKRCNTAMVALESVLSAADQEKAHTQSTWHKVNGERVLDEQLLKGLVEKHFRYTGSERAKELLADWNNARRRFVKVFPTEYKRALTEMYEREQASAREQIAA

SEQ ID NO: 689 - protein, 1487 aa, Psychrobacter arcticus 273-4
MSMISSHTHLASPDDFSDNCGFGLIAHIEGQASHDLVKKAIHSLSCMTHRGGVAADGKTGDGCGLLLATPVAFFKDIAADQQFKLTDNFAVGMVFVNDDKTQAQHSQQVLSDEIIAQGLEVAGWRDVPLDLSIVGEIGRQTLPDFKQVFVNAPDNLAADDFNRKLFVARKKAEQRLDNDELFYVCSLSCQTIIYKGLVMPSDLPAFFLDLQDERLASHIVVFHQRFSTNTLPRWPLAQPFRYLAHNGELNTITGNRSWSEARTPKLKSEKLPNLNELTPLVNSSGSDSSSLDNMLEVLMSGGMSLFHSMSILVPPAWQNVDSMDMDLRAFYEFYSQHMEAWDGPAGLVIQDGRYAVCMLDRNGLRPSRWVTTKNGYITVASEVGVWDYKPKDVLAKGRVGPGQMLVIDTQTGQIMDTKAIATLLKKAHPYRKWLRDEATRIRDDERLEEELAAQACRGEPLKALQKMYHITKEERTEIIRPNAENAQEPVGSMGDDTPMAVLSQQIRHVGDFFRQQFAQVTNPPIDPLRESIVMSLQTCLGAETNVFAPSARDAHRLILSSPVLSASKMQQLETLDDPAFKLARIDLNYEGTLELSAAIVAICEQVASSIRAGHTLIVLSDKDIAVDKVPANAMMVTGAVHHYLIAQGIRTDANLIIETGLARDSHQVAVLIGFGATCVYPYLAYDVIDDLVATGELLGDPIQARMNFRKGLDKGLLKILSKMGISTIVSYRGAQLFEAVGLSEEVVNLCFKGVQSRIKGATFADLAVDQAQLAANAFKRRAPLDQGGLLKFVFNKEYHAFNPDVINSLHLAVRTGNYDNYRQYAEIVNSRPVATLRDLLQLKTDNPLEVDEVEDISAILSRFDSAGMSLGALSPEAHEAIAIAMNTIGGRSNSGEGGEDPVRYGTLRNSKIKQIASGRFGVTPAYLRSAEVMQIKVAQGAKPGEGGQLPGGKVNALIARLRYSVPGVTLISPPPHHDIYSIEDLAQLIFDLKQVNPDALVSVKLVSRPGVGTIATGVAKAYADLITISGYDGGTAASPLSSIHHAGSPWELGLAETHQSLRVNGLRHKVRIQTDGGLKTGLDVVKAAILGAESFGFGTTPMIAVGCKYLRICHLNNCPTGVATQKAQLRDDHFIGEAEMLINFFKFVATETREWLAKLGVRTMEELVGRTDLLDILEGNTAKQQHLDLSPLLFSHPASSGKAQTCQVERNEPFDKGLLAEQMISDMLLNIRQGNGGDYSYYVGNCDRSIGARISGEIAQVWGNLGMSDKPIKLHLTGTAGQSLGVWNAGGLHIELEGDANDYVGKGMAGGEIVIYPPKDSSFVTQDTAIIGNTCLYGATGGKLYAAGTAGERFGVRNSGAHAVIEGTGDHCCEYMTGGIITILGRTGLNFGAGMTGGFAYVLDMEGDFFDRCNHELIDLNRISSEQMESHRIYLQQVIERHVDKTGSAWGQAILVDFEHYARKFYLVKPKAANVATLLKTTTADPQ

SEQ ID NO: 690 - protein, 497 aa, Nitrosomonas europaea ATCC 19718
MPDSLIDLIIYSVGTILGLIVVGAIVTFFIRDVTQKEHAILRNYPIIGRLRYFFEIQGKYFRQYFFSGDRDEMPFNRATRKWIYKNAKNRGGIIGFGSTYDLREPGAFIFVNAAFPILEEDQLPTPALSIGEGYCDQPFLARSIINISAMSYGAISTPAVRALSRGAAKAGCWLNTGEGGLAPCHLEGECDRIMQIGTAKYGIRDIQGNFSATRAKEIAQSVKAFEIKLSQGAKPGKGGVLPASKVNPEIAAIRGIPPYQDSISPNRHHDIGNIDELLDQVAFIRELTGRPVGVKTAIGGWHFINELCDTILRRGLEYAPDFLTIDGGEGGSGAAPQTLLDHAGLPITEALPRVVDALIESGLKQRIRVVAAGKLVTSAQGAWALCVGADFINTARGFMFALGCIQAMRCHLNTCPTGITTHNPRLQRGLVVEEKYLRVANYALNVNHEINMIAHSCGLKHARELRREHIRIVEKAGISVALNILHPYPETKSTVRN

SEQ ID NO: 691 - protein, 429 aa, Antirrhinum majus
MEAFQTPIFNLPLPYGFTTTPNTINLQNTMIMSTTNPWMDCRIWSRLPQKLIDRIIACLPPPAFFRSRSVCKRWYSLIFSTTFLELHLQASPIRHWFMFFKQQSIKHHIYNNNSTNARPTNYEGYLFDPQTLKWYRISFPLIPPGFSPASSSGGLICWVSEDSGPKNILLSNPLTNTAIQLPSTLEPRLCPTIGLTITNSSIDISFAGDDLISPYAVKNLTSESFHIDVGGFYSIWNTTSSLPRLCSLESGRMVHVQGRFYCMNYSPFSVLSYDISLNQWCKIQAPMRRFLRSPTLVESKGKLILVAAVEKSKLNVPKSLRLWALQECGTIWVEIERMPQQLYIQFAEIEGGRGFSCVAHAEFVVILIRGSYDKAVMFDFCRKQWVWVPPCPYVGGDDELHGFAYEPRLAVPITPLLEQLTLPFQSFTA

SEQ ID NO: 692 - protein, 514 aa, Mycobacterium marinum M
MKPRSVAAVLGGGMAGVAGWDLWQRRHAILRNFPIIGHLRFLLEAVGPELRQYIVTDNNEERPFSRDQRRWVYTSSKLTNRYFGFGTDNDLERAHNYPIIKHAAFPVSAPDGEPAHPDPAVALPAAKVLGGARGRAKAFRPSSLVNISGMSYGALGGAAISALNQGAAIAGALHTTGEGAVSPYHLNGGDLVWQIGTGYFGCRNDDGTFSLSRLIDRVAATPSIRAIEIKLSQGAKPGLGGMLPGAKVTADIAAIRGIPVGVDCKSPAGHSAFADIDGMLELVETIADATGLPVGIKSAVGEGLFWPQLAARMARTGRGVDFVTVDGGEGGTGAAPLVFSDHVALPFKWAFPRVFRAFAEEDLHHDVVFIGSAKLGIPENALLALTMGVDMINVGRTAMFAIGCIQAQRCHTGRCPSGVATQSAWLQHGLDPALKAVRCANYLATLRFELLSLARACGYVHPALVPLQAIELLDVDLQTVQVDDLFGYQPGWGIPSPADVAAITALMTKASPPR

SEQ ID NO: 693 - protein, 1481 aa, Pseudomonas aeruginosa UCBPP-PA14
MKAGLYHPETFKDNCGFGLIAHMQGEPSHQLLQTAIEALTCMTHRGGINADGKTGDGCGLLIQKPDLFLRAVAREAFSVDLPEQYAVGMVFFNQDPVKAEAARENMNREIVAAGLELVGWRKVPIDTSVLGRLALERLPQIEQVFIGGAGLSDQDFAIKLFSARRRSSVANAADSDHYICSFSHKTIIYKGLMMPADLAAFYPDLGDERLQTAICVFHQRFSTNTLPKWPLAQPFRFLAHNGEINTITGNRNWAQARRTKFTNELIPDLEELGPLVNRVGSDSSSMDNMLELMVTGGMDLFRGLRMIIPPAWQNVETMDADLRAFYEYNSLHMEPWDGPAGVVLTDGRYAVCLLDRNGLRPSRWVTTKNGYITLASEIGVWDYKPEDVIAKGRVGPGQILAVDTETGQVLHSDDIDNRLKSRHPYKQWLRQNALRIQATLDDDHGVASYDADQLKQFMKMFQVTFEERDQVLRPLGEQGQEAVGSMGDDTPMAILSRRIRSPYDYFRQQFAQVTNPPIDPLREAIVMSLETCLGVEQNIFEEAPHHANQAILTTPVISPAKWRTIMTLDRPGFDRHFIDLNYDESMGLEAAVRNIADQAEEAVRGGKVLLILSDRHIAPGKLPVHAALAVGAVHHRLVQTGLRCDSNILVETATARDPHHFAVLIGFGASAVYPFLAYEVLADLIRTGEVLGDLYEVFKYYRKGISKGLMKILSKMGISTVASYRGAQLFEAVGLSDEVTGLCFTGVASRIQGARFVDIENEQKLLAAEAWSNRKPIQQGGLLKFVYGGEYHAYNPDVVNTLQAAVQQGDYEKFKEYTALVDQRPVSMIRDLLQVKTAAQPLALDEVEPLEAIFKRFDAAGISLGALSPEAHEALAEAMNTLGGRSNSGEGGEDPARYGTLKSSKIKQVATGRFGVTPEYLVNAEVLQIKVAQGAKPGEGGQLPGGKVNGLIARLRYAVPGVTLISPPPHHDIYSIEDLAQLIFDLKQVNPQALVSVKLVSEPGVGTIAAGVAKAYADLITISGYDGGTGASPITSIKYAGSPWELGLAETHQTLRGNDLRGKVRVQTDGGLKTGLDVIKAAILGAESFGFGTAPMIALGCKYLRICHLNNCATGVATQNDKLRKDHFIGTTAMVINFFTFIATETREWLARLGVRSLGELIGRTDLLEILPGETAKQQNLDLAPLLGSDLIPADKPQFCEVEKNPPFDQGLLAEKMVELSKAAIEGLSGGEYELDICNCDRSIGARVSGEIARLHGNQGMAKAPVVFRFKGTAGQSFGVWNAGGLHLYLEGDANDYVGKGMTGGKLVITPPKGSPFKTQESAIVGNTCLYGATGGKLFAAGTAGERFAVRNSGSHAVVEGTGDHCCEYMTGGFVCVLGKTGYNFGSGMTGGFAYVLDMDNTFVDRVNHELVEIQRISGEAMEAYRSHLRKVLVEYVNETASEWGANILENLDDYLRRFWLVKPKAASLGSLLTSTRANPQ

SEQ ID NO: 694 - protein, 1482 aa, Oceanobacter sp. RED65
MRTGLYTPGEFKDNCGFGLIAHMEGQASHDLLRTAIESLTCMTHRGGIAADGKTGDGCGLLIQKPDSFLRQVAKTDIEVELPEQYAVGMVFLDLDEATAQKQRETFNQEIEKQGLKVLGWRLVPTNNDCLGPMAIDCLPRFEQVFVAPDSAIDESKLAVKLYYARRKTELALQGNEDFYICSLSEQTLSYKGLMMPVDLPNFYLDLGDERLETAICVFHQRFSTNTAPRWPLAQPFRMLAHNGEINTIRGNRNWAAARGAQFETPLLSELESIQPVVNTTGSDSSSMDNMLELLHTGGMDMFRAIRMMIPPAWQNVETMDSDLRAFYEYNSMHMEPWDGPAGLVITDGRYAVCGLDRNGLRPSRWVKTKNGYITVASEIGTHSYKAEDVIAKGRVGPGEILAIDTLNGEVLEANQIDTRLKDSQPYRKWLKENAVRIESELELKRLNEEPLTSDQVKVHQKLHLISFEERDQVLRPLAEQGVEGTGSMGDDAPMAVLSKNSRNIADYFRQQFAQVTNPPIDPLREAIVMSLETCIGKEKNVFVEAPDHASRIILTSPVLSPLKFNGLKNTGKDEFSYTTLPLAFDETLGLKQAIQTLVEQAEAAAREGTTILILSDRDVKEGQLVIPAAMATGAVHHALIKNSLRCSTNLVVETGDARDAHHFAVLLGFGATAVYPWLVYEVLGDMHRSGELIGDPLKSNQNFRKGIRKGLMKILSKMGISTIASYRGSQLFEGIGLAEEVVDLCFCGLTSRIKGADFSDFEQDLRNNTKKAFKARKTLDQGGLLKYVHGGEYHAFNPDVISTIQDAVQTGSQSAYDQYAKLVNERPVATIRDLFSLKTDNSISIDQVEPAEKIFPRFDSAAMSLGALSPEAHEALAQAMNELGGNSNSGEGGEDPKRYGTVKNSKIKQIASGRFGVTPHYLSSAEVLQIKVAQGAKPGEGGQLPGGKVNSLIATLRYSVPGVTLISPPPHHDIYSIEDLAQLIYDLKQVNPRAKVSVKLVSEPGVGTIAAGVAKAYADLITISGYDGGTAASPLTSIKYAGSPFELGLAEAHQALRANDLRGNVRLQTDGGLKTGLDIVKAAILGAESFGFGTTPMVAMGCKYLRICHLNNCATGVATQNDELREKHFIGTVEMVKNFFRFVAEETRQWMAALGVRTLEELVGRTDLLEVIEGQTEKQRKLDLSDLLGNDQIPADKPHTVQVDRNTPYDEGALAEKMVADILPSIEAKKGGEFSYNISNCDRSIGARLSGEIALRHGNQGMASNPVTLKLTGTAGQSFGVWNAGGLNMHLEGDANDYVGKGMTGGKLVIYPPKVSSFASQDASIVGNTCLYGATGGTLYAAGCAGERFGVRNSGAHAVVEGAGDHCCEYMTGGQITVLGSTGYNFGAGMTGGFAYVLDMDKSFVDKYNHELVDIHRISNEETEAHRHHLRGIVKKYVAETGSEWGQEILENFEKYIGKFWLVKPKAASLEQLLENTRTRSE

SEQ ID NO: 695 - protein, 308 aa, Thermotoga sp. SG1
GGVLLTSMGNDRPYFSYFDRIVLNASQVTNPSIDPLREPMEIRTYIGRKEARLEIEEDSDGNVALKTEIAPQLKLEVPVMFTAMSYGSISLNALLSLARAARTIGTFFNTGEGGLPKELREFKDNMIVQVASGRFGVSADYLNAGSAVEIKIGQGAKPGIGGHLPGEKVTEPISETRMIPVGTDALSPAPHHDIYSIEDLRQLIYAIKEATRYEKPVGVKIAAVHNVAPIAAGMVRAGADYIVIDGIRGGTGAAPKVTRDHVGIPIEFAIAVVDQRLREEGIRHMASIVVGGGIRNSADVIKAIALGA

SEQ ID NO: 696 - protein, 304 aa, Thermotoga thermarum
GGVLLSSMGNDRPYPVYWDKMVINASQVTNPSIDPLREPMELRVYIGRKPDKIEIDENLNVKTKMPQQLKLETPIMFSAMSYGSISYNAHAALARAAEELGILYNTGEGGLHKDFRKYGKNTIVQVASGRFGVDREYLNTAAAIEIKIGQGAKPGIGGHLPGEKVSEDISATRMIPPGSDAISPAPHHDIYSIEDLAQLIYSLKEATDYQKPVGVKIAAVNNVAAIASGIARAGADYIAIDGFRGGTGAAPKRIRDNVGIPIEFAIAAVDARLRSEGIRHTISLVAAGSIRNSADIVKAIALGA

SEQ ID NO: 697 - protein, 286 aa, Picea sitchensis
MQSVTTKLGSESSPIDEQQKQPIQQQQVPSTGILPAHAESVMRQAQLELGPAGNAFWQAQAAYPYPEPFYGSYVATYGAQAMIPPHMLGVQQPGLPLPPSDMVEEPPVYVNAKQYRGILRRRQSRAKAESENKLIKSRKPYLHESRHRHALRRARGCGGRFLNTKNDGSNEKDVSGDNDSHDSMGQSNKVLNPDSGKDGTSHEVNGIQRIGNLAQIGNGISAPHSGTVSPGQVGVGESVSNGLHYTYHQRRGFHSSAFHPLSVSNAESGQVGGMVSSGGHHTAVAT

SEQ ID NO: 698 - protein, 313 aa, Arabidopsis thaliana
MMHQMLNKKDSATHSTLPYLNTSISWGVVPTDSVANRRGSAESLSLKVDSRPGHIQTTKQISFQDQDSSSTQSTGQSYTEVASSGDDNPSRQISFSAKSGSEITQRKGFASNPKQGSMTGFPNIHFAPAQANFSFHYADPHYGGLLAATYLPQAPTCNPQMVSMIPGRVPLPAELTETDPVFVNAKQYHAIMRRRQQRAKLEAQNKLIRARKPYLHESRHVHALKRPRGSGGRFLNTKKLLQESEQAAAREQEQDKLGQQVNRKTTCLDSKLICCRTTKTAAQPLLAQTSPLFPTVLISLDTLNSSFQVSQLR

SEQ ID NO: 699 - protein, 448 aa, Zea mays
MGQKDSKPSHGYGYSSYDYGSASSGYTSRNTGNSSSSYSVRYAPSSENSVQPETHARLQRKYSKIGDDYRSLSQVTEALAQAGLESSNLIVGIDFTKSNEWTGKISFNRRCLHDIGNTPNPYEQAISIIGRTLSAFDEDNLIPCFGFGDASTHDQEVFSFYPENRPCNGFEEALDRYREIVPTLRLAGPTSFAPMIETAIGIVDSTGGQYHVLLIIADGQVTRSVDTQSGQLSPQERATIDAIVRASQFPLSIVLVGVGDGPWDMMHQFDDNIPARSFDNFQFVNFTEIMSKSIAADRKEAEFALSALMEIPTQYKATIDLQLLGRRQRITPRIALPPPTRTAYSRSSSFSQQSGVYSRSSSFDQQTSGASQQRSESLKQQKKPAATKRPDTYASERALEDRILCPICMYKSKDLAFGCGHQTCYECGRNLERCPLCQQNITTRIRLY

SEQ ID NO: 700 - protein, 308 aa, Thermotoga sp. RQ2
GGVLLTSMGNDRPYFSYFDRIVLNASQVTNPSIDPLREPMEIRTYIGRKEEKLEIEEDEDGTVKLKTEIAPQLKLEVPVMFTAMSYGSISLNAILSLARAARTVGTFFNTGEGGLPKELREFKDNMIVQVASGRFGVSADYLNAGSAVEIKIGQGAKPGIGGHLPGEKVTEPISETRMIPVGTDALSPAPHHDIYSIEDLRQLIYAIKEATRYEKPVGVKIAAVHNVAPIAAGAVRAGADYIVIDGIRGGTGAAPKITRDHVGIPIEFAVAVVDQRLREEGIRHMASIVVAGGIRNSADVIKAIALGA

SEQ ID NO: 701 - protein, 917 aa, Triticum aestivum
  misc_feature (450)..(450): Xaa can be any naturally occurring amino acid
  misc_feature (627)..(627): Xaa can be any naturally occurring amino acid
RGRGRGTNTSPRWPLAQPMRLLGHNGEINTIQGNLNWMRSREATIQSPVWRGRENELRPFGDPKASDSANLDSAAELLLRSGRSPAEAMMMLVPEAYKNHPTLSVKYPEVIDFYEYYKGQMEAWDGPALLLFSDGRTVGACLDRNGLRPARYWKTSDGFVYVASEVGAIPMDESKVVMKGRLGPGMMITVDLETGQVLETTEVKKNVASAKPYGTWLQESTRSIKPVNFQSSPVMDNETILRHQQAFGYSSEDVQMVIETMASQGKEPTFCMGDDIPLAVLSQKPHMLFDYFKQRFAQVTNPAIDPLREGLVMSLEVNIGKRGNILEVGPENADQVTLSSPVLNEGELESLLKDPKLKPKVLSTYFNIRKGLDGSLENAIKALCEEADAAVRSGSQLLVLSDRSEALEPTRPAVPILLAVGAIHQHLIQNGLRMSASIVADTARCRRAHXFACWGGYGASAICPYLALETCRQWRLSNKTVNLMRNGKMPTVTIEQAQRNFIKAVKSGLLKILSKMGISLLSSYCGAQIFEIYGLGQEVVDLAFCGSVSKIGGLTLNELGRETLSFWVRAFSEDTAKRLENFGFIQSRPGGEFHANNPEMSKLAAQSQFREKKGIMAITIYQQHLAXRPVNVLRDLVELKSERTPIPIGKVEPATSIVERFCTGGMSLGAISRETHEAIAIAMNRIGGKSNSGEGGEDPIRWSPLTDVVDGYSATLPHLKGLQNGDTATSAIKQVASGRFGVTPTFLVNAEQIEIKIAQGAKPGEGGQLPGKKVSAYIARLRNSKPGVPLISPPPHHDIYSIEDLAQLIFDLHQINPKAKVSVKLVAEAGIGTVASGVSKANADVIQISGHDGGTGASPISSIKHAGGPWELGLTETHQTLIQNGLRERVVLRVDGGFRSGLDVLLAAAPGGDRSEP

SEQ ID NO: 702 - protein, 318 aa, Coprinopsis cinerea okayama7#130
MDTTIDDQLYLNQYLYQQQDTQNQQQIDDEPLYVNAKQYFRILKRRVARSRLEEVHRLSRQRKPYLHESRHKHAMRRPRGPGGRFLTAEEIAAQKAAGTSNNGEASGSKDAEGEEQEDGEKTMEQTPERDEQQQQQQQQVQQPPPPPPPPPPSLPDLPELPEPHIIDAEPPRLDHISHHERDNSFYAPMISSSSFRPSISIPQQIMPSHHTHGGHHHGHPRHLPTQHHQNSQPKPTNHMHNFAHLPKSLPVNLTSPYGSMPQMHHVPHPHAHARHHHSNLAFHHPLYNDPINPPGSSNPDMQRRTEEMIQFGAPGSSN

SEQ ID NO: 703 - protein, 546 aa, Oryza sativa Japonica Group
MSGFLAVVGKVGTFLLWLLFLVLQTATKIVGSLLAAGPPPADAQEAAAAAAARRRSPPASPHSGGGATDPYQPPQLWDPPPPSSPYSAGHAADEYSSSSSYRRRGASAPPAEDVVVSSSYSRPAAAVASAPQACTVSSAPPLRAVETRSPAPSRAAAAVGGKRPKLERKYSKIVDQYRSLDEVIEALAQAGLESSNLIIGIDFTKSNEWTGKRSFNGMSLHHIGDSPNPYEQAITIIGQTLSAFDEDNLIPCYGFGDASTHDQDVFAFYPDERPCNGFQEALARYREIVPHLRLSGPTSFSPIIEMATTIVEQSGGQYHVLVIIADGQVTRSVDTEFGQLSTQEQMTVDAIVQASEFPLSIILVGVGDGPWDMMKEFDDNIPARSFDNFQFVNFTSIMSKKISQSKKETEFALSALMEIPLQYKATLELGILGRRFAKSPERVPLPPPFASYNTISRAAPSRANSFRSMPSHPRDEAPVDSAITASVTSPPSVDARAAEPQLCPVCLSKPRDMAFGCGHQTCAECGPQVEHCPICRRPIDTRVKLY

SEQ ID NO: 704 - protein, 2474 aa, Saccharomyces cerevisiae YJM789
MNKYINKYTTPPNLLSLRQRAEGKHRTRKKLTHKSHSHDDEMSTTSNTDSNHNGPNDSGRVITGSAGHIGKISFVDSELDTTFSTLNLIFDKLKSDVPQERASGANELSTTLTSLAREVSAEQFQRFSNSLNNKIFELIHGFTSSEKIGGILAVDTLISFYLSTEELPNQTSRLANYLRVLIPSSDIEVMRLAANTLGRLAVPGGTLTSDFVEFEVRTCIDWLTLTADNNSSSSKLEYRRHAALLIIKALADNSPYLLYPYVNSILDNIWVPLRDAKLIIRLDAAVALGKCLTIIQDRDPALGKQWFQRLFQGCTHGLSLNTNDSVHATLLVFRELLSLKAPYLRDKYDDIYKSTMKYKEYKFDVIRREVYAILPLLASFDPAIFTKKYLDRIMVHYLRYLKNIDMNAANNSDKPFILVSIGDIAFEVGSSISPYMTLILDNIREGLRTKFKVRKQFEKDLFYCIGKLACALGPAFAKHLNKDLLNLMLNCPMSDHMQETLMILNEKIPSLESTVNSRILNLLSISLSGEKFIQSNQYDFNNQFSIEKARKSRNQSFMKKTGESNDDITDAQILIQCFKMLQLIHHQYSLTEFVRLITISYIEHEDPSVRKLAALTSCDLFIKDDICKQTSVHALHSVSEVLSKLLMIAITDPVAEIRLEILQHLGSNFDPQLAQPDNLRLLFMALNDEIFGIQLEAIKIIGRLSSVNPAYVVPSLRKTLLELLTQLKFSNMPKKKEESATLLCTLINSSDEVAKPYIDPILDVILPKCQDASSAVASTALKVLGELSVVGGKEMTRYLKELMPLIINTFQDQSNSFKRDAALTTLGQLAASSGYVVGPLLDYPELLGILINILKTENNPHIRRGTVRLIGILGALDPYKHREIEVTSNSKSSVEQNAPSIDIALLMQGVSPSNDEYYPTVVIHNLMKILNDPSLSIHHTAAIQAIMHIFQNLGLRCVSFLDQIIPGIILVMRSCPPSQLDFYFQQLGSLISIVKQHIRPHVEKIYGVIREFFPIIKLQITIISVIESISKALEGEFKRFVPETLTFFLDILENDQSNKRIVSIRILKSLVTFGPNLEDYSHLIMPIVVRMTEYSAGSLKKISIITLGRLAKNINLSEMSSRIVQALVRILNNGDRELTKATMNTLSLLLLQLGTDFVVFVPVINKALLRNRIQHSVYDQLVNKLLNNECLPTNIIFDKENEVPERKNYEDEMQVTKLPVNQNILKNAWYCSQQKTKEDWQEWIRRLSIQLLKESPSACLRSCSSLVSVYYPLARELFNASFSSCWVELQTSYQEDLIQALCKALSSSENPPEIYQMLLNLVEFMEHDDKPLPIPIHTLGKYAQKCHAFAKALHYKEVEFLEEPKNSTIEALISINNQLHQTDSAIGILKHAQQHNELQLKETWYEKLQRWEDALAAYNEKEAAGEDSVEVMMGKLRSLYALGEWEELSKLASEKWGTAKPEVKKAMAPLAAGAAWGLEQWDEIAQYTSVMKSQSPDKEFYDAILCLHRNNFKKAEVHIFNARDLLVTELSALVNESYNRAYNVVVRAQIIAELEEIIKYKKLPQNSDKRLTMRETWNTRLLGCQKNIDVWQRILRVRSLVIKPKEDAQVRIKFANLCRKSGRMALAKKVLNTLLEETDDPDHPNTAKASPPVVYAQLKYLWATGLQDEALKQLINFTSRMAHDLGLDPNSMIAQSVPQQSKRVPRHVEDYTKLLARCFLKQGEWRVCLQPKWRLSNPDSILGSYLLATHFDNTWYKAWHNWALANFEVISMLTSVSKKKQEGSDASSVTDINEFDNGMIGVNTFDAKEVHYSSNLIHRHVIPAIKGFFHSISLSESSSLQDALRLLTLWFTFGGIPEATQAMHEGFNLIQIGTWLEVLPQLISRIHQPNQIVSRSLLSLLSDLGKAHPQALVYPLMVAIKSESLSRQKAALSIIEKMRIHSPVLVDQAELVSHELIRMAVLWHEQWYEGLDDASRQFFGEHNTEKMFAALEPLYEMLKRGPETLREISFQNSFGRDLNDAYEWLMNYKKSKDVSNLNQAWDIYYNVFRKIGKQLPQLQTLELQHVSPKLLSAHDLELAVPGTRASGGKPIVKISKFEPVFSVISSKQRPRKFCIKGSDGKDYKYVLKGHEDIRQDSLVMQLFGLVNTLLQNDAECFRRHLDIQQYPAIPLSPKSGLLGWVPNSDTFHVLIREHREAKKIPLNIEHWVMLQMAPDYDNLTLLQKVEVFTYALNNTEGQDLYKVLWLKSRSSETWLERRTTYTRSLAVMSMTGYILGLGDRHPSNLMLDRITGKVIHIDFGDCFEAAILREKFPEKVPFRLTRMLTYAMEVSGIEGSFRITCENVMKVLRDNKDSLMAILEAFAFDPLINWGFDLPTKKIEEETGIQLPVMNANELLSNGAITEEEVQRVENEHKNAIRNARAMLVLKRITDKLTGNDIRRFNDLDVPEQVDKLIQQATSVENLCQHYIGWCPFW

SEQ ID NO: 705 - protein, 1498 aa, Leptospira interrogans serovar Copenhageni str. Fiocruz L1-130
MNDLKEQLQLQKYLEENGLYEKSFEHDNCGVGFVASYQGENSHRIVSMGLKAVACLTHRGAVDADMVTGDGAGIMIQIPKKLFATYIEEMGHRRPDEDSIGVGMIFLPREDIDKQDMCRSLVESALMEFNFKLYAWRYVPVNPEVLGPKANQSRPQIEQVLIGKPEGMSNEDFETKLFLIQKKLMRDADRHSLAGDLYICSLSSERIVFKGLFNGNQVSQFYDDLNSEEMVSPYCIFHQRYSTNTFPSWALAQPFRILAHNGEINTIAGNRIWMLAREEELECKKWGEYQKEIHPIIRPHMSDSASLDNAMEAIVRSGKDVLQAKAMLVPNAWSKNLTMSEELKSFYEYNNTLIEPWDGPAALAFAEGDWIGGALDRNGLRPARYAVTEDGLLVMGSEAGLVQVEEELVIKKGRLGPGEMIGINLKEKKLYYNEDINSLFEKKYDYREWSKENVSYLNQDLDSSINETITYKGDDLRRRQILFAYSPFKQKSVIKPQAHQGKEAISSMGDDTPLSILMLSRIGLYTYFRQRFAQVTNPPIDYMREKGVTSLYTRLVKKMNLFGDEKPQNCLVLSHPYLTNLDLKRIREMEGKPYKILTLDATFEAHLETEASQSRNYLETALDALLDQALKAATSGTNILILSDKKLSKERAPIPMELAVAAVHNHLIRSKTRSAVSILVETGSAFEIHNVAVLLGYGASGVNSYLIWDTLFDLWEKGEFDGEDGARPEFYKICGNYRYGVDDGLLKIMSKMGISILSSYVGGQVFEAIGLSRTLVSKYFPGTYSRISGIGIGGIEQNILRNHEQAFYKEINPEDFISEKDDQPHRWSPRVVKFLRKAAVDNDYEAFKEATKILKESDPINIRDLFDFVAKKPIPIEEVETVTEIQKRFLTPGMSHGALSIEAHTDLAIAMNRLGAKSSSGEGGENPSRYVVNEKGDLANSSIKQIASGRFGVTSEYLNSATEIEIKIAQGAKPGEGGQLPGKKNNEEIATNRHTPMGIDLISPPPHHDIYSIEDLSQLIYDLKMANHKAQVSVKLVSEAGVGTIAAGVAKANADVILISGHVGGTGAAPITSIKYAGSPWELGLSETHQVLVMNGLRDRVVLRTDGGIVSGRDVIIAACLGAEEYGVGTASLVALGCIMARKCHLNNCPTGIATQDIKFRAKYKGSPDQLVNLFTCLALEVREYLAELGFRSIDEIIGRTDLLKQITRYERDRLDSLDLNPILVRLPLFYDPTKQKKDRSIRKEPVGEVLDDRIIKDAEKALEGKSSMALSYLVRNTNRTVGAKISGLIARKYGSKGLPGKLEIILEGTAGQSLGAWLVKGVQITLHGDANDYVGKGLCGGVIVIKKHRKSKFKAYENTIIGNTCLYGATSGKLFCSGRAGERFGVRNSGAEAVVGGAGDHFLEYMTSGTIVCLGSVGKNMGAGMTGGTAYFFQKGWDIQPLLNKEYVRTVDLENVDYEIIKNLISEHSKLTSSDLSEGILKDFEANKNYFVKVVPK

SEQ ID NO: 706 - protein, 180 aa, Coccidioides immitis RS
MSRPSGQPSMPPPPPAHQPVQQSQPSPEMVTGPAEESPLYVNAKQFHRILKRRVARQKLEEQLRLTSKGRKPYLHESRHNHAMRRPRGPGGRFLTAEEVAAMEKQQAANATGVENIPNHAASKDHTSGSTGVASSTTIGQKRKAAGAMNSNQSKKVKPGLQQSRISMAEGGLENDVDADG

SEQ ID NO: 707 - protein, 496 aa, Shewanella sp. MR-4
MQELNWFMWGLDLFSGLFLILIGLGALAVVYMYIADKLQTKQAVRHNYPVIGRFRYLFEKQGEFFRQYFFAQDREELPFNRAERSWVYRAAKNVDRTIAFGSTRPLDSTGAIMFMNTAFPTQDEDITPILPQTIGPHCREPYTTKAICHISAMSFGALSRPAVTALSHGAAQAGCWLNTGEGGLSPYHLKGGCDLVFQIGTAKYGVRNEQGHLDDDKLIEIAAHPEVKMFEIKMSQGAKPGKGGILPGIKVTEEIAKIRGIPQGHDSISPNGHIEFKNVADILDMIARVREVTGKPTGIKAVLGDVQWLEDFCDEIERRGEASAPDFFTLDSADGGTGAAPQPLMDYVGLPLKESLPILVNILIQRGLRKRIKVIASGKLIVPSRVAWALALGADFIASARGNMFALGCIQALQCNKDTCPTGITTHNKKLQQGLNPRDKSTRVANYNHNLHHDLALIAHSCGVTEPRQLKPSHVRIVLESGLSVSLDKYYSHINQ

SEQ ID NO: 708 - protein, 453 aa, Arabidopsis thaliana
MLEVLQAIVLFILFWVWLSWMGGSSSKESPRGGGSGRRYERSVSGSSSYSSAWDQSSYYQTPNHPSASPVSSYNSGRQTPKNLERKYSRIADNYRSIDEVTAALSHAGLESSNLIVGIDVTKSNEWTGARSFGRKSLHFIGTTPNPYQQAISIIGKTLSVFDEDNLIPCYGFGDATTHDQDVFSFNPNDTYCNGFEEVLMCYREIVPQLRLSGPTSFAPIIERAMTIVEESGGQYHVLLIIADGQVTRSVDTDNGGFSPQEQQTIDAIVRASEYPLSIVLVGVGDGPWDTMRQFDDNIPARAFDNFQFVNFTDIMSKNIDPARKEAEFALSALMEIPSQYKATLELGLLGQRTGHCPDRIALPPPTYATQSMRNSPRTSRSTSFQNKPYDNGVSSTPPSTTHNESQQQFCPVCLVSAKNMAFNCGHQTCAGCGEDLHVCPICRSSISVRIKLY

SEQ ID NO: 709 - protein, 555 aa, Pseudomonas putida GB-1
MKHSLPSRYACLALCLVFSFASLPLLAQHAWLWPVTLITALLSLVGLNDLRQSHHAVRRNYPILGNIRYLIETIRPEIRQYLIEGDDDKLPFSRSQRSLVYARAKNESAEKAFGTLNDAYKPGFEFISHSMLPVATPDPASFRIAIGGPQCRLPYSASIFNISAMSFGALSANAIAALNRGARMGRFAHDTGEGSISPYHREHGGDLIWEIGSGYFGCRTEDGRFDPQRFAEQAKSPQVKMIEIKLSQGAKPGHGGILPGHKVSPEIAQTRGVRAGEDCISPAAHSAFRTPVELLQFVASLRKLSGGKPVGFKFCLGHPWEFMGIAKAMLATGITPDFIVVDGKEGGTGAAPREFSDNMGVPMREGLMFVHNTLVGLNLRSSIRIGAAGKIVSAFDIASVLAIGADWVNSARGFMFAIGCIQSQSCHTNKCPTGVATQDPLRQRALVVPDKAERVASFHRNTLHTLAEMLAAAGLEHPSELKPKHLARRISPSEIGLFSDLHTFLKPGELLSGSIESEFYARMWRMARSDSFAPETADATPAPAVTLRRKETAPA

SEQ ID NO: 710 - protein, 466 aa, Arabidopsis thaliana
NLPSQTCLNNVKVLQAIVLFILFWVWLSWMGGSSSKESPRGGGSGRRYERSVSGSSSYSSAWDQSSYYQTPNHPSASPVSSYNSGRQTPKNLERKYSRIADNYRSIDEVVVSVTAALSHAGLESSNLIVGIDVTKSNEWTGARSFGRKSLHFIGTTPNPYQQAISIIGKTLSVFDEDNLIPCYGFGDATTHDQDVFSFNPNDTYCNGFEEVLMCYREIVPQLRLSGPTSFAPIIERAMTIVEESGGQYHVLLIIADGQVTRSVDTDNGGFSPQEQQTIDAIVRASEYPLSIVLVGVGDGPWDTMRQFDDNIPARAFDNFQFVNFTDIMSKNIDPARKEAEFALSALMEIPSQYKATLELGLLGQRTGHCPDRIALPPPTYATQSMRNSPRTSRSTSFQNKPYDNGVSSTPPSTTHNESQQQFCPVCLVSAKNMAFNCGHQTCAGCGEDLHVCPICRSSISVRIKLY

SEQ ID NO: 711 - protein, 1510 aa, Silicibacter pomeroyi DSS-3
MTKYDADWVRAEEAKRKWLAENGLYSEEEEHSSCGVGLVVSVNGKRSRKVVEAGIDALKAVWHRGAVDADGKTGDGAGIHVQIPVPFFYDQIRRTGHEPRMNELVAVGQVFLPRTDFGAQERCRTIVETEILRMGYFIYGWRHVPVDVTCLGEKANATRPEIEQILISNSKGVDEETFERELYVIRRRIEKAAQAAGIAGLYLASLSCRSIIYKGMMLAEQVAVFYPDLMDERFESAFAIYHQRYSTNTFPQWWLAQPFRMLAHNGEINTLKGNLNWMKSHEIRMASSYFGEKAEDIKPIVPGGSSDSAALDAVFEVLVRAGRNAPMAKTMLVPESWSKQAVELPQAWVDMYSYCNSVIEPWDGPAALAMTDGRWVCGGLDRNGLRPMRYVVTGDGLLIAGSEAGMVPTDEATVVEKGALGPGQMIAVDMAKGKLYHDRALKDKLAASRPFGDWVGKINNLEDQLGDVEETPLFTGAELRKRQIAAGYSVEELEQVLAPMAEDGKEALASMGDDTPAAVLSKQYRPLSHFFRQNFSQVTNPPIDSLREYRVMSLKTRFGNLKNVLDEDSSQTEIIVAESPFVGNAQWETLKKNFNAPLVEIDCSFEQGSAGLGAALARIRSEAEEAVSSGAGHLLLTDQYSGPGKVAMPMILATSAVHSHLTRKGLRTFCSLNVRSAECIDPHYFAVLIGCGATVVNAYLAEDSIADRIKRGLLDGSLTENIARYREAIDQGLLKIMAKMGISVVSSYRGGLNFEAVGLSRAMVAEFFPGMTSRISGIGIKGIQTKAEEIHARGWDSGLDVLPHRGFYKARKSGETHAWEATSMHMMQMACNRASFELWKQYSAKMQSNPPIHLRDLLDIKPLGKPVPIEEVESITSIRKRFVTPGMSLGALSPEAHKTLNVAMNRIGAKSDSGEGGEDPAHFVPESNGDNPSAKIKQVASGRFGVTAEYLNHCEELEIKVAQGAKPGEGGQLPGMKVTDLIARLRHSTKGVTLISPPPHHDIYSIEDLAQLIYDLKQINPRAKVTVKLVASSGVGTIAAGVAKAKADIILISGGNGGTGASPATSIKFAGLPWEMGLTEAHQVLSMNNLRDRITLRTDGGLRTGRDIVMAAMMGAEEYGIGTAALIAMGCIMVRQCQSNTCPVGVCTQDESLRAKFTGNADKVVNLITFYAQEVREILASIGARSLDEVIGRADLLAQVSRGSAHLDDLDLNPLLITVDGAQNIVYDRAKPRNVVPDTLDAEIVRDAARFLEDGEKMQLSYSVQNTHRTVGTRVSSHIVKRFGMRNDLQPDHLHIKLRGSAGQSLGAFAAPGLKIEVSGDANDYVGKGLSGGTIVVRQPQVSPLKADENTIIGNTVLYGATDGHLFAAGRAGERFAVRNSGAKVVIEGCGTNGCEYMTGGVAVILGGIGANFGAGMTGGMAYLYDPDGQAQLLMNMETLVTCPVSVAHWEAQLKELVERHAEETRSAKAAHILQHWDIEKGNFLQVCPKEMLNKLPRPLSHDSLAMPAE

SEQ ID NO: 712 - protein, 651 aa, Glomus mosseae
  misc_feature (252)..(252): Xaa can be any naturally occurring amino acid
  misc_feature (268)..(268): Xaa can be any naturally occurring amino acid
GILTHAQQNPNLQDLQLKENWYEKLNRWEDALTAYEKRRTDDPNDNEATLGVMRCLHSLGDMDGLSELVQEKWPEAETEMRKSIATYAAAGAWSLGQWGLMEDYIKNIKSDNYYRPFYQAIIALHKNQYSEAVRYIDKTRDLLDTELTALVGESYNRAYNVVVRVQMLAELEEIITYKQYAQGVPRNVDVWQQILKVRALVISPKENMEMWIKFANLCRKSDRLEFAEKTLKLLLVGDQKLELIHPSILARXSPQVVYAHLKWMWASXVREEALEFLRDFTTRMSNNDRVGNNGLLARCYLKKGEWQKVLQDDWDRETVPDILQSYLLATQYDKDWYKAWHAWALANLEVISFYEKLKSAENNTPADQTITSVTEEISGDIQQEVLRYVYRPFKGFFRSIALSRGNCLQDTLRLLTLWFKYGYQEEVCSAIKEGYGSVNIDTWLEVIPQLIARIHAPDQKVRRLIHDLLAEVGKEHPQALIYPLTVASKSQSFNRQTAASSVMDKLRAHSAVLVEQALLVSQELIRVAILWHEIWMENLEEASRLFFIERNFEAMFNILDELQERLDRGPETLREVAFVQAYGRELQEAGGWCKKYKQTGDMTFLSQAWQIYHEMFKKITAQVGTITTLELQYVSPKLLAARDLELAVPGP

SEQ ID NO: 713 - protein, 2144 aa, Saccharomyces cerevisiae
MPVLKSDNFDPLEEAYEGGTIQNYNDEHHLHKSWANVIPDKRGLYDPDYEHDACGVGFVANKHGEQSHKIVTDARYLLVNMTHRGAVSSDGNGDGAGILLGIPHEFMKREFKLDLDLDIPEMGKYAVGNVFFKKNEKNNKKNLIKCQKIFEDLAASFNLSVLGWRTSRRFYYLGDVALSREPTILQPLLVPLYDEKQPEFNETKFRTQLYLLRKEASLQIGLENWFYVCSLNNTTIVYKGQLTPAQVYNYYPDLTNAHFKSHMALVHSRFSTNTFPSWDRAQPLRWLAHNGEINTLRGNKNWMRSREGVMNSATFKDELDKLYPIIEEGGSDSAALDNVLELLTINGTLSLPEAVMMMVPEAYHKDMDSDLKAWYDWAACLMEPWDGPALLTFTDGRYCGAILDRNGLRPCRYYITSDDRVICASEVGVIPIENSLVVQKGKLKPGDLIPSDTQLGEMVDTKKLKSQISKRQDFKSWLSKVIKLDDLLSKTANLVPKEFISQDSLSLKVQSDPRLLANGYTFEQVTFLLTPMALTGKEALGSMGNDAPLACLNENPVLLYDYFRQLFAQVTNPPIDPIREANVMSLECYVGPQGNLLEMHSSQCDRLLLKSPILHWNEFQALKNIEAAYPSWSVAEIDITFDKSEGLLGYTDTIDKITKLASEAIDDGKKILIITDRKMGANRVSISSLIAISCIHHHLIRNKQRSQVALILETGEAREIHHFCVLLGYGCDGVYPYLAMETLVRMNREGLLRNVNNDNDTLEEGQILENYKHAIDAGILKVMSKMGISTLASYKGAQIFEALGLDNSIVDLCFTGTSSRIRGVTFEYLAQDAFSLHERGYPSRQTISKSVNLPESGEYHFRDGGYKHVNEPTAIASLQDTVRNKNDVSWQLYVKKEMEAIRDCTLRGLLELDFENSVSIPLEQVEPWTEIARRFASGAMSYGSISMEAHSTLAIAMNRLGAKSNCGEGGEDAERSAVQENGDTMRSAIKQVASARFGVTSYYLSDADEIQIKIAQGAKPGEGGELPAHKVSKDIAKTRHSTPNVGLISPPPHHDIYSIEDLKQLIYDLKCANPRAGISVKLVSEVGVGIVASGVAKAKADHILVSGHDGGTGAARWTSVKYAGLPWELGLAETHQTLVLNDLRRNVVVQTDGQLRTGFDIAVAVLLGAESFTLATVPLIAMGCVMLRRCHLNSCAVGIATQDPYLRSKFKGQPEHVINFFYYLIQDLRQIMAKLGFRTIDEMVGHSEKLKKRDDVNAKAINIDLSPILTPAHVIRPGVPTKFTKKQDHKLHTRLDNKLIDEAEVTLDRGLPVNIDASIINTDRALGSTLSYRVSKKFGEDGLPKDTVVVNIEGSAGQSFGAFLASGITFILNGDANDYVGKGLSGGIIVIKPPKDSKFKSDENVIVGNTCFYGATSGTAFISGSAGERFGVRNSGATIVVERIKGNNAFEYMTGGRAIVLSQMESLNAFSGATGGIAYCLTSDYDDFVGKINKDTVELESLCDPVEIAFVKNLIQEHWNYTQSDLAARILGNFNHYLKDFVKVIPTDYKKVLLKEKAEAAKAKAKATSEYLKKFRSNQEVDDEVNTLLIANQKAKEQEKKKSITISNKATLKEPKVVDLEDAVPDSKQLEKNSERIEKTRGFMIHKRRHETHRDPRTRVNDWKEFTNPITKKDAKYQTARCMDCGTPFCLSDTGCPLSNIIPKFNELLFKNQWKLALDKLLETNNFPEFTGRVCPAPCEGACTLGIIEDPLGIKSVERIIIDNAFKEGWIKPCPPSTRTGFTVGVIGSGPAGLACADMLNRAGHTVTVYERSDRCGGLLMYGIPNMKLDKAIVQRRIDLLSAEGIDFVTNTEIGKTISMDELKNKHNAVVYAIGSTIPRDLPIKGRELKNIDFAMQLLESNTKALLNKDLEIIREKIQGKKVIVVGGGDTGNDCLGTSVRHGAASVLNFELLPEPPVERAKDNPWPQWPRVMRVDYGHAEVKEHYGRDPREYCILSKEFIGNDEGEVTAIRTVRVEWKKSQSGVWQMVEIPNSEEIFEADIILLSMGFVGPELINGNDNEVKKTRRGTIATLDDSSYSIDGGKTFACGDCRRGQSLIVWAIQEGRKCAASVDKFLMDGTTYLPSNGGIVQRDYKLLKELASQV

SEQ ID NO: 714 - protein, 425 aa, Triticum aestivum
MGNRIGGRRKAGVEERYTRPQGLYEHRDIDQKKLRKLILEAKLAPCYPGADDAAGGDLEECPICFLYYPSLNRSKCCSKGICTECFLQMKPTHTARPTQCPFCKTPNYAVEYRGVKTKEERSIEQFEEQKVIEAQMRVRQQALQDEEDKMKRKQSRCSSSRTIAPTTEVEYRDICSTSYSVPSYQCTQQETECCSSEPSCSAQANMRSFHSRHTRDDNIDMNIEDMMVMEAIWRSIQQEQGSIGNPSCGSFMPFEQPTRERQAFVAAPPLEMPHPGGFSCAVAAMAEHQPSSMDFSYMTGSSAFPVFDMFRRPCNIAGGSMGAAESSPDSWSGIAPSCSRREVVREEGECSTDHLSEGAEAGTSYAGSDIVVDAGTMLPLPFADNYSMVASHFRPESIEEQMMYSMAVSLAEAHGRTHTQGLAWL

SEQ ID NO: 715 - protein, 535 aa, Rhodococcus sp. RHA1
MFRFLIVGFTVLGLGVVTAAAALGSWAWWAVASLLAVLLIVGLYDLLQRRHSVLRNYPILGHLRYLLESLRPELQQYFIERNFDGRPFDRDVRTVIYERAKGIHGELSFGTERDIEEVGYEYLVHSVMPAAEPEHPPRVLVGGADCSRPYSMSLLNISSMSFGALSANALRALNSAAARGGFAHDTGEGGLTPYHLSGGGDIIWEIGSGYFGTRTPGGQFDPHRFADKAAHEQVKAISLKLSQGAKPGVGGVLPAAKVSAEIAEYRGVPVGEKCVSPAAHSAFHTPREMIEFVARMRDISGGKPVGLKLCVGSRVELLAICKAILEMGTGPDFIVVDGAEGGSAAAPLEYEDHVGLPLTDGLMTVHNALVGTGLREQIRLGASGKVAVGNDIVKRLIQGADYTNAARAMMMAIGCIQAQRCHTNTCPVGVATQDPKRTRALDVADKSLRAYRYHEATVRQAVQIMASMGVTDPSGLGPHLLRKKITPTRVSSYAEIYEWLTPGELLHHTPRAWAADWAEASADTFHPGAEPGHRP

SEQ ID NO: 716 - protein, 453 aa, Petunia x hybrida
MEAFHHAPISFHFPYAFPIPTPTNFLGTTTPNSSSINGSPYMDSRLWSRLPHRLVDRIIAFLPPPAFFKARAVCKRFYGLLYSTNFLELYLQVSPKLHWFIFFKQKLPKNNIFKNSIGGTSNDRIEGYLLDPNNLCWYKLSFALIPQGFSPVSSSGGLICFVSDEAGSKNILLCNPLVGSIIPLPPTLRPRLFPSIGLNITNSSIDLAVAGDDLISPYAVKNLTTESFHIDGNGFYSIWGTTSTLPRLCSFESGKMVHVEGRFYCMNFSPFSVLCYDIGTNNWSKIQAPMRRFLRSPSLVESNNGKLVLVAAVEKSKLNVPRSLRLWSLQECGTMWVEIERMPQQLYVQFAEVENGQGFNCVGHGEFVVILIKNSDKALLFDFVKKRWVWIPPCPFVVGNNHNIDYSCGASSSINNYGEFGGGELHGFGYDPRLAAPIGALLDQLTLPFQSFN

SEQ ID NO: 717 - protein, 447 aa, uncultured bacterium
MLKVMAKMGISTLESYKGAQIFEAVGLAQEIMEKCFFGTASRIDGVGFDILQDETETRHQSAYTSETLDNLGQYHWRSGGEKHMWDPEAISNLQVAARNNDESAYWKFAKHANEEGTRNSTLRGLMSFKKGSPININEVEPCQEIVKRFATGAMSFGSISAESHESLAIAMNRLGGKSNTGEGGEDSKRWTADANDDSRRSAIKQVASGRFGVTIDYLNNADEIQIKVSQGAKPGEGGELPGTKVDEGIAKIRHSTPGVGLISPPPHHDIYSIEDLSQLIFDLKRSNPDARISVKLVAEVGVGTIAAGVTKAKSDHIVIAGHDGGTGASPLTSIKHAGLPWELGLAETHQTLVMNDLRSRVVIQTDGQLKTGRDVAIGILLGAEEFGFSTAPLITMGCIMMRKCHLNTCPVGIATQDKALPNNSLKPEYVVNYLFMVAQELRLIMAE

SEQ ID NO: 718 - protein, 185 aa, Brassica oleracea
MGDSDKDSGGGQNGQSPLSPREQDRFLPIANVSRIMKKALPANAKISKDAKETMQECVSEFISFVTGEASDKCQKEKRKTINGDDLLWAMTTLGFEDYVEPLKVYLQRFREIEGERAGVGRPQTGGEGGEHQRDAGVGDGGGFYGGGMQYHQHHQFLHQQNHMYGSTGGGGGDGGGGAGSGRTRT

SEQ ID NO: 719 - protein, 811 aa, Magnetospirillum magnetotacticum MS-1
MAKMGISTYQSYCGAQIFDAIGLSSGFLNTYFAGTSSRVEGISLIGVAEETVRRHQIAYSDAPVYRNALDVGGEYAVRLRGEEHAWTSETIATMQHAVRSGSMDKFREFSKNIDDQSKRLLTLRGLFEIKPAGNGISIDEVESAKEIVKRFVTGAMSFGSISYEAHSTLAVAMNRIGGKSNTGEGGEEPERFLPLANGDSKRSAIKQVASGRFGVTAEYLVNADDIQIKMAQGAKPGEGGQLPGHKVDKVIARVRHSTPGVGLISPPPHHDIYSIEDLAQLIFDLKNVNPAARISVKLVSEIGVGTVAAGVSKAKADHVTISGFDGGTGASPLTSIKHAGSPWEIGLAETHQTLVLNQLRGRIVVQADGGLRTGRDVIIAALLGADEFGFATAPLIAAGCIMMRKCHLNTCPVGVATQDPELRKRFVGQPEHVINYFFFVAEEVREWMAKLGVRSLSELTGRTDLLDVNQAINHWKAKGLDFSKMFHRIPSQPGVAERHCESQEHDLDDALDRELINEAKPALDDRMSVRISKPVRNVNRTVGAMLSGEVAKRFGHGGLPGDTIHVKLSGTAGQSFGAFLARGVTLELEGEGNDYVGKGISGGRVIIYPSKDFKSPAEDNIIVGNTVLYGAIEGECYFRGVAGERFAVRNSGAIAVVEGVGDHGCEYMTGGVVLVIGATGRNFAAGMSGGVAYVLDEAGDFKKRCNLSMVELEPVAAEEDANSKHENQAGDLEGHGLVDVMGDMTRDDASRIQALLRNHQHYTGSKRAHEILLNWEYYMPKFVKVMPVDYRRALLEMQKAQEPKVAAGGGR

SEQ ID NO: 720 - protein, 187 aa, Brassica napus
MGDSDRDSGGGQTGNNQNGQSSLSPREQERFLPIANVSRIMKKALPANAKISKDAKETMQECVSEFISFVTGEASDKCQKEKRKTINGDDLLWAMTTLGFEDYVEPLKVYLQRFREIEGERTGLGRPQTGGEAGEHQRDGGVGDGGGGYYGGGMGMQYQQHHQFLHQQNHMYGSTGGGGGGHSGGRS

SEQ ID NO: 721 - protein, 159 aa, Glycine max
FNFKGHELLEFARESVVVYLDDEDGATRKDAALCCCRLIASSFSGMACSHFGSSRLTRSGGKRRRLVEELVEKLLISAVADADVTVRHSIFTSLHGDRGFDEYLAQADNLSAVFAALNDEDFDVREYAISVAGRLSEKNPAYVLPALRRHLIQLLTYLE

SEQ ID NO: 722 - protein, 1489 aa, Chlorobium tepidum TLS
MKHRGATGYEKNTGDGAGILIQIPDKFMRKVCAQRNIELPEPGKYGVGMVFLPPDLTQRRAIEDICRQMVQAEGQKYLGLRKVPTDNSTLGQTARSQEPVVKQIFVGRGNDNMSDLEFERKLYIIRRRIFKRVRFTSGLLGSSFFYISSFSARTIVYKGMLNPEQVEEFYPELRDPDMESAIAMVHSRFSTNTFPSWDRAHPYRFLSHNGEINTLRGNVNWMKAREKNMQSSIFKGALEEIKPILLEEGSDSATLDNAFELLVMCGRSMAHAAMMLIPEPWSGNESMDPDKRAFYEYHSCLMEPWDGPASVVFTDGIQIGAVLDRNGLRPSRYYITSDDLVVMASEVGVLDIDPEKIIKKDRLQPGRMFLVDTKEGRIISDEEIKKSIASEKPYTEWIERNVIDLASLPERERMKNPDEDNYSITARQKAFGYTNEDLTLQIRPMAQNGTECIGSMGNDTPLAVLSNRPRLLYDYFKQLFAQVTNPPIDSIREEIVTSTTVMLGAEGNLLESDEINCRRIRIPHPILTDEDLEKIRGIDKPGFKAITLPIFYNVAEGGRGIQETMQDLYRQAEKAINQEGVNIIILSDKGELEKSRAPIPVLLALAGFHHFLISAGLRTKVGLIVESGEPRTVHHFSMLIGYGAGAINPYLAFETIRQQVAQGRITHDEKKAIKNYVKAAVKGVVKTMAKMGISTVQSYRGAQIFEAVGLNTEVVDTYFTKTPSRIEGIGLDTLADEVRKRHEAAFPPGGNKVNRGLEAGGDRKWRHDGEFHLFNPETIHYLQHSCRTGDYELFKKYEKLIDDQSEHYCTIRGLMDIRFSEKPIPIDEVEPVEAIVKRFKTGAMSYGSISKESHETLAIAMNRLGGKSNTGEGGEEPDRFVRDANGDSRMSAIKQVASGRFGVTSEYLTNAEEIQIKMAQGAKPGEGGQLPGTKVYPWIAKTRHSTPGVGLISPPPHHDIYSIEDLAQLIFDLKNANRSARINVKLVSTVGVGTIAAGVAKAHADVVLISGHDGGTGASPISSIMHAGMPWELGLAETHQTLMLNNLRSRIVVEADGQLKTARDIVIAAMLGAEEFGFATTALVVMGCIMMRCCQDDSCPVGIATQNPELRKNFKGKPEHVENFMRFLAQGVREYMAKLGIRTLNELVGRSDLLATSRTIKHWKAKGVDLSKILHQVDTGDNDTPYCTITQDHGIEESLDMRVLMAICEPAIKRGEKVSTTLPIKNTNRAAGTIVGHEVTKAYGSKGLPDDTIHLKFIGSAGQSLGAFIPKGMTIELVGDANDYIGKGLSGGRIIAYPPKSSKFVPEENIIVGNVAFYGATSGEAFIRGMAGERFCVRNSGMEAVVESVGDHGCEYMTGGKVVILGKTGRNFAAGMSGGVAYVYDVDGAFTGRCNLEMVSLSAVEAEDELEWLRSKIEQHVEVTGSELGKGLLATWPNASQRFVKVLPNDYKRAIDAMKEVEAMGMTGDEAVMAAFEKNVHDPSRASGN

SEQ ID NO: 723 - protein, 1605 aa, Marinobacter sp. ELB17
MDKRAILPLPDSRNIHEECAVEHKHNIEAKIQHAQQYGLYNPAKEHDACGIGFIAHIKGHKSHSIVKQGLLILKNLAHRGAVGADKLMGDGAGILIQLPDQYYREEMAKQGVELPPPEEYGVGMIFLPKENTSRIACEQEIERVVRAEGQVVLGWRNVPIDTEMPMSPTVREKEPVIRQVFIGRGPDITVSDALERKLYVIRKSSSHAIQALDLPHGKEFFVPSMSARTIVYKGLLLADQVGVYYKDLQDERCVSALALVHQRFSTNTFPEWPLAHPFRLIAHNGEINTVKGNINWMRAREGVMESAVLGDDLQKLFPLIDDVQSDTACFDDALELLLMAGYPIAQAMMMMIPEAWENHPLMDDNRRAFYEYHAAMMEPWDGPAAMAFTDGRYIGGTLDRNGLRPARYIVTDDDLVVMASESGVLPIPESRIIKKWRLQPGKMFLIDLEAGRIIDDQEIKDTYANAKPYKAWINSVRINLDDIKLHEVTLDDIKTQTSAAKTSASLLDCQQAFGYTQEDVRVLMSPMALNAEEATGSMGNDSPPAVMSNKLKPLYHYFKQMFAQVTNPPIDPIREAMVMSLVSFIGPRPNLLDVNNINPPMRLEVSEPILDYSDIAKLRNISAHTSGNFKSHELNICYPVAWGKEGMEVRLASVCAQAVDAVKSGHNILIVSDRKVDAEQVAIPALLATSAIHLHLVSTGFRTSTGLVVETGSARETHHFALLAGFGAEAIHPYLAMDTLAEMANRLSDDLSPEKAIQNFQKALAKGLLKVMSKMGISTYMSYCGAQVFEAIGLNKSLIDKYFKGTASNIEGIGVVEVAEEALRLHQQAFGNDPVLAHALDAGGEYAFRVRGEEHMWTPDAIAKLQHSTRSNNFSTYQEYAQIINDQSKRHMTLRGLFEFKLDPSKAIALDEVEPAKEIVKRFATGAMSLGSISTEAHATLAVAMNRIGGKSNTGEGGEDPSRYRQEMKGIPIKQGETMASVIGHDQIEADIVLQDGDSVRSRIKQVAAGRFGVTAAYLDSADQIQVKMAQGAKPGEGGQLPGYKVSEYIAKLRFSVPGVGLISPPPHHDIYSIEDLAQLIHDLKNVNPSASISIKLVSEVGVGTVAVGVTKAKADHVVIAGHDGGTGATPLSSLKHAGTPWELGLAETQQTLVLNGLRGRIRVQADGQMKTGRDIVIAAMLGADEIGFATAPLVVEGCIMLRKCHLNTCSVGIATQDPVLRAKFSGKPEHVVNYFFFVAEEARQLMAQLGIRTFDELIGRVDLLDKSKAITHWKAKGLNFSKIFYQPEVPASVPRYHAEEQDHGLEKALDHKLIAQAKAALEKGEKVSFTLPIRNVNRTVGTMLSGVVAKKYGHEGLPDDTIHIQLLGTAGQSAGAFLAHGITLDLVGEGNDYVGKGLSGGRIIVRPNTEFPGLADDNIIIGNTVLYGAIAGEAFFNGVAGERFAVRNSGAITVVEGVGDHGCEYMTGGTVVVFGEAGRNFAAGMSGGIAYVWDPDGDFAKKCNMAMVTLEPVLAHAEQEAKVDRSIWHSQLRGDQSETDEAILKRLIERHFKYTGSTRARNLLDDWSNGRNKFLKVFPNEYKRALGEMNVARVAIRQKEKNAI

SEQ ID NO: 724 - protein, 156 aa, Oryza sativa Indica Group
MQLLMRRFLRSPALVELGGGREGAAVVVLVSAVEKSRLSVHLWTRRGGGGHGGGAGDGGAWTEVHAQFAVAEGGRGFECAAHGSLGPSPPSYRPRFVANTTVFAGADLDRRSYRQVSIYAYVMSAPVTGAVACLARSTHHDRSRELTAKWPKLMPR

SEQ ID NO: 725 - protein, 495 aa, Oryza sativa Japonica Group; identical to SEQ ID NO: 414

SEQ ID NO: 726 - protein, 529 aa, Frankia sp. CcI3
MFSFGILPALAGLMAAAIAAGLWWSADWWGAAAVSGALLALAVHDVTQRRHAILRNYPVFGHLRFMLESIRPEIQQYFIERNYDGRPFDRDIRTSIYERAKGIHSDQAFGTERDVNAVGYEYLLHSTVPLAVAPGTPPPRVRIGGPDCTQPYDMALLNISAMSFGALSGNAVLAMNRGAAAGGFAHDTGEGGLTEHHLRYHADLVWEIGSGYFGARTADGDFDPALFKDKAALPSVRMVELKLSQGAKPGLGGILPAAKVSAEIARARGVPAGVTCVSPPGHRVFSTPRELVLFIARMRELAGGKPTGFKLCMGPRRELLAICRAMLAEGITPDFIVVDGGEGGTGAAPLEYEDHVGTPLTEGLMTVHNALVGVGLRDQVRIGVSGKIATGVDIVKRLAQGADYTNAARAMMMAVGCIQAQRCHTNTCPVGVATQDPRRARAVDVADKGERVRRYQQAAVAQAVQMIASLGCAGPEQLHPGMLMRRVTHTDTRSYAELYEWLEPGELLVEPPADWAADWAAADPDRFRP

SEQ ID NO: 727 - protein, 122 aa, Glycine max
IYGSLLAVGELLRNTGEFMMSRYREVAEIVLRYLEHRDRLVRLSITSLLPRIAHFLRDRFVTNYLTICMDHILSVLKVPQDRDSGFIALGEMAGALDGELIHYLPTITTHLREAIAPRRIKP

SEQ ID NO: 728 - protein, 1543 aa, Microcoleus chthonoplastes PCC 7420
MVPLQPSSFLGHFEMKSNQLPKKQGLYDPQFEHDACGVGFVVQMKGNKSHDIVEQGLTILANLEHRGACGCEPNTGDGAGILIQIPDQFMRKVAAADNITLPEAGEYGVGAIFTSPDSMIRQQSRQIFEKIATEEGQRVLGWRDVPVDDSPLGSIAKLGEPFMQQVFLQRSPNLTDDLAFERKLYVILKRAEKEISQSEVDPCWYTASLSCRTIVYKGMLTPIQVGQYYPELHDPDLKSALALVHSRFSTNTFPSWERAHPYRYIAHNGEINTLRGNINWMHARQSLFKSELFGDDLEKIQPVIDLEGSDSAIFDNSLEMLVLSGRSLPHAVMMMIPEPWTNHESMSAETKAFYEYHSCLMEPWDGPASIAFTDGTTIGAVLDRNGLRPSRYYVTKDDRVIMASEAGVLPVEPEDVAFKGRLQPGRMFLVNMEEGRIIADEELKQAIITEHPYQEWIDEYMVELAQLKDAPEVPQSEPDTLIQRQIAFGYTFEELRMLMAPMAQNGVEAVGSMGSDTPLAVLSDRPKLLYNYFQQLFAQVTNPPIDSIREEIITSAETTIGSERNLLEPEPQSCHLIELKTPILNNEELAKLKYVSEGEFKSITLPILFDPKAGVKGLETAMEEIFAKADSAIADGTTIIILSDRGIDKDHAPIPALLAVAGLHHHLIRKKTRTKVGIVLESGEPREVHHHALLIGYGCGGINPYLMFETIDDMISQGLLENIDRKTAQKNYIKAATKGVIKVASKIGISTIQSYRGAQIFETIGLKQALVDKYFTWTATRIEGADLDVIAQEAIMRHSYAFPDREVNGHTLDAGGEYQWRKDGEAHLLSPQTIHALQNAVRQGSYDLYKEYATLINEQTKQHFTLRGLLQFKKRDPIPLEEVEPVEAITRRFKTGAMSYGSISKEAHESLAIAMNRIGGKSNTGEGGEDPERYTWTNENGDSKNSGIKQVASGRFGVNSLYLSQAKELQIKMAQGAKPGEGGQLPGRKVYPWIAKVRNSTPGVGLISPPPHHDIYSIEDLAELIHDLKNANRNARINVKLVSEVGVGTIAAGVAKAHADVVLISGFDGGTGASPQTSIKHAGLPWELGVAETHQTLVLNDLRSRIVVETDGQMKTGRDVVMAALLGAEEFGFSTAPLVTLGCIMMRVCQKNTCPAGIATQNPVLRQSFIGNPDHTVNFMTFVAQEVREIMAQLGFRTLNEMVGRVDVLEAKPAVDHWKAKGLDLSQILYQPDVGPEIGRYCQIPQDHGLDKSLDMRVLLDLCKGAIAKGEKVTATLPIQNTNRAVGTILGNEITKRHWQGLPEDTIHLHFQGSAGQSFGAFVPKGVTLELEGDANDYFGKGLSGGKLILYPPARSTFVPRENIIVGNVALYGATAGEVYIRGMAGERFCVRNSGVNAVVEAVGDHGCEYMTGGKVVVLGPTGRNFAAGMSGGVAYVLDEKGDFATRCNTQMSDLEKLEDEEEIEIIHQMIAKHVEYTKSQLGLTILANWTEMVPKFVKVIPKDYKRVLACLHKAEEAGLSGDDALTAAFEENARDLARISGS

SEQ ID NO: 729 - protein, 1519 aa, Geobacillus kaustophilus HTA426
MKHYGLPEAQGLYRPEFEHDACGIGFYAHLKGKPSHDIIEKALHMLRQLEHRGGQGSDPETGDGAGIMTQIPHEYFQAVCGGMNLPEKGRYGVGMFFLPEEEAKRAYYESMFNEIVAQEGQRLLGWRTVPVDREKLGKLARQSQPFIRQVFVAASDDVADELAFERKLYVIRKQFEKCVENNECYVASFSSRTIVYKGLLTPEQIDAFYLDLQDERFRSAFALVHSRFSTNTFPSWERAHPNRYLIHNGEINTLRGNVNWMTAREKQFVSEAFGADLEKVVPILDTNGSDSSILDNAFEFFVLAGRKPAHVAMMLIPEPWFWDEQMDGAKKAFYEYHSCLMEPWDGPTAISFTDGKQIGAILDRNGLRPARYYVTKDDYIIFSSEVGVIDVDPNNILYKERLSPGKMLLVDLEQGRIISDQEIKEEMAHEKPYRQWINEQMITLGDLEIPEDVEAPKQLVKLQKAFGYTFEDVEKTILPMAAEGKDPTGAMGMDAPLAVLSERPQSLFNYFKQLFAQVTNPPIDAIREYVVTSTMTLLGKEGNILHPDAKAARRIRLETPLLTNEELAALKANPYPEFACAVLPTLFTDDLKQALDELFAKADEAIENGAALLVLSDRGVDETHVAIPVLLATSGLHQHLVRKGTRTNVSLLVESGEAREVHHFAALIGYGADAINPYLALETIRQASENGTIALSYREAVKTYIKAAVDGVVKVMSKMGISTVQSYRGAQIFEAVGIGNDVIDEYFTGTASQIGGIGLAEIAKEAKMRHESAFDARYEDDVLDTGSELQWRRNGEHHAFNPKTIHLLQWACRKNDYNLYKQYSKLANEEQLTFLRNLFDFDSSRQPVPIEEVEPVESIVRRFKTGAMSFGSISQEAHEALAIAMNRIGGKSNSGEGGEDPARYVKDENGDWRRSAIKQVASGRFGVKSHYLVNADELQIKMAQGAKPGEGGQLPANKVYPWVGKVRGSTPGVELISPPPHHDIYSIEDLAQLIYDLKNANKDARISVKLVAKAGVGTIAAGVAKGNADVIVISGYDGGTGASPKTSIKHAGLPWELGLAETHQTLMLNGLRDRVVLETDGKLMTGRDVVMAALFGAEEFGFATAPLVVLGCVMMRVCHLDTCPVGVATQNPELRKKFTGKPEHVVNFMYFVAQEVREIMAELGFRTIDEMVGRVDVLKVSERAKAHWKAKHLDLSRLLYQVDGPRTCIKGQNHRLEETLDHTEILPAVQPALERQEPVELHLAIRNVHRTVGAMTGSEISKRYGEEGLPDDTIRLHFTGSAGQSFAAFVPKGMTLELVGDANDYVGKGLSGGKVIVRPPHEAPFAAADNVIIGNVAFYGATSGEAYIRGRAGERFCVRNSGVHAVVEGVGDHGCEYMTGGRVVILGSVGKNFAAGMSGGIAYVLADEDSWQQTANLELVSFERLEDEEEIRDVRRMIENHYRYTGSPRAALVLEEWDAYVRRFVKVIPHNYKLMVETIQALEQSGFSYDEAALAAFETVAKRKKAAAVGVHVLQAAAK

SEQ ID NO: 730 - protein, 482 aa, Oceanobacillus iheyensis HTE831
MVDIIILILLCIVILGSIVMLLSWRKIMKKMTKKYGSIIMSDQYQENLIEMMAGFKHMGIQTTLENNLRAEFGKILHRPLGSTRQWPHFESITFIPAQAAKFPTDHDVSVDISVTIGPKAKKPLEINAPFMISGMAYGIALSKNVRLALMDAANNVGIAINSGEGGILDEEIDGADNYILQFGKARWSKEEELFKKAEMIELKFGQGAILGMGDIIIPRDLQGHARKVMGLEDDEDAVIHNNFFENQTMKDLKDLVEELRHISGGVPIGAKVGAGGKIEDDIDALLEIGVDYIAVDGGQAATYGAAPLLTDDFGIPTLHALIRAVNHLEKINKKNEISLIISGGMFTPGEYLKALALGADAVYLGSVMLFTVAHKQVLDAVPFEPPTQVVWSDGKYRDKFVREEGAKNATNFLKSTIEELEVAIRAMGKTKLSEVTKEDLVSYEKNTAQAVGIPFTTLPYSEGKVQETSLKEEKKTDPLIEL

SEQ ID NO: 731 - protein, 1581 aa, Agrobacterium tumefaciens str. C58
MTHKPQAEIAAATLTTDCPTAAAAAPVSAKARFAGGLPERQGLYNPANEHDACGVGFVAHMKGVKSHQIVSDGLFILENLTHRGAVGADPLMGDGAGILVQIPDRFFREEMALQGVTLPKAGEYAVGHIFMPRDPSRIEHYKKVIVDVIGEEGQQFLGFRDVPVDNSSLSKAPDIAATEPHHVQVFIGAGRDAATNHDFERKLFLIRKVLSNRIYDEGGGKETQDFYPVSLSSSTIVYKGMFLAYQVGAYYKDLADPRFESAVALVHQRFSTNTFPSWKLAHPYRMVAHNGEINTLRGNVNWMAARQASVSSALFGDDISKLWPISYEGQSDTACFDNALEFLVRGGYSMAHAVMMLIPEAWSGNLSMSAERKAFYEYHAALMEPWDGPAAVAFTDGKQIGATLDRNGLRPARYLVTDDDRVIMASEAGTLPVPEERIIKKWRLQPGKMLLIDMEKGAIISDEDVKHELAAKHPYRTWLDRTQLILEDLKPVEPRALRRDVSLLDRQQAFGYTSEDTKLLMSPMATTGQEAIGSMGTDTPISAMSDKSKLLYTYFKQNFAQVTNPPIDPIREELVMSLVSFIGPRPNLLDHEGAARAKRLEVRQPILTNGDLEKIRSIGHTEDRFDTKTLDFTYDVERGAEGMPEMLDRLCERAESAVRGGYNIIVLSDRQLGPDRIAIPALLATAAVHHHLIRKGLRTSVGLVVETGEPREVHHFCLLAGYGAEAINPYLAFDTLLDMHKHGAFPKEVSDDEVVYRYIKAVGKGILKVMSKMGISTYQSYCGAQIFDAIGLSSQFVEQYFFGTATSIEGVGLTEIAEETVTRHTAAFGKDPILANTLDIGGEYAYRMRGESHAWTPDAVASLQHAVRGNSQDRYREFAGMVNETALRMNTIRGLFNIKSAGALGRKPVSIDEVEPAADIVKRFSTGAMSFGSISREAHTTLAIAMNQIGGKSNTGEGGEESDRYLPLLNGKPNPERSAIKQIASGRFGVTTEYLVNADMLQIKVAQGAKPGEGGQLPGHKVDATVAKTRHSTPGVGLISPPPHHDIYSIEDLAQLIYDLKNVNPEADVSVKLVSEVGVGTVAAGVAKARADHITVSGFDGGTGASPLTSLKHAGSPWEIGLAETQQTLVLNGLRSRVALQVDGGLKTGRDVIIGALLGADEFGFATAPLIAAGCIMMRKCHLNTCPVGVATQDPVLRKRFKGTPEHVINYFFFVAEEVREILASLGVTRLDEIIGASELLEKDEMLAHWKAKGLDFSRIFHKVEAPKEATFWTERQKHPIDDILDRKLIEKSLPSLENREPVVFEVPIKNVDRSAGAMLSGALAKRWGHKGLKDDTIHVTLRGTAGQSFGAFLARGITFDLVGDGNDYVGKGLSGGRIIVRPPENTRIVAENSIIVGNTVLYGAITGECYFRGVAGERFAVRNSGAVAVVEGVGDHGCEYMTGGIVVVLGETGRNFAAGMSGGVAYVLDEKGDFATRCNMAMVELEPVPEEDDMLEKLHHHGGDLMHKGRVDVSEDMTRHDEERLYQLISNHFHYTNSARAKDILDRWSEFRPKFRKVMPVEYRRALEEMERMRMGVAAE

SEQ ID NO: 732 - protein, 446 aa, Pseudomonas syringae pv. tomato str. DC3000
MSDPTNNKPAPVLRESATFDRLTIQEIQRAAETGIYDIRGGGTKRKLPHFDDLLLLGASVSRYPLEGYREKCGTDVVLGNRFAKKPLYLKIPVTIAGMSFGALSANAKEALGRGATIAGTSTTTGDGGMTPEERGQSQHLVYQYLPSRYGMNPDDLRKADAIEIVLGQGAKPGGGGMLLGMKVTERVAGMRTLPVGVDQRSACRHPDWTGPDDLAIKIAEIREITDWEKPIYVKIGASRPYYDVKLAVKAGADVIVLDGMQGGTAATQEVFIEHVGIPILPAIPQAVQALQEMGMHRKVQLIVSGGIRNGADVAKAMALGADAVAIGTAALIALGDNHPRLDEELKKIGSAAGFYDDWQNGRDPAGITTQDPELSKRLDPVEGGRRLANYLRVLVLEAQTMARACGKSHLHNLDPEDLVALTVESAAMARVPLAGTSWIPGSGSGY

SEQ ID NO: 733 - protein, 445 aa, Xanthobacter autotrophicus Py2
MTAHSNVPRTPPRFSATFDPATLAEIRRAAATGIYDIRGGGTKRKVPHFDDLLFLGASMSRYPLEGYREKCGTEVVLGTRFAKKPITLKTPVTIAGMSFGALSAQAKEALGRGATTVGTSTTTGDGGMTPEERGQSQTLVYQYLPSRYGMNPVDLRKADAIEIVIGQGAKPGGGGMLLGQKISDRVAAMRNLPKGIDQRSACRHPDWTGPDDLEIKIEELRELTDWEKPIYVKVGASRPYYDIALAVKAGADVVVLDGMQGGTAATQDVFIENVGLPILGAIRPAVQALQDLGMHRKVQLIVSGGIRSGADVAKALALGADAVAIGTAALVALGDNDPQWEDEYQALGTTAGAYDDWHEGLDPAGITTQDPVLSARLDPVKAGRRLANYLSVMTLEAQTIARACGKSHVHNLEPEDLVALTVEAAAMAGVPLAGTSWIPGRNGGY

SEQ ID NO: 734 - protein, 500 aa, Dehalococcoides sp. BAV1
MKTFLPSKFIVDRIEDRCIKCKVCITQCSFDTHYYDADDDQIKVRNQNCVGCHRCVTFCPTGALVVRNNPLEYRQNANWTPEMIEDIFKQAETGGVLLTGMGMDKAKPIYWDKLLINASQVTNPSIDPLREPMELTTYLGRKPEKATFDKCGNIEVNVAPQVKIDVPLMFSAMSYGAISLNVHRSLAQAAKNMGTMWNTGEGGLHSSLMEFKDNTIVQVASGRYGVQNDYLNSGRIVEIKIGQGAKPGIGGHLPGEKVSADVSLTRMIPMGTDAISPAPQHDIYSIEDLSQLIYGLKEATRYRVPISVKIAAVHNVAAIASGIVRAGADIVTIDGMRGATGAAPKVIRDNVGIPIELALAAVDSRLREEGIRNQASLVISGGIRNSGDVFKAIALGADAVNIGTAALVALGCHLCQQCHTGKCSWGICTSDLALTKRINPEIGAKRLTNLLRGWSLEIKDMLGGLGVNAIESLRGNRLHLRGVGLSAEELKILGVRAAGE

SEQ ID NO: 735 - protein, 442 aa, Mesorhizobium loti MAFF303099
MTYRNPPTTPRKSATFDDYTLSEIRRAAATGIYDIRGAGAKRKLPHFDDLLFLGASISRYPLEGYRERCDTSVVLGSRHAKKPIELKIPITIAGMSFGSLSGPAKEALGRGATLSGTSTTTGDGGMTEEERGHSKQLVYQYLPSRYGMNLRDLRRADAIEVVVGQGAKPGGGGMLLGQKISDRVAEMRTLPKGIDQRSASRHPDWTGPDDLEIKILELREITDWEKPIYVKVGGARPYYDTALAVKAGADVVVVDGMQGGTAATQEVFIENVGQPTLACIRPAVQALQDLGMHRKVQLIVSGGIRNGADVAKALALGVDAVSIGTAALVALGDNDPRWEAEYNELGTTAGAYDDWHEGRDPAGITTQDPELMKRVDPVAAGRRLANYLKVMTLEAQTIARACGKNSLHNLEPEDLVALTIEAAAMAGVPLAGTNWIPGKNGF

SEQ ID NO: 736 - protein, 455 aa, Solanum lycopersicum
MEAFHHPPISFHFPYAFPIPTPTTNFLGTPNSSSVNGMIINTWMDSRIWSRLPHRLIDRIIAFLPPPAFFRARVVCKRFYGLIYSTHFLELYLQVSPKRNWFIFFKQKVPRNNIYKNVMNSSNSGVCSVEGYLFDPENLCWYRLSFALIPQGFSPVSSSGGLICFVSDESGSKNILLCNPLVGSIIPLPPTLRPRLFPSIGLTITNTSIDIAVAGDDLISPYAVKNLTTESFHIDGNGFYSIWGTTSTLPRLCSFESGKMVHVQGRFYCMNFSPFSVLSYDIGTNNWCKIQAPMRRFLRSPSLVEGNGKVVLVAAVEKSKLNVPRSLRLWALQDCGTMWLEIERMPQQLYVQFAEVENGQGFSCVGHGEYVVIMIKNNSDKALLFDFCKKRWIWIPPCPFLGNNLDYGGVGSSNNYCGEFGVGGGELHGFGYDPRLAAPIGALLDQLTLPFQSFN

SEQ ID NO: 737 - protein, 1520 aa, Synechocystis sp.
CGVGFIANLRGKPDHTLVEQALKALGCMEHRGGCSADNDSGDGAGVMTAIPRELLAQWFNTRNLPMPDGDRLGVGMVFLPQEPSAREVARAYVEEVVRLEKLTVLGWREVPVNSDVLGIQAKNNQPHIEQILVTCPEGCAGDELDRRLYIARSIIGKKLAEDFYVCSFSCRTIVYKGMVRSIILGEFYLDLKNPGYTSNFAVYHRRFSTNTMPKWPLAQPMRLLGHNGEINTLLGNINWMAAREKELEVSGWTKAELEALTPIVNQANSDSYNLDSALELLVRTGRSPLEAAMILVPEAYKNQPALKDYPEISDFHDYYSGLQEPWDGPALLVFSDGKIVGAGLDRNGLRPARYCITKDDYIVLGSEAGVVDLPEVDIVEKGRLAPGQMIAVDLAEQKILKNYQIKQQAAQKYPYGEWIKIQRQTVASDSFAEKTLFNDAQTVLQQQAAFGYTAEDVEMVVVPMASQGKEPTFCMGDDTPLAVLSHKPRLLYDYFKQRFAQVTNPPIDPLRENLVMSLAMFLGKRGNLLEPKAESARTIKLRSPLVNEVELQAIKTGQLQVAEVSTLYDLDGVNSLEDALTNLVKTAIATVQAGAEILVLTDRPNGAILTENQSFIPPLLAVGAVHHHLIRAGLRLKASLIVDTAQCWSTHHFACLVGYGASAICPYLALESVRQWWLDEKTQKLMENGRLDRIDLPTALKNYRQSVEAGLFKILSKMGISLLASYHGAQIFEAIGLGAELVEYAFAGTTSRVGGLTIADVAGEVMVFHGMAFPEMAKKLENFGFVNYRPGGEYHMNSPEMSKSLHKAVAAYKVGGNGNNGEAYDHYELYRQYLKDRPVTALRDLLDFNADQPAISLEEVESVESIVKRFCTGGMSLGALSREAHETLAIAMNRLGAKSNSGEGGEDVVRYLTLDDVDSEGNSPTLPHLHGLQNGDTANSAIKQIASGRFGVTPEYLMSGKQLEIKMAQGAKPGEGGQLPGKKVSEYIAMLRRSKPGVTLISPPPHHDIYSIEDLAQLIYDLHQINPEAQVSVKLVAEIGIGTIAAGVAKANADIIQISGHDGGTGASPLSSIKHAGSPWELGVTEVHRVLMENQLRDRVLLRADGGLKTGWDVVMAALMGAEEYGFGSIAMIAEGCIMARVCHTNNCPVGVATQQERLRQRFKGVPGQVVNFFYFIAEEVRSLLAHLGYRSLDDIIGRTDLLKVRSDVQLSKTQNLTLDCLLNLPDTKQNRQWLNHEPVHSNGPVLDDDILADPDIQEAINHQTTATKTYRLVNTDRTVGTRLSGAIAKKYGNNGFEGNITLNFQGAAGQSFGAFNLDGMTLHLQGEANDYVGKGMNGGEIVIVPHPQASFAPEDNVIIGNTCLYGATGGNLYANGRAGERFAVRNSVGKAVIEGAGDHCCEYMTGGVIVVLGPVGRNVGAGMTGGLAYFLDEVGDLPEKINPEIITLQRITASKGEEQLKSLITAHVEHTGSPKGKAILANWSDYLGKFWQAVPPSEKDSPEANNDVSLTGEKTLTSV

SEQ ID NO: 738 - protein, 1517 aa, Escherichia coli O157:H7 EDL933
  misc_feature (382)..(382): Xaa can be any naturally occurring amino acid
  misc_feature (1285)..(1285): Xaa can be any naturally occurring amino acid
MTRKPRRHALSVPVRSGSEVGFPQSLGEVHDMLYDKSLERDNCGFGLIAHIEGEPSHKVVRTAIHALARMQHRGAILADGKTGDGCGLLLQKPDRFFRIVAHERGWRLAKNYAVGMLFLNKDPELAAAARRIVEEELQRETLSIVGWRDVPTNEGVLGEIALSSLPRIEQIFVNAPAGWRPRDMERRLFIARRRIEKRLEADKDFYVCSLSNLVNIYKGLCMPADLPRFYLDLADLRLESAICLFHQRFSTNTVPRWPLAQPFRYLAHNGEINTITGNRQWARARTYKFQTPLIPDLHDAAPFVNEIGSDSSSMDNMLELLLAGGMDIIRAMRLLVPPAWQNNPDMDPELRAFFDFNSMHMEPWDGPAGIVMSDGRFAACNXDRNGLRPARYVITKDKLITCASEVGIWDYQPDEVVEKGRVGPGELMVIDTRSGRILHSAETDDDLKSRHPYKEWMEKNVRRLVPFEDLPDEEVGSRELDDDTLASYQKQFNYSAEELDSVIRVLGENGQEAVGSMGDDTPFAVLSSQPRIIYDYFRQQFAQVTNPPIDPLREAHVMSLATSIGREMNVFCEAEGQAHRLSFKSPILLYSDFKQLTTMKEEHYRADTLDITFDVTKTTLEATVKELCDKAEKMVRSGTVLLVLSDRNIAKDRLPVPAPMAVGAIQTRLVDQSLRCDANIIVETASARDPHHFAVLLGFGATAIYPYLAYETLGRLVDTHAIAKDYRTVMLNYRNGINKGLYKIMSKMGISTIASYRCSKLFEAVGLHNDVVGLCFQGAVSRIGGASFEDFQQDLLNLSKRAWLARKPISQGGLLKYVHGGEYHAYNPDVVRTLQQAVQSGEYSDYQEYAKLVNERPATTLRDLLAITPGENAVNIADVEPASELFKRFDTAAMSIGALSPEAHEALAEAMNSIGGNSNSGEGGEDPARYGTNKVSRIKQVASGRFGVTPAYLVNADVIQIKVAQGAKPGEGGQLPGDKVTPYIAKLRYSVPGVTLISPPPHHDIYSIEDLAQLIFDLKQVNPKAMISVKLVSEPGVGTIATGVAKAYADLITIAGYDGGTGASPLSSVKYAGCPWELGLVETQQALVANGLRHKIRLQVDGGLKTGVDIIKAAILGAESFGFGTGPMVALGCKYLRICHLNNCATGVATQDDKLRKNHYHGLPFKVTNYFEFIARETRELMAQLGVTRLVDLIGRTDLLKELDGFTAKQQKLALSKLLETAEPHPGKALYCTETNPPFDNGLLNAQLLQQAKPFVDERQSKTFWFDIRNTDRSVGASLSGYIAXTHGDQGLAADPIKAYFNGTAGQSFGVWNAGGVELYLTGDANDYVGKGMAGGLIAIRPPVGSAFRSHEASIIGNTCLYGATGGRLYAAGRAGERFGVRNSGAITVVEGIGDNGCEYMTGGIVCILGKTGVNFGAGMTGGFAYVLDESGDFRKRVNPELVEVLSVDDLAIHEEHLRGLITEHVQHTGSQRGEEILANWSTFATKFALVKPKSSDVKALLGHRSRSAAELRVQAQ

SEQ ID NO: 739 - protein, 171 aa, Glycine max
MAESDNESGGHTGNASGSNEFSGCREQDRFLPIANVSRIMKKALPANAKISKEAKETVQECVSEFISFITGEASDKCQKEKRKTINGDDLLWAMTTLGFEEYVEPLKVYLHKYRELEGEKTAMMGRPHERDEGYGHATPMMIMMGHQQQQHQGHVYGSGTTTGSASSARTR

SEQ ID NO: 740 - protein, 1527 aa, Gracilaria tenuistipitata var. liui
MQASKYYNCQLNNLYKHPFIFSEKDACGVGFITRIKHAPSNTIVKQALNALNCMEHRGGCSADRVSGDGAGIMTQIPWKIFVEYLPQKNLNQVGVAMLFMPQEKSESIQNIIEWAVGLNGFNFLRWRIVPVNDGVLGFQAKSNQPLVMQFFVQAKDLSGDALEQALFITRKKIEKLVAQSHLNLNKQFYFCSFSSRVIIYKGMVQSEVLSKYYIDLCNINYESNFAMYHRRFSTNTMPKWPLAQPMRFMAHNGEINTLLGNLNWMQSKESLFEQSYLAEHFDALKPITNFQNSDSANLDAVLELLIQSGKSPQESLMILIPEAYKNQPALENYPEIVDFYEYHNSLQEPWDGPALVVFSDGKVVGATLDRNGLRPARYIITSNGFISLSSEVGVLDNNLGEITHKGRLGPGQMICVDIINNVILDNWTVKQSVASKFPYKKWLDAYQKHLLQKSYVQDSIIDSFTMMRCHTAFGYTNEDVELVIEHMASSAKEPTFCMGDDIPLAVLSQKHHLLYDFFKQRFAQVTNPAIDPLRESLVMSLTTYLGSKGNFLEPHDYMAKSIKLDSPILNEAEMLNLGKYGLSISFINTFFIQDSNNINFVNRITEICQETVQLIHSGSEIIVLSDRVEALDEAKAFIPPLLITGAVHHYLISQNLRHKVSIVIETAQCWSTHHFACLIGYGASAICPYMAFLTVRQWWHNPRTQKLMSNGKLSKISLIEAQHNYRCAIEAGLLKILSKMGISLLSSYHGAQIFEILGLGKDVVNLAFKGTTSSLDGINLYELGLSIVDSYNNIMTMKTSKKLPNLGYVQYRPSAEYHVNNPEMSKTLHKAVRNQDFTLYNKYKNLLQDRPPTNLRDLLDFSYSKDPIDLDKVESVESIVKRFCTGGMSLGALSRETHETLAIAMNRLGGKSNSGEGGEDHTRFAPIMDIDDSGISKSFPHLKGLKVNDIASSAIKQIASGRFGVTPEYLMNAKQLEIKIAQGAKPGEGGQLPGKKVSTYIAKLRNCKPGVTLISPPPHHDIYSIEDLAQLIFDLHQINPEAKVSVKLVAEMGIGTIAAGVAKANADIIQISGHDGGTGASPLSSIKHAGCPWELGLSEVHKTLVDNKLRSRVILRVDGGLRTGKDIILAALMGAEEFGFGTVAMIATGCVMARICHTNNCPVGVATQREDLRKRYPGIPADLVNFFIFIAQEVREILSSLGYISLSDIIGRAELVKHKDQHLNKTKHLSLDPLLSSPEYNYNLNSHTTTHNNGKVLDDTLLSDPSILRAIEKQEDINKKVNILNTDRTVGARISGFIAKKYGNDSFQGNLQLDFIGVAGQSFGAFILKGMHLRLIGEANDYVGKGMNGGEIIIVPEVNTLPNVIQPVLIGNTCLYGATGGYLFVSGQAGERFAVRNSLAQSVVEGVGDHACEYMTGGIVVVLGSAGRNIGAGMTGGLAYFLDQDNNLESKINKQIVKYQKIKTYEGEKQLKNLIELYEIKTKSLKAQYILQNWSKFLPMFWQVIPPSESNTALTNTSYSSYHAIIN

SEQ ID NO: 741 - protein, 531 aa, Streptomyces avermitilis MA-4680
MGFTRGVRRFLLLLFVALGAAGALVLSCAVSSWWWIAAGLLLPLTALGVWDLVQTRHSLLRNYPLLGHLRFLTEPPRPEPRRYFAEGHHEGRPYGRAVRSIVHERAEGVATEEPFGTERDVYAAGYEFLMPSLRPVEPPEDPPVVRVGGPDCTQPYDMALLNVSAMSFGSLSANAILALNKGAALGGFATDTGEGGLSEYHLRGGGDLIWEIGTGYFGCRTSDGGFDEREFADKVALPEVKCVSLKLSQGAKPGTGAVLPGVKVSAEIARARAVPVGETVVSPPCHRMFSTPRELVLFLARIRELAHGKPTGVKLCVGSRRQFLAVCKAMLAEGITPDFVVVDGAEGGTGAAPPEFAGRLGTPLTEGLVTVHNALAGTGLRDRVRIGASGKVATGADIVKRLLQGADYTNAARAMMFAVGCVQARRCHTNTCPVGVTTQDPRRVRALDVADKSERVHRFQRATVRSAARIMAAMGVRDPAGLAPGMLLRRTDSTTVLSYAELYEWLPPGVLLAQPPPSWEADWTAADPDSF

SEQ ID NO: 742 - protein, 1629 aa, Arabidopsis thaliana; identical to SEQ ID NO: 607

SEQ ID NO: 743 - protein, 1552 aa, Symbiobacterium thermophilum IAM 14863
MRIVRSEREIRRYLAENEHDACALMAAVRKDGHPTHAVVADALAALDRMVHRSGDVDGEGDGCGVQIDIPRRLWASILREAGQDPRLAEAPQFAVAHIFIPRREAYWSGSLKEQVCRRLAADGFRLLAQRSGAVNREALGTRAREDEPEFWQVAVLAPTADRQAAARDCFGLTLALEAETDLHICSFSPDTAVYKVRGNAAVLAAYYPDLRDPRCETRAVLGHNRYSTNTSTAFERVQPFSVLGHNGEINTIRALREQAPLVGIPLPRGGSDSQDLNRTLEGLIHLHGITLFEAVEMLFPPIIGEIKQMPPALQDLYMYYRQAWGPFAQGPAAIAARSGDALVASVDALGLRPFWLLETEESLLFSSEPGIVSSLDLVRDPHPLAPGERVGVLLPQGRSPELLTYTELQDRVLQLSRQRFPDPVNHRRFIAVGGPAETDRGPLPEATGPTATEPGRAAAGVERERLMAAMGWSVEDLEQVAAMARTGAEPIGSLGYDGPLACLAETRQNLADYFKESVAVVTNPALDREREIEHFSTRTVLGVRPPIRMRGEDDARSLAATRVELGIPVLLGGERGEPLVSRAVGRRLARTAGTWLLDDLLAAFEAGAPGAVRRIAVWFRPTETLAQALSRLSAAAVDAVRTGAQVLLLDDGDAFAGDRLWIDPHLSLSAVDRALHAADGADGRQRLRRRCSLVLRSGALRSLHDVALALGLGADAVNPYLMLEAAAQAAPAPEEGLANLLAALRKGMEKVISTLGIHELRGYARCFSHIGLRPEVAAYFAAEGFVGSEQGGLSLARLKADAHERYQVAAGQCSGRLPRTPRFWPRLWKAAGEAAADSSKYADYLARLRKQEQESPVCLRHLLDFRPHGRKRPLTAEVDTTVEGYRYPITISGMSFGSQGETAFRAYAEAARRLDIVCMNGEGGEISDMVGRYWRWRGQQVASGRFGVHAEMLNGSRFIEIKIGQGAKPGEGGHLPGAKVSAKVARARNATPGVDLISPSNNHDIYSIEDLAQLVEELRTVNPLAKIVVKMPVVPGIGTIAVGVAKAGADVVALCGYDGGTGAARQHALRHAGLPVEIGVREAHLALVASGIRDRVEIWADSGMRSGLDVVKMLLLGANRVGFATLAMVAVGCTVCRGCHLDTCHVGIATQIESLAEARAKGLKSFVPRHYEEAVQRLVTLFTCVGEEVRQLTAQLGFRRTQDLVGRAELLWQARGLGRVDLAELVAPAPWEAPAVPAAERAPVRRYARSELTREIAAVAAGRARAGEPQVCHRQAGVTAGDRIIGTSLAGDVARARVRPAVEGARLPDLPPDFAATIELGEGSIAGNGLAAFSTGVLSVRVQGGAQDGVGKGMLGGRVVILKNRNQRGQWVNGSVGKSFAYGAQRGLFVVQGDADARCGIRLSGADLILGGRIREPLRDDLGSIGTRANLKGFAFEYMTQGRVVVLGDPGPWICSGMTGGVVYVRLQPELGLDREALRRRIAKGARVQLTPVGEQGEKDLTELLSAYHRILLEAQQPEEAAEVMGLMLDCGRHFIAIRPVTRQVDPGVTTE

SEQ ID NO: 744 - protein, 2335 aa, Schizosaccharomyces pombe
MEYFSDLKNKNESIQLAAADQLKEFVHSSTKELSGESLARFNNDINRRIFELIHSHDSHERFGGILAIGKLIEFESEGDVTNLSRYANYLRMTLPSTDWHSMELSAKVLGHLAASGGTLAAEFVEFEVQRAFEWLQGDRQEQKRMAAILIIKALAQNSPTLVYLYISEIFQNLWTGLRDPKPLIRETAADALGASLDVVCQREAKVQLQCFNEVLLQAEHGLRQSSVEYLHGSLLAYKELFEKSGSFIREHYTEFCDLALRLREHRDNSIRRCIVFLLPTLSEYNPKKFQQRYLDSFMVYLLSHIRKDKEKSLAFEAIGRIAMAVNEAMIPYLQNILKVIRDTLTAKVREKTQYEKPVFECIGMLAAAVKLELLEDSRSLLGLIFSCELSVHLRQALVKMAENIPPLLAPIQERLLNMVSQILTGKNFEIRTNDTYTPSFTNIYSAREPDQRSKSTESIILALETLGTFNFTGYSLISFIQESVLSYLENDNSEIRIAAARTCCQVFARDPICRKTNPLAVESVAEVLEKLLTLGIADSDPKIRETVLSLLDERFDRHLAHPDNIRCLFIALNDEVFSIREIAIIIIGRLALYNPAHVMPSLRKTIIQLLSDMEYSGNSRQKEESAQLLKLLVSKARTLIKPYIQSIIHVILPKAADTSPGVSSAIISALGELASVEGEDMPVDVRGSFMKLILVNLQDQSSTLKRLASLKCLRKLCGRSGYVIQPYLDYPPLLGALIGILQSEQPTPIRREVLRTLGVLGALDPYTYLTTEEVSDDLQSSHNNAHGVPQISAAQYPSLENYAMVAVVTLIGILKDSSLSMHHSSVVQAVMHICSQMGSKSTVFLPQVVPTFLQVMQSLSASSAEFYFQQLTTLTSIIGPNIRDYVSDIFNLSKVFWESTTSLLLVILELIDAIAIALQDEFKFYLPQILSCMLKAFSLDNTSSRSVSYKVLQSFVIFGSNIEEYMHLVLPVIIRSFERDTIPLGFRKSALKCIAQLFQSVNFSDHASRIIHPLVRMLGKSNGDLRAVIMDTLCAIVSQLGYDYSIFIPMVNKVLVSHKISHPAYELLVSRLLKGEPLPKDVVVKEFKPRPSTKPFSTQDEVLTKLPVDQASLKAAWESSQKLTRDDWQDWIRRISIELLKESPSSALRSCSTLAGIYHPLARDLFNVSFLSCWDELTESNKKNLVKSIELAMNAPNISVEILQTLLNLAEYMEREDHTLPIPIKVISAHASKCNVYAKALHYTELQFVQETKEEVSISTIESLITINNHLQQSDAAVGMLQYTKEHKQFSLKETWYEKLHRWDDALAAYEHREREGDSSFEINIGKLRCYYALGDWDHLSELAQKAWVTSEQEHREAIAPLAAAAAWGLGQWNLISEYVSAMDRDPQDKEFFSAISAVHLGQYNKAYGHIERHRDILVNDLSSIIGESYNRAYGIMVKSQMLSELEEIIDYKKNMQYENNLDSLKKTWRKRLEGCQKNVDVWHNTLRFRALVLSPQDSPEMWIKLADLCRRSDRLKLSNQCLTYLMGRDPSNAYPLDSLKLLNPHVVYTYLKYLWATDQKNIAVSELEEFTSYLSSKHGYKMGDSSKLVDILASSSVSSEERSFLARCFHKLGKWKKSLQDSVNQESVRDILNCYFYATLFDKSWYKAWHSWALANFEVVGYYEQTEHGVTQDMYEQYIVPAIKGFFHSSVLNQKNSLQDILRLLNLWFKFGEHSDVAAAIVEGFSNVPMDTWLEVIPQLIARIHTSSSSVRASVHQLLSDIGRVHPQALVYSLTVSSKSTNPQQKHSAKSIMDSMLSHSDTLVRQALLVSQELIRVAILWHELWYEGLEEASQAYFSDHDISLMIDIVKPLHETLEKGPSTLSEISFAQTFGYDLRKARSYWQKFLQDGDPTELNQSWDLYYQVFRRIQKQLPRIKHLELQYVSPKLLDACDLELAVPGTYGHNKPVIRISHFHHTFEVISSKQRPRRLTIHGSDGKDYQYVLKGHEDLRQDERVMQLFGLCNTLLTTDSETFKRRLNIERYTVIPLSPNSGLLGWVPHSDTLHFLIKEFRSKRNILLNLEHRMMLQMAPDCDSLTLLQKLEVFEYVMANTDGYDLYHVLWLKSRSSEAWLDRRTSYTQSLAVMSMVGYILGLGDRHPSNLMMDRYSGKIIHIDFGDCFEVAMHREKFPEKIPFRLTRMLINAMEVSGIQGTYKITCELVMRVLRSNTESLMAVLEAFVYDPLINWRLMTKSSFGASTTLRPTSSSVEEKGRSYTHRARHADYAALSETNGVNAEGLNERSIQVLKRVSNKLTGKDFDLKEQLPVKAQVEKLIQQATAPENLCRCYVGWCSFW

SEQ ID NO: 745 - protein, 300 aa, Kluyveromyces lactis NRRL Y-1140
MPTELITYEQNFSSGVDAENDYPPLDSGMGSFQVSELERQGDSHKRSNDEISELRDETLNGREKKLRQSESISRNSTGNAQVEAIPHHSINVDQSDNLLSEQENPTKVYLYDDPHLENDPQQRQEESDANGIMEKLTDDNSMKQVSNAKTSLETAQFLETSNSMELQRTKPHDMNIISPSEPLEQPFYVNAKQYYRILKRRYARAKLEENLKISRERRPYLHESRHKHAMRRPRGQGGRFLTAAEMAEMKRKEEEGTDNDSFLQEHVPKMNVLPQQLPGPVKDNNNEKSDEKPVAKEASN

SEQ ID NO: 746 - protein, 550 aa, Coxiella burnetii RSA 493
MVHEKTTVRSYFYLIFITVFAAIFVIAFFWLPILWFLIIALPLFFVGIYDIFQKDSNILRNYPVWGHWRYILLKIRPQIHAYFIEDEWGGAPFTHAQRFLVYDRSRKTVDTMPFGTQLDVHEVGYEWVNQSMAPKQPDFDSCTRVEIGGPQCTQPYSASRFNVSAMSFGAISAEAVRALNRGAKLGGFHQDTGEGGLSKYHLMEGGDLVWEIGTAYFGCRTKDGKFNPEQFKEKSRHPNVKMVEIKISQGAKPSHGAILPGVKVTQELAEARGVEAGVDCLSPPAHSTFSTPIGLLEFVQQLRELSGGKPTGFKLCIGILQEFMAVCKAMLETKIYPDFIVIDGSEGGTGAAPFEFSDSVGMPLNEGLIFAHNCLVGIDVRKHIRLIGSGKIITGFDMLTKIALGADILNSARGMMFALGCVQSRRCHLNTCPTGVTTQDPKRRYALDVNEKAVYVKNFHEATLKSFLEVLGATGLERPEELQPFHVHRRVSKDAALTYDEIFPYLEPNDILKGRVPEKYRNYMKLWKEADPHYFVARPKETHRADSQPT

SEQ ID NO: 747 - protein, 1573 aa, Brucella melitensis 16M
MVSHNVQNEAVKAATTASTRTTRKTKAAGVPPAQGLYDPRNEHDACGVGFIAHMKGRKSHVVVENGLKMLENLTHRGAVGADPLMGDGAGILVQIPDRFFREEMARQGIDLPQPGHYGVGYIFMPRDPDLRAHAEEIVREVIAAEGQTFIGFREVPVDNSSLSKAPHIAATEPFHMQVFIGRSPMLETDDDFERRLFVLRKVISNRIYQENDGDDKGFYVVSMSARTVVYKGMFLAYQVGAYYLDLKDPRFESAVALVHQRFSTNTFPSWRLAHPYRMVAHNGEINTLRGNVNRMAARQASVDSELFGNDISKLWPISYEGQSDTACFDNALEFLHQGGYSLAHAMMMLIPEAWSGNKLMSDERRAFYEYHAALMEPWDGPAAVAFTDGRQIGAMLDRNGLRPARYIVTEDDFVILASEAGVLPVDEKKIVRKWRLQPGRMLLIDMEEGRIISDEEIKSQIAQKHPYKQWLANTQLILEDLNPVEPRALRKDVSLLDRQQAFGYTQEDTKFLMAPMATTGQEAIGSMGTDTPISAMSDKSKLLYTYFKQNFAQVTNPPIDPIREELVMSLVSFIGPRPNIFDLVGASRRKRLEVRQPILTNGDLEKIRSIGHTEDRFDTKTLDITYNTGEGATGMHGAIERLCDRAEAAVHGGYNIVILSDRQVGPDRIPIPALLATAAVHHHLIRKGLRTSVGLVVESGEPREVHHFACLAGYGAEAINPYLAFDTLLDMHRRREFPPEVDEHEVVKRYIKSIGKGILKVMSKMGISTYQSYCGAQIFDAVGVRTDFVDKFFFGTATTIEGVGLDEIAEETVRRHTDAFGNDPVLLNALEVGGEYAYRMRGEAHMWSPDAVAKLQHAVRTSNPDTFTEYTRMLDAKSSQAKTIRGLFNIRFAEERGLKPVSIDEVEPATDIVKRFSTGAMSFGSISREAHTTLARAMNAIGGKSNTGEGGEEPDRFYPLPDGTANPERSAIKQVASGRFGVTTEYLVNSDLIQIKVAQGAKPGEGGQLPGHKVDATIAKTRHSTPGVGLISPPPHHDIYSIEDLAQLIYDLKNVNPAADISVKLVSEVGVGTVAAGVAKARADHITVSGYDGGTGASPLTSLKHAGSPWEIGLAETHQTLVLNGLRSRVALQVDGGLRTGRDVVIGALLGADEFGFSTAPLIAAGCIMMRKCHLNTCPVGVATQDPVLRKRFKGTPEHVINFFFYLAEEVRALLAQMGFTRLEQIIGETELLEKQAMIDHWKAKGLDFSRIFYKPEAEKHEIYWTERQHHPIDDILDRKLIELAAPALEERQPVKIDVEIKNVDRSAGAMLSGEVAKRFRHKGLPEDTISVTLRGTAGQSFGAFLARGISFELIGDGNDYIGKGLSGGRIVVRPPEDTRIVAEDSIIVGNTVLYGALEGECYFRGVAGERFAVRNSGAVTVVEGVGDHGCEYMTGGVVVVIGQTGRNFAAGMSGGVAYVLDEEGDFAQRCNMAMVELEPVPEEDDILEKLHHHGGDLMHKGRVDVSANMTHHDEERLVQLIANHLHYTGSTRAKDILDNWESYRPKFVKVMPVEYRRALEEMERMQIGVAAE

SEQ ID NO: 748 - protein, 401 aa, Arabidopsis thaliana
MGNKLGRKRQVVEERYTKPQGLYVNKDVDVKKLRKLIVESKLAPCYPGDDESCHDLEECPICFLYYPSLNRSRCCMKSICTECFLQMKNPNSARPTQCPFCKTPNYAVEYRGVKSKEEKGIEQVEEQRVIEAKIRMRQKEMQDDEEKMQKRLESCSSSTSAMTGEMEYGSTSAISYNSLMDDGEIAPSQNASVVRQHSRPRGNREDEVDVDLEELMVMEAIWLSVQETGTQRNSASGEITSSRQYVTDNHSYVSSPPRVTPIVEPATPSSSSGGLSCAISALAERQMVGESSSHNHNHNVNVSSYSMLPGNCDSYYDIEQEVDGIDNHHHHRHHYEMGETGSSNSYVSSYMTGEGFHNFPPPPPLVIVPESFEEQMMMAMAVSMAEVHATTTCAPTEVTWQ

SEQ ID NO: 749 - protein, 511 aa, Saccharophagus degradans 2-40
MLDTFAQQAMNYIALLIMVIVVIALITIAVLYVIDSTQNTQAIRRNYPVIGRFRYFFEHLGEFFRQYFFAMDREEMPFNRAMRTWVYKAAKNIDLTIAFGSTRNLRVTGEPLFLNSAFPTLDEDATESGSLTIGPDCKTPYHAPSFFNISGMSYGALSRVAIQALSHGAKKAGCWVNTGEGGLSPYHLEGGCDIVFQIGTAKYGVRDSKGNLSHTKLKELAAIEQVKMFELKLSQGAKPGKGGILPAEKVNTEIASIRGIPVGEASISPNRHKDVANNEQLLELIVAIRETTGKPVGFKAVMGDPAWLEEVCRLITVKGNAYAPDFISVDCAEGGTGAAPQPLMDYVGLPIRESLPLLVDTLKEFGLRDRIKVIASGKLVNPGAVAVAMATGADFAVSARGFMFALGCIQALQCNKNTCPTGITTHDKKLQKGLDPTVKSERVANYHYHLVKSVETIAHSCGVRSARMLEREHVRLVTENGFSRPLSLIHPEKVVFVETPKKHTNKSKETL

SEQ ID NO: 750 - protein, 1648 aa, Arabidopsis thaliana
MAMQSLSPVPKLLSTTPSSVLSSDKNFFFVDFVGLYCKSKRTRRRLRGDSSSSSRSSSSLSRLSSVRAVIDLERVHGVSEKDLSSPSALRPQVRFFTDINFTNTQRAKFHPLWGSFKQVANLEDILSERGACGVGFIANLDNIPSHGVVKDALIALGCMEHRGGCGADNDSGDGSGLMSSIPWDFFNVWAKEQSLAPFDKLHTGVGMIFLPQDDTFMQEAKQVIENIFEKEGLQVLGWREVPVNVPIVGKNARETMPNIQQVFVKIAKEDSTDDIERELYICRKLIERAVATESWGTELYFCSLSNQTIVYKGMLRSEALGLFYLDLQNELYESPFAIYHRRYSTNTSPRWPLAQPMRFLGHNGEINTIQGNLNWMQSREASLKAAVWNGRENEIRPFGNPRGSDSANLDSAAEIMIRSGRTPEEALMILVPEAYKNHPTLSVKYPEVVDFYDYYKGQMEAWDGPALLLFSDGKTVGACLDRNGLRPARYWRTSDNFVYVASEVGVVPVDEAKVTMKGRLGPGMMIAVDLVNGQVYENTEVKKRISSFNPYGKWIKENSRFLKPVNFKSSTVMENEEILRSQQAFGYSSEDVQMVIESMASQGKEPTFCMGDDIPLAGLSQRPHMLYDYFKQRFAQVTNPAIDPLREGLVMSLEVNIGKRGNILELGPENASQVILSNPVLNEGALEELMKDQYLKPKVLSTYFDIRKGVEGSLQKALYYLCEAADDAVRSGSQLLVLSDRSDRLEPTRPSIPIMLAVGAVHQHLIQNGLRMSASIVADTAQCFSTHHFACLVGYGASAVCPYLALETCRQWRLSNKTVAFMRNGKIPTVTIEQAQKNYTKAVNAGLLKILSKMGISLLSSYCGAQIFEIYGLGQDVVDLAFTGSVSKISGLTFDELARETLSFWVKAFSEDTTKRLENFGFIQFRPGGEYHSNNPEMSKLLHKAVREKSETAYAVYQQHLSNRPVNVLRDLLEFKSDRAPIPVGKVEPAVAIVQRFCTGGMSLGAISRETHEAIAIAMNRIGGKSNSGEGGEDPIRWKPLTDVVDGYSPTLPHLKGLQNGDIATSAIKQVASGRFGVTPTFLVNADQLEIKVAQGAKPGEGGQLPGKKVSAYIARLRSSKPGVPLISPPPHHDIYSIEDLAQLIFDLHQINPNAKVSVKLVAEAGIGTVASGVAKGNADIIQISGHDGGTGASPISSIKHAGGPWELGLTETHQTLIANGLRERVILRVDGGLKSGVDVLMAAAMGADEYGFGSLAMIATGCVMARICHTNNCPVGVASQREELRARFPGVPGDLVNYFLYVAEEVRGILAQLGYNSLDDIIGRTELLRPRDISLVKTQHLDLSYLLSSVGTPSLSSTEIRKQEVHTNGPVLDDDILADPLVIDAIENEKVVEKTVKICNVDRAACGRVAGVIAKKYGDTGFAGQVNLTFLGSAGQSFGCFLIPGMNIRLIGESNDYVGKGMAGGEIVVTPVEKIGFVPEEATIVGNTCLYGATGGQIFARGKAGERFAVRNSLAEAVVEGTGDHCCEYMTGGCVVVLGKVGRNVAAGMTGGLAYLLDEDDTLLPKINREIVKIQRVTAPAGELQLKSLIEAHVEKTGSSKGATILNEWEKYLPLFWQLVPPSEEDTPEASAAYVRTSTGEVTFQSA

SEQ ID NO: 751 - protein, 1490 aa, Xanthomonas axonopodis pv. citri str. 306
MAPRTRQGLNDDGLYNSVRDERDACGFGMVAQLDDQPSRALVDTAIAALSRMTHRGGVAADGLTGDGCGLLIRKPDAFLRGLARDAGITLGTRYAAGVVFLPLDEADAARCRAELEAQLHNAGVHFRGWRVVPTDDSVCGQLARDTLPRMEQVFVDAGAEQTEDGFTLALFLARRRAEQALHAVEHFYVTTLSPNGISYKGMVLPDKLSTFYPDLQRSDLSSSAIVFHQRFSTNTLPRWPLAHPFRLLAHNGEINTIEGNRRWAQARSKVWQTPRFDIAQFDPVISMHGSDSQSLDNMLELLIAGGMDLLQALRILVPPATQSLEFKDADLAAFYEFYGLNTEPWDGPAGIVACDSRYAACMLDRNGLRPARWMLTSDRHFLVASEAGVWELPAERITRKGKLGPGEMMAIDLKRGDLLDSDAIDRINRARAPYKQWLQQGVTYLQTELIDPSLVEEPFSEQTLRSYHKLFQLSTEEVEQVLRPLAETEQEATGSMGDDTPMAVLSRQTRPLYDYFRQAFAQVTNPPIDPLREGIAMSLTTQLGRETNIFHAGAETVNHVILNSPVLSQRKLRQLLKMEQYVERNRLIDLSYSLEEGLKAGLERICQEVEAAARAGAVMLLLSDRYPVPDRPMAHALLATGAVHHHLCKVGLRCDVNLIIETGTARDPHHMACLLGVGATAVYPYLAYQTLFDLGRRGILQLSKGGEQSQIGRRYRKGIYKGLSKIISKMGICTIASYRGAQLFEIVGLDPDVVDLCFADTPARIGGVDLARLDTEARELTVRAWNDQLKPEVGGLLKYVHGGEYHMYNPDVVMTLQRATRTGDAGDWQKYVDAVHARPASTLRDLVQLKRADTPTPLDDVAPAEDVLRRFDSAAISLGALSPEAHEALAIAMNRLGGRSNSGEGGEDPARYGTEKRSKIKQVASGRFGVTPEYLVNAEVLQIKVAQGAKPGEGGQLPGHKVNELIARLRYAKPGIGLISPPPHHDIYSIEDLAQLIYDLKQVNPTALVSVKLVAHAGVGTIAAGVVKAGADLITVSGHDGGTGASPVSSIRYAGVPWELGVAESHQALVANDLRERTILQTDGGLKTGLDVVKAALLGADSFGFGTAPMIVLGCKYLRICHLNNCATGVATQDERLRAGYFTGLPERVEHFFRLLAEEVRQWLSYLGVRSLDEIVGRTDLLEQLDISPRPGVKVDLSRLLTHAQYDGSHCAAQRLYESPDSLATQMDGLLADAIANKSGGDHRFLIHNTDRSIGARLSGAIARAHGNHGMSDAPLNLRFRGTAGQSFGAFNAGGLQLELEGEANDYVGKGMAGGRLVVRPPRGARFEARNTPIVGNTCLYGATGGELFAAGRAGERFAVRNSGALAVVEGAGDHCCEYMTDGVVLVLGKVGLNFGAGFTGGLAYVLDIERDFVDRYNHELIDIHRVSAEGFENHRQHLHTLISRHRELTGSIWAQQILDEFRDYIGKFWLVKPKAASIESLTESLRRAA

SEQ ID NO: 752 - protein, 1487 aa, Vibrio parahaemolyticus RIMD 2210633
MALYDPSLEKDNCGFGLIAHMEGEQSHKLVRTAISALDRMTHRGGIAADGKTGDGCGLLLQKPDSYLRLIAEENGFNLGKQYAVGMLFFSQDPVKAQLSKDIVNKELAQETLTVAGWREVPTNSAVLGPIAANSLPNIQQVFISAPAGWRERDIERRLYIARRRIEKQITEDPDFYICSLSTQVLVYKGLCMPADLPRFYLDLADLRMESAICLFHQRFSTNTQPRWPLAQPFRYLAHNGEINTIEGNRQWARARAYKFSSPLLPDLQTAAPFVNETGSDSSSLDNMLDLFLAGGMDIFRAMRMLVPPAWQNHPDMDPDLRAFYDFNSKHMEPWDGPAGIVLSDGRYAACNLDRNGLRPARYVITKDKLITLASEIGIWDYAPDEVAKKGRVGPGELLVVDTRKGKLWQSSEIDNDLKSRHPYREWMENNVRKLTPFSQLPEDQVGERSFDEDLLKTYQKQFAMTNEEVDQVLRVLGDMGQEAVGSMGDDTPMAVLSSKERLVTDYFRQKFAQVTNPPIDPLREKHVMSLATSIGQEMNVFCETDGHAHRVTFDSPVLLYSDMQQLLELGDDHYRNTILDINYDPQEKDLKQAIDDLCDQAEQVVREGTVLVVLSDRALVKGKLPIPAALAVGAVQTRLVTANLRCDANIVAETATARDPHQFAVLLGFGATAVYPYLAYEALGKLIDDGALDKDYRDVMQNYQYGINKGLYKIMSKMGISTIASYRCSQLFEAVGLSREVVDLCFKGVTTRIEGANFDDFQQDLTNLSRKAWAKRKSIEHGGLLKYVHGGEYHAYNPDVVGTLQKAVKSGESNDYQSFAKQVNERPVAMLRDLMALKKTDSPLPLERIEPKTELFKRFDSAAMSIGALSPEAHEALATAMNRLGGYSNSGEGGEDPRRFGTERNSRIKQIASGRFGVTPHYLTNADVLQIKVAQGAKPGEGGQLPGHKVTAEIAKLRYSVQGVTLISPPPHHDIYSIEDLAQLIFDLKQVNPNALVSVKLVSEPGVGTIATGVAKAYADLITISGYDGGTAASPLTSVKYAGSPWELGLAETQQALVANGLRHKIRLQVDGGLKTGLDVVKAAILGAESFGFGTAPMVAMGCKFLRICHLNNCATGVATQDETLRKEYFKGLPEMVMNYFTGLADEVRELLAALGVEKLTDLIGRTDLLEAVEGFTAKQTKLDLSNILEAPISAEGHPLFWTEPNKPFDKAELNQKIVDDALNAVENSQSASFFYNVINTDRSVGARLSGEIAKRYGNQGLAASPIKIYLDGTAGQSFGVWNAGGVELYLTGDANDYVGKGMAGGKIAIKPHLGTAFKCNEATIIGNTCLYGATGGKLFAAGKAGERFGVRNSGTIAVIEGAGDNACEYMTGGIVAILGATGVNFGAGMTGGFAYVLDENQDFQGRVNNESVEAISLSDLYIHQEHLRGLIAEHLEETGSSHAEHILANFDEWIPKFYLVKPQAADLNTLLGHQSRSAAELRVQAQ

SEQ ID NO: 753 - protein, 1522 aa, Shigella flexneri 2a str. 301
MRGARMTRKPRRHALSVPVRSGSEVGFPQSLGEVHDMLYDKSLERDNCGFGLIAHIEGEPSHKVVRTAIHALARMQHRGAILADGKTGDGCGLLLQKPDRFFRIVAQERGWRLAKNYAVGMLFLNKDPELAAAARRIVEEELQRETLSIVGWRDVPTNEGVLGEIALSSLPRIEQIFVNAPAGWRPRDMERRLFIARRRIEKRLEANKDFYVCSLSNLVNIYKGLCMPADLPRFYLDLADLRLESAICLFHQRFSTNTVPRWPLAQPFRYLAHNGEINTITGNRQWARARTYKFQTPLIPDLHDAAPFVNETGSDSSSMDNMLELLLAGGMDIIRAMRLLVPPAWQNNPDMDPELRAFFDFNSMHMEPWDGPAGIVMSDGRFAACNLDRNGLRPARYVITKDKLITCASEVGIWDYQPDEVVEKGRVGPGELMVIDTRSGRILHSAETDDDLKSRHPYKEWMEKNVRRLVPFEDLPDEEVGSRELDDDTLASYQKQFNYSAEELDSVIRVLGENGQEAVGSMGDDTPFAVLSSQPRIIYDYFRQQFAQVTNPPIDPLREAHVMSLATSIGREMNVFCEAEGQAHRLSFKSPILLYSDFKQLTTMKEEHYRADTLDITFDVTKTTLEATVKELCDKAEKMVRSGTVLLVLSDRNIAKDRLPVPAPMAVGAIQTRLVDQSLRCDANIIVETASARDPHHFAVLLGFGATAIYPYLAYETLGRLVDTHAIAKDYRTVMLNYRNGINKGLYKIMSKMGISTIASYRCSKLFEAVGLHDDVVGLCFQGAVSRIGGASFEDFQQDLLNLSKRAWLARKPISQGGLLKYVHGGEYHAYNPDVVRTLQQAVQSGEYSDYQEYAKLVNERPATTLRDLLAITPGENAVNIADVEPASELFKRFDTAAMSIGALSPEAHEALAEAMNSIGGNSNSGEGGEDPARYGTNKVSRIKQVASGRFGVTPAYLVNADVIQIKVAQGAKPGEGGQLPGDKVTPYIAKLRYSVPGVTLISPPPHHDIYSIEDLAQLIFDLKQVNPKAMISVKLVSEPGVGTIATGVAKAYADLITIAGYDGGTGASPLSSVKYAGCPWELGLVETQQALVANGLRHKIRLQVDGGLKTGVDIIKAAILGAESFGFGTGPMVALGCKYLRICHLNNCATGVATQDDKLRKNHYHGLPFKVTNYFEFIARETRELMAQLGVTRLVDLIGRTDLLKELDGFTAKQQKLALSKLLETAEPHAGKSLYCTENNPPFDNGLLNAQLLQQAKPFVDERQSKTFWFDIRNTDRSVGASLSGYIAQTHGDQGLAADPIKAYFNGTAGQSFGVWNAGGVELYLTGDANDYVGKGMAGGLIAIRPPVGSAFRSHEASIIGNTCLYGATGGRLYAAGRAGERFGVRNSGAITVVEGIGDNGCEYMTGGIVCILGKTGVNFGAGMTGGFAYVLDESGDFRKRVNPELVEVLSVDDLAIHEEHLRGLITEHVQHTGSQRGEEILANWSTFATKFALVKPKSSDVKALLGHRSRSAAELRVQAQ

SEQ ID NO: 754 - protein, 1583 aa, Vibrio parahaemolyticus RIMD 2210633
MRINKGISPRIVFLAILFLRDTERNQDQSTSTGGDNKYKGQDASCVTRQLRSASYLCVALNWKDVSMVDREQNSQGLYTPELEHDACGIGFVAHLKNRKSHEVVTQALDMLARMEHRGGQGCDPCSGDGAGILLQKPHEFLLEEAVKLGIKLPSFEKYGVGVVLFPKDEYKREQCRDILERNAKRLDLEVIGYRVLPTDNSMIGADPLSTEPQFEHVFISGGPGITPEELERKLYVLRNYTVRVCLESVSNIGDDFYINSMSYKTLVYKGQLTTEQVPQYFLDLQNPTMVTALALVHSRFSTNTFPKWRLAQPFRYIAHNGEINTVRGNLNWMKAREAILESDLFTQAEIDMLLPICQEGSSDSSNFDMALELLVLSGRSLPHALMMMIPEAWQENKNMDPKRRAFYQYHANIMEPWDGPASVCFTDGVQVGATLDRNGLRPSRYTVTKDNFLVMASESGVVDIAPENVEFRGRLQPGRIFVADLEQGRIISDEEVKDTIATAQPYEKWVEENLLSLKKLPDASNQFSQPKPEHLLHRQQAFGVSTEEVNEIIVPMANEGKEPLSAMGADWPLAVLSHQSQHLSNYFKQLFAQVTNPPIDPIRERMVMSLNTYLGKDQNLLTETPLHCQKVELESPVLANSELEKLRAIDNEHLQAKTLDIVFQASEDQGKLERALKRICQYAEDAVIDGYSIILLTDRAVNSNHAAIPAMLAVGAVHHHLIRKGLRAKCDIVVETGDARETHHFATLLGYGANAVNPYLVIETIIELQRTKKLDPEANPRDLFNNYRKAINGGLLKIFSKMGISTLQSYHGAQIFEALGIHKSVVDKYFTGTVSRIQGLTLDDIAKEVLIRHRIGYPQREIPIQMLDVGGVYQWKQRGEKHLFNPETISLLQQSTRNKDYEQFKQYASAVDKQGDNAVTLRSQLEFIKNPAGSISIDEVEPIESIVKRFATGAMSFGSISYEAHSTLAVAMNRLGAKSNSGEGGEDPMRFERKENGDWERSAIKQVASGRFGVTSYYLTNAEELQIKMAQGAKPGEGGQLPGDKVDDWIGATRHSTPGVGLISPPPHHDIYSIEDLAQLIYDLKNANRAGRVNVKLVSEAGVGTIASGVAKAKADVVLIAGFDGGTGASPMSSIRHTGLPWELGLAETHQTLLKNGLRNRIVVQADGQMKTPRDLAVATLLGAEEWGVATAALVVEGCIMMRKCHKNTCPVGIATQNKTLRERFDGRVEDVVTFFQYMAQGLREIMAELGFRTIDEMVGQGQKLKVRQDVSHWKYKNLDLSPVLHVEQPREADGVFNQAQQNHNLEAVLDRKLIQAAIPALEKGEAVNADFPIVNTDRSVGTMLSNEISKVYKDQGLPQPMNVKFKGSAGQSFGAFLAKGVKFEVEGDANDYWGKGLSGGTLVLYPDAKSSIVAEDNIVVGNVCFYGATSGESFIRGMAGERFCVRNSGAKVVVEGVGDHGCEYMTGGAAIILGSTGRNFAAGMSGGVAYVWDKSCDFESKLNPELVDLDPIEQEDKDLLLDMLTKHVQFTGSEVAQSFLDNFEASLASMVKVMPRDYKAVLQKRKAEETQSQGNETQAEAV

SEQ ID NO: 755 - protein, 284 aa, Physcomitrella patens subsp. patens
RQSTHYRKIKDDYESVEEVQQALRDAGLESSNLVVGIDFTKSNEWTGKNSFGGRSLHAIGGDLNPYERALSIVGRTLSSFDEDNLIPCFGFGDATTHDTEAFSFYADHRPCDGFEEALARYRSIAPHIRLAGPTSFAPVINAAVDIVEKTGGQYHVLVIIADGQVTRSVNTQEGQLSPQEQATVDAIVNASKYALSIVLVGVGDGPWDTMQRFDDDLPQRNFDNFQFVNYTEIMLHNLPPMVADAKFALQALMEIPQQYNATKEIEILGTQRGHSPGIELLPPP

SEQ ID NO: 756 - protein, 422 aa, Medicago truncatula
  misc_feature (63)..(63): Xaa can be any naturally occurring amino acid
MEGFHPSMNMSMNMNMSMSMNPSFSYTFPITATASGVSTNITTAPYTTTSTTPWMNSRIWSKXPQRLLDRIIAFLPPPAFFRARSVCKRFYSLLFSNSFLELYLQVSPRFHWFIFFKHKTRSKTHIYKNSNNITDSTSFEGYLFDPNEMTWYRISFALIPSGFSPSSSSSGLVCFVSDESGPKTMLLSNPLLGSIAQLPPTLRPRLFPSIGLTITPSSIDVTVAGDDMISPYAVKNLTSESFHIDASGFYSIWGTTSSLPRLCSLESGRMVYSNGKFYCMNCSPFSVLAYDVATNAWFKIQAPMRRFLRSPNLVECKGKLLLVAAVEKSKLNVPKSLRVWCLQGCGSVWVESERMPQQLYVQFAEMENGNGFECVGNGEFIVIMIKGSDKGLVYDIGRKRWQWIPPCPYAGYDGFELHGFAY

SEQ ID NO: 757 - protein, 1527 aa, Rhodococcus sp. RHA1
MLFSQLPGPQGLYDPDQEVDSCGVAMVADVHGRRSHSIVSDGLLALENLEHRGAAGSEPNSGDGAGILLQLPTEFFADVVDFDLPAPLDDGSSTYAAGTCFLPHDPQARAAAQRRVSDLAAEEGLDILGWRRVPVDPDGADVGSSARACEPHMSQLFVTAPAVGGIRPGGLALDRLVYALRKRAEQVTPEVESEGSGVYFPSLSSRTVVYKGMLTTSQLSRYFPDLRDPRIASAIAIVHSRFSTNTFPSWPLAHPFRFVAHNGEINTVRGNRNRMRAREALLSSSVIPGDLRRLYPICTPDASDSASFDEVLELLHLAGRSVAHAVMMMVPEAWENDTSMCPDRRAFYQFHASLMEAWDGPACVTFTDGTVVGAVLDRNGLRPGRWWQTVDGRVVLASESGVLDVPQAEVVAKGRLEPGQMFLVDTSEGRIVPDEKIKMRLAAEQPYAEWLYAGLLELKTLPDRPHVQHNHESVVRRQVAFGYTEEDLRILLAPMAASGGEPLGSMGTDTPIAVMSQRSRLLYDYFVELFAQVTNPPLDAIREEIVTSLSRVMGPEQNLLEPTAASCRQIVLPWPVLDNEELNKIINVNADGNHPGLAATVLRALYDVERGGAGMAEAIEELRAQASAAIADGYRTLVISDRDSDHTRAPIPSLLAVAAVHHHLVRTKERTKVALVVESGDAREVHHLALLIGYGAAAVNPYLAMESIEDLVSEGELTGVEHTIAVRNYLTALGKGVLKVMSKMGISTVGSYTAAQVFEAIGLDRDLVHEYFTGTVSKLGGAGLDEIAREVTVRHRQAYPDNPAEFAHRRLEDGGEYQFRRDGELHLFTPETVFLLQHATRTGQHEVFAKYSEEVNRLAEAGGALRGLFTFREGVRPPVPLDEVEPVERIVTRFNTGAMSYGSISAEAHETMAVAMNNLGGRSNTGEGGENVDRLYDPSRRSAVKQVASGRFGVTSDYLINASDIQIKMAQGAKPGEGGQLPAYKVYPWVAETRHSTPGVGLISPPPHHDIYSIEDLAQLIHDLKNANDRARVHVKLVSSVGVGTVAAGVSKAHADVVLISGNDGGTGATPLTSMKHAGAPWEIGLADAQQTLVLNGLRDRITVQCDGGMRTARDVVVAALLGAEEFGFSTAPLIVAGCIMMRVCHLDTCPVGVATQNPELRKRYTGKPEFVEEFFRFVAEDVRQYLADLGFRSIDEAVGHADVLETAQGIAHWKNRGLDLTPIFAVATGPDGVPLPQRRRDRDQDHGLDRALDRTLIQLAEGALEDAHAVEIEMPVRNVNRTVGTLLGAEVTRRYGAAGLPDDTIRLTFTGSAGQSLGAFLPPGITIDLTGDANDYVGKGLSGGRIVVRPADDVLFVPETQVIAGNTLLYGATSGELYLRGRVGERFSVRNSGASAVVEGVGDHACEYMTGGRVVILGPTGRNMAAGMSGGIAYVLDLDPEDVNRAMVKLLQPDPDDLDWLCGAVTRHHRWTGSAVAASVLADWPRRSALFTKVMPVDYQRVLDATRMAKAEGLDVDTAIMEAARG

SEQ ID NO: 758 - protein, 513 aa, Vibrio sp. Ex25
MSKPIIADNKPIKVNLTEGQEYYFCRCGRSKNQPYCDGSHSGTGLKPMSFTAEKDEDAYLCQCKHTSNAPFCDGTHKRFSSEQVGKEGPEKKREKSDKPTASATQEEPTLEFIHQLAREGLSKLGHHGPMAAMGVPRHLLPHWDAIQIMVAQMATQPLLEDVPVSTELIVGPNARKPLKLAIPLLVSDMSFGALSEEAKIALAKGAELAGTGICSGEGGMLPEEQAANSRYFYELASAQFGYDESKLLNVQAFHFKGGQGAKTGTGGHLPANKNVGKISQVRGIPEGQPAISPPTFKDLHTTHDFRKFADRVRGITGGIPIGFKLSANHIEQDIQFALDAGADYIILDGRGGGTGAAPTMFRDHISVPTIPALARARKYLDEKGASDRVTLIITGGLRVPMDFVKALALGADGVAIANSAMQSIGCVAARICNTNNCPAGIATQNADLRQRLDIEKSSQQLKNFFESSVELMQVMARACGHHALNEFSRHDLATWDHNMARLSGIKYSGMDLN

SEQ ID NO: 759 - protein, 1535 aa, Colwellia psychrerythraea 34H
MNDMSKKSQGLYRAEFEHDSCGIGFVANLKGKKTHDIIENALTMLSCMEHRGGTGFDVKSGDGAGILIQIPHDFLSQETEKLGFSLPDAGNYGVGMIFFPRDKAQSEACREILNQNITELGLTLLGYRDVPGDNSMLGAASFDSEPNIEQVFIAKPAALTAQEFERKLFVLRKYTSHKINASGITERDEFYVTSMSSTKIVYKGQFTTQQVRQYYLDLQDERTISGMAMFHSRFSTNTFPAWRRAQPFRYIAHNGEINTVRGNINWMNAREALFSSVNFSDAELKMLNPICNNDNSDSANLDMAIELLVLSGRSLAQVMMMMVPEAWQTQTDMDATKHAFYEYYACIMEPWDGPASLSFSDGNVIGATLDRNGLRPSRYLLTEDGTLVMGSETGTLCVDQSTVVEKGRLQPGKIFIADLKQGRIISDDEVKAQVSSAQPYGKWLADNKVELDKLPVPIASIAQPPLAELRKMQKAFGYTSEDLNLVLAGMVGTSKEPLGAMGTDTPLAVLSSRPQQLSHYFKQLFAQVTNPPIDPIREELVMSLRGYIGKSFNLLDETPEHCHKVEIEQPVLTIDQLRKLQYIDNNHLQSKTIAITFKASGEAGALKKALDRVCFNAKSAVEDGYEILILSDREVDSDHVAIPSVLATAAVHHYLIREKLRSGADIILESGDIRETHHFATVIGYGAAAVNPYLALESMYGLRDEGVLDSKLTDEEIVAKYTAAVGSGLLKTFSKMGISTLQSYLGAQVFEALGINSDVIDEYFTGTVSRIQGLSLDQIAQEALLRHREGFPEASRIAVENLLPTGGEYSWRNDGERHLFSPTVIRLLQHSTASNDTNQFKQYAKTVDDQSKEAFTLRGLLELNSDRPSIPLSEVEPIENIFKRFASGAMSFGSISWEAHTTLAIAMNRIGGKSNSGEGGEDPIRYTPLENGDSMNSRIKQVASGRFGVTSHYLTNADELQIKMAQGAKPGEGGQLPGDKVDAWIGKTRGSTPGVGLISPPPHHDIYSIEDLSQLIFDLKNANREARVNVKLVSEAGVGTIASGVAKAYADVVLIAGHDGGTGASPLSSIKHTGLPWELGLAETHQTLVRNHLRSRITVQTDGQLKTPRDLAIATLLGAEEYGMATTALVVEGCIMMRKCHLNTCPVGIATQDKGLRDKFTGRADILVNFFTMMAEGLREIMAELGFKTIEEMVGQTQCLKQLENVDHWKYQGLDLTPLLHKEESHESETLYQSINQKHLIDDIIDRKMIKDAQVALDSQQSVSLEYDVINTDRTIGAMISNEISKKYQAEGLPENTIKVKFNGSAGQSFGCFSAKGLHFELEGDANDYFGKGLSGANLVVYPSKQAKFIASENILIGNVAFFGATSGSAFIRGIAGERFCVRNSGATAVVEGVGDHGCEYMTGGKAVILGATGRNFAAGMSGGVAYVLDDNKDFAPKCNMEMVSLETVDTDAESLELKALIAEHFAATGSDVANELLNDWDNNVKRFVKVMPVDYKRMQGYMNDVRESGKFESEYDIAVQAFDIHLNKLASAKA

SEQ ID NO: 760 - protein, 2456 aa, Candida glabrata CBS 138
MSSLKLEDRDSSESAALLRSAVIGTPNEQSMSPVPILDYDSGSASNFTKGESTMLESDVLPDLESLPMLMDYILELLKSPNVRLRLSATNKLKTVLISLAHEISIEQFQSFNHKLDNKIYQMVHSKDVRSQIAGVLSVDCLIWYYSQTEELPNYTTKLAGYLKVLIPSKNLDLMKQAIEILGKLAIPTSSITSEFLQHEVKNCIEWLTTSPESKFSTQTQELRKHASLQIITVLSKNSPTVLYPYINSILDNIWRALRDPDNLMRFDAAKVVGCCLRIISKRDESACKEWIIHLMQGCAFGLTLKTTDAIHATLLVYHELLELDSECLNDFFDDIYYVTMSFKDHRSPLIREEICSIVSLLASLNPVMFSNLYLDKVMNHFLDLLQNITTYNISNKERSHIFISIGDIADNVGEMMFEFLEPTLITLKESLRTRYRTRKDYEEGVFYCIGKLSSAIREDLQKYLEGGLLKLILECPLSDHMQKTLSILSANTPDYAKHIDKELLDLLCIHLSGDHFIEPGTPIKGKPFSPNAARVWRNQNVYHQIGIANDDLNDAQILIQTLKIFRETKFKVVLTEFVKNVIIYYIEHENQLVRKLAALTSCEIFINDSICKETSLNSLNTVSEVLEKLLTVAVTDLNPEIRLEILKHLSSPFDSHLAKPENLQLLFTALNDELIAIQIEAMKIIGRLVTVNPAYVIPSLRNYLLSLITELKYPNFSTRKDEAATLLCTLIQSSKNVTKPYIEPILNVLLPKLDDNSSTVASIALKAIGALAVVGGEDMKQNNSTLFPLMIKTLQDQSNSFKRDAALKSLGQLAASSGYVIRPFLDYPDLLSVLIGILRAESAQNIRRETVRLIGILGALDPHKQRDVEVNLKTKLAVEQNQPPIDVALLMQGNSPSNDDYYPTVVIVSLMKILKDPSLSSYHTSAVQAIMQIFQIMGLKCISFLDKIIPGIISVMHMCPSNLLDFYFQQLCQLTVIMKQHIRPYVDEIYDAIIEFFRFENLQVTILSVINSLCYALKGEFKRFIPLTLNLLLGVLEKDRSAGRENSIRVLQSFVIFDTNLELYAHTILPSILKLTEFSTGHLRKAAIITVGKLSKCINLSEMASRIVHSLARVLYVNDDELREVTLNTLSLLLLRLKRNYIIFVPVVNRILVDCSIKHAIYDDLVTKLLNGEALPNTIILEDDTEQKQLSLSNIAETTDKKLPINQNGLKSVWDCSQLRTKEDWQDWIRRLSIQFLKESPSPALRTCANLASIYHPLARELFNASFSSLWSELYTQYQESLIGSLCSALSSPQNPPEIHQVLLNLIEFMEHDDKPLPIPINTLGQYAERCHAYAKALHYKEVKFIKEPVSSTIESLISINNQLHQTDAAIGILKHAQQHHSYQLKETWYEKLQRWDDALDSYTKRAEAGDNSIEVTVGRMRSLHALGEYETLSQLAENKWKTSNLQVRKKIAPLAAGAAWGLGEWDEIEKYISVMKENSPDKEFFDAVLCLHRNRFDEAEKHIFAARDLLVTEISALINESYTRAYGVVVRTQIIAELEEIIDYKKASHNSAKRTHYRNLWDQRLLGCQKNVDIWQRILRVRSLVVKPKQDMHIWIKFANLCRKSGRMSLAQKALYSLLEDGSDPNQPNTAKAPPPVVYAQLKYLWATSSHEEVLHHLIGFTSRMAHDLGLDPSNMIAQSVPQNATVAPQHIETYTKLLARCFLKQGEWRVAIQPNWRVQNPDAILGSYLLATHFDKNWYKAWHNWALANFEVISMLTSKNKNEDTNGAQVNGDWRIENSIMGTDYFSNDESKFSPEIIQRHVVPAIKGFFHSISLLKASSLQDNLRLLTLWFTFGGVEEANKAMHDGFGMIKIDNWLEVLPQLISRIHQPNPVVSKALLSLLSDLGKAHPQALIYPLTVAIKSESVSRQKAALSIIEKMRIHSPILVDQAELVSHELIRLAVLWHELWYEGLEDASRQFFGEHNTEKMFATLEPLHELLNCEPETLREATFKKSFGRDLNDAYEWVLNYKRTKDVSNLNQAWDIYYNVFRRISRQLPQLQSLELQYVSPKLLAAHDLELAVPGTYSATKNVIKISYFEPTLTVISSKQRPRKIWIHGSDGVEYQYVLKGHEDIRQDNLVMQLFGLVNTLLRNDSECFQRHLDIQQYPAIPLSPKSGLLGWVPNSDTFHVLISEHRDAKKIPLNIEHWVMLQMAPDFDNLTLLQKIEVFTYALDSTKGQDLYKILWLKSRSSEAWLDRRTTYTRSLAVMSMVGYILGLGDRHPSNLMLDRTTGKVIHIDFGDCFEAAILREKFPEKVPFRLTRMLTFAMEVSGIEGSFRITCEHVMRVLRANKESLMAMLEAFAFDPLIHWGFDLPPQKITEMTGIQLQLSNTNELLRRGAITLEQANKMEKEQQAEIKNARALLVLRRIINKLTGNDFKRCKDLGINEQVDKLIQQATSVENLCQHYIGWCPFW

SEQ ID NO: 761 - protein, 342 aa, Zea mays
  misc_feature (158)..(158): Xaa can be any naturally occurring amino acid
  misc_feature (235)..(235): Xaa can be any naturally occurring amino acid
MGNQVGGRRRRRRPVDERYTRPQGLYPHPDIDLRKLRRLILEAKLAPCHPGADDARADLDECPICFLFYPSLNRSKCCAKGICTECFLQMKSPTSCKPTQCPYCKTLNYAVEYRGVKTKEEKGIEQLVSARTHPPCFGPHVAALVCFRQLVGVWSFGXEEQRVIEAQIRMRQQEVQDDAERMKNKRTATLGDVVASAQVDSCNTDGASTAVANGPRGHDVLSSRVQHSELISRNXEAFNRMRGNNFEVDLEEVMLMEAIWLSIQDQEALGNPGCVSTTPSSIPSRPFDDGDMTTTAEAASSGGFACAVAALAEQQHMHGESSSASPCQTIRFGTLSRPDRST

SEQ ID NO: 762 - protein, 2216 aa, Arabidopsis thaliana
MSAASSSSVLHLRTNQQLLSLRSLKNSTSVASQLAVTSGVSRRRSCTARCSVKKPVIPESPFLGTRVRRSGSETLQFWRSDGPGRSAKLRTVVKSSFSAVPEKPLGLYDPSYDKDSCGVGFVAELSGETTRKTVTDSLEMLIRMTHRGACGCESNTGDGAGILVGLPHDFYAEAATELGFVLPSAGNYAVGMFFLPTVESRREESKNVFTKVAESLGHSVLGWRLVPTDNSGLGNSALQTEPIIAQVFLTPTTKSKADFEQQMYILRRVSMVAIRAALNLQHGAMKDFYICSLSSRTIVYKGQLKPDQLKDYYYADLGSERFTSYMALVHSRFSTNTFPSWDRAQPMRVLGHNGEINTLRGNVNWMRAREGLLKCNELGLSKKELKKLLPIVDVSSSDSGAFDGVLELLVRAGRSLPEAVMMMIPEAWQNDKNIDPSRKEFYEYLSALMEPWDGPALISFTDGRYLGATLDRNGLRPGRFYITHSGRVIMASEVGVVDVPPEDVMRKGRLNPGMMLLVDFEKHIVVDDDALKQQYSLARPYGEWLKRQKIELKDIIESVPEAERIAPSISGVVPLTFFLETKASNDDDSMESMGIHGLLSPLKAFGYTVEALEMLLLPMAKDGSEALGSMGNDTPLAVMSNREKLCFEYFKQMFAQVTNPPIDPIREKIVTSMECMIGPEGDLTETTEEQCHRLSLKGPLLKIEEMEAIKKMNYRGWRTKVLDITYAKERGTKGLEETLDRICDEANEAIKEGYTLLVLSDRAFSATRVAVSSLMAVGAVHHHLVKTLARTQVGLVVESAEPREVHHFCTLVGFGADAICPYLAVEAVYRLQVDGKIPPKSNGEFHSKEELVKKYYKASNYGMMKVLAKMGISTLASYKGAQIFEALGLSSEVIQKCFAGTPSRVEGATFEMLARDGLQLHELAFPTRGYAPGSAEASALTNPGNYHWRKNGEIHLNDPLAIAKLQEAARTNSVAAYKEYSKRINELNKQSNLRGLMKFKDADVKIPLDEVEPASEIVKRFCTGAMSYGSISLEAHTTLAMAMNKLGGKSNTGEGGELPSRMEPLADGSRNPKRSSIKQIASGRFGVSSYYLTNADELQIKMAQGAKPGEGGELPGHKVIGDIAITRNSTAGVGLISPPPHHDIYSIEDLAQLIHDLKNANPGARISVKLVSEAGVGVIASGVVKGHADHVLIAGHDGGTGASRWTGIKNAGLPWELGLAETHQTLVANDLRGRTVLQTDGQLKTGRDVAVAALLGAEEFGFSTAPLITLGCIMMRKCHKNTCPVGIATQDPVLREKFAGEPEHVINFFFMLAEEVREIMSGLGFRTVTEMIGRADMLELDREVVKNNDKLENIDLSLLLRPAAEIRPGAAQYCVQKQDHGLDMALDQELIALSKSALEKSLPVYIETPICNVNRAVGTMLSHEVTKRYHLTGLPKDTIHIKFTGSAGQSLGAFLCPGIMLELEGDSNDYVGKGLSGGKVVVYPPKGSSFDPKENIVIGNVALYGATSGEAYFNGMAAERFSVRNSGAKAVVEGLGDHGCEYMTGGTVVVLGKTGRNFAAGMSGGIAYVLDVDGKFNTRCNLELVDLDKVEDEEDKMTLKMMIQQHQRHTNSQLAQEVLADFENLLPKFIKVFPRDYKRVLSAMKHEEVSKQAIERASEEADETEEKELEEKDAFAELKNMAAASSKEEMSGNGVAAEARPSKVDNAVKNGGFIAYEREGVKYRDPNVRLNDWNEVMEESKPGPLLTTQSARCMDCGTPFCHQENSGCPLGNKIPEFNELVYQNRWQEALNRLLETNNFPEFTGRVCPAPCEGSCVLGIIENPVSIKSIECAIIDKAFEEGWMVPRPPLKRTGKKVAIIGSGPAGLAAADQLNKMGHLVTVYERSDRIGGLMMYGVPNMKTDKIDVVQRRVDLMTKEGINFVVNANIGKDPSYSLDGLKEENDAIVLAVGSTKPRDLPVPGRDLSGVHFAMEFLHANTKSLLDSNHEDGNYISAKGKKVVVIGGGDTGTDCIGTSIRHGCTNIVNLELLPQPPSTRAPGNPWPQWPRVFRIDYGHQEATTKFGKDPRTYEVLTKRFIGDDNGNVKGLELVRVSWEKDETGRFQFKEIEGSEEIIEADLVFLAMGFLGPEPTLAEKLGLECDNRSNFKAEYGRFSTTVEGVFAAGDCRRGQSLVVWAISEGRQAADQVDKFLTKTDDDEDAKLQQDLNQMKHNTITN

SEQ ID NO: 763 - protein, 1515 aa, Vibrio angustum S14
MTDQELNDQGLYVPEMEHDACGIGFVAHLKNRKSHQIVTQALDMLARMEHRGGQGCDPCSGDGAGILLQKPHEFLLEEALTLGIKLPAFDKYGVGVVLFPKDEHKRQQCREILERNAKRLDLEVIGYRVLPVDNSMIGEDPLSTEPQFEHVFITGGANLDPAVLERKLYVLRNYTVRVCLESVSNIGDDFYINSLSYKTLVYKGQLTTEQVPQYFLDLQNPTMVTALALVHSRFSTNTFPRWRLAQPFRYIAHNGEINTVRGNLNWMKAREAILESDLFSQQEINMLLPICQEGSSDSSNFDMALELLVLSGRSLPHALMMLIPEAWQENKNMDPKRRAFYQYHANIMEPWDGPASVCFTDGVQVGATLDRNGLRPSRYTVTKDDFLVMASESGVVEIEPENVQFRGRLQPGRIFVADLEQGRIISDEEVKDSIATAQPYEQWVKDNLLSLKTLPEADNMHHQPTPERLLHHQQAFGVSSEEVNDIIVPLAKTAYEPLSAMGADWPLAVLSHQSQHLSNYFKQLFAQVTNPPIDPIRERMVMSLNTYLGKDQNLLAETPAHCQKVELESPVLSNAELEKIREIDNEHLQSKTLDIVFNASGEPGKLERALKRICQYSEDAVVDGYSIIILTDRAVNSNHAAIPAMLAVGAVHHHLIRKGLRAKCDIVVETGDARETHHFATLVGYGANAVNPYLVTETLVDLQRKRKLDPELPTDTLFDNYRKGVNGGLLKIFSKMGISTLQSYHGAQIFEALGISKSVVDKYFTGTVTRIQGLTIDDIAQEVLVRHRVGYPTREIPVQVLDVGGVYQWKQRGEKHLFNPETISLLQQSTREKDYAQFKQYAKAVDDQGDNAATLRSQLDFIKNPAGSIPLEEVEPIENILKRFATGAMSFGSISYEAHSTLAVAMNRIGAKSNSGEGGEDPIRFEKKDNGDWERSAIKQVASGRFGVTSYYLTNADELQIKMAQGAKPGEGGQLPGDKVDDWIGATRHSTPGVGLISPPPHHDIYSIEDLAQLIYDLKNANRAGRVNVKLVSEAGVGTIASGVAKAKADVVLIAGFDGGTGASPMSSIRHTGLPWELGLAETHQTLLKNGLRNRIVVQSDGQMKTPRDLAIATLLGAEEWGVATAALVVEGCIMMRKCHKNTCPVGIATQNKTLRERFDGRVEDVVTFFQYMAEGLREVMAELGFRTIEEMVGQSHKLKVRDNVSHWKYKNLDLSPVLYVEKPRAEDGIYNQRPQDHGLDNVLDRQLIELAQPALTEGKAVNAELPIINTDRSAGTMLSNEISKVYKDSGLPQPMNVKFFGSAGQSFGAFLAKGVKFEVEGDANDYWGKGLSGGTLVLYPDAKSDIVAEDNIVVGNVCFYGATSGESYIRGLAGERFCVRNSGAQVVVEGVGDHGCEYMTGGVAVILGQTGRNFAAGMSGGVAYVWDQFDDFETKLNPELVDLDPIEKEDQALLLNMLTKHVALTGSTVAELFLSNFEDNLKKMVKVMPRDYKAVLQKRKAEAQDKEALEAVNG

SEQ ID NO: 764 - protein, 1487 aa, Vibrio angustum S14
MSLYDPSLEKDNCGFGLIAHIEGQTSHKLVRTAISALDRMTHRGGIAADGKTGDGCGLLIKKPDNFYRIIADEKSWNLSREFAVGQIFLSQDPVLAEQARTIINEELATETLSVVGWREVPVNPAVLGPIAQESLPNIEQVFINAPAGWKPRDIDRRLYIARRRIEKRITEDSDFYICSLSTQVIVYKGLFMPSDLPKFYLDLGDIRLESSICLFHQRFSTNTQPRWPLAQPFRYLAHNGEINTITGNRQWARARGYKFSSPLLPDLKTAAPFVNETGSDSSSLDNMLELFLSGGMDLFRAMRMLVPPAWQNHPDMDPALRAFYDFNSMHMEPWDGPAGIVMSDGRYAACNLDRNGLRPARYVITKDKLITLASEVGIWDYTPDEVAEKGRVGPGELLVIDTKFGKIWHSSDIDNELMGRHPYKAWMDSHVKRLTPFEQLGDEQVGCRSLTDNELSVYHKQFGVSSEELDQVLRVVGENGQEATGSMGDDAPMAVLSSKERPITDYFRQMFAQVTNPPIDPLREKHVMSLATCIGREINVFCETDSHAQRVAFGSPVLVYSDLVQLLELDDQYYANSIIDINYNPNEKDLKQALIDLCDEAERVVKDGAVLVVLSDRGINKDKLPIPAAMAVGAVQKRLVDNNLRCDTNIVVETATARDPHQFAVLLGFGATAIYPYLAYESLGKLIDAGAINKSYREVMSNYQNGMNKGLFKIMSKMGISTIASYRCSMLFEAVGLSDEVVELCFKGVSSRIAGADFSDFQQDLFNLSRKAWLKRKPIEHGGLLKYVHGGEFHAYNPDVVGTLQKAVKSGDYQDYLAFAKEVNERPVAAIRDLFKLKDGTTSIPVEQVEAATELYKRFDSAAMSIGALSPEAHEALAIAMNRLGGCSNSGEGGEDPRRFGNERNSRIKQVASGRFGVTPHYLVNADVIQIKVAQGAKPGEGGQLPGHKVTTEIAKLRYAVPGVTLISPPPHHDIYSIEDLAQLIFDLKQVNPSAMVSVKLVSEPGVGTIATGVAKAYADLITISGYDGGTGASPLTSVKYAGSPWELGLAETQQALVSNGLRHKIRLQVDGGLKTGLDVVKAAILGAESFGFGTAPMVALGCKYLRICHLNNCATGVATQDEKLRRDFFKGLPEQVMNYFIGVGQEVRELLAQLGVEKLTDLIGRTDLLESLEGFTAKQAKLDLSPILVAPTPKEGKTLYCSEPNTPFDNAELSQTLVDQILLAIESRSGGDFYFDICNTDRSIGARLSGEIAQRYGNQGMSASPVTLHLTGTAGQSFGVWNAGGLNLKLTGDANDYVGKGMTGGIITIRPPQGSAFKSSEATIIGNTCLYGATGGKLFAAGKAGERFAVRNSGTITVVEGAGDNACEYMTGGIVAILGKTGVNFGAGMTGGFAYILDEDGDFAGRVNPELVEALPLDELQIHQEHLRGLIDRHLQETGSSRAQEILANFDQWIPKFYLAKPKSADINTLLGHQSRSASELRLQAQ

SEQ ID NO: 765 - protein, 447 aa, Oryza sativa
MGAKDSKPSYSYSSSYDHGNSSSGYNSRYPAYPANASSSQNTRYAPSMENYVQPETHARLQRKYSRIGDDYRSLNQVTEALAQAGLESSNLIVGIDFTKSNEWTGKLSFNRRCLHDIGNTPNPYEQAISIIGRTLSAFDEDNLIPCFGFGDASTHDQEVFSFYPENRPCNGFEEALERYREIVPTLRLAGPTSFAPMIETAIGIVDSTGGQYHVLLIIADGQVTRSVDTQSGQLSPQERDTIDAIVKASQFPLSIVLVGVGDGPWDMMHQFDDNIPARSFDNFQFVNFTDIMSKSIAADRKEAEFALSALMEIPTQYKATLDLQLLGRRQRIQPRIPLPPPMRNAYSRSTSFDQHSGVYSRSSSFGPQTSGFQQSESFKQRQPVATTAPDTYTSESSLEGRLLCAICMDKSKDLAFGCGHQTCYECGKNLVRCPMCQQHITTRIRLY

SEQ ID NO: 766 - protein, 167 aa, Brassica napus
VDPRVRDSVMAMMEAFVHDPLINWRLFNFNEVPQLALLGNNNPNGPANVEPEEVDEDPADVDLPQPQRSTREKEILQAVNMLGDANEVLNERAVVVMARMSHKLTGRDFSTSAVPSNPIADHNNLLGGDSHEVEHGLSVKVQVQKLIDQATSHENLCQNYVGWCPFW

SEQ ID NO: 767 - protein, 521 aa, Rhodococcus sp. RHA1
MIVLALWILGLGALALTLGVATGWWFAAVVLLALAALGTWDLLQRRHSILRNYPVLGHARFLLEKIRPEIQQYFVESSTDGTPFDRDTRDLVYERAKGTLAEEPFGTERDVHAVGYEFMAHSLRARMAPPEPPTVRIGGPDCERPYDIALLNVSAMSFGSLSANAIEALNAGAARGGFAHDTGEGAISPYHRKHGGDLIWEIASGYFGCRTDDGHFDPGKFAEHAASDQVKAISIKLSQGAKPGLGGVLPGAKVSREIAETRGVPVGKTVISPPSHTAFSTPNELIDFIVTLRTLSGGKPVGFKLCVGSRTEFLGICKAMLERDVTPDFVIVDGSEGGTGAGPVEFEDNMGMPLTEGLMLVHNALTGAGLRNRIKIGASGKVASASDIVKRIIQGADFTLAARAMMFAVGCIQAQMCHTNRCPVGVTTQDPARTRALDVPDKAARVFRFQKSTVAGAQQMVASMGLDSFDQLTPSMLNRRIDGVTTRTYAELYEWLMPGELLEDPPSDWLTDWIDADSSRF

SEQ ID NO: 768 - protein, 204 aa, Hypocrea jecorina
MSDSPQSPPKDVDQGAQSPDEEGQMNDNQEPHSAGGTGYEFEGVKEQDRWLPIANVARIMKNALPDNAKIAKEAKECMQECVSEFISFITSEASEKCQQEKRKTVNGEDILFAMTSLGFENYAEALKVYLSKYREQQNQSNRDRVLENNTWGNAMIPGEKTEPGTTNPEYAPPEGANPPESGAEPNYMYTSHAGHNGAGAGENY

SEQ ID NO: 769 - protein, 1506 aa, Gluconobacter oxydans 621H
MTQNNDFIREYAENVERLKGLYDPSQERDSCGVGLVASLDGKPSRSVVQAGIEALGNIWHRGAVDADGKTGDGAGIHVEIPQDFFAEAIHNGSSDDTIDGRIAVGMVFLPKTDLGSQERGRQIIETEILNFGYGIYGWRQVPIDTACIGEKANQTRPEIEQIMIRNRLGRSEDEFERDLYVLRRRIEKQATAQQVDLYVCSMSCRSVIYKGMFLAENLTDFYPDLLDERFVSRFAIYHQRYSTNTFPTWKLAQPFRKVAHNGEINTISGNTNWMRSHETRLAHPELDPYMADLKPVVQAAGSDTAALDNVFELLTFAGRDAPMAKTMLVPASGGANSAMSDAARALFRYCNAVIEPWDGPAALCATDGRWVVAGLDRAGLRPLRYSITQDGLLIVGSETGMVRVPDARVKSRGRLGPGQTLALDLKEGRLYQSEELLEMLASRQDFRGWVKRIRDIEPIVRDVVEPEALDPDLLRRHQVAVSLTHEELETILHPMVENAAEALGSMGDDTPLQVLSTIYRGLAHYFRQGFSQVTNPPIDSLRETRVMSLVTRLGNLGNILDQAPEQCDLLQLPSPVLTIGEFDELLKVCGENAGVIDCTFPAEEGEEGLRAAIASIRAQAEDHVRGGCTHLFLTDDNTDATRVAIPMILATAAVHIHLVRNSLRTFTSLNVRTSGAIDVHAIAVTIGVGATTVNPALAQYCVADRLRRGLFGKMSLREAMERYRKAVDKGLLKIMSKSGISIISAYRGGYNFEAIGLSRALVAEFFPGMPSRISGIGLPGIARNILGAHAAAWNRKVEALPVGGRYKLRRQGETHAFSGQLVHMLQSAVTANSFTLYRRYADAVRQMPPVALRDLLDFKPAHAPVPVDEVESITQIRRRLVAPGISLGALSPEAHETLAIAMNRIGAKSDSGEGGEDAERSKPRPNGDNASSAIKQVASGRFGVTAQYLNDCREIEIKMAQGAKPGEGGQLPGFKVTELIGRLRHATPGVTLISPPPHHDIYSIEDLAQLIYDLKQINPTATVTVKLVARTGIGTIAAGVAKAKADAILISGHSGGTGASPQSSIHYAGLPWEMGLSEAHQVLMLNRLRHRLVLRTDGGIKTGRDVVMAAMLGAEEFGIGTAALVAMGCIMVRQCHSNTCPVGVCVQDEKLREKFGGSPEKVINLFTLIAEDIRHILADLGVRSLEEVIGRTDMLRQVSRGADYLDDLDLNSLLVQADPGGHARFCTREGRNEVPETLDGQIIPDATALFERREKLHLHYTVQNTHRAIGTRVSGLITRKFGMKELPEGQLTLSLRGSAGQSLGAFGVQGLKIEVEGDANDYVGKGLSGATIVVRKSPAAQWASEQSAIIGNTVLYGATAGTLFAAGQAGERFAVRNSGATAVVEGCGSNGCEYMTGGTVVILGETGDNFGAGFTGGMAYVLDVKGLFEAQINPDTVIWNRVQAGSRWDQELRALVERHVAETGSTYAADLLHCWERTLERFWHVVPRDYARIIGYVQEDLSQLSA

SEQ ID NO: 770 - protein, 1023 aa, Glycine max
LFDYFKQRFAQVTNPAIDPLREGLVMSLEVNIGKRRNILETGPENASQVMLSSPVLNEGELESLLKDSYLKPQVLPTFFDISKGIEGSLEKALNKLCEAADEAVRNGSQLLILSDHSEALEPTHPAIPILLAVGTVHQHLIQNGLRMSASIVADTAQCFSTHQFACLIGYGASAVCPYLALETCRQWRLSNKTVNLMRNGKMPTVSIEQAQKNYCKAVKAGLLKILSKMGISLLSSYCGAQIFEVYGLGKEVVDLAFRGSVSKIGGLTFDEVARETLSFWVKAFSEDTAKRLENFGFIQFRPGGEYHANNPEMSKLLHKAVRQKSQSAFSVYQQYLANRPVNVLRDLLEFKSDRAPIPVGKVEPASSIVQRFCTGGMSLGAISRETHEAIAIAMNRIGGKSNSGEGGEDPVRWKPLTDVVDGYSPTLPHLKGLQNGDTATSAIKQVASGRFGVTPTFLANADQLEIKIAQGAKPGEGGQLPGKKVSMYIARLRNSKPGVPLISPPPHHDIYSIEDLAQLIFDLHQVNPKAKVSVKLVAEAGIGTVASGVAKGNADIIQISGHDGGTGASPISSIKHAGGPWELGLTESHQTLIENGLRERVILRVDGGFRSGVDVMMAAIMGADEYGFGSVAMIATGCVMARICHTNNCPVGVASQREELRARFPGVPGDLVNYFLYVAEEVRGILAQLGYEKLDDVIGRTDLFQPRDISLAKTQHLDLNYILSNVGLPKWSSTEIRNQEPHTNGPVLDDVLLADPEVADAIENEKVVNKTIKIYNIDRAVCGRIAGVIAKKYGDTGFAGQLNITFTGSAGQSFACFLTPGMNIRLVGEANDYVGKGIAGGELVITPVDKTGFEPEDAAIVGNTCLYGATGGQVFVRGRAGERFAVRNSLAEAVVEGAGDHCCEYMTGGCVVVLGKVGRNVAAGMTGGLAYILDEDDTFIPKVNREIVKIQQVSAPVGQMQLNTLIEAHVEKTGSTKGAAILKDWDKYLSLFWQLVPPSEEDTPEANAKYDTTTADQVTYQSA

SEQ ID NO: 771 - protein, 681 aa, Azotobacter vinelandii
MAAASAYFARSQTSFRIRRLCRHAFERPCGAARWHRFNQNDEIDPVEFNYLFNRRAPKRLAPRPACPRPVAPSGQRPSSTPLPRRHVVRIGGYPCRRTGPTAGRRASTWLVHRGIARPATRQPTAPARKPSARNLSDQPQETRRMSFTLFSRYAFFAACVLLALVTLPLLPGSPGLWPLTLIGGLLSLLGIADLLQKQHAVRRNYPVLGNIRYLIEYIRPEIRQYLLETDDDCLPFSRAQRTLVYARARNRSAEKAFGTLQDVYQSGFEFITHSMSPAPLRDPATFRVTVGGPQCEKPYSASLFNISAMSFGSLSANAVRSLNLGARLGGFAHDTGEGSISPYHREHGGDLIWEIGSGYFGCRSEDGRFDPERFAAQARHDQVKMIEVKLSQGAKPGHGGILPKDKITAEIAATRGVRMDRDCVSPARHNTFSTPRELLDFLVRLRELSGGKPVGFKFCVGHPWEFMGIVKAMLETGTLPDFIVVDGKEGGTGAAPLEFADHMGVPLRDGLRFVHNTLVGAGLRDSIRLGASGKIISAFDIASVLAIGADWANSARGFMFALGCIQSQSCHTNRCPTGVATQDPLRQLALVVPDKAERVRNFHHNTLAALAEMVAAAGLEHPARLEPRHLLRRMSASEIRQYAQLHAFLKPGELLGDSIGSEFYARMWRMARADSFEPAPF

SEQ ID NO: 772 - protein, 225 aa, Triticum aestivum
MPDSDNDSGGPSNADFSSPKEQDRFLPIANVSRIMKKALPANAKISKDAKETVQECVSEFISFITGEASDKCQREKRKTINGDDLLWAMTTLGFEDYMEPLKLYLHKFRELEGEKAVGAGGVGALPSPGGSSSQQRESTPRNNGGGGEAGGYGGMYGGAGAGGSGGGMFMMMGQPMYGSPPAAGYQHPQHHHQMMTGGQGGYGYGDAGAGGGSSSSSGFGRQDRA

SEQ ID NO: 773 - protein, 1626 aa, Physcomitrella patens subsp. patens
MALATKSCLVSPLLAEKRPTVAASSSINSVTASSAHNRLSLCTKLRLTDHLRYSEVFGIKVRSLKKNGWRSCRNSQGSGWCMKLVASAVKDARQYEVANLDDILAERDACGVGYIASLKNEASHKIVKDALTSLGCMEHRGGCGADNDSGDGAGVMTSIPWGLFKKWCKEQGLPEIDESHSAVGQVFLPRDESLAAAAKAVVEDVFKKEGVEVLAWRPVPVTESVVGHFAKITMPRIEQVFVKVAAEDAMDDIERELYISRKLIEKAASTEPWGEDFYFCSLSSRTIVYKGMLRSEVVGQFYDDLRNEDYVTPFAIYHRRFSTNTTPKWPLAQPMRFLGHNGEINTLQGNLNWMRSREATMESPIWRGRDNELRPFGNIKASDSANLDMIAELLMRSGYSPEETMMMMVPEAYKKHPTLMVKYPEVVDFYEYYKGQMEAWDGPALLLFSNGRTVGACLDRNGLRPARYWRTKDDLIYVASEVGVLDIEPSNVTMKGRLGPGMMICVNLETGEVYENTEVKKRVANAKPYGEWLKAGSQKLEPVEFKDMVMYSADNLLKHQQAFGYSIEDVQMIIESMASTGKEPTFCMGDDTPLAVLSEKAHLLYDYFKQRFAQVTNPAIDSLREGLVMSLEMNLGKRANLLNAGSENAAQVTLSDPILSEGELASLEASELLKPTILPTFFEIDDGIEGSLQRGLDKLCEAADEAVRSGSQLLILSDRTTNMEATKPAIPVLLAVGAVHHHLISNGLRMSASIVVDTAQCFSTHHFACLIGYGASAICPYLALETCRQWRMSPKTVAFIKNGKLPSITVEQTQKNFKKAVKAGLLKILSKMGISLLTSYHGAQIFEIYGLGQDVVDTAFRGSTSRIGGLTMDELARETVSFWSKGFTEEAAKKLENFGFIQLRPGGEYHGNNPEMSKLLHKAVREKNQSAYAVYQEHLANRPVNVLRDLLEFTSDRQPIPIDQVEDASGIMERFVTGGMSLGAISRETHEVIAIAMNRIGGKSNSGEGGEDPIRWKHLDDVNDGLSETLPHLKGLENGDIASSAIKQIASGRFGVTPSFLVNSEQLEIKIAQGAKPGEGGQLPGKKVSPYIATLRNSKAGVPLISPPPHHDIYSIEDLAQLIFDLHQIAPHAKVSVKLVAEAGIGTVASGVAKANADVIQVSGFDGGTGASPISSIKHAGGPWELGLAETHQTLLANSLRERVALRVDGGFKSGVDVIMAAAMGADEYGFGSLAMIATGCVMARICHTNNCPVGVASQREEMRAKFPGVPADLVNYFLYVAEEVRGILAQLGYEKLDDIIGKADILKRRDVQLAKTKSLDLSFLVANTGMPTWTSTQIRKQEVHSNGPVLDDTILADLDVIEAIENEKTIEKTIKIYNVDRAVGGRVSGRIAKKYGDTGFAGEIKLTFEGSAGQSFGCFLTPGMHLRLVGEANDYVGKGMAGGKIVILPVEGSGFNAEDATIVGNTCLYGATGGQLFANGKAGERFAVRNSLAEAVIEGTGDHACEYMTGGCIVAIGKVGRNVAAGMTGGLGYFLDEDDTFPSKVNKEIVKIQRVTAPAGQQQLQRLLQSHLDETGSKKAKEILSNWEKFLPLFWQLVPPSEEETPEANADVEDRKVENLVAQPA

SEQ ID NO: 774 - protein, 550 aa, Leptospira interrogans serovar Lai str. 56601
MIKIFLAKHFPKVQNYRMQNSMILQFISEHPWYSLFYTIGTYLFFALLHDIFQRRHAIKHNFPLVGRIRYIFETIGPELRQYWVANDKEEMPFNRAERSWVYATAKKQNNNFGFGTTELLYEAGYPIIKHSAFPFPESKVKHLKNDTSMIPCLKVIGEFHNRKKPFRPPSVVNISAMSYGSLGKNAVSALNKGAMMAHCYQNTGEGGISPYHKLGGDIVWQIGTGYFGARDEKGNFSLEVFGQKIQENPQIRMIEIKLSQGAKPGKGGILPGKKVTKQIASIRGVPIGKDCVSPNAHSEFGNVNELIDFIERLHFASGLPVGIKSAIGEIHFWNELAERMKETNKGPDFITIDGGEGGTGAAPLAFADHVSLPFKVGFARVYQIFQKEKLSERMAWIGSGKLGFPDRAIVAFAMGCDLINVAREAMMSIGCIQAQRCHTDHCPAGVATQNRWLQAGLDIELKAERNANYIKGLRKEVLSVTHAAGYEHPLQFRGSDIEISAGLNIFKTLETILGYERDHVHFTKMLDYTDHTYLEEYMQGTTKQEHPKTV

SEQ ID NO: 775 - protein, 1536 aa, Bacteroides thetaiotaomicron VPI-5482
MKKQELFNNATGKFPYQRQPGQMGLYDAAYEHDACGVGMLVNIHGEKSHDIVESALKVLENMRHRGAEGADNKTGDGAGIMLQIPHEFILLQGIPVPEKGRYGTGLLFLPKNEKDQAAIFSIIIEEIEKEGLTLMHLRNVPTCPEILGEAALANEPDIKQVFITGFTETETADRKLYLIRKRIENKVRLSAIPTRNDFYVVSLSTKSIIYKGMLSSLQLRNYYPDLTNSYFTSGLALVHSRFSTNTFPTWGLAQPFRLLAHNGEINTIRGNRGWMEARESVLSTPMLGDIKEIRPIIQPGMSDSASLDNVLEFLVMSGLSLPHAMAMLVPESFNEKNPISEDLKAFYEYHSILMEPWDGPAALLFSDGRFAGGMLDRNGLRPARYLITKNDTMVVASEVGVMDFEPGDIKEKGRLQPGKILLIDTEKGEIYYDGELKKQLAEAKPYRTWLSTNRIELDELKSGRKVPHHVENYDRMLRTFGYSKEDIERLIMPMASAGAEPIHSMGNDTPLAVLSDKPQLLYNYFRQQFAQVTNPPIDPLREELVMSLTEYIGAVGMNILTPSESHCKMVRLNHPILSNTQLDILCNIRYKGFKTVKLPMLFEVSKGKAGLQESLNNLCKMAEESVTDGANYIVLTDRDVDATHAVIPSLLAVSAVHHHLISVGKRVQTALIVESGEMREVMHAALLLGFGASALNPYMAFAILDKLVKEKDIQLDYATAEKNYIKSICKGLFKIMSKMGISTIRSYRGAKIFEAVGLSEELSKAYFGGLGSPIGGIRLEEVARDAIAFHDEGVEGMENGELKMENEAPHGNSQFSTFNFPLLKNNGLYAFRKDGEKHAWNPETISTLQLATRLGSYKKFKEFTHLVDNKEKPIFLRDFLGFRRNPISIEQVEPIENILRRFVTGAMSFGSISKEAHEAMAIAMNTIHGRSNTGEGGEDASRFHPLPDGTSMRSAIKQVASGRFGVTAEYLVNADEIQIKIAQGAKPGEGGQLPGFKVNDVIAKTRHSIPGISLISPPPHHDIYSIEDLAQLIFDLKNVNPQAKISVKLVAESGVGTIAAGVAKAKADLIVISGAEGGTGASPASSIRYAGISPELGLSETQQTLVLNGLRGQVVLQADGQLKTGRDIIIMALMGAEEYGFATSALIVLGCVMMRKCHQNTCPVGVATQNEELRKRFHGRSEYLINFFTFLAQEVREYLAEMGFTKMDDIIGRTDLIERKSDENDPNPKHALIDFTKLLARVDNSAAIRHVIDQDHGISTVKDVAIIDAAQEAIEHEKEVSLEYTIANTDRATGAMLSGVIAKKHGEKGLPEHTLNVKFKGSAGQSFGAFLVPGVNFKLEGEANDYLGKGLSGGRIAVLPPIRSNFEAEKNTIAGNTLLYGATSGEVYINGRVGERFAVRNSGAVAVVEGVGDHCCEYMTGGRVVVLGQTGRNFAAGMSGGVAYVWNKDGNFDYFCNMEMVELSLIEEAGYRKELHELIRQHYLYTGSKLARTMLDDWNHYVDQFIQIVPIEYKKVLQEEQMRKLQQKIADMQRDY

SEQ ID NO: 776 - protein, 214 aa, Helianthus annuus
MERGGGFHGYHRLPIHPTSGMQQPDMKQKQPDTTNTTFTEDNECIVREQDRFMPIANVIRIMRKILPPHAKISDDAKETIQECVSEYISFVTGEANDRCQREQRKTITAEDVLWAMSKLGFDDYIEPLTVYLHRYREFDGGERGSIRGEPLVKRAAATADPGPFGMGPFVPGFHMGHHNGFFGPASIAGFFKDPSSAAGQSGPAGFEPYAQCKD

SEQ ID NO: 777 - protein, 1604 aa, Cupriavidus taiwanensis
MDQTKNLSAQAQTSEQISESSSATDLHALRPQAQGMYDPANEHDACGVGMVAHIKGKKSHEIISQGLKILENLDHRGAVGADPLMGDGAGILIQIPDQFYREEMAAQGVSLPPAGEYGVGMIFLPKEHASRLACEQELERTVRLEGQVVLGWRDVPVDAAMPMSPTVRKTEPVIRQIFIGRGRDIMTTDALERKLYVIRKTASHAIQALKLKHGKEYFVPSMSARTVVYKGLLLANQVGEYYLDLQDPRAVSALALVHQRFSTNTFPAWELAHPYRMVAHNGEINTVKGNVNWINARTGAISSPVLGDDLPKLWPLIYPGQSDTASFDNCLELLTMAGYPLVHAMMMMIPEAWEQHTLMDDNRRAFYEYHAAMMEPWDGPAAICFTDGRQIGATLDRNGLRPARFYVTEDDVVVLASEAGVLPFPESRIVQKWRLQPGKMFLIDMEQGRIIDDKELKDNLANAKPYKSWIDAVRIKLDEIDAKPEDVAAEKKPVAKLLDRQQAFGYTQEDVKFLMAPMAMSGEEATGSMGNDSPLAVLSSKNKTLYHYFKQLFAQVTNPPIDPIRENMVMSLVSFIGPKPNLLELNNINPPMRLEVSQPVLDFKDIAKIRNIEHYTGGKFRSYELNICYPTAWGKEGIEARLASLCAEAVDAVRSGYNILIVTDRPVDADHVAIPALLATSAIHHHLVEKGLRTSTGLVVETGTAREVHHFALLAGYGAEAVHPYLAMETLADMSSGLSGDLSPEKAVKNFVKAIGKGLFKVMSKMGISTYMSYTGAQIFEAIGLSRELVQKYFHGTPSNVEGIGIFEVAEEALRLHKDAFGNSPVLENMLDAGGEYAFRIRGEEHMWTPDSIAKLQHSVRADDGKGAYQTYKEYANIINDQSKRHMTLRGLFEFKVDPAKAIPLEEVEPAKEIVKRFATGAMSLGSISTEAHTTLALAMNRIGGKSNTGEGGEDEKRYRNELRGIPIKQGDTLKGVLGDGVIEKDLELQAGDSLRSKIKQVASGRFGVTAEYLASADQIQIKMAQGAKPGEGGQLPGHKVSDYIGKLRYSVPGVGLISPPPHHDIYSIEDLAQLIHDLKNVNPSSDISVKLVSEVGVGTVAAGVSKAKADHVVIAGHDGGTGASPWSSIKHAGTPWELGLAETQQTLLLNGLRNRIRVQADGQMKTGRDVVIGALLGADEFGFATAPLVAEGCIMMRKCHLNTCPVGVATQDPQLRKKFQGKPEHVVNFFFFVAEEAREIMAQLGIRTFDELIGRADLLDTKAGIEHWKARGLDFSRIFHQVSLGADVPLYHTDVQDHGLSAEAGKALDHVLIAKARPAIEKGERVSFIQPVKNVNRTVGAMLSGVVARQYGHEGLPDDTIHIQLQGTAGQSFGAFLAHGITLDLVGDGNDYVGKGLSGGRVIVRAPHEFRGDPTRNIIVGNTVLYGAIAGEAFFNGVAGERFAVRNSGAVAVVEGTGDHGCEYMTGGTVVVLGGTGRNFAAGMSGGVAYVYDEDGLFDKRCNTSMVALEAVLASADQEKGQPQASWHKVDGKRVLDEVILRNLIEQHFRYTGSERAKALLADWTTARRKFVKVFPTEYKRALGEMYAKEQAARDSDREAIAA

SEQ ID NO: 778 - protein, 1527 aa, Gemmata obscuriglobus UQM 2246
MQPETLAFVPSPLVPEGLYHPSFERDACGVGFVADLRGRKTHATVSDALQLLRNLQHRGACGCDQDTGDGAGILLQLPDPFFRAAAAKLNVALPPVGSYGVAFCFLPTDAASAAACRRALEKVAAEEGQTVLGWRPVPVVSAAIGWLARTTEPVMEQLLVGRGAGTPADAFERKLYVIRRRAEHWAATHPAGAGFAITSCSARTIVYKGMLKPDQLEAYFPDLADPGAESALALVHSRYSTNTSPQWALAHPFNVLAHNGEINTLNGNVHWLKARQALMEGGALGDDLRKVLPLDLDGLSDSAVLDRAVELLLHSGRSLPHVMMMLVPEAYEEQKQLDPAVRGFFRYHRCLTEPWDGPASLSFTDGTVIGAMLDRNGLRPGRYVITDERVIVASEIGALPTPTGAVRTAGRMQPGKMFIVDTSCGSVILDDEIKLEVARERPYAEWVAANQVQLDDLPAAAPVEPDLATVRNRQHAFGYTQEDVARVLLPMAQDGQEPVSSMGTDTPLAVLSDRAQLLFNYFKQHFAQVTNPPIDPIREKVVMNTESLIGCEQNILAETPEHARLLRLKGPTLNDEELAKVRALDRPGLTVRTLTTLFDRAAGEPGLARAVDALCAEAEAAVRAGATILILSDRGVDAHKVPVPSLLATAAVNHHLIRAGLRVKCGLVAETGEAREVHHLALLIGYGAAAVNPYLALETYRDLAAEGMLVDAHGGPLELTKAFKNYAKAINAGLLKVFSKMGISTLLSYRGAQIFEAIGLNRDLIERHFADTPSRIAGIGLNEIARESLTRHAVGFPDAQPAEAGKGHEVSPPELDVGGEIMWRRRGEHRMWNPETVQTLQHAVRKESREAYREFAQAANDESRRLCTLRGLLGVKKTHKPIPLELVEPAKEIVKRFFTGAMSFGSISKEAHETLAIALNRVGGRSNTGEGGEDPARFKPDTNGDRRGSAVKQVASGRFGVTANYLANAVEIQIKMAQGAKPGEGGQLPGHKVDSAIAKTRYSTPGVGLISPPPHHDIYSIEDLAQLIFDLKNANPHAEISVKLVAAAGVGTVAAGVAKGYADRILVSGDSGGTGASPLSSIRHAGVPWELGLAEAQQVLVRNGLRGRVRLQTDGQMKTGRDVVIAACLGAEEYGFATAPLIAMGCVMMRKCHLNTCPVGIATQDPVLRAQFTGTPEHVVNYLFFVAEEVRELLSEMGFRTLDEIVGRPDLLAPIDLSWHWKAKHLDLSALLARPNVPFGSVVRNVERQPDILAEQLDWEVVRAAKEAVEHPRRLQLAMPITNRNRTTGTLLSYFVTARYGEAGLREDTIDLRFTGTAGQSFGAFLTRGITLRLRGEANDYVGKGLSGGKLIVAPQPEAGYVPEENVVIGNVALYGATGGEAYFRGRAGERFAVRNSGAKAVVEGIGDHGCEYMTGGVVVVLGPTGRNFAAGMSGGFAYVYDPHGTFRDNCNLEMVDLLPVEEYKDVGTLSNLINRHVLYTGSAVGNEIVNDFGSALPKFVKVYPKDYRRVLEQNKAVQRQWELVNG

SEQ ID NO: 779 - protein, 1530 aa, Listeria monocytogenes str. 4b H7858
MKQTNLPKKHGLYNPENEHDACGIGFVANIKKISSHKIVEQGIHMLCQLKHRGGEVGGDTGDGAGILLEISDSFFRRECSKLGINLPEKYHYAVGMFNFPQNKTERECLMAETEKLIASEGQTFLGWRKLPTDVTKVGAGARKTEPAIYQLFIQKNAKLDEAGFERALYLIRKQIEKFAATSKQITETFYVPSLSTRTVIFKGMLLPEQINQYYLDLADPAYVSAFALVHSRFSTNTFPSWERAHPYRYLIHNGEINTQRGNVNWMKAREKRAESDLLGEDLAKLLPIIDESGSDSATLDNALEFLVQAGRSLPHAAMMLIPEPWDKNPHMTDPKRAFYEYHSTLMEPWDGPTSISFTNGRVIGTILDRNGLRPARYYETKDHTIIYSSETGVVPVDSSEIIRKETVGAGTMLLIDLEEGRIVTDAELKEELTTEKPYREWLEAEMTEIADLATADLHYEAMDKSERFKKQRAFGYTQDELNKILIPMVTEKKDPMGAMGYDAPLAVLSQRPQVLFNYFKQLFAQVTNPPIDGIREETVTSAMTLLGDEGNILNPTAQNANRIRLKTPILSRKEFAALEQQTKFAQPTVTLPILFKAEERDGLEARLESLFVEADEKIAAGAELLILSDDGVNADWIGIPSLLAVSGLHHHLVKAGTRTQVSIVVKTAEARDVHQCALLIGYGADAVFPSLAIDTFDGLIKEGRMKGFTLDEAESRYIEAITDGILKIMSKMGISTVQSYRGAQIFEAIGIGDDVIKHYFPGTASQIGGIPLEVIAQEAWLRHREAYHDVGYQSFTLNTGGEYQWRSNGEYHVYNPLAIHSLQQATRENDRETYNLYSDLMQNQNNAFLRGLLTFTSDRKPIPLDEVEPAEAIFKRFKSGAMSYGSISQEAHEALAIAMNRIGGKSNSGEGGENPNRFTPDENGDWRRSAIKQIASGRFGVTSHYLVNAEELQIKMAQGAKPGEGGHLPGNKVYPWISKTRGSTTGVGLISPPPHHDIYSIEDLSQLIFDLKNANQNARINVKLVSKTGIGTIAAGVAKGNADVILVSGYEGGTGAAARTSIRHAGVPWEIGLAETHQTLLLNGLRNKVVVETDGKLMTGKDVLVAAMLGAEEFGFATAPLVTLGCVMMRVCHLDTCPVGVATQNPELRKKFSGSADYVVNFFHFIVAEMREMMAELGFRSLTEIIGHKEFLTTHEKKEAHWKAKYIDFSNMLYSDDFYKNQVQYCTKQQDHKIDQTLDMRELVPLIQPALENGEKVTGTFAVRNVDRAIGTVAGSFISKKYGAEGLPEDTISLDFVGSAGQSFGAYTPLGMTLRIHGDANDYFGKGLSGGKLIVSPDAKTPIKPHDSAIVGNVTLYGATGGYAYVHGKAGARFAVRNSGATAVVEGIGDNGCEYMTGGAVVVLGEIGENFAAGMSGGVAYLYTNNKQATTAKINHELVNSRSTLNTSELTKLKQLIEQHANLTGSNFAKDILQNWEAEKANFIFVIPNEYEMMLTRITTLEQTGKTHDEAELQAFYEHKDGKLVAGVAK

SEQ ID NO: 780 - protein, 401 aa, Magnetospirillum magnetotacticum MS-1
MVLGSRFAKKPIHLKTPVTIAGMSFGSLSANAKEALGRGASIAGTSTTTGDGGMTPEERGHSKTLVYQYLPSRYGMNPDDLRKADAIEVVIGQGAKPGGGGMLLGQKITERVAGMRCLPPGIDQRSACRHPDWTGPDDLAIKIEELREITDWEKPIYVKVGASRPYYDTALAVKSGADVVVLDGMQGGTAATQDVFIEHVGIPTLAAIRPAVQALQDLGMHRKVQLIVSGGIRSGADVAKALALGADAVAIGTAALIALGDNDPRWQAEYEALGTTAGAYDDWHEGRDPAGITTQDPELMKRLDPELAGRRLANYLAVMTLEAQTIARACGKSHLHNLEPEDLVALTIEAAAMAPGTTGRHHLGSRQDRHVTCEGRPLKLRRAALSLSSNRRDPPTPGGCL

SEQ ID NO: 781 - protein, 230 aa, Brassica napus
  misc_feature (196)..(196): Xaa can be any naturally occurring amino acid
MGNNLGKKRQVVDERYTKPQQGLLYMNKDVDFKKVKKLILDSKLAPCYPGAEETTCHDLEECPICYLYYPSLNRSRCCLKSICTECFLRMKNPSSSQPTQCPYCKTSNYAVEYRGGKTKEEKSIEQIEEQRVIEAKIRIRQKEVDEEKEERMQKRLESPSSSRTSEVTANTAYGSAADEDEETVSSQDSCVTSHPXVSRDGEFDYDLEDIMVMEAIWLSVQEPGSQMNNS

SEQ ID NO: 782 - protein, 90 aa, Zea mays
RPRRLVRELPDLDAGRLRRLIRTGDLAPCFDPAEDASAGLTEECPICFFFYLSLNRSRCCGKGICTECFLQLMPSGASKVIQYPTLRLPI

SEQ ID NO: 783 - protein, 2474 aa, Saccharomyces cerevisiae
MNKYINKYTTPPNLLSLRQRAEGKHRTRKKLTHKSHSHDDEMSTTSNTDSNHNGPNDSGRVITGSAGHIGKISFVDSELDTTFSTLNLIFDKLKSDVPQERASGANELSTTLTSLAREVSAEQFQRFSNSLNNKIFELIHGFTSSEKIGGILAVDTLISFYLSTEELPNQTSRLANYLRVLIPSSDIEVMRLAANTLGRLTVPGGTLTSDFVEFEVRTCIDWLTLTADNNSSSSKLEYRRHAALLIIKALADNSPYLLYPYVNSILDNIWVPLRDAKLIIRLDAAVALGKCLTIIQDRDPALGKQWFQRLFQGCTHGLSLNTNDSVHATLLVFRELLSLKAPYLRDKYDDIYKSTMKYKEYKFDVIRREVYAILPLLAAFDPAIFTKKYLDRIMVHYLRYLKNIDMNAANNSDKPFILVSIGDIAFEVGSSISPYMTLILDNIREGLRTKFKVRKQFEKDLFYCIGKLACALGPAFAKHLNKDLLNLMLNCPMSDHMQETLMILNEKIPSLESTVNSRILNLLSISLSGEKFIQSNQYDFNNQFSIEKARKSRNQSFMKKTGESNDDITDAQILIQCFKMLQLIHHQYSLTEFVRLITISYIEHEDSSVRKLAALTSCDLFIKDDICKQTSVHALHSVSEVLSKLLMIAITDPVAEIRLEILQHLGSNFDPQLAQPDNLRLLFMALNDEIFGIQLEAIKIIGRLSSVNPAYVVPSLRKTLLELLTQLKFSNMPKKKEESATLLCTLINSSDEVAKPYIDPILDVILPKCQDASSAVASTALKVLGELSVVGGKEMTRYLKELMPLIINTFQDQSNSFKRDAALTTLGQLAASSGYVVGPLLDYPELLGILINILKTENNPHIRRGTVRLIGILGALDPYKHREIEVTSNSKSSVEQNAPSIDIALLMQGVSPSNDEYYPTVVIHNLMKILNDPSLSIHHTAAIQAIMHIFQNLGLRCVSFLDQIIPGIILVMRSCPPSQLDFYFQQLGSLISIVKQHIRPHVEKIYGVIREFFPIIKLQITIISVIESISKALEGEFKRFVPETLTFFLDILENDQSNKRIVPIRILKSLVTFGPNLEDYSHLIMPIVVRMTEYSAGSLKKISIITLGRLAKNINLSEMSSRIVQALVRILNNGDRELTKATMNTLSLLLLQLGTDFVVFVPVINKALLRNRIQHSVYDQLVNKLLNNECLPTNIIFDKENEVPERKNYEDEMQVTKLPVNQNILKNAWYCSQQKTKEDWQEWIRRLSIQLLKESPSACLRSCSSLVSVYYPLARELFNASFSSCWVELQTSYQEDLIQALCKALSSSENPPEIYQMLLNLVEFMEHDDKPLPIPIHTLGKYAQKCHAFAKALHYKEVEFLEEPKNSTIEALISINNQLHQTDSAIGILKHAQQHNELQLKETWYEKLQRWEDALAAYNEKEAAGEDSVEVMMGKLRSLYALGEWEELSKLASEKWGTAKPEVKKAMAPLAAGAAWGLEQWDEIAQYTSVMKSQSPDKEFYDAILCLHRNNFKKAEVHIFNARDLLVTELSALVNESYNRAYNVVVRAQIIAELEEIIKYKKLPQNSDKRLTMRETWNTRLLGCQKNIDVWQRILRVRSLVIKPKEDAQVRIKFANLCRKSGRMALAKKVLNTLLEETDDPDHPNTAKASPPVVYAQLKYLWATGLQDEALKQLINFTSRMAHDLGLDPNNMIAQSVPQQSKRVPRHVEDYTKLLARCFLKQGEWRVCLQPKWRLSNPDSILGSYLLATHFDNTWYKAWHNWALANFEVISMLTSVSKKKQEGSDASSVTDINEFDNGMIGVNTFDAKEVHYSSNLIHRHVIPAIKGFFHSISLSESSSLQDALRLLTLWFTFGGIPEATQAMHEGFNLIQIGTWLEVLPQLISRIHQPNQIVSRSLLSLLSDLGKAHPQALVYPLMVAIKSESLSRQKAALSIIEKMRIHSPVLVDQAELVSHELIRMAVLWHEQWYEGLDDASRQFFGEHNTEKMFAALEPLYEMLKRGPETLREISFQNSFGRDLNDAYEWLMNYKKSKDVSNLNQAWDIYYNVFRKIGKQLPQLQTLELQHVSPKLLSAHDLELAVPGTRASGGKPIVKISKFEPVFSVISSKQRPRKFCIKGSDGKDYKYVLKGHEDIRQDSLVMQLFGLVNTLLQNDAECFRRHLDIQQYPAIPLSPKSGLLGWVPNSDTFHVLIREHREAKKIPLNIEHWVMLQMAPDYDNLTLLQKVEVFTYALNNTEGQDLYKVLWLKSRSSETWLERRTTYTRSLAVMSMTGYILGLGDRHPSNLMLDRITGKVIHIDFGDCFEAAILREKFPEKVPFRLTRMLTYAMEVSGIEGSFRITCENVMKVLRDNKGSLMAILEAFAFDPLINWGFDLPTKKIEEETGIQLPVMNANELLSNGAITEEEVQRVENEHKNAIRNARAMLVLKRITDKLTGNDIRRFNDLDVPEQVDKLIQQATSVENLCQHYIGWCPFW

SEQ ID NO: 784 - protein, 107 aa, Chlamydomonas reinhardtii
MSGDEGDGRDGNSNAREQDRFLPIANISRIMKKALPNNAKIAKDAKETVQECVSEFISFITSEASDKCQREKRKTINGDDLLWAMTTLGFEEYLEPLKLYLAKFREV

SEQ ID NO: 785 - protein, 1607 aa, Burkholderia cenocepacia J2315
MARAKPAQPLSAVPSPVGSGLDGNKKTVQRPPGPLYDGVPMNDHQQPLAAVPAAQGLYDPQNEHDACGVGFVAHIKGKKSHEIIQQGLKILENLDHRGAVGADPLMGDGAGILIQIPDAFYREEMAKQGVNLPPAGEYGVGMIFLPKENASRLACEQELERTVKAEGQVVLGWRDVPVDHAMPISPTVKASEPLIRQIFIGRGKDIMVTDALERKLYVIRKTASHRIQALKLKHGKEYFVPSMSARTVVYKGLLLAGQVGVYYRDLQDERVVSALALVHQRFSTNTFPAWELAHPYRMIAHNGEINTVKGNVNWLNARTGAIASHVLADDLPKLWPLIYPGQSDTASFDNCLELLVMAGYPLVHAVMMMIPEAWEQHTLMDENRRAFYEYHAAMMEPWDGPAAIAFTDGRQIGATLDRNGLRPARYIVTDDDLVIMASEAGTLPIPESKIVKKWRLQPGKMFLIDMEHGRIIDDKELKDNLANAKPYKSWIDAVRIKLDEIEPKAEEVAAGRTQGAALLDRQQAFGYTQEDLKFLMAPMAAQGEEAVGSMGNDSPLAVMSNKNKTLYHYFKQLFAQVTNPPIDPIRENMVMSLVSFIGPKPNLLDTNNINPPMRLEVSQPVLDFKDIAKIRAIDQYTGGKFSAYELNICYPVAWGKEGIEARLASLCAEAVDAVKSGYNILIVSDRKTDAEHVAIPALLATSAIHTHLVQQGLRTSTGLVVETGSARETHHFALLAGYGAEAVHPYLAMETLAKMAEGLPGDLSPEKAVYNFTKAVGKGLQKVMSKMGISTYMSYTGAQIFEALGLSSDLVEKYFKGTASKVGGIGLFEVAEEAIRLHRDAFGDNPVLRDMLDAGGEYAYRVRGEDHMWTPDSIAKLQHATRSNSYQTYKEYAHLINDQTKRHMTFRGLFEFKVEPTKAIPIDDVEPAKEIVKRFATGAMSLGSISTEAHATLAIAMNRIGGKSNTGEGGEDEKRYRNELRGIPIKSGETLKSVIGDEIVSDIALKDGDSLRSKIKQVASGRFGVTAEYLASADQIQIKMAQGAKPGEGGQLPGHKVSEYIGKLRYSVPGVGLISPPPHHDIYSIEDLAQLIHDLKNVNPSASISVKLVSEVGVGTVAAGVAKAKADHVVIAGHDGGTGASPLSSVKHAGTPWELGLAETQQTLVLNRLRGRIRVQADGQMKTGRDVVIGALLGADEFGFATAPLVVEGCIMMRKCHLNTCPVGVATQDPVLRAKFKGQPEHVVNYFFFVAEEVREIMAQLGVAKFDDLIGRADLLDTRKGIEHWKAKGLDFSRVFYQPEECEDVAPRHVDVQDHGLERALDHVLIEKAKAAIENGEHVSFIQPVRNVNRTVGAMLSGVIAKKHGHDGLADDAVHIQLKGTAGQSFGAFLAKGVTLDLVGDGNDYVGKGLSGGRIIIRPTNDFRGKSEENIICGNTVMYGAIEGEAFFRGVAGERFCVRNSGATAVVEGTGDHGCEYMTGGTVVVLGETGRNFAAGMSGGLAYIYDPEGTFAAKCNKSMVALEPVLQQAEQERTVDRALWHAGTTDEALLKGLVERHFQFTGSPRAKSLLENWDAARRQFVKVFPHEYKRALGEIGAKKAAKEVLAA

SEQ ID NO: 786 - protein, 1531 aa, Mycobacterium abscessus
MPHPATGLYNPAYEHDSCGVAMVVDMHGRRSRDIVDKAITALLNLEHRGAAGAEPNSGDGAGIMLQIPDKFFRAVLAEQGSFELPAEGSYASGIAFLPQGSKDAATACEAVEKIVEAEGLTVLGWREVPHDDSSLGALARDAMPTFRQLFIAGASGIDLERRVYVVRKRIEHELGNQGSGRGSLGEETVYFPSLSGRTFVYKGMLTTPQLRAFYLDLQDERVESALGIVHSRFSTNTFPSWPLAHPYRRVAHNGEINTVAGNENWMRAREALIKTDVFGDPAQLEKIFPICTRGASDTARFDEALELLHLGGRPLHHAVLMMIPEAWERHENMSAELRSFYEFHASLMEPWDGPASVCFTDGTIVGAVLDRNGLRPSRVWVTNDGLVVMASEAGVLDLDPSTVVQRTRLQPGRMFLVDTTQGRIVSDEEVKAELAAAEPYQRWLEEGLVRLEQLPDRPHQHMPHNRIVLRQQVFGYTYEEINLLVAPMARTGAEALGSMGTDTPIAVLSNRSRMLFDYFQQLFAQVTNPPLDAIREEVVTSLGGVIGPEGDLLHPTAESCHQILLPQPVLHNDELDKLIHLDPADTVNGRAHGFSSRVIRCLYPVAEGGAGLRTALESVRAEVSAAIAGGAQVIILSDRESDDLMAPIPSLLAVAAVHHHLVRERSRTKVGLVVEAGDAREVHHVAALVGFGAAAVNPYMAFESIEDLIDRGVITGVDRDKAIRNYIKAAGKGVLKVMSKMGISTLASYTGAQLFQAIGLSQELLDEYFTGLACPTGGIGLDEIAADVASRHNLAFLDRPEEWAHRELEVGGEYQWRREGEYHLFNPDTVFKLQHSTRTGQYSVFKEYTQLVDDQSERMASLRGLLKFKTGVRPPVPLDEVEPASEIVKRFSTGAMSFGSISAEAHETLAIAMNRLGGRSNSGEGGEDPRRFTPDENGDWRRSAIKQVASGRFGVTSHYLSNCTDIQIKMAQGAKPGEGGQLPAHKVYPWVAEVRHSTPGVGLISPPPHHDIYSIEDLAQLIHDLKNSNPQARIHVKLVSENGVGTVATGVSKAHADVVLISGHDGGTGATPLTSMKHAGAPWELGLAETQQTLLLNGLRDRIVVQVDGQLKTGRDVMIAMLLGGEEFGFATAPLVVSGCIMMRVCHLDTCPVGVATQNPVLRQRFNGKPEFVENFFLFIAEEVRELMAELGFRTVNEAVGQVGALDIERAVAHWKASKIDLTPVLTEPESAFMNQDLYCSGSQDHGLEKALDQQLIVMSREALDHGTPVKFETLITNVNRTVGTMLGHEVTKAYGGEGLPDDTIDITFTGSAGNSFGAFVPRGITLRLFGDANDYVGKGLSGGHIVVRPSREAPEGFVAEKNIIGGNVILFGATSGEAFLNGVVGERFAVRNSGAAAVVEGVGDHGCEYMTGGTVVVLGPTGRNFAAGMSGGVAYVYDPDKRLMDNLNDEMVDLDALDPDDQQVLRSLIEKHVAATDSAVGQRILADWSGHSDSFVKVMPRDYRRVLEAIADAELTGGDVNEAIMAAARG

SEQ ID NO: 787 - protein, 1521 aa, Bacillus licheniformis ATCC 14580
MTYNQLPKAQGLYRPEFEHDACGIGLYAHLKGLPTHDIVKKGLQMLCQLDHRGGQGSDPHTGDGAGIMMQIPDAFFKKVCADFNLPEKGRYGVGMIFFSKDDSGREKSEARINELIEQEGQTVLGWRTAPVNVGKIGTVAQESAPVVRQVFIGANEALKDNLAFERKLYIIRKQAENWAKEHEKTFYFVSLSSNTIVYKGLLTPEQVDAFYEDLQDEDFVSAFSLVHSRFSTNTFPSWERAHPNRYLIHNGEINTLRGNMNWMKAREQQFVSEAFGEDLPKVLPILDENGSDSSILDNAFEFFVLAGRKPAHAAMMLIPEPWNENPYMSKEKKAFYEYHSSLMEPWDGPTAISFTNGKQIGAILDRNGLRPARYYVTKDDYLIFSSEVGVIDVEQENILYKDRLDPGKMLLVDLEEGRIISDEEVKSEIAGEFPYQEWLSKELVHVSNDIEETEEKSVPDLLTRQKAFGFTYEDIHKYLIPVITEGKDPLGSMGHDVPLAVLSDRPQSLFNYFKQLFAQVTNPPIDAIREQIVTSTLTWLGAEGDILHPNESSCRRIKLYTPVLTNAQFNSLKGLVHKDFKSKTIHTLFTDDLKSGLEDMFKEADRAIAEGVTLLILSDRKMDGQKAPIPALLAVSALHQYLVRAGKRTKVSIIAQSGEAREVHHFAALIGYGADAIHPYLTYATYKQAIEDGALSISYEEAVTKYSKSVTEGVVKVMSKMGISTVQSYRGAQIFEAVGISKDVIDSYFTGTASQLGGIGLDTIAEEAKRRHREAYEDTFSETLDSGSDFQWRKGGEHHAFNPKTIHTLQWACRKGDYSLFKQYSKAADEERIGFLRNLFSFDENRKPLPLEEVESAESIVRRFKTGAMSFGSLSKEAHEALAIAMNRLGGKSNSGEGGEDPARFTPDANGDNRRSAIKQIASGRFGVKSHYLVNADELQIKMAQGAKPGEGGQLPGNKVYPWVANVRGSTPGVGLISPPPHHDIYSIEDLAQLIHDLKNANRDARISVKLVAKAGVGTIAAGVAKATADVIVISGYDGGTGASPKTSIKHTGLPWELGLAEAHQTLMMNGLRERVVLETDGKLMTGRDVVMAALLGAEEFGFATAPLVVLGCVMMRACHLDTCPVGVATQNPELRKKFMGDPDHIVNYMLFVAEEVRELMAQLGFRTVDEMVGRTDVLRVSERAKAHWKAGQLDLSSLLYQPEGTRTFRTPQNHKIDESLDVTQILPAVQSAVENGTPVEASFEIRNINRVTGAITGSEISKRYGEEGLPEDTITLRFTGSAGQSFGAFVPKGMTMYLTGDANDYIGKGLSGGKIAVKAPDEFNPAFRENVIVGNVAFYGATSGEAYINGLAGERFAVRNSGVSVVVEGIGDHGCEYMTGGRVAILGDVGKNFAAGMSGGIAYVYAEDKKAFKRKCNPEMIEFETLEAPEEIAELKTMIENHYKYTESSKAASILDHWEEAVGRFVKVIPKDFKQMIERIKEQKEAGLSDEEALMYAFEAGTKQKIEPSAAASSKEAVAQ

SEQ ID NO: 788 - protein, 157 aa, Brassica napus
MADSDNDSGGHKDGGGASSREQDRFLPIANVSRIMKKALPANAKISKDAKETVQECVSELISFVTGEASDKCQREKRKTINGDDLLWAMTTLGFEDYVEPLKVYLQKYREVEGERMTPGGRQGDKEGGGGSGGMYGGVVTMGHHHHQRHVYGGSGMN

SEQ ID NO: 789 - protein, 96 aa, Oryza sativa Japonica Group
MGNVAIGVGRRRRRWPEVEERLTQPRRLLRQLSDVDSGRLRRLIRSGDLAPCFDAAEDDAGLDEDCPICFYFYPSLNRSKCCGKGICTGEFKAIAV

SEQ ID NO: 790 - protein, 1482 aa, Chromobacterium violaceum ATCC 12472
MDRQSRLQGTLYKPEFEQDSCGFGLIAQLDDKPSHWLVATAISSLAKLTHRGAVAADGKSGDGCGLLFRKPDGFLREVAAEAGIALKSVYAAGLVFHHPDRATGERSLARLREHLEAQQLEVAGFRTVPVDTSACGETALASLPAISQVFVNCPFGMDELAFQRRLYMGRRLAEKANRGDDSCFYLPTLSPHTISYKGLVTPENLPRFFLDLADPRFESSLAVFHQRFSTNTWPQWKLAQPFRFLAHNGEINTVQGNRNWARARERIMASPHLDMDAVRPIVQTDGSDSMSLDNMLEGLLMGGIPLFRALRLLVPPAWQNVDSTDKDLRAFYEFNSMHMEPWDGPAGIVLTDGRYAACMLDRNGLRPARWVLTRDNILTIASEVGVWDYRAQDVVRKGRVKPGQLFAADLLNGELLMPEDIDAQLKSAKPYRQWIKDSAKYLELSIEDDAGVEPLSKEELARLQKLFNLSREERDQILRVLAADGQEAVGSMGDDTPMAVLSQKVRAPFDYLRQQFAQVTNPPIDPIREAVVMSLNTVFGPERNMFEESAEHAKRLEVRSPVLSHEKFTRVTTRPEPYLKATNFDLCYDPAETTLREAISCLTRHVVEAVQEGTVVVVLSDRHATGERLPIHALFATGAVHHALIDAGLRCKTNIVVETAAVRDAHQMACVLGYGATAVYPYLAYQTIIDLVNSGEVPLKANEALQHYRKGINKGLLKVLSKMGISTIASYRGAQLFEAVGIHQEVIELCLKGTVSRVSGANFADFEAEQKKLAKLAFNPMRGLNQGGLLKYVHGEEYHAYNPDVVQLLQKAVQNGDYGVYLQYAETVNTRPVAMLRDLMQLKLAGEPIPLDEVEPVEAIVKRFDSAGMSLGALSPEAHEALAIAMNRLGGRSNSGEGGEDPARYGTEKMSKIKQVASGRFGVTPHYLVNAEVLQIKVAQGAKPGEGGQLPGDKVSGLIARLRHAKEGVSLISPPPHHDIYSIEDLAQLIFDLKQVNPSALVSVKLVAEPGVGTVAAGVAKAYADLITISGYDGGTGASPLTSVKYAGSPWELGLSEAQQVLRANGLRGRVRVQTDGGLKTGLDVVKAAILGAESFGFGTGPMVALGCKYLRICHLNNCATGVATQEIKLRSKYFTGLPDMVVNYFLFIARETREWMAKLGVRSMEELIGRMDLMDVLEGESERQGRLDLSPLLSQGTVPDSEPRFCVSDSNPSFDKGELAERILQEALPAIHNKQMLELAYPIENTHRSIGARLSGEIARVHGAAGLPFGCLKVKFTGSAGQSFGVWNAAGLHLELEGDANDYVGKGMAGGRVTIYPPKDAGYQASESIIIGNTCLYGATGGQLFAAGIAGERFGVRNSGALAVIEGAGDHCCEYMTGGTVIVLGETGYNFGAGMTGGFAFVYDPNEKFAYRYNNELIDIHLINGEAMGMYRAYLLEKIAKHVELTGSETGRAMLQNFDDYVDYFWLVKPKAAKLESLLKD

SEQ ID NO: 791 - protein, 307 aa, Gibberella zeae PH-1
MDYSQYQQQGQNTNSGYTNSAAANNITSPTNNISQHPVQSSPIIASQQQQGQTQGHGMYQPPYGVPQQGMQQVHYGMPGIQAAAMAATAAASGANYPYMPSDPNMPQSSPRTGANAKNDGRQSPRMNSMSQLPGRRMSQVTSPGVATAPMMSHAGARPGVAPPQMPTAQMQHPQSPDMPAASGAEESPLYVNAKQFHRILKRRVARQKLEEQLRLTSKGRKPYLHESRHNHAMRRPRGPGGRFLTAEEVAAMERDGEKSADGKDNSAAENSGNAGTKRKSEAGSATSNKKAKTDTASPGDDEDEDEG

SEQ ID NO: 792 - protein, 2168 aa, Ustilago maydis 521
MAPVATSHENTRQVRFVDKLNVAEQVAVHEEAISSDSLEASGFDEVERSTHFWAGSLPAAQGLYDPDNEKDACGVGFICQIKGKPAHKIVSEARFLLCNMTHRGAVGADARDGDGAGVMTGIPDTFFRRESERDLGVKLPAQGQYAVGNLFFNPKDDNARAEHVHTFTTIADKLGLRVLGWRDVPVDNSILGPASKSKEPKIMQPFVVLKDHYGSGSTPLETSKPFDEQYFGRQLYVLRKHATHTIGLQNWFYICSLSPTNIIYKGQLSPVQVYNYYYDLNNVHYASHFALVHSRFSTNTFPSWDRAQPMRWAAHNGEINTIRGNKNWMRAREGLLKSETFGDELDLLYPIIEGGGSDSAAFDNVLELLVINKVLTLPQAVMMMIPEAWQGSADHMEPEKVAFYQWAACLMEPWDGPALFTFADGRYCGANLDRNGLRPCRYYITDDDIMICASEVGTVTIDPKTVIAKGRLQPGKMLLVDTVEGRVVEDRELKLSTAQRADFAAWLENQLLRLPEIVDTVRRNTANAIAPVLDDERLSTDPKLLAFGYTAEQINLLMLPMVADGKEALGSMGNDAPLACISSAPRVIYDYFRQLFAQVTNPPIDPIRESVVMSLEQYVGPEGNLLEMKPEQCHRLLLPSPILSIDQLNAIKQIDTVHSDWSAKTIDITYDKGEGIIGYERTLDRICSETSQAIRDGYRVVVLSDRAVGADRVAISSLVACGGVHHHLIRNKERSRIALMIESAEAREVHHMCVLLGYGADAICPWLAMEAILKVSREGLVKGDLSPNQLIDNWTHAVDNGILKVMSKMGISTLASYKGAQIFEALGLASDVVDRCFAGTASRVSGSDFTLLAMDALEFHDRGYPSRDTISVPGLPESGEYHYRDGGEAHINDPMAIAHLQDAARERNQASWDAYSKASHNAVKATSLRGLLDFDYTKSRAIPIDQVEPWTEIVQRFCTGAMSYGSISMEAHSALAIAMNRLGGKSNTGEGGEDAERSIPLPNGDSLRSKIKQIASGRFGVTSNYLADSDELQIKMAQGAKPGEGGELPGHKVSPSIARTRHSTAGVGLISPPPHHDIYSIEDLKQLIYDLKCANPRARVSVKLVSEVGVGIVASGVAKAKADHILISGHDGGTGASRWTGIKYAGLPWELGLAETHQTLVLNDLRGRVTVQTDGQIRTGRDVAIACLLGAEEFGFATTPLIALGCIMLRKCHLNTCAAGIATQDPELREKFAGQPESVINFFYYLAEELRSYMAKLGLRTINEMVGRSDLLKVDDSLRTPKTANLDLSAILKPAHEMRPGAATYKVRQQDHKLYVRLDNKFIDEAEPALTQGLPVQIDCDVVNTDRALGTTLSYRVSKLYGEEGLPTDTIHINAKGSAGQSFGAFLAPGITIELEGDANDYSGKGLSGGRLIVYPPKVSPFKAEENVIVGNTTLMGATSGFAYFRGLAAERFAVRNSGAHAVVEGVGDHGCEYQTGGRVVVLGPTGRNFAAGMSGGIAYVLDMNRDFRSKCNTEMVELGPVKDPKEIAELRNLIENHRHYTGSTVADHVLHDFHHILPRFVRVMPLDYKRVLEEEAAKAAVEKKRSSHVDLLGTLSRHGSQVEILPQEDNAKDNAADGVREIPAAKPVEPAVVDVEDSMVDDETAKARLNKLDKTRGFMKYKRLGEHYRNPTKRVKDYKELSTRLSEAELKYQTARCMDCGVPFCQGDTGCPISNIIPKWNDLVFKGQWEDALNRLLMTNNFPEFTGRVCPAPCEGACVLGIIEQPVGIKSIECAIIDKGFEEGWMVPRPPKVRTGKTVAVIGSGPAGLATADQLNKAGHSVTVYERADRIGGLLMYGIPNMKLDKGVVQRRVDLMAAEGINFVTSTHVGRDVDPKQLHAQNDAIVYAVGATWPRDLKVPGREADGVHFAMDFLAPNTKSLLDSGLQDGHYLSAKGKDVIVIGGGDTGCDAQATALRHGAKSIVNFELLPQPPNERAKGNPWPQFPRVFKVDYGHAEVAAQWGSDPREYCISTTSFEKDADGKLIALNTIKVNWELDASGKWQMNKIPGSEKRWPCDLCLLSLGFLGPENDAVTALGLEQDGRSNIKADDQKGKSPYKTNVERVYTAGDCRRGQSLIVWGIQEGRACAAQVDRDLMGNTRLPWAGSIKKREFLPITGAEKTQVAATA

SEQ ID NO: 793 - protein, 155 aa, Cryptococcus neoformans var. neoformans JEC21
MSEHTNLKSLAPLGNQPEPSANSAGVGPSKPFTEAQVEEFREQDRWLPIANVARIMKSSLPTSAKVSKEAKECVQECVSEFISFITSEAAEKCLNEKRKTLNGEDILTSMRALGFDNYEGVLRVYLAKYRDVTRTGEATSWRHHFDQRPCRGDKV

SEQ ID NO: 794 - protein, 513 aa, Nitrosococcus oceani C-27
MEIMAKAKIADRIPKQLNSEPGEYYWCACGRSKKQPFCDGSHVGTGIKPVAFMVEEGASEWLCMCKQTGNAPYCDGTHKTLPPDETELEIPDRRPKAESPAPVNTPEEPTVEFIHSLAKHGLKHYGQQGKMDAMGVPRSRLPGWEDIQILTAQLARMPLQEDAPVDTGLTIGPNAKRPLHLALPLFVSDMSFGALSEEAKTALARGAELAGTGIASGEGGMLPAEQQANSRYMFELASAKFGYSESLLTRIQAFHFKAGQAAKTGTGGHLPGVKVSEDIASVRGIPVGKDAVSPSIFPNLKAPHDFKEFADHVREVSGGIPIGFKMSAQHIEKDIDFALEASADYIILDGRGGGTGAAPLLFRDNIAVPTIPALARARRHLHAVGREDVTLIITGGLRTPDDFIKALCLGADGIAVANSAIQAIGCVGARICHTNNCPTGIATQKEELRARLNVDVAAERLARFFSASTELMKVMARACGHTKLNDFNTDDITSWKKPIAELAGIRYAGLAAE

SEQ ID NO: 795 - protein, 360 aa, Oryza sativa
  misc_feature (227)..(227): Xaa can be any naturally occurring amino acid
  misc_feature (240)..(240): Xaa can be any naturally occurring amino acid
AANAAWHMGEWDHMAEYVSRLDDGDENKLRILGNTTASGDGSSNGAFFRAVLSVRCKKYEEARVYVERARRCLATELAALVLESYERAYNNMVRVQQLSELEEVIDYCTLPMESPIADSRRELIRNMWNERIKGTKRNVEVWQALLAVRELVLPPNEDRDTWIKFAKLCWKSGRISQAKSTLVKLLQFDPESSPELTLYHGHPQVVLAYLKYQYAVGDELKRRDAFXRLQDLSVQLATAXNSYSGTLASQVATSNAGVPLIARVYLTLASWKRALSPGLDDDSIQEILVSYKNATLNAKDWGKAWHLWALFNTEVMSRYTLRGRPDIAGKYVVAAVTGYFYSIACASTTKGVDDSLQSRR

SEQ ID NO: 796 - protein, 87 aa, Medicago truncatula
MRGHQMILWQRRQWSIDHGSRVAETATSYANSVEAEDRDELSSMSQSNDIDGSFQSATYPIVPESYEEHMMLDVAVFIAEGRAMSDG

SEQ ID NO: 797 - protein, 2423 aa, Gibberella zeae PH-1
MAQAQQIALERLEQVSRGLKSKVSDDLRKRSAVQLRELVVICHRDLSPELFQSFYNAVNNRITQLITHGSDSSERLGGIYALDALIDFEGVDVAVKYTRFTQNLKTILRGKDINPMQPAAIALGKLCRPGGSMISEVVDSEVNTALEWLQNDRVEERRYSAVLVLRELARSAPTLMYQYIPTIFDWIWIGLRDSRQLIRATSAETVSACFRILRERDQEMKQRWMSNIYNEAKQGLKVNTVESIHGSLLVLKELLEQGAMYMQEHYQQACEIVFKHKDHRDPTIRKTVVLLIPDLASYSPADFAHTWLHKFMVYLSGMLKKDKERNDAFLAIGNIANSVKSAIAPYLDGVLIYVREGLSVQSRKRGSVDPVFDCISRLAVAVGQTLSKYMEALLDPIFACDLTPKLTQALVDMAFYIPPVKPTIQERLLDMLSVVLCGEPFKPLGAPHPNTLTSVPIIPKDAKDPLAYEHRRAEVKLALNTLGSFDFSGHVLNEFVRDVAIKYVEDEDPEIREAAALTCCQLYVRDPIVNQTSYHALQVVGDVIEKLLTVGVSDPEPNIRRTVLAALDERFDRHLAKAENIRILFFALNDEVFSIREVAISIIGRLARYNPAYVIPSLRKTLIQLLTELEFSDVARNKEESAKLLSLLVQNAQSLIKPYVEPMISVLLPKAKDPNPSVAATILKAIGELATVGGEDMMPYKDRLMPLILDALQDQSSNAKREAALHALGQLASNSGYVILPYIEYPQLLEILQSIIRTEGQRVPLRQETIKLMGILGALDPYKHQAEERTPDSRNGEATQLTDISLMMTGLTPSNKEYFPTVVINALLQILKDSSLVQHHAAVIEAIMNIFRTLGLECVSFLDRIIPAFLQVIRSATSTRLESYFNQLATLVSIVRQHIRNYLPSIVEILQEYWHTSPSLQTTILSLVEAISRSLEGEFKIYLAGLLPLMLGVLDKDNSAKRTPSERVMHAFLVFGASAEEYMHLIIPVIVRTFEKQGQPTFIRKQAIDTIGKISRQVNLNDYAAKIIHPLTRVLDMGEPVLRTAALDTLCALIQQLGKDYLHFMGTVNKTINQHQIQHSNYELLVSKLQKGEVLPQDLSSGAGFGDGADEATFADQGTKKLEMNAIHLKAAWDTKGKSTKEDWQEWLRRFSTTLLTESPNHALRACASLASVYLPLARELFNSAFVSCWSELYEQFQDELIQNIESAIKSENVPPDLLGLLLNLAEFMEHDDKALPIDIRVLGREAARCHAYAKALHYKELEFLQDQSSGAVEALIVINNQLQQSDAAIGILRKAQLYKEGIQLRETWFEKLERWEEALAFYNKREEEVPEDQAIPVDIVMGKMRCLHALGEWEALASLTGSTWANSTPEVQRMIAPLATAAAWGLNKWDSMDNYLSSLKRYSPDRSFFGAILALHRNQFREAIACVTQAREGLDTELSALVSESYNRAYQVVVRVQMLAELEELIVYKQCDEKKQAIMRRTWETRLKGCQRNVEVWQRMLRLRAIVIAPTENMHMWIKFANLCRKSGRMGLAEKSLKQLIGTDAPLESMIPYWNDQRQPGPGPRSAPAAQVIYAVLKYQWETGQQAAKKTNIPEKTLYCLRKFTNDAAQRLDITRAHLNAQVGSEVNITGDYGFQNPMDPTIMSPQTQRALYEQTVLLAKCYLRQGEWLIALNKDDWQYTQVQDILTSYSQATKYNPRWYKAWHAWALANFEIVQTLTAQNEGTLSRADQSMVIEHVVPAVKGFFKSIALSEGSSLQDTLRLLTLWFTHGGSADVTSAVTEGFANVSVDTWLEVIPQLIARINQPNKRVQQSVHNLLADVGRAHPQALVYPLTVAMKSWQNTRRSRSAAQIMDSMRQHSANLVAQADIVSHELIRVAVLWHELWHEGLEEASRLYFGDHNIEGMFATLEPLHELLERGPETLREISFAQAFGRDLKEAQDWCRQYETSQDVNDLNQAWDLYYQVFRRISRQLPQVTTLELTYCSPKLLNAKNLDLAVPGTYKSGQPIVRIMSFDTTFSVINSKQRPRKLNVNGSDGKSYAFLLKGHEDIRQDERVMQLFGLCNTLLSHDSECFKRHLNIQRYPAIPLSQNSGLLGWVPNSDTLHVLIREYRESRKILLNIEHRIMLQMAPDYDNLTLMQKVEVFGYALDNTTGQDLYRVLWLKSKSSEAWLERRTNYTRSLGVMSMVGYILGLGDRHPSNLMLDRVTGKIIHIDFGDCFEVAMKREKYPERVPFRLTRMLTYAMEVSNIEGSFRITCENVMRVLRDNKESVMAVLEAFIHDPLLTWRLTNAPSPAGPNFRNDRDTAMPVPGGVRARRQSILDSDVAPSELLNAPEPSIQTRARARTNSSAGVPETNGGAPEVESQNARAVEVLDRVQQKLTGRDFKNNEELDVINQVNKLIMEATKLENLCQHYIGWCSFW

SEQ ID NO: 798 - protein, 135 aa, Medicago truncatula
MVPNFVFAESSTSIIEHDEIVSLKTRVPIGRAILIPISIKDLACVIAALDERQQMSGESSIRSNNENTSSFNMPPGSRRFYNRIGRDMVSYSAAENLDEGAPDDAMETTSSHGQWSISHGFETTTSYANSVDAED

SEQ ID NO: 799 - protein, 430 aa, Arabidopsis thaliana
MGNKLGRKRQVVEERYTKPQGLYVNKDVDVKKLRKLIVESKLAPCYPGDDESCHDLEECPICFLYYPSLNRSRCCMKSICTECFLQMKNPNSARPTQKFLINLMGFFPFVSSLTFMRCPFCKTPNYAVEYRGVKSKEEKGIEQVEEQRVIEAKIRMRQKEMQDDEEKMQKRLESCSSSTSAMTGEMEYGSTSGFLFVPWFAAISYNSLMDDGEIAPSQNASVVRQHSRPRGNREDEVDVDLEELMVMEAIWLSVQETGTQRNSASGEITSSRQYVTDNHSYVSSPPRVTPIVEPATPSSSSGGLSCAISALAERQMVGESSSHNHNHNVNVSSYSMLPGNCDSYYDIEQEVDGIDNHHHHRHHYEMGETGSSNSYVSSYMTGEGFHNFPPPPPLVIVPESFEEQMMMAMAVSMAEVHATTTCAPTEVTWQ

SEQ ID NO: 800 - protein, 1505 aa, Propionibacterium acnes KPA171202
MIFGHHPRQGLYDPQFEHDACGVAFVATMTGVASHKIVEQGLEALRNLDHRGATGADPAAGDGAGILVQVPDAFLRRTTGIRLPEPGSYAVGLAFMPVDEAQRARARAAIELIAADEGIKVLGWREVPVHTHTLSEISLGTMPHFEHLLIRARDGRVGMDLERLAFVLRRRAQHEAGVYFASLSSRTLVYKGMLTTHQLEEVFPELHDTDLSSAVALVHSRFSTNTFPSWELAHPYRLIAHNGEINTVRGNRSWMQAREALLQSDLIPGDLARLYPICTPSGSDSASFDEVLELLHLGGRSLPHAVLMMIPEAWQENTEMSQELRDFYEFHSFLMEPWDGPACVIFTDGNQIGAVLDRNGLRPARYWVTDDGLVVFASESGVLDLPDAHVVEKGRLKPGRMFLVDLTEHRVVDDLEIKARLASAKPYGEWLDQGRIDLDDLPERTHIIHSHASVTRRQQLFGYTSEELKMLVAPMANQGVEATGAMGTDTPLAVLSNRPRMLWDYFSQLFAQVTNPPLDAIREELVTSLTGTIGPEANLLEPGPESCRQVVVNYPIVDSDQLAKIIHIDADGEHPDRKTHVVRGLFVVEEGGEGLRRRIEEIRAEVSEAIAEGTTIIVLSDRHATRELAPIPSLLLTSAIHHHLVREKTRTRAGLVVEAGDVREVHHVALLMGYGASAVNPYLLFESAEDMARREVWVSTDPETAIHNVYKALGKGVLKTMSKMGVSTISSYTGAQIFEATGLSQELIDEYFTGTTSRIAGVGLTEIAQEILARHLSAYPETGVRLAHRTLKPGGHYQWRREGEQHLVDPESIFRLQLAARTNDYEQFRRYTDHINDNSTRLMTLRSLLEFRHDRPAVPLAEVEPANEIVKRFSTGAMSYGSISIEAHQTLAIAMNRIGGKSNTGEGGEDPERLYDPERRSAIKQVASGRFGVTSEYLVNADDIQIKMAQGAKPGEGGQLPGSKVYPWVAKTRHSTPGVGLISPPPHHDIYSIEDLKQLIHDLKCVNPRARIHVKLVAETGVGTVAAGVSKAKADVVLISGHDGGTGAAPLTSIKHAGGPWELGLAEAQQTLLLNGLRDRIVVQCDGQLKTGRDVVVAALLGAEEFGFATTALIVEGCVMMRKCHTDTCPVGVATQNPELREKFAGDPDHVVNFMMMMAEQTREILAELGFRSIDEAVGHVEALDTRKAITHWKARGLDLSPILHQVDLPHGSPLRHVRDQDHDLETSLDMKLIDMCTEALTNGTPVRQEVSIRNVDRTVGTMLGSRVTVATQGKGLPDNTIDLTFTGTAGQSFGAFVPRGMTMRLIGDANDYVGKGLSGGRVIVAPPLKTPFQPRDQIVAGNVVGYGATSGEILLCGQAGERFCVRNSGVTAVVEGVGDHGCEYMTGGEVLVLGAIGRNFAAGMSGGMAWVRNLDVSRLNADMVDALPMEQADVDRVTELLELHQTETGSTLAGEILAQGAGGIRESFMKVLPRDYATMMKAMVDAEEHGLDENETTFMEVSHG

SEQ ID NO: 801 - protein, 409 aa, Ochromonas danica
YSIEDLAHVIYDLHYINPRAAVSVKLVSEEGIGTVASGVAKAGADIIQISGHDGGTGASPAASIKHAGSPWELGLVEAHSVLRKNGLRDRVLLRADGGLKSGWDVVMAAAMGAEEYGFGTIALIAEGCIMARICHTNKCPVGVTTQNEALRKRFVGTPEHVVTFFQFVAEEVRHILAKLGYRSLEEIIGRPGLLQPRKSLSLRKVSRLDVSYLLTSLTCMPETGENFCDVDIDRSWLEHKSVETKRKESGVITVDERLLSDALMQKAINEHDKYNRAYHLVNTDRSAFARISGVLTEKYGDNGFEGSLEFDLTGAAGQSFGAFLSRGMDLNLKGYANDYVGKGMAGGVISIRAPEEELIQTKRSLALAGNTLLYGATGGKLFIGGRVGERFAVRNSGGLAVVEGMGDHG

SEQ ID NO: 802 - protein, 1532 aa, Synechococcus sp. WH 7805
MSHPTGSLWPYSDSAAPEAVAGEKDACGVGFLAQLSGETSHWVLQQALRGLGCMEHRGGCGGDGDSGDGAGVLCQIPWTYLKAVWPEATSARGLGMMFMPQDPERRELARRFCNEEAEALGLISAGWRAVPVDPSVLGPMARDTAPVIEQWSLAGGPDGDAFEALLLRLRRRIGARSRKAWGFEGSRDLYVASLSSRTVVYKGMVRSEVLAQYYADLRDPRFEVSFAVYHRRFSTNTLPRWPLAQPMRLLGHNGEINTLLGNLNWAKASEASLADVWGEAADDLNPVVNPAFSDSANLDATLELMVRSGRSITDSLITLVPEAFRNQPDLEDRPEVTAMYEFNAGIQEPWDGPALLVFADGKRVGATLDRNGLRPARWCTTADGFVIMGSETGVVDLRGKTVVQKGRLGPGQMVAVDLENGQLLDNWTVKEDAAGRFPYGDWLQQHRRSVAAQPWTQERQIGELDLLRLQTAMGFTAEDFDLVIEDMAGLGKEPTYCMGDDIPLAVLSDKPHLLYDYFKQRFAQVTNPPIDPLREKLVMSLEMHLGERRPALKPQAEAAAVIHLDTPVLNEAELAAIGEQGLPVATLSTQVTVEACAGGLSSALQGLCQAAEEAVRGGAQVLVLSDRVDGSGAAAQLTATSVAMPALLAVGAVHHHLLRQKLRLRCSLVIDTAQCWSTHHMACLIGYGASAVCPWLTWETTRHWLAHPKTQKRIEQGKLPALDANKVQENVRLSLENGLRKILSKIGISLLASYHGAQIFEAIGLGADVIDTAFTGTTSRVAGMTLAELANETLSLHAKAFPELNRSKLEFMGFVQYRTGGEYHLNSPDMAKALHAAVKTGPGYDHFSTYKTLLENRPVTALRDLLEFKLAPAPLPLDQVESAESLCKRFCTGGMSLGALSREAHEVLAVAMNRIGGKSNSGEGGEDPARFQILHDVDADGRSQAFPSIGGLRNGDTACSAIKQIASGRFGVTAEYLRSGKQLEIKVAQGAKPGEGGQLPGPKVDQYIAWLRNSKPGVALISPPPHHDIYSIEDLAQLIHDLHQVHPKAPVSVKLVAEIGIGTIAAGVAKANADVIQISGHDGGTGASPLSSIKHAGSPWELGLTEVHRSLLENGLRDRVLLRADGGLKTGWDVVIAALLGAEEYGFGSVAMIAEGCIMARVCHTNNCPVGVATQKEALRKRFTGVPEHVVNFFWYVAEEVRQLLSILGVAKIEDLIGRSDLLQPRAVDLAKTRGVDLSSLLAPIQGSEDRSWLRHSAEAHGNGPILEDELLADAELMEAVERHESLSRTITIINTDRSVGARLAGEIAQRHGNRGFDGQLNLTFQGAAGQSFGAFLVKGMNVRLEGEANDYVGKGMNSGRISLVPSDGCSNPGDQVILGNTCLYGATGGELFALGRAGERFGVRNSGARTVVEGAGDHCCEYMTGGVVVVLGGTGRNVGAGMTGGVTFLLDEGDRVLPRVNPEIVEVCSLTTAQQESTLKELLEAHVAATGSAKASALLADWAAAKTRFKVLIPPSERAVMGLVDQQAVAA

SEQ ID NO: 803 - protein, 1561 aa, Azoarcus sp. EbN1
MDLPQKQGLYDPANEHDACGVGFIAHIKGSKSHEIITQGLEILKNLDHRGAVGADELQGDGAGILIQIPDALYREDMAKQGVTLPPAGEYGIGMVFLPKEQASRLACEEEIRRAVRAEGQVVLGWRDVPVNPDMPMSPTVKAKEPVMRQVFIGRGPDVTVTDALERKLYVIRRRAANAVNALHLKHGKEFYVVSMSARTINYKGLLLATQVGEYYDDLTDPRAVSALALVHQRFSTNTFPKWNLAHPFRYIAHNGEINTLRGNYNWMRAREKGVSSPLLGADLEKIWPLIYPGQSDSASFDNALELLVMGGYSLAHAMMMMIPEAWESHTLMDERRRAFYEYHAAMMEPWDGPAAVAFTDGRQIGATLDRNGLRPARYLVTDDDFVVMASESGVLPIPDSKIVKKWRLQPGKMFMIDLEQGRIIDDRELKESLATAKPYREWIRRINIKFDELQAPADAGAPQCAASVLDRQQAFGYTQEDIKFILDPMGKTGEEATGSMGNDSPLAVLSAKEKTLYSYFRQLFAQVTNPPIDPIREQLVMSLVSFIGPRPNLLEINEINPPYRLEVTQPVLDFADMAKIRNIAAYADSRFRSTELDVCYPAEWGKEGVEARLATLCAEAEDAVLQGFNILIVSDRKIDAQTAAIPALLATSAIHQHLVTKGLRTRAGLVVETGTAREVHHFAVLAGYGAEAVHPYLAMETLQQLAAQSPNPAEAADKAIKHFVKAIGKGLMKVMSKMGISTYMSYTGAQIFEAVGLQQALCDKYFTGTTSQVEGIGVFEVMEEALRLHKRAFGDDPVLVDMLDAGGDYAYRVRGDEHMWTPDAIAKLQHATRSGKTDTYKEYAQLINDQTRRHMTLRGLFEIKPAAAPVPLDEVEPAKEIVKRFATGAMSLGSISTEAHTTLAVAMNRIGGKSNTGEGGEDPMRFKPVTQAMRMSQIIGDGRIARDLELKAGDSLRSAIKQVASGRFGVTAEYLVNADQIQIKMAQGAKPGEGGQLPGHKVSEYIGFLRHSVPGVGLISPPPHHDIYSIEDLAQLIHDLKNANPAASISVKLVSEIGVGTVAAGVAKAKADHVVIAGHDGGTGASPWSSIKHAGSPWELGLAETQQTLVLNRLRSRIRVQVDGQMKTGRDVVVGALLGADEFGFATAPLVVGGCIMMRKCHLNTCPVGVATQDPELRKRFTGQPEHVVNYFFFVAEEVRELMAELGIRRFDELIGRVDLLDMKKGIEHWKARGLDYSRIFHRPDVPASVSRRQVETQDHGLEKALDNHLVELARPALERGETVRIELPVRNINRTVGAMLSGRVAAKYGHAGLPDDTVHVTLTGTAGQSFAAFLARGVTLELVGEGNDYVGKGLSGGRVIVRPQSSFRGASTENIIIGNTVLYGAIEGEAYFSGVGGERFAVRNSGATAVVEGVGDHGCEYMTGGTVVVLGPTGRNFAAGMSGGVAYVLDADGTFEQRCNMAQVALEPVPEEIEARKGSESGDDLESHGRVDIDHLEMGDELILKGLIERHVRYTGSAHAREIIENWTAWRCKFVKVMPHEYRRALAEMAAQKQKQLEAA

SEQ ID NO: 804 - protein, 441 aa, Bradyrhizobium sp. BTAi1
MSVPPHRTPPRFSATFNPNVIAEIQRAAATGIYDIRGGGAKRALPHFDDLLFLGASISRYPLEGYREKCGTDVTLGTRFARKPIKLKIPVTVAGMSFGSLSGPAKEALGRGASAAGTSTTTGDGGMTPEERGHSSILVYQYLPSRYGMNPDDLRKADAIEIVIGQGAKPGGGGMLLGQKISPRVAKMRTLPEGIDQRSACRHPDWTGPDDLEIKIEELREITDWEKPIYVKVGASRPYYDTALAAKSGADVIVLDGMQGGTAATQDVFIEHVGLPTLAAIRPAVQALQDLGLHRKLQLIVSGGIRTGADVAKALALGADAVSIGTAALIALGDNDPQWEAEYQKLGTTAGAYDDWQEGLDPAGITTQDPVLAARLDPVKAGRRLANYLSVLTLEAQTIARACGKSHLHNLEPEDLVALTIEAAAMAGVPLAGTNWIPGRDK

SEQ ID NO: 805 - protein, 215 aa, Vitis riparia
MMPMTMAEYHLAPPSQLELVGHSIVQSQFLGVNVARMALPIEMAEEPVYVNAKQYHGILRRRQSRAKAELEKKLIKVRKPYLHESRHQHAMRRARGCGGRFLNTKKLDSNASYDMPDKGSDPDVNLSTRPISSSVSESLPFNSSRNEDSPTSHLDARGPSVQELHNRQTSSMEMATSLLSTQPGISVGRTYHSLKMMIGVERRRPRKAASIREFW

SEQ ID NO: 806 - protein, 334 aa, Schizosaccharomyces pombe
MNPYEPVEGLYVNAKQYHRILKRREARAKLEERLRGVQTTKKPYLHESRHKHAMRRPRGPGGRFLTADKVSKLRAQEAAEAAANGGSTGDDVNATNANDATVPATVSSEVTHTSEGYADSNDSRPSSISNSSESPAPINSATASMSPANNTSGNNITSPNVRGELDMSGNIAMSGGPTNTASTSGPVPHDMTVLPQTDSNTSNLMSSGSQLGSFATASTNGNNSTTTTTSSAAHPGSFHKGTNDYSSTLAGNEHSAFPGLDVYHDDSVSAGAAFIPHNPMDSIDHLDVNDPTATGLPVLPASDIDPLNLTGNTQDSMIIGQQTYPSHGSSGTMK

SEQ ID NO: 807 - protein, 492 aa, marine gamma proteobacterium HTCC2080
MQVIEFSALLMATLILVGVVTVVVVYIIDVTQSQQAIRKNYPVIGRFRYLFEHMGVFFRQYFFAMDREELPFNRAQRGWIARAAKDIDHTIAFGSTKPIHTPGDILFLNSAFPKLDEETQQSAKTPLCFGRGYARAPYKTHSVFHVSAMSYGALSAPAIQALSMGAAKAGILLNTGEGGLAPFHLKGQCDLVFQIGTAKYGVRDTDGTLSDDKLEEVAAHASVKMFEIKLSQGAKPGKGGILPAEKVTEVIASTRGIPMGQDSLSPNRHIDIGSVNDLLSMIHRVREVTGKPVGIKFVLGQPEWLDDFCKAIQTQGLDYAPDFVTVDSADGGTGAAPQSLMDNVGLPADSSLPWVVDKLIEYGLRERIKVMASGKMSTPSGVAAALCLGADSVNTARGFMFALGCIQALQCNKNTCPTGITTHDPKLQKGLDPELKAVRVANYARNLLHEVEVVAHSCGVLNPYELGREHAYLVTANGLPQRLTDRYPNTAT

SEQ ID NO: 808 - protein, 511 aa, Archaeoglobus fulgidus DSM 4304
MMLEGEFHTHMLPEFMIERRQDRCIRCRVCERQCGFNVHWYDEEMDMMREDEMKCVGCQRCAVMCPTNALVVKPHPGNYKPNANWTRERLQDLKKQAETGGVLLTGSGNDKPYRIYWDHIVLNASQVTNPSIDPLREPMELRTFLGRKQDRLEFKYSEDFEDIEITTELYPNVQIETPIVFSAMSYGAISYQAFKSLAMAASEFGTLFNTGEGGLPKELRKYGKNAIVQCASGRFGVDPEYLNVAAVVEIKIGQGAKPGIGGHLPGEKVTLPISVTRMIPEGTDALSPAPQHDIYSIEDLSMLIYALKEATNYEKPVSVKIAAVHNVAAIASGMVRAGADIIAIDGLRGGTGAAPKMIRDNVGIPVELALAAVDQRLRDEGIRNKASILVAGGFRCSADVVKAIALGADAVYIGTPALVAMGCTLCQKCHTGICNWGICTQDPYLAKRLNPEITAKRLVNLLRAWSHEIKEMLGGMGINAIESLRGNREQLRGVGLEDWELEVLGIKGAGE

SEQ ID NO: 809 - protein, 2517 aa, Debaryomyces hansenii CBS767
MSTTQLQIVDGIALTQIFNGLKSNKEEERNRYALELRNYLASIARDLSPEQFNRYNNDINKTIFEFLHSNETSEKLGGIAALNSLIDFDSGVGEENATKTARFSNYLGSLILSNDLTIMKQATMTLGKLATPGGTLTGDFVDFEAKRAIEWLQSDNKQHENRRHAAILIITALVDNAPTLLYNFINQILEHLWIPLRDSKLVIRTDAAIALQKCMRIIYDRDINSRRFWIKHFIDMASKILNENVARNPTSESNDSSNNGSGNNSVNSVNAAASTAYNLIYSTATGSQTNESIHGSLLVYRELITFHSDPYIHSKFELIYENTVLYRNHKQAIIRQELTKIIPLLCKVNTELFVEKYLHRTLLHYLSQLKQLKSQHSETANNDKSAIFRSIGLISLEVGNQMATYLDAILDNIRDGLSYPSNPSVQLILVNAVSNNGDNPLSGAVTSSNGSSQSTINGLNSISTSGSGPTKYRLSRKNTEPAIFDCISKLSIAVGPALTKHLQRDILDMMFSNCSLSVYMQNVLQTLIVNIPMLTNLISMKLLNLLSLVLSGKIFQPPGSPYGSIKMNESLARDYRLIMISRDTGLSINSILNDADDYENYDSAILVQALNMLAFFEFENYQLNEFVRYCTITYLEHNVPKVRQTATITSCEIFIKDPICQQTSVNALNAVNEVLDKLLSIAITDPIPEIRLEGLNCLANAGNLDPQLSQANNVRLLFIALNDEVFSIRKIAIKILGRLSSINPAYIVPSLRKTLIQLLSRLEYSPTSRKKEESATLISLLISNSKELTRPYVKPIVEALLPKAKDPSSSVAASAINCLGELAVVGGEDLQPFIPDLMPLILETFQDQSSSYKRDAALKTLGQLASSSGYVIKPLLDYPQLLGMLVGILKLESSPHIRRETVRLLGILGALDPYKHREVEQNSKNIPSEQNAPPVDVALLMQGMSPSNDEYYPTVAINNLMKILKDPSLTAHHNKVIQAIMYIFQTLGLRCVSFLPQIIPGIINVMNTCQPSMLKFYFQQLGALILIVKQHIRPFLPEIFEVIKESFNINIQLNVQVIIINLIESISRALEGEFKMHLPDVLNLMLNVFEDDKSVKREPSLHVLKAFVVFGSSIEEYVHIIVPNIVKMFEMGPIVLRRAAIETIGRLSKQVLLNDMASRIIHPILRVLRQGNDELKTTAMNTLSYLLLQLGNEFSVFIPVIKSLLIQQKIHSAIFEQLVNKLLSGDPLPAYLNIYKDYDIHVNHFDVPDVDMPSKKLPVNQGALKAAWDSSLRQTKEDWQEWIGRLSKELLKQSPSHAIRACAGLATDYHPLAKDLFNASFASCWSELYSQHQEELVESFCIALSSANNPPEIHQILLNLAEFMEHDDKSLPIAITTLGQYAQRCHAYAKALHYQELEFYVEPTTPTIESLISINIQLQQSDAAVGILKHAQLHHDLQLKETWYEKLQRWDDALRAYSLREKQEPDNMEITMGKMRCYHALGEWEQLSELAQSKWNNSSSDIKRGVAPLAAAAAWGLGQWDRMDACIKVMKTESPDKAFFNAILSLHRNSFEDASNHILKARDLLVTEITALVSESYNRAYGVVVRVQMLAELEEIIKYKCLPQGSEKRVIMRKTWNTRLLGCQRNVDIWQRMLKVRALVIKPKQDMDMWIKFANLCRKSGRLNLAEKSLNYLLEEGSPENPSRAPPQVVYAQLKYMWAKGQQREALRHLVDFTTRMSQDLGLNPNDLITQPLPSEGPGIPKHVEEYTKLLARCFLKQGEWQILLNNNWRTETSEIILGAYLLATHFDDKWYKAWHNWALANFEVISLFTSQNNNGNNGTINVSQGEIMDQNDQVVTSSDEQSQQPQRQIQPANIIPMDVVQRHVVPSIKGFFHAIALSNTNSLQNTLRLLTLWFKFGGIPEAAQAMNEGFNMVKIDNWLEVVPQLISRIHQPNQTVSRSLIGLLSDLGKAHPQALVYPLAVAVTSESVSRKRAALSIIDKMRLHWATLVDQSDLVSHELIRVAVLWHEQWYEGLEDASRLFFGEKNTEKMFEVLEPLHQMLQKGPETMREASFNNAFGRELADAYEWVLNFRRTKDITNLNQAWDIYYNVFRRISRQLPQLLSLELQYVSPKLEEANNLELAAPGTYHAGKPTIKIVKFDPTFSVISSKQRPRKLSCKGSDGKEYQYVLKGHEDIRQDNLVMQLFGLVNTLLVNDPECFKRHLDIQQYPAIPLSPKVGLLGWVPNSDTFHVLIREYRESRKILLNIEHRIMLQMAPDYDSLTLLQKVEVFTGALDNTRGQDLYKVLWLKSKSSEAWLDRRTTYTRSLAVMSMVGYILGLGDRHPSNLMLNRITGKVIHIDFGDCFEAAILREKYPEKVPFRLTRMLNYAMEVSGIEGSFRITCEHVMRVLRDNKESLMAILEAFAYDPLINWGFDFPTKAVAEATGINVPQVNIAELLRREQIDEQEAARLTRQNEIEIRNARAALVLKRITDKLTGNDIKRLNDLDVPTQVDKLIQQATSVESLCQHYIGWCSFW

SEQ ID NO: 810 - protein, 1520 aa, Bacillus subtilis subsp. subtilis str. 168
MTYNQMPKAQGLYRPEFEHDACGIGLYAHLKGKQTHDIVKQGLKMLCQLDHRGGQGSDPDTGDGAGLLVQIPDAFFRKECKNINLPEKERYGVGMVFFSQKEDERKKIEKQINALIEQEGQVVLGWRTVPVNVGKIGTVAQKSCPFVRQVFIGASSDLKDNLSFERKLYVIRKQAENWGVTEGLDFYFASLSSQTIVYKGLLTPEQVDAFYSDLQDEAFVSAFALVHSRFSTNTFPTWERAHPNRYLVHNGEINTLRGNINWMRAREQQFVSESFGEDLNKILPILNADGSDSSILDNAFEFFVMAGRKPAHTAMMLIPEPWTENTHMSKEKRAFYEYHSSLMEPWDGPTAISFTDGKQIGAILDRNGLRPARYYVTKDDYIIFSSEVGVIEVEQENVLYKNRLEPGKMLLIDLEEGRIISDEEVKTQIATEYPYQKWLEEELVQVNPDPESREEEQFSDLLTRQKAFGYTYEDIQKYLIPVIKEGKDPLGSMGNDAPLAVLSDRAQSLFNYFKQLFAQVTNPPIDAIREQLVTSTMTWLGAEGDLLHPSERNVRRIKLYTPVLSNEQFYALKTIVHPDLKSQKIDVLFSEDLERGLKDMFTQAEKAISQGVSLLILSDKKMNERLTPIPPLLAVSALHQHLIRKGLRTKVSIIVESGEAREVHHFAALIGYGADAINPYLAYATYKQEIDEGRLDISYEEAVSKYGKSITEGVVKVMSKMGISTVQSYRGAQIFEAVGISRDVIDRYFSGTASQLGGIDLQTIAEEAQRRHREAYQDDYSKTLEPGSDFQWRNGGEHHAFNPKTIHTLQWACRRNDYNLFKQYTKAADEERIGFLRNLFAFDGNRKPLKLEEVESAESIVKRFKTGAMSFGSLSKEAHEALAIAMNRLGGKSNSGEGGEDPKRFVPDENGDDRRSAIKQIASGRFGVKSHYLVNADELQIKMAQGAKPGEGGQLPGNKVYPWVADVRGSTPGVGLISPPPHHDIYSIEDLAQLIHDLKNANRDARISVKLVSKAGVGTIAAGVAKATADVIVISGYDGGTGASPKTSIKHTGLPWELGLAEAHQTLMLNGLRDRVVLETDGKLMTGRDVVMAALLGAEEFGFATAPLVVLGCVMMRACHLDTCPVGVATQNPELRKKFMGDPDHIVNYMLFIAEEVREYMAALGFKTFDEMIGRTDVLHASERAKEHWKASQLDLSTLLYQPEGVRTFQSPQNHKIDQSLDITTILPAVQEAIESGKEADISIEINNTNRVAGTITGSEISKRYGEEGLPEDTIKLHFTGSAGQSFGAFVPKGMTLYLDGDSNDYVGKGLSGGKIIVKSSEGFNSASDDNVIIGNVAFYGATSGEAYINGRAGERFAVRNSGVNVVVEGIGDHGCEYMTGGSVVVLGDVGKNFAAGMSGGIAYVLTEDVKRFKRKCNLEMILFESLEDEKEIQQIKAMLERHTAYTNSQKAEDLLDQWEDSVKKFVKVIPKNYKQMLASIEEQKAAGLSDEEAIMFAFEANTKPKQNTAASGQKQAVVQ

SEQ ID NO: 811 - protein, 1493 aa, Acinetobacter sp. ADP1
MHLPSPNTVAPAQGLYQPDEFKDNCGFGLIAHMKGDSSHHLVQTAIHSLSCMTHRGGIAADGKTGDGCGLLLAMPKQFFREEAKKLSDITLSEIFAVGTVFLNIDPALAQHAKAILTKEIESEGLRVLAWRVVPTNNDVLGEIALQSLPAFEQVLVNCPMGVTEVEFNRKLFLARRRAEQQLTNDPLFYVTTLCSTVISYKGLMMPAAIADFYTDLADERLASHIVVFHQRFSTNTLPRWPLAQPFRYLAHNGEINTITANRNWAMARTPKFENPLLPGLTELKPIVNRTGSDSSSLDNMLEILIGGGMDLFRALRMLVPPAWQNVETLDADLRAFYEFNSKHMEAWDGPAGLVIQDGRHAICMLDRNGLRPARWVVTKNDYITLASEIGVWDYQPEDVISKGRVGPGQILVIDTFTGKVLDTQDVSNHLKRMRPYRQWLRENSLRLQGSPELEEHLIDKGLAGDSLKAAQKMFLVTFEERDQLLRPIAESGQEAVGSMGDDTPMAVLSRQVRPVSDYFRQQFAQVTNPPIDPLRESIVMSLETCMGREQNVFEQGPEHADRLIISSPVLSNSKMHQIRTLGRKGYEIADIDLNYPESEGLQAAIQRICEESAQAIRDGKTLLVISDKKIREGYLPANAILATGAIHHYLINIGLRTDANIIVETGVARDPHQFAVILGFGATAIYPYLAYDVINDLVAKGELLGDPVHAQANFRKGIEKGLLKVLSKMGISTVASYRGGQLFEAVGLSKEVVNTCFVGVPSRIEGATFNDLENDQKKLAATAWKNRQPIDQGGMLKFVFGKEYHAFNPDVINSLHKAVRSGNYQDFKEYAELVNNRPVATIRDLFKLKIGNSIPLEQVEAVEQILPRFDSAGMSIGALSPEAHEAIAIAMNTMGGRSNSGEGGEDPARYGTIRNSKIKQIASGRFGVTPAYLTSAEVLQIKVAQGAKPGEGGQLPGGKVNSLIARLRYAVPGVTLISPPPHHDIYSIEDLSQLIFDLKQVNPQAMVSVKLVSEPGVGTIAAGVAKAYADFITISGYDGGTAASPLSSIHHAGSPWELGLSEAHQALRVNDLRGKVRVQTDGGLKTGLDVIKAAILGAESFGFGSTPMIALGCKYLRICHLNNCATGVATQQDHLRQEHYIGEPEMLINFFHFIAEETREWLAALGVASLKDLIGRVDLLEILPGETDKHAHLDLSPLIQSHPSAEGKAQYCQVQGNAPFDKGLLAEKMVAEMLPAIEAGTGGEFHFEIGNCDRSIGARLSGEIARRYGNLDMEAHPVVLNLKGTAGQSLGVWNAGGLHIKLEGDANDYVGKGMAGGRVSIFPPKGSPFQTQNTAIIGNTCLYGATGGKLFAAGTAGERFAVRNSGAFAVIEGAGDHCCEYMTGGIVTVLGKVGHNFGAGMTGGFAYVLDLENDFVDYYNHELIDLTRISTESMEDHQENLLRILDEHIQETGSAWAYKIRNEFDFYSRKFWLVKPKAANLLTLLKATKADPQ

SEQ ID NO: 812 - protein, 1575 aa, Rhodopseudomonas palustris CGA009
MSGSECEREIMVANALTADSAVKTTAREHTWRPPAEGLYDLSREKDACGVGFIANIKGVKSHQIVCDALRILCNLEHRGAVGADPRAGDGAGILVQIPHAFFSRKATELGFSLPAPGEYAVGALFMPRETSWRKVIKSIIEDRIKAEGLTFLGWRDVPTDNSSLGETVKPTEPANMQVFIGRGTAITSEDDFERKLYILRKSISNAIYQRRERALAGYYPVSLSCRTVIYKGMFLADQLGKYYPDLHEDDFASALALVHQRFSTNTFPTWSLAHPYRMVAHNGEINTLRGNVNWMAARQASVHSELYGEDISRLWPISYEGQSDTACFDNALEFLVRGGYSLTHAVMMMIPEAWAGNPLMDEKRRAFYEYHAALMEPWDGPAALAFTDGRQIGATLDRNGLRPARYLVTKDDRIVMASEMGVLKIPEDQIVTKWRLQPGKMLLVDLEQGRLIPDEEIKAQLAASQPYADWLHRTQIVLEELKDAPVKGQRSNLPLLDRQQAFGYTQEDISILLTPMASTGEEANGSMGNDTPLSALSDKPKLLYTYFKQNFAQVTNPPIDPIREELVMSLVSIIGPRPNLFDTEGLAGTKRLEVRQPILTDGDLEKIRSISEVGDSHFKSRTLDTTFHAGLGASGMEQVLDELNGRAESAVRDGVNIIILSDRAAGSDRIPIPALLACASVHHHLIRVGLRTSVGLVIESGEPREVHHFACLAGFGAEAINPYLAFETIIALKDRLPTKLEDKEIVKRYIKSIGKGLLKVMSKMGISTYQSYCGAQIFDAVGLRHDFIAKYFAGTHSQIEGVGLAEIAEETVRRHRDAFGSALVYKTALDVGGEYAYRTRGEDHAWTADSVATLQHAVRGNSQERYRAFAKLLNEQQERLLTLRGLFKIKGAEAEGRKPVPLAEVEPAAEIVKRFATGAMSFGSISREAHTTLAIAMNRIGGKSNTGEGGEEPDRFKPMANGDSMRSAIKQVASGRFGVTTEYLANSDMIQIKMAQGAKPGEGGQLPGHKVDATIAAVRHSTPGVGLISPPPHHDIYSIEDLAQLIYDLKNVNPSSAISVKLVSEIGVGTVAAGVAKARADHVTISGFEGGTGASPLTSIKHAGSPWEIGLAETHQTLVRERLRSRIVVQVDGGFRTGRDVVIGALLGADEFGFATAPLIAAGCIMMRKCHLNTCPVGVATQDPVLRKRFTGQPEHVINYFFFVAEEVRELMASLGYRSFNEMVGQSQMLDHAALVAHWKAKGLDFSKLFFKQKADKGQTIFHSEGQDHHLDSVLDRKLIAKSQAAIDRGAPVKFEIEINNTDRSAGAMLSGTVAKHYGHAGLPADTIQVHLKGTAGQAFGAWLARGITFDLEGEGNDYVGKGLSGGKIIVRPPANSGIVPEHSIIVGNTVMYGAIEGECYFRGVAGERFAVRNSGAVAVVEGAGDHCCEYMTGGIVVVLGKTGRNFAAGMSGGVAYVLDEDGSFAKTCNMAMVELEPVLSEEMINAGTFHQSGDLEAHGKVDVFADLLGADVERLHVLISRHAKYTGSKRAQDILANWKSYLPKFRKVMPVEYRRALREMKARAAEEPKIAIGA

SEQ ID NO: 813 - protein, 1510 aa, Corynebacterium glutamicum ATCC 13032
MKPQGLYNPAHEHDACGVAFIADIHGRPSRSIVDRALEALRNIDHRGAAGAEKNTGDGAGILMQIPDGFYREVSGIELPEAGEYATGIAFLPRGRMAMMDAQKEIERIAKQEGADVLGWRMVPFDSRDLGSMAEEAMPSFAQIFLTVPGKSGEDLDRVMFFIRKRCERELGTTNGRDTVYFPSLSSRTIIYKGMLTTLQLEGFFEDLGDARLESAIAIVHSRFSTNTFPSWPLAHPYRFVAHNGEINTVRGNENWMRAREALIKNDKLGNLSSVLPICTPEGSDTARFDEALELLHLGGYSLPHAVAMMIPQAWEHNKTLSPELRDFYEYHSCLMEPWDGPAALAFTDGRFVGAVLDRNGLRPGRITITDSGLVVMASESGVLDLREESVVKRTRVQPGRMFLVDTAEGRIVEDEEIKQKLSEAQPYGEWIRDNFVHLDRLPQTRYNYMAHSRAVLRQRVFGITEEDVDLLLLPMARQGAEAIGSMGSDTPIAALSQRPRMLYDFFAQRFAQVTNPPLDSIREKPVTSMFTLLGAQSDVLNPGPDAARRIRLESPIIDNHELATLINANAHGEWDSFGAAVISGLYPVAHHGAGMKAAIARVRREVSEAIRNGKTLIVLSDRESDERMAPIPALLLTSAVHQYLVQQRTRTQCSLVVESGDAREVHHLAMLIGFGADAINPYMAFETIDELRMKGQLGDLSLDEASRNYIKAATTGVLKVMSKMGIATVSSYRGAQLADVTGLHQDLLDNYFGGIASPISGIGLDEVAADVEARHRSAFLPRPEEHAHRELDLGGEYKWRREGEYHLFNPETIFKLQHATRSGSYEIFKDYTRKVDDQSTRLGTIRGLFEFSTDRKPISVSEVEPVSEIVKRFSTGAMSYGSISAEAHEVLAIAMNRLGGMSNSGEGGEDARRFDVEPNGDWKRSAIKQVASGRFGVTSHYLNNCTDIQIKMAQGAKPGEGGQLPPNKVYPWVAEVRITTPGVGLISPPPHHDIYSIEDLAQLIHDLKNANPRARIHVKLVAEQGVGTVAAGVSKAHADVVLISGHDGGTGASPLTSLKHAGGPWELGLAETQQTLLLNGLRDRIRVQCDGQLKTGRDVVIAALLGAEEFGFATAPLVVEGCIMMRVCHLDTCPVGIATQNPDLRSKFTGKAEHVVNFFTFIAQEVREYLAQLGFRSIDEAVGQAQVLRKRSGIPADSRAAHLDLSPIFHRPETPHFPTQDVRCTKTQEHSLEKALDNAFIDKASDTITRAAAGVETSIVIDSSISNVNRSVGTMLGSAVSRVAGAQGLPDGTITLNLQGCAGNSFGAFIPRGITINLTGDANDFVGKGLSGGKIVIKPSAQAPKQLKNNPNIIAGNVLGYGATSGELFIRGQVGERFCVRNSGATAVVEGIGNHGCEYMTGGRVLVLGPVGENFGAGMSGGIAYLANSPDLNQKINGELVDVVPLSADDLTWADELIARHRELTGSETKLRAQDLVKIMPRDFQKVLNIIETAHAEGQDPAIKIMEAVS

SEQ ID NO: 814 - protein, 544 aa, Desulfovibrio vulgaris subsp. vulgaris str. Hildenborough
MQPAQGITPSTLSVKDLPWQVEWDRATCALCGRCTAVCPVNAIELGVHRQRIVDAPVGLAKRPSNAHTVYHGVRQRTDAAYACVGCGMCTMVCPNNAIRPVHQAEATALRFHNNRGGQPRTRGGRRNDPLGLLDQIKFIRISMLTDPALDAGRHEFELRTLLGRILPPEEGMAALHGNGWVPPVREIYPLVIGGMSFGALSPNMWEGLQMGVAYLNEEMGMPVRMCTGEGGCPPRLLRSRFLKYVILQIASGYFGWDEILHAIPEMKEDPCAIEIKYGQGAKPGDGGLLMWHKVNKLIASIRGVPPGVSLPSPPTHQTKYSIEEAVAKMIQSMSMAWGFRVPVYPKISGTATALAVLNNLVRNPYAAGLAIDGEDGGTGAAYNISMNHMGHPIASNIRDCYNALAAQGRQNEIPIMAGGGIGKNGNLAHNAAALIMLGASMVQSGKYIMQAAAGCVGSEVDRCNICNIGRCPKGITSQDPRVYRRLDPEKVAERLVDVYLAFDTELKKVFAPLGRSTSLPVGMSDALGIADRNAAERLGIRYVV

SEQ ID NO: 815 - protein, 444 aa, Acinetobacter sp. ADP1
MTQSATQFEPVLRESATFDRLTIQEIQRAAATGIYDIRGGGTKRHLPHFDDLLLLGASMSRYPLEGYREKCGTDVVLGTRFAKKPIHLKIPVTIAGMSFGALSANAKESLGRGASMVGTSTTTGDGGMTPEERGHSETLVYQYLPSRYGMNPDDLRKADAIEIVLGQGAKPGGGGMLLGMKVTERVAGMRTLPVGVDQRSACRHPDWTGPDDLAIKIAEIREITDWEKPIYVKIGASRPYYDVKLAVKAGADVIVLDGMQGGTAATQEVFIEHVGIPILSAIPQAIQALQEMGMHRKVQLIVSGGIRTGADVAKAMALGADAVAIGTAALIALGDNHPRLDDELKKIGSASGYYDDWQNGRDPAGITTQDPELAKRLDPIEGGRHLANYLRVLVLEAQTMARACGKSHLHNLDPEDLVALTVEAAAMARVPLAGTNWVPGQLQY

SEQ ID NO: 816 - protein, 1488 aa, Yersinia pestis CO92
MLYDQSQERDNCGFGLIAHIEGEPSHKVVRTAIHALARMQHRGAILADGKTGDGCGLLLQKPDHFFRMVAEERGWRLAKNYAVGMMFLSQDEELAKASRRIVEEELQNETLSIVGWREVPTNPDVLGEIALSSLPRIEQIFVNAPAGWRSRDMERRLFVARRRIEKRISDKDFYACSFSNLVTIYKGLCMPADLPRFYLDLADLRLESAICLFHQRFSTNTVPRWPLAQPFRYLAHNGEINTIAGNRQWAKARAYKFKTPLIPDLQDAAPFVNETGSDSSSLDNMLELFLSGGMDLIRAMRLLVPPAWQNNPDMDTDLRAFFDFNSMHMEPWDGPAGIVMSDGRYAACNLDRNGLRPARYVITKDKLITCASEVGIWDYQPDEVVEKGRVGPGELMVIDTRSGKILHSAETDNDLKSRHPYKEWMEKNVKRLVPFEDLPEEQVGSRQLDDSQLETYQKQFGYSNEELDQIIRVLGENGQEATGSMGDDTPFAVLSSGPRIIYDYFRQQFAQVTNPPIDPLREAHVMSLATSIGREMNVFCEAEGQAHRLSFKSPILLYSDFQQLTTLEGEHYRADRLDLTFNPAENDLEQAVLSLCDEAERKVRDGAVMLVLSDRAIAPNRLPVPAPMAVGAIQTRLVDKSLRCDANIIVETASARDPHHFAVLLGFGATAIYPYLAYESLAKLVDSQAIDKKYRDVMLNYRNGINKGLYKIMSKMGISTVASYRCAKLFEAVGLHRDLSDLCFQGVVSRIGGASFSDFQQDLQNLSKRAWLKRKPLDQGGLLKFVHNGEYHAYNPDVVSTLQKAVHSGEYSDYQAYAKLVNERPIATLRDLLAIKPQGTPIPVDQVEPAESLFKRFDTAAMSIGALSPEAHESLAIAMNSLGGFSNSGEGGEDPARYGTNKVSRIKQVASGRFGVTPAYLVNADVIQIKVAQGAKPGEGGQLPGDKVTPYIAKLRYSVPGVTLISPPPHHDIYSIEDLAQLIFDLKQVNPKAMISVKLVSEPGVGTIATGVAKAYADLITIAGYDGGTGASPLSSVKYAGCPWELGLVETQQALVANGLRHKIRLQVDGGLKTGVDIVKAAILGAESFGFGTGPMVALGCKYLRICHLNNCATGVATQDEKLRRDHYHGLPERVVNYFHFIARETRETREIMAELGVSQLVDLIGRTDMLLELDGISAKQNKLDLSPMLKTATPHPGKALYCTESNPPFDKGLLNKELLSQAEPYIEAKQSKTFYFDIRNTDRSVGAALSGAIATKHGDQGLATDPIKAYFSGTAGQSFGVWNAGGVELMLTGDANDYVGKGMAGGRIAVRPPVGSNFRSHEASIIGNTCLYGATGGKLFAAGRAGERFAVRNSGAITVVEGIGDNGCEYMTGGIVCVLGRTGINFGAGMTGGFAYVLDEDGEFRKRVNPELVEVLDVEQLAIHEEHLRGLITEHVQLTGSSRGEEILANWPEWVTKFALVKPKSSDVKALLGHRSRSAAELRVQAQ

SEQ ID NO: 817 - protein, 2357 aa, Coprinopsis cinerea okayama7#130
MASADQAPVGDQQLNAIFSGLKSRSADTRMQAAEDLKRFVQVSYAEMTSDAAAKLWDDHINRRLFALIHSQNINEAFGGLLGIERLLELDLEETIESKRNHFRFYNYVKHLLPNPDVHLMMAASKTLGKIAEIGGGVAFGERFMEYEIPAAIELMQPDKQEAPRYAGVLILKELARNSPTYFHPHIGIVFDNILLPLRDPRLHVREGAADLLANCLEIVCSRERQTRNPYLYKILQDAQAGLKSSQPEVIHGSLAAYRELLLHAGMFMQENFLDTAEAILRFKSSRDPLVRRMVITMIPTLAAYDTQTFTEHFLHKAMAHLLTQLDKAPERNFAFIAIGHTALAVGSDMKPFLDPIMDNNAPSEEPIFQCIGMLAAAVGPNLTKLLHDQLDLMLACGLSEPLSQALAAIAKYIPPLLKTIQGRNEFPAPPNQLTATQMTTTDKNSELITLALKTLGTFDFSGHVLNEFVRSCALPYLEDDNPQVRCAAAETCCTLFIKDPICYQASSHAIEVISDVLDKLLTVGIADPDPGIRNVVLRGLHERFDKHLAQAENVRSLFIALNDEVMANREAAVGLIGRLAKHNPAYVMPSLRKALIQLLTELEYSTVMRNREDCTRLLTLLVSATQRLIKPYAIPMLRVLLQKANDPNPAVAANVLMCLGELACVAGEDAMPHVQELMQIILAKLADPQTLKRDAALHALGQVCSSTGYVVQPLLDHPQLLPLLGRIMRTETSVQTRREVVKVLGILGALDPYRRKSRPDEDVASNAETSVAAVNQVPINPHPTSSSSDDYFQTVVITSLLAILKDQSLSSHHHTVIEAIMSIFKTQGLKCVTFLPQIIPAFAAITRTSIARLQEFHLQQLAILVGIIKQHIRNYTLDVFSLITELWDNVTLQLPIVALIEALGKALDAEFKPFLPTILPLVLKVFDGDTSDKRIAVQIKIFDAFLTFGANIEEYLHLVIPIIVKSYERSDAPSSLRKRAIQTIDGLSRRVNFSDHASRIIHPMVRVLDGNNNELRMAVFDTLCSLVAQLGSDFAIFVPTINKATLRNRISHPRYENLVSKLLNGESLPSEAGGMDWIQAENSKAQEFQAPAEAPKMTVNQQHLKQAWDVSQVTTKDDWLEWMHRLSVEFMKESPSHALRACMTLVDIHQPLAKELFNAAFLSCWTELYDQYQEDLVRSIEFAITSTTAPPELIHRLLNLAEFMEHEEKPLPIEHRTLGEYANKYMAYAKALHYKEMEYFAESSPAVIESLISINTKLQQHDAAWGTLLHAREQYDVTKHEEWYERLGRWQEALQVYDRKAMEDPDSPEVKIGRVKCYHALGEWELLAAQVQENWANATNEERREMAPMAAAAAWSLNDWDSMDNYIGTMKNDSPDRAFYRAILSVHQNQFSKALAHIAKARELIDPELSSFTGEGYGRSYNVMVRAQMLSELEEIIAYKQYADQPERQATMRKTWMKRLQGCQPDVEVWQRILQVRTLVSSPEQDPVMWIKFANLCRKNDRMMLAEKTINSLLTPERRMLDHHHHHNTKAPPNVVYAQLKYMWANGEKEETLNHLRLFTASLAKDIQQETNEQGHRPNVSKSKLAELTKLLARCYFKQGEWQMELKDDWDARNVEDILHSYYYATHYDPGWYKAWHTWALANFEVISHIDTLAENRATDIPGDSLASHVVQAVTGKPPFVAVLDAMLILGKGFFRSISLRNQDALQDTLRLLTLWFKYGHHDEVSHSMANGFSTVEVDTWLEVIPQIIARIQTPHANIRRNINNLLTDVGKHHPQALIYPLTVASKSSSSARRTAAIQIMERMKDHSSTIVTQALLVSKELIRVAILWHEMWHEGLEEASRLYFNDKNPEGMIMALEPLHKLLEKGPTTARETSFAQVFGRELAEAREACKRYQIYGDPTELDKAWDIYYGVFKKVEKQLPSLTTLDLQYVSPSLLKARHLDLAVPGTYQSGRPVITIASFATKLTVIASKQRPRRLSLKGSDGRDYQYVLKGHEDLRQDERVMQLFSLVNTLLSVDTNSFKRRLHIQRYPVIPLAPNAGLLGWVQDSDTLHVLIRDYRESRKVLLNIEYRLMLQMAPDYENLMLLQKVEVFEYALENTTGQDLYRVLWLKSTNSEHWLERRATYTRSLAVNSMVGHILGLGDRHPSNLLLERSTGKVVHIDFGDCFEVAMHREKFPEKVPFRLTRMLTHAMEVSGIEGSFRNTCEITMTVLRDNKESLMAVLEAFVYDPLINWRLMQADVEVRRPDDDLVLTVYKADVERVPELGRVAAHPQAPNRKLKADENDIFNETEEEPGAQEVRNERALFVYNRVQHKLTGRDFNPTQVLSVKAQVEKLIEQATSLENLCQCFSGWCAFW

SEQ ID NO: 818 - protein, 447 aa, Azoarcus sp. BH72
MTTTNTPAGQIPQTVPQFSSTFDAYTLSEIRRAAATGIYDIRGGGTKRKLPHFDDLLFLGASISRYPLEGYREKCGTDVVLGTRFAKKPIHLKIPVTIAGMSFGALSANAKEALGRGASIAGTSTTTGDGGMTPEERGQSQTLIYQYLPSRYGMNPDDLRKADAIEVVIGQGAKPGGGGMLLGQKISPRVAAMRCLPQGIDQRSACRHPDWTGPDDLEIKILELREITDWEKPIYVKVGATRPYYDVALAVKAGADVVVLDGMQGGTAATQEVFIEHVGIPILAAIRPAVQALQDLGMHRKVQLIVSGGIRNGADVAKALALGADAVAIGTAALVALGDNDPRHEEEYRKLGTTAGAYDDWHEGRDPAGITTQDPALAARLDPVQAGRRLANYLSVMTMEAQVIARACGKSHLHNLEPEDLTALTLEAAAMAQVPLAGTGWIPGKTF

SEQ ID NO: 819 - protein, 437 aa, Triticum aestivum
  misc_feature (402)..(402): Xaa can be any naturally occurring amino acid
  misc_feature (433)..(433): Xaa can be any naturally occurring amino acid
MGQKDSKPSYNSGNSANGYNSRYANTPSSYSPRYASSAGNNMQQPEAQARLQRKYSRIGDDYRSVSQVTEALAQAGLESSNLIVGIDFTKSNEWTGKISYNRRCLHDIGNTPNPYEQAISIIGRTLSAFDEDNLIPCFGFGDASTHDQEVFSFYPENQPCNGFEEALERYREIVPTLRLAGPTSFAPIIETAIGIADSTGGQYHVLLIIADGQVTRSVDTQSGQLSPQERDTIDAIVKASHFPLSIVLVGVGDGPWDMMHKFDDNIPARSFDNFQFVNFTEIMSKSIAADRKEAEFALSALMEIPTQYKATLDLQLLGRRQGIPPRVPLPPPTRTPYSRSTSFDQQSGVYSRSSSFGQQTSGFQQSDSFKQRQHAATRRPDSHPSESSESTLSCAICMDKSXDLAFGCGHQTCYDCGGKLVRCPMCQKHITTXIRLY

SEQ ID NO: 820 - protein, 1490 aa, Xanthomonas campestris pv. vesicatoria str. 85-10
MAPRTRQGLNDYGLYNSVRDERDACGFGMVAQLDDQPSRALVDTAIAALSRMTHRGGVAADGLTGDGCGLLIRKPDAFLRGLARDAGIPLGTRYAAGVVFLPLDESEAARCRAELEAQLQAAGVQLRGWRVVPTDDSVCGQLARDTLPRIEQLFVDAGAEQTEDGFTLALFLARRRAEQQLQGVPDFYVTTLSPNGISYKGMVLPDKLSTFYPDLQRSDLSSSAIVFHQRFSTNTLPRWPLAHPFRLLAHNGEINTIEGNRRWAQARSKVWQTPRFDIAEFDPVISMHGSDSQSLDNMLELLIAGGMDLLQALRILVPPATQSLEFKDADLAAFYEFYGLNTEPWDGPAGIVACDSRYAACMLDRNGLRPARWMLTSDRHFLVASEAGVWELPAERITRKGKLGPGEMMAIDLKRGDLLDSDAIDRINRARAPYKQWLQQGVTYLQTELIDPSLVEEPFSEQTLRSYHKLFQLSTEEVEQVLRPLAETEQEATGSMGDDTPMAVLSRQTRPLYDYFRQAFAQVTNPPIDPLREGIAMSLTTQLGRETNIFHAGAETVNHVILNSPVLSQRKLRQLLKMEQYVERNRLIDLSYSLEEGLKAGLERICQEVEAAARDGAVMLLLSDRYPVPDRPMAHALLATGAVHHHLCKVGLRCDVNLIIETGTARDPHHMACLLGVGATAVYPYLAYQTLFDLGRRGILQLSKGGEQSQIGRRYRKGIYKGLSKIISKMGICTIASYRGAQLFEIVGLDPDVVDLCFADTPARIGGVDLARLDTEARELTVRAWNDQLKPEVGGLLKYVHGGEYHMYNPDVVMTLQRATRTGDAGDWQKYVDAVHARPASTLRDLVQLKRADTPTPLDQVAPAEDVLRRFDSAAISLGALSPEAHEALAIAMNRLGGRSNSGEGGEDPARYGTEKRSKIKQVASGRFGVTPEYLVNAEVLQIKVAQGAKPGEGGQLPGHKVNELIARLRYAKPGIGLISPPPHHDIYSIEDLAQLIYDLKQVNPTALVSVKLVAHAGVGTIAAGVVKAGADLITVSGHDGGTGASPVSSIRYAGVPWELGVAESHQALVANDLRERTILQTDGGLKTGLDVVKAALLGADSFGFGTAPMIVLGCKYLRICHLNNCATGVATQDERLRAGYFTGLPERVEHFFRLLAEEVRQWLSYLGVRSLDEIVGRTDLLEQLEVSPRPGVKVDLSRLLTHARYDGSHCAAQRLYESPDSLATQMDGLLADAIANKRGGDHRFLIHNTDRSIGARLSGAIARVHGNHGMSDAPLNLRFRGTAGQSFGAFNAGGLQLELEGEANDYVGKGMAGGRLVVRPPRGARFEARNTPIVGNTCLYGATGGELFAAGRAGERFAVRNSGALAVVEGAGDHCCEYMTDGIVLVLGKVGLNFGAGFTGGLAYVLDIERDFVDRYNHELIDIHRVSAEGFENHRQHLHTLISRHRELTGSIWAQQILDEFRDYIGKFWLVKPKAASIESLTESLRRAA

SEQ ID NO: 821 - protein, 1559 aa, Nostoc sp. PCC 7120
MNDNSTHQNQQITANNNSGDTYQGQRWLVEERDACGVGFIAHRQNHGSHEIVAKALAALTCLEHRGGCSADQDSGDGAGILTAIPWELLQQDYPQGQIDFLSSKNIAVGMIFLPQDGEVARKAKAIFEQIATEEKFTVLGWRVVPVQPDLLGIQAKENQPRIEQVILSADNSGDALERQLFIARKRLFKAVKSISEEFYICSLSSRTIVYKGMVRSAVLGAFYLDLQNPAYKSAFAVYHRRFSTNTMPKWPLAQPMRLLGHNGEINTLLGNINWMMAREANLSHPIWGDRFDELKPSVLMGNSDSATLDNVLELLVHSGRSPLEALMIMVPEAYQNQPSLRNYPEIIDFYEYYSGLQEAWDGPALLVFGDGKTVGATLDRNGLRPARYLITKDDYIVVASEAGVVDFPEADIIEKGRLGPGQMIAVDLVNHEVLKNWEIKQRIAKQQPYGEWLQKYRQELKQVTIQVNGNGNGNGNGNGNGHVTTAKIDKETLLRKQLAFGYTTEDVEMVIQPMAATGSEPTFCMGDDIPLAVLTDKPHLLYDYFKQRFAQVTNPAIDPLREKLVMSLKVELGERGNLLEPKPEYARRLKLESPVLLESELAAIKLSGFATAELSTLFAIASGPDGLKAAVLALQQQAAESVRAGAKILILNDRAGEGISTEYSYIPPLLAVGAVHHYLIREGLRTKTSLIVNTAQCWSTHHFACLIGYGAGAVCPYMTLETVRNWWSDPATQQFMERGKITSLSLEQAIANYRKAVESGLLKILSKMGISLLSSYQAAQIFEAIGIGGDLLALGFQGTASRIGGLSVSELAQEVLSIHSKAFPELATHKLENLGFVNYRPTGEYHMNNPKLAKALHEAVDGKKYDHYEVYKQYLQDRPITALRDLLDFHSDRTPISLEEVESVSDIVKRFCTGGMSLGALSREAHEVLAIAMNRIGGKSNSGEGGEDPVRYKVLDDVDASGHSPTLPHLRGLRNGDTASSAIKQVASGRFGVTPEYLASARQIEIKIAQGAKPGEGGQLPGPKVSQYIAMLRRSKPGVTLISPPPHHDIYSIEDLAQLIFDLHQINPKAQVSVKLVAEIGIGTIAAGVAKANADIIQISGHDGGTGASPLSSIKHAGSPWELGLSEVHRVLMENSLRDRVVLRVDGGLKSGWDVLIGALMGAEEFGFGSIAMIAEGCIMARICHTNNCPVGVASQKEELRKRFTGIPEHVVNFFYFVAEEVRHLLAKLGYRSLSEIIGRADILTTRKDVQLPKTQAINLNCLLQLPDTKENRSWLVHEQVHSNGPVVDDQLLADPDIQAAIRNQSAVTKTLPIVNTDRTLGARLAGAIASQYGDSGFEGQINLNFTGSVGQSFGAFNLPGIILTLKGEANDYVGKGMHGGEIIIKPPTEATYDPAQNVIVGNTCLYGATGGVLFANGLGGERFAVRNSKGVAVIEGTGDHCCEYMTGGTIVVLGKVGRNVAAGMTGGLAYFLDEDGLFPELVNREIVKIQRVLTTAGEKQLQDLIQAHAERTGSPKAQMILDNWQEYLPKFWQLVPPSEAESPEANPQAVVEKYLSSV

SEQ ID NO: 822 - protein, 2114 aa, Gibberella fujikuroi
MGLNEDFDDRHIQTEAEQQPYIPYEYQTENNDSWAGALPVKQGLYDPSYEKDACGVGFACHIKGKPSHKIVSDARNLLCNMTHRGAVGSDARDGDGAGVMTSIPHRFFIKNFEKEEDIKLPPLGQYAVGNLFFKPDEETLQESKRQLEDVAESLGLRVLGWRRPPVDSTLLGPAAKSREPIIAQPFVVLASAYGTGNAPEMTDPEKFDERLFERQLYILRKRATQSIGLHNWFYLCSLSNKNIVYKGQLAPVQVYSYYHDLVNADYEAHFALVHSRFSTNTFPSWDRAQPLRWAAHNGEINTLRGNKNWMRAREGVMQSDIFKEELEQMYPVVEDGGSDSAAFDNVLELLTINGVLSLPEAVMLMVPEAWQGNQHMDPKKAAFYEWAACQMEPWDGPALFTFADGRYCGANLDRNGLRPCRFYVMDDDRIICASEVGTIPVEPETVIQKGRLQPGRMLLVDTQAGRIIDDKELKEAVSSRYDFRAWLDSELITLPKVVEIMEQALDLAPKLDDKAIQADPLLLSYGYTHEQVSLLLAPMAADEKEALGSMGNDAPLACLTQAPRLLYDYFRQLFAQVTNPPIDPIRESIVMSLECYVGPQGNLLEMDASQCGRLLLPSPILSIEEFNAVKNMSNKYSEWTVKTIDLTFPKNQGIQGYIKHLDEICNEASAAIESRDRVIVLSDRNTSADRVPVSAVLASAMVHHHLVSNKWRSMVALVVETAEAREVHHMCVLLGYGADAINPYLAMECILKLNREGLIKKKTTNETLIRNYKHACDGGILKVMSKMGISTLASYKGAQIFEILGLDETVVERCFRGTASRIQGMTFELPIAEEAFRFHERGFPTRETILPSGLPESGEYHWRDGGEPHVNDPTSIANIQDAVRTKNDKSYEAYSRSEYEQIKNCTLRGLLDFKFEDCTPVPIDQVEPWTDIVRRFCTGAMSYGSISMESHSTLAVAMNRLGGKSNTGEGGEDPERSQRMPNGDTMRSAIKQVASGRFGVTSAYLADSDELQIKMAQGAKPGEGGELPGHKVSKSIARTRHSTPGVGLISPPPHHDIYSIEDLKQLIYDLKCSSPRSRVSVKLVSEVGVGIVASGVAKAKADHILISGHDGGTGASRWTGIKYAGLPWELGLAETHQTLVLNDLRGRVVVQTDGQLKTGRDVALACLLGAEEWGFATAPLIAMGCVFMRKCHLNTCPVGIATQDPEVRKKFTGTPEHVINFFYYVANELRAIMAQLGFRTINEMVGHVEVLKMRDDLRTHKTANIDLSLLLTPAHKLRPGVATFNVRKQDHKLHVRLDNKLISESELTLDKGLPSRIECDIVNTDRAMGTSLSYHISKRYGEAGLPMDTVHVNIKGSAGQSFGAFLAPGVTLELEGDANDYVGKGLSGGRLIVYPPRSAVFQSEENILIGNTCLYGATTGTCFFRGVAAERFAVRNSGATAVVEGVGDHGCEYMTGGRVVVLGSTGRNFAAGMSGGIAYISDVHGDFHSKLNGEMVETSDFEDPAEIAFVRGLIEDHHHYTGSERAARILVDFNRALPRFIKILPVDYKRVLEEEAAKAAEAKRAEYNLPAVSGVQHKKSEKVAKLQDLEEAVGDNAAEKKRALVLDKTRGFKMYKRRQEKYRPVNSRLKDWAELSSRLDEDELKYQSARCMDCGVPFCQSETGCPISNIIPKWNELVFQNQWKDALNRLLMTNNFPEFTGRVCPAPCEGACVLGINEDPVGIKSIECAIIDRGFEMGWMVPQPPKVRTGKTVAIIGSGPAGLAAADQLNRAGHLVTVYERADRLGGLLMYGIPNMKLDKRIVKRRTDFMASEGIIFKTGVAVGEEGHPSLNDLRASNSAVVIATGATVARDLPIKGRQLDGIHYAMEFLHKNTKSLLDSELADNTYISAKGKDVVVIGGGDTGNDCIGTSLRHGAKSVTNFELLPQPPPERANDNPWPQWPRIYRVDYGHTEVRQHTGKDPREYCIMSEEFMDDGSGKVKGINTIRVEWTKSPSGGWDMKKVEGSQQFFPADLVLLAMGFLGPEARVLGDEIEKDARKNVKTAPGKYSTNLEGVFAAGDARRGQSLIVWGINEGRQAAREIDLYLEKYTNLPVTGGITKRTAQEIFSQIKVEA

SEQ ID NO: 823 - protein, 1782 aa, Agrobacterium tumefaciens str. C58
MSAEGVGDGAGVSLDLSLSFFRELTGDAALPAGRFGVGNFFLPQNPAFHGEAVGIIGNALKEQGFSVLLVRDVPVNDTAIRPAAIPYQLPIRQWVFSAPVECATLAEFDWRIHKALLAIEALAYTVPDLAGFYPLSLSARTQVLKGRLNSQEVMPYFCDLTDPRHKVHTMYFHTRFSTNTDPHPSMAQPFRLMAHNGELNTDKKNRLSEAAVALAKNASIVRPKGQSDSCRLDQTLQARVMEDGLDLVTAVVSMMPPAWENDDTLSPGVKSMLEYFSLYEEKNDGPAALIFGDGTIIGARLDRLGLRPLRTVETDDYLCVMSEAGQIAFPAESVIRRGRIEAGGMLYYDHTERRAFSTVEALELLASRRDYSSLLSDARVMLGDLPEVPADKQGSPLRYNGDLERHQRYVAYSHNQESFKFLMDPMLASGAEKISAMGYGNAINALSDQEGGVAKYFSQRFAQVTNPPLDSIREADGMTLRVALGAKPNSGAKKARQIVVRSPILTHLDMLRIREQPETPVRRFEMLYTPVFDAEDANEAALRQAIDGLCGEVVAFAAEEGGIAVVTDRHVSAGRAALPMIMVVSAINQRLIEEGLRLRISLIVESGQFSSSHHIAAGLGFGASAVYPLGVQFRAEEKFGADADKAFKRFAKAAEKSLMKTMGKVGLCTAESYIGGEFFEPNFLDTSDPVLKRYFPNVKTPVGGVTFAVIAQAVADWHRKALSVKGENDIPLLGLFKERAEGAGHSYGTTAVRGFVDMTEEKIGFDKGTENEEALRLLPLNRLEDAFGLNDAAYYHNSFDRLTPDAIDAFEVTPGYRAFSRMMAEERARRPAALRDVLELPADVTFAGSAEEFRREMGRFCRHGNNSFMVRGLRCDEAADGSFRLQLIGPHGHELARLAALGQSLLDRFDDDIAGHWLEGGALMVQAKGEAFAYMSLIRTAPNSIPLETVQKASEITKTLASGAMSHGALVAAAHEAVAHGTNMVGGMSNSGEGGEHISRYGTIRASRIKQFASGRFGVWAGYLADPMLEEIEIKIGQGAKPGEGGQLPSPKVTVEIAAARGGTPGVELVSPPPHHDTYSIEDLAQLIHDAKAARVRVIVKLVSSEGIGTIAVGVAKAGADVINVAGNTGGTGAAAVTSLKYTGRAAEIGIAEVHQALCATGLRAKVLLRCSGAHQTASDVVKSALLGGDSFEFGTTALMMLKCVMAKNCNIKCPAGLTTNQEAFNGDPRALAQYLMNIAHETREILAGLGLRSLREARGRSDLLHLLDHPASVGQLDLRAMLAVVEEVKIDNPVYMEKDFALDDAFIELVRSALVDSRRENIELGGNRFLNNCNKSVGGQLAVDIERMLNHELSDEQLDALPAVKRDSRGRRFLEAGSVRIDTSGSAGQSFGAFCNDGMIMVHTGTCNDGVGKSACGGTIVVRSPGGGSKETGGNVLVGNFALFGATGGRTFVEGQAGDRFAVRNSGATAVVEGVGDFACEYMTNGAVLNLGSFGKGFGNGMSGGFVYQYDPYGDLPKKVSHDSILLGSITGEDEQAAIHNQAVHQLLTLHVAETGSAKAAWLLENWESEQHNFAYGMPRALLLYQDSDEILKAKPRKELLEELASALAGYQLRKFKLAYRDRKAVLNGTVPGYGETDTEDMYALINNYTVLSMAQAIALQRLPMASGPSDPAIEKAVRNLILTEDYALMQRLLKYAREALSDHSDQQLAVMIAAKRLDDYKQALARRNIWSVDSPGTYGWIIQQNRKNIEKIGRLPGFEELFAARAIPDLATASSHSRAA

SEQ ID NO: 824 - protein, 1580 aa, Polaromonas sp. JS666
MTTAAEIKHFEEHGLYSGAHEHDACGVGFVAHIKGHKSHAIVQQGLKILENLDHRGAVGADKLMGDGAGILIQLPDALYREEMAKQGVALPPPGEYGVGMVFLPKEHASRLACEQALERAVKAEGQVLLGWRDVPVNRDMPMSPTVREKEPILRQIFIGRGNDVIVQDALERKLYVIRKTASAAIQNLRLTHSKEYYVPSMSSRTVVYKGLLLADQVGTYYRDLTDTRCVSALGLVHQRFSTNTFPEWPLAHPYRYVAHNGEINTVKGNYNWMKAREGVMSSPVLGADLQKLYPISFAGQSDTATFDNCLELLTMAGYPISQAVMMMIPEPWEQHTTMDERRKAFYEYHAAMLEPWDGPASIVFTDGRQIGATLDRNGLRPSRYCVTDDDLVIMASESGVLPIPEHKIVRKWRLQPGKMFLIDLEQGRMVDDEEIKATLAHSKPYKQWIENLRIKLDDVSGKVPAAAASATPADAGLTLLDRQQAFGYTQEDIKFLMSPMATNGEEATGSMGNDSPLAVLSNKNKPLYNYFKQLFAQVTNPPIDPIREAIVMSLVSFIGPKPNLLDINQVNPPMRLEVSQPVLNVADMQKLRDIEAHTQGKFKSYTLDITYPLAWGHEGVEAKLASLCAEAVDAIKDGKNILIVSDRAVSAAQVAIPALLALSAIHQHLVKEGLRTTAGLVVETGSAREVHHFAVLAGYGAEAVHPYLAMETLAELSRGLPGDLNTDKAVYNYTKAIGKGLSKIMSKMGVSTYMSYCGAQLFEAIGLNRDTVAKFFSGTASQVEGMGVFEIAEEALRMHKAAFSDDPVLANMLDAGGEYAWRVRGEDHMWTPDAIAKLQHSTRSNNWNTYKEYAQLINDQNRRHMTLRGLFEFRIDPSKAIPIDEVEPAKEIVKRFATGAMSLGSISTEAHATLAVAMNRIGGKSNTGEGGEDPNRYRQELKGIPIKKGETLKSVIGPKQVEVDLPLQDGDSLRSRIKQVASGRFGVTAEYLVSADQIQIKMAQGAKPGEGGQLPGGKVSDYIGHLRYSVPGVGLISPPPHHDIYSIEDLAQLIHDLKNVNPRASISVKLVSEVGVGTIAAGVAKAKSDHVVIAGHDGGTGASPWSSIKHAGSPWEIGLAETQQTLVLNRLRGRIRVQADGQMKTGRDVVIGALLGADEFGFATAPLVVEGCIMMRKCHLNTCPVGVATQDPVLRQKFSGKPEHVVNYFFFVAEEARQLMAQLGVRKFDDLIGRADLLDTQKGIEHWKARGLDFGRLFYQPNVPADVPRLHVMEQDHALGKALDIRLIEKSKAALEKGEKVQFIEVARNVNRTVGAMLSGELTRRHPEGLPDDTLRIQLEGTGGQSFGAFLAKGITLYLIGDANDYTGKGLSGGRIVVRPSIDFRGESHKNTIVGNTVLYGATTGEAFFSGVAGERFAVRLSGATAVVEGTGDHGCEYMTGGTVAVLGKTGRNFAAGMSGGVAYVYDEDGLFATRCNTSMVSMDRVVSTVEQHAHESDWHAGESDEELLKRLLQDHNRWTGSKRARELLDNWSEARLKFVKVFPNEYKRALIERKERRLEAATETTRSQVATNLETAAAK

SEQ ID NO: 825 - protein, 1539 aa, Desulfitobacterium hafniense DCB-2
MQNYGLPQKQGLYDPALEHDACGMGFVVSIKGEKSHEIIDEALTVLENLNHRGASGADENTGDGAGILVQIPHDFFQRECEVLGFALPEKGNYGVGMIFAHRYADFRQIQMETFERIVIEEGQRILGWREVPIDKSTIGESAKTVMPRFIQVFIEKNPEILDVMDFERKLYTIRKRAEKIILPMCEDKGGTFYVASLSAKTIVYKGMLTAEQLRHFYLDLSDLDFVSALAMVHSRFSTNTFPSWERAHPNRYIVHNGEINTIRGNVNWMRARQKCIDSSLFEDIAKVYPIVDEFGSDSAMFDNSLEFLHLTGRSLPHAVMMMIPEPWENNDFMPKAKRDFYAYNSFLMEPWDGPAAMGFTDGVVIGGVLDRNGLRPSRYYVTKDDKVILASEVGVIDIKPENVQYKGRLEPGKMLLIDTEAQRIIADEEIKAGVARKNPYGEWIEKHIVKLSSLPEAARMDQGAGSVGIVEESEESKDQGQLIQQQKAFGYTFEDITKTIQPMAVEGVDPVGAMGMDSPLAVLSEKPQMLYLYFKQLFAQVTNPPIDGIREEIVTSCTMLLGNSGNLLDPDQENTASLFLEHPILTNEQLNRIKHLQHGQFKTVTLSMLYPVAGGPKAMERALERLCREADKAIAEGANIIILSDRGVDKEQAAIPALLASSGLHHHLIRKEIRTNLGIVLESAEPREVHHFCTLVGYGVTAINPYLAYETIEDLAAKGLLDGLTAQAGIKNFIKASVKGMLKVLTKMGISTMHSYHGAQIFEAVGLRKDLIDKYFTMTPSRLEGIGLEEIALENQMRHESAYDENSLYADSLEVGGYFQCKEDGEKHLYNPETIYLIQKACREGNYALFKEYTKKINEEEVYTLRHLLDFKYNAGDTIPIEEVESVDSIVKRFKTGAMSYGSISKEAHEALAVAMNRLGGKSNTGEGGEDCERFKVLTNGDTKNSAIKQVASGRFGVTSNYLVNAQEIQIKMAQGAKPGEGGQLPGRKVYPWVAKTRHSTPGVDLISPPPHHDIYSIEDLAELIHDLKNANRGARINVKLVSEVGVGTIAAGVAKGKADVILISGYDGGTGASPRTSIRNAGLPWELGLAETHQTLVLNKLRDRVVVETDGKLLSGRDVVIAAMLGAEEFGFATTPLIALGCVMMRVCNLNTCPVGIATQDEELRKNFTGKPEHVENFMRFIAQEMREIMAKLGFRTINEMVGRTDRLKSKETIKNWKASQLDLSQILYQPYAGSDVSRYNTQAQKHLLEKSLDMKKLLRVCQPALENQKPIRAKLKINNVDRVVGTIIGSEISKRYGEQGLPEDTIKLAFVGSAGQSFGAFVPKGLTLELEGDSNDYLGKGLSGGKIAVYPPRTADFVPEENILIGNVAFYGATSGEAYINGIAGERFCVRNSGVHAVVEGVGDHGCEYMTGGKVVILGKTGRNFAAGMSGGVAYILDFDENYCNKSMVLLENIQSEAELDEVKEMIRKHVEYTHSPQGGKVLADWESYATRFTKVIPKDYKRMLANIDKACQDGYSGDEALMAAFAEHFKTSEAAK

SEQ ID NO: 826 - protein, 363 aa, Triticum aestivum
  misc_feature (162)..(162): Xaa can be any naturally occurring amino acid
  misc_feature (192)..(192): Xaa can be any naturally occurring amino acid
NKFVQKSRLVPVRNSRDILRPTRPPPSPAWTGNFSFHGRSLHHISNVPNPYEQGISILGQTLSKFDEDNLIPCFGFGDASTHDQDVFCFYPDERPCNGFSEALERYRELVPHLRLAGPTSFAPIIEMAMTIVEQSGGQYHVLLIIADGQVTRSVDTASGPAXGSQEQKTVDAIVRASELPLSIVLVGVGDGXPWDMMKEFDDNIPARAFDNFQFVNFSEIMSKNMPQSRKEAAFALSALMEIPQQYKATVELGILGRRSMKAPERVPLPPPGGSHDAYSYGSKSFSKPQPSTSSSAYPPYETAHTAAPAAPSSAYDNQVCPICLVNPKDMAFGCGHQTCCECGQTLESCPICRSPITTRIKLY

SEQ ID NO: 827 - protein, 1514 aa, Streptomyces coelicolor A3(2)
MDARPAAQGMYDPRNEHDACGVGFVATLTGEASHTLVDQALTVLRNLEHRGATGSEPDSGDGAGILSQVPDAFFREVAGFELPEAGAYAVGIAFLPVDGTEDAVSRIETIAHEEGLTVLGWREVPVAPQMLGATARSTMPVFRQVFVGDGASRGIALDRHAFALRKRAEREAGVYFPSLSARTIVYKGMLTTGQLEPFFPDLSDRRFASAIALVHSRFSTNTFPSWPLAHPYRFVAHNGEINTVKGNRNWMRARESQLASNLFGSSADLERIFPICTPDASDSASFDEVLELLHLGGRSLPHSVLMMIPEAWENHASMDADRRAFYQFHSTMMEPWDGPACVTFTDGTQVGAVLDRNGLRPGRYWVTDDGLVVLGSEVGVLDIDPAKVVRKGRLQPGRMFLVDTAEHRIIEDDEIKAQLAGEQPYGEWMEAGEIELSDLPEREHIVHTHASVTRRQQTFGYTEEELRVILAPMAKAGAEPIGSMGTDSPIAALSERPRLLFDYFTQLFAQVTNPPLDAIREELVTSLRSSLGPQGNLLDPTAASCRSVLLPFPVIDNDELAKLIHINADGDMPGFKAATLSGLYRVHGGGDALAARIEEICAEADAAIENGARLIVLSDRHSDAEHAPIPSLLLTAAVHHHLIGTKQRTQVGLLVEAGDVREVHHVALLIGFGAAAVNPYLAMESVEDLVRAGTFLQTDDGEPEQAIRNLIYALGKGVLKVMSKMGISTVASYRGAQVFEAVGLDEEFVAKYFHGTATKIGGVGIDVVAKEVAARHAKAYPASGIAPAHRALDIGGEYQWRREGEPHLFDPETVFRLQHSTRSGTYDIFKKYTERVNEQSERLMTLRGLFGFKSGRQPISIDEVEPVSEIVKRFSTGAMSYGSISQEAHETLAIAMNQLGGKSNTGEGGEDPERLYDPARRSSIKQVASGRFGVTSEYLVNADDIQIKMAQGAKPGEGGQLPGHKVYPWVAKTRHSTPGVGLISPPPHHDIYSIEDLAQLIHDLKNANPQARIHVKLVSEVGVGTVAAGVSKAHADVVLISGHDGGTGASPLTSLKHAGGPWELGLAETQQTLLLNGLRDRIVVQTDGQLKTGRDVVIAALLGAEEFGFATAPLVVSGCVMMRVCHLDTCPVGIATQNPVLRERFSGKAEYIVNFFRFIAEEVREILAELGYRSIEEAVGHAETLDVTRAVDHWKAQGLDLEPLFHVPALTEGAVRHQAVGQDHGLEKALDNQLIKLASDALAAPDATRAAPVRAQVAIRNINRTVGTMLGHEVTKKFGGGGLPDDTVDITFTGSAGQSFGAFVPRGITLRLEGDANDYVGKGLSGGRIVVRPDRGADHLAEYSTIAGNTIGYGATGGEMFLRGKVGERFCVRNSGALVVSEGVGDHGCEYMTGGHAVVLGETGRNFAAGMSGGIAYVVDLDRDNVNVGNVDAVQALDDADKDWLHDVVRRHAEETGSTVAGKLLADWPVAVERFSKIIPSTYQAVLAAKDAAERAGLSETETTEKMMEAATNG

SEQ ID NO: 828 - protein, 366 aa, Physcomitrella patens subsp. patens
MNPRYSMINDNYRSLEEVQRALKDNGLESSNLIVGIDFTKSNEWTGRVSFGGRSLHAIGQEQNPYEKALTIIGTTLSPFDDDNLIPCFGFGDSTTHDKQVFSFYSENRPCDGMEEALARYRAILPHVRLAGPTSFAPIINAAVDIVEESGGQYHVLFIIADGQIEGPQERATVDAIVNASYYPLSIVLVGVGDGPFSMMKEFDDNLPERTFDNFQFINFTEIMQSRLLPQEKEAKFALGALMEIPLQYKATVKLGILGTRRGQSPGVRPRPPPPRVLQMDGLGYGPSPGSPQTPSFTHMDSQKYGRSNNPQAPSSIYSEDAECPVCLLDKKDTAFNCGHQTCQYCAQALTNCPICRQPISRRIRLY

SEQ ID NO: 829 - protein, 529 aa, unidentified eubacterium SCB49
MKVREFFILISVAITFCIVTISFFWPPILWLFILVVPLILMGIFDVLQKPHTIRRNFPVIGRFRYVLESIRPEIMQYFVETDTEGRPINRILRSLVYRRAKGQNDTEPFGTQLNLYHSGYEWLEHSMYAKHNPKNIGKFPRLLIGGKDCKQPYSSSLLNISAMSFGSLSTNAVMALNKGAKMGGFAHNTGEGGISDYHLKYGGDLIWQVGTGYFGCRKEDGTFNPKTFRENALRPEVKMIEIKLSQGAKPGHGGILPAVKNTEEIAKIRHVKPGIAVHSPPSHSAFSDPMQFMQFIKQLRELSDGKPIGFKLCLGRKQEFMDFCEAMVVSGITPDFITVDGGEGGTGAAPVEFSNSMGMPLREGLVFVHDTLVGYGLRKEIKVIAAGKIITGFHVARAIALGADGCNSARAMMLSIGCIQALQCNNNTCPVGVATQNKSLVKGLVVDDKAPRAERYHNATIQSFLELIAAAGLNGPEELSRNHISKRLGSFNIKTYDDIYPYIEENSLLNIETIPEDYKKFFQLTRIMK

SEQ ID NO: 830 - protein, 1577 aa, Acidovorax sp. JS42
MTKAAEIQHLQQHGLYASSNEHDACGLGFVAHIKGVKRHDIVTGALKILENLDHRGAVGADKLMGDGAGILIQIPDQLYREEMARQGVELPPAGEYGVGMIFLPKEHASRLACEQEMERAIKAEGQVLLGWRDVPVNLDMPMSPTVREKEPILRQVFIGRGSDVIVQDALERKLYVIRKTASAAIQALKLKHSKEYYVPSMSSRTVVYKGLLLADQVGVYYKDLADERCVSAIGLVHQRFSTNTFPEWPLAHPYRYVAHNGEINTVRGNYNWMLAREGVMASPVLGEDLKKLYPISFAGQSDTATFDNCLELLTMAGYPISQAVMMMIPEPWEQHESMDERRRAFYEYHAAMLEPWDGPASIVFTDGRQIGATLDRNGLRPSRYVVTDDDLVILASEAGVLPVPDGKIVRKWRLQPGKMLLIDLEQGRLIEDDELKANIVNTKPYKQWIENLRIKLDDVKVGESAVHPAASALPLLDRQQAFGFTQEDIKFLLAPMAKNGEEGVGSMGNDSPLAVLSDKNKPLYNYFRQMFAQVTNPPIDPIREAIVMSLVSFVGPKPNLLDINQVNPPMRLELQQPILDFEGMAKLRQIEQYTHGKFKSATIDITYPLAWGKQGVEAKLASLCAQAVDEIKGGANILIISDRNLSATQVAIPALLALSAIHQHLVREGLRTTAGLVVETGTAREVHHFAVLAGYGAEAVHPYLALETLVDMHQELSGDLSADKAIYNYVKAVGKGLSKIMSKMGVSTYMSYCGAQLFEAVGLNSDTVQKYFTGTASRVEGIGVFEIAEEAIRTHLAAFSDDPVLETMLDAGGEYAWRARGEEHMWTPDAIAKLQHSTRANNFSTYKEYAQIINDQAKRHMTLRGLFEFKFDPAKAIPVEEVEPAKDIVKRFATGAMSLGSISTEAHATLAVAMNRIGGKSNTGEGGEDPKRYRNELKGIPIQQGETLSSIIGSDKVQADIPLLNGDSLRSKIKQVASGRFGVTAEYLASSDQIQIKMAQGAKPGEGGQLPGGKVSDYIGQLRHSVPGVGLISPPPHHDIYSIEDLAQLIHDLKNVAPHADISVKLVSEVGVGTIAAGVAKCKSDHVVIAGHDGGTGASPWSSIKHAGSPWEIGLAETQQTLVLNRLRGRIRVQADGQMKTGRDVVIGALLGADEFGFATAPLVVEGCVMMRKCHLNTCPVGVATQDPELRKKFTGKPEHVVNYFFFVAEEVRQIMAQLGIRKFDELIGRTDLLDTRKGIAHWKAQGLDFSRLFAQPQVPADVPRYHVETQDHKLDKALDVKLIERCRPAIERGESVRIMEVAKNVNRSVGAMLSGAVTKVHPEGLPDDTVRIHFEGTGGQSFGAFLCKGITLNLTGEANDYTGKGLSGGRVIVRPSHEFRGESASNTIVGNTVMFGATSGEAFFAGVAGERFAVRLSGATAVVEGVGDHGCEYMTGGTVVVLGKTGRNFAAGMSGGIAYVYDEDGKFDSRCNLSMVTLERILPGEEQAVHMGRGIWHRDQTDEALLKKLLEDHSRWTGSKRAREILDNWAASRSKFVKVFPTEYKRALSEIYERKVLEEQATPAVAAPKTEAVAAK

SEQ ID NO: 831 - protein, 73 aa, Medicago truncatula
MKIHHHSTCHRLLRFYNRIGRDVVSYSAAENLDECPPNDAMETTRSHGQWSISHRSQVAETTTSYANSVDAED

SEQ ID NO: 832 - protein, 2192 aa, Phaseolus vulgaris
MSSSISFPTVRTPSARTLPCKTEKSLFNSRCPVRVTKFLGTRLRSSGKWLGSERLHVWKSEGPLRRPKLRVVVRSGMSTVPKKPLGLYDPAMDKDSCGVGFVAELSGEGNRNTVTDALEMLVRMTHRGACGCEPNTGDGAGIMVGLPHQFYKEVVDFELPPPGKYAIGMFFLPTSNSLREESKSVFQKVAESLGHSVPGWRSVPTNNSELGKSALLTEPVIEQVFLTPSTLSKVDLERQMYILRKLCMVAITSTLNLHNDGTTDFYICSLSSRTVVYKGQLTPAQLKDYYFADLGNERFTSYMALVHSRFSTNTFPSWDRAQPMRVLGHNGEINTLRGNVNWMKAREGLLKCKELGLSENELKKLLPIVDANSSDSGAFDGVLEFLIQSGKSLPEAVMMMIPEAWQNDKNMDPQRKAFYEYFSALMEPWDGPALIAFTDGHYLGATLDRNGLRPGRFYVTHSGRVVMASEVGVVDIPLEDVSRKGRLNPGMMLLVDFEKHIVVNDDALKEQYSLARPYGEWLKEQKLELKDIVDSVQQSERMPPTIAGVVPAYGDDVDMENMGIHGLLAPLKAFGYTVESLEMLLLPMAKDATEALGSMGNDTPLAVMSNREKLTFEYFKQMFAQVTNPPIDPIREKIVTSMECMVGPEGDLTEITEAQCHRLSLKGPLLSIEEMEAIKKMNHRGWQSKVIDITYSKGRGKKGLEEALDRICAEAHDAIGDGYTTLVLSDRAFSRKRVAVSSLLAVGAVHQHLVKTLERTRVALVIESAEPREVHHFSTLVGFGADAVCPYLAVEAIWRLQVDGKIPPKASGEFYSKDELIKKYFKASNYGMMKVLAKMGISTLASYKGAQIFEALGLSSEVIERCFAGTPSRVEGATFEMLARDALQLHELAFPSRVFSPGSAEAIALPNPGDYHWRKGGEIHLNDPLAISKLQEAARTNSVDAYKQYSKLIHELNKACNLRGLLKFKEAAVKVPLDEVEPASEIVKRFCTGAMSYGSISLEAHTALATAMNKMGGKSNTGEGGEQPSRMEPLSDGSMNPKRSAIKQVASGRFGVTSYYLTNADELQIKMAQGAKPGEGGELPGHKVVGDIAVTRNSTPGVGLISPPPHHDIYSIEDLAQLIHDLKNANPAARISVKLVSEAGVGVVASGVVKGHADHILISGHDGGTGASRWTGIKNAGLPWELGLAETHQTLVANDLRGRTVLQTDGQLKTGRDVAIATLLGAEEFGFSTAPLITLGCIMMRKCHKNTCPVGIATQDPVLREKFAGEPEHVINFFFMIAEEMREIMSQIGFRTVKEMVGRSDMLEVDKEVIKSNEKLENIDLSLLLRPAAELRPEAAQYCVEKQDHGLDMALDNKLIALSKAALEKGLQVYIESPILNVNRAVGTMLSHEVTKRYHLNGLPTDTIHIRFKGSAGQSFGAFLCHGITLELEGDGNDYVGKGLSGGKIVVYPSKVSTFDPKQNIVIGNVALYGATSGEAYFNGMAAERFCVRNSGVKAVVEGVGDHGCEYMTGGIVVVLGNTGRNFAAGMSGGIAYVLDIDGGFPSRCNRELVDLDKIEEEDDIATLKMLIQQHQRHTNSVLASEVLADFDSILPKFIKVFPREYKRVLASMKLKEASKDAAESASKHGEEQVEMELVEKDAFKELKELATASPNGKPNEAESFKRPSQVIDPVKHRGFVAYEREGVQYRDPNVRLNDWKEVMKETQPGPLLKTQSARCMDCGTPFCHQENSGCPLGNKIPEFNELVYQNRWREALERLLETNNFPEFTGRVCPAPCEGSCVLGIIENPVSIKSIESAIIDKAFEEGWMVPRPPVNRTGKRVAIVGSGPSGLAAADQLNKMGHTVTVYERADRVGGLMMYGVPNMKADKENIVQRRVNLMAEEGINFVVNASVGHDPLYSLDRLREENDAVVLAVGATKPRDLPAPGRELSGIHFAMEFLHANTKSLLDSNLHDGNFISAKGKKVVVIGGGDTGTDCIGTSIRHGCSSIVNLELLPEPPQTRAPGNPWPQWPRIYRVDYGHQESAAKFGKDPRSYEVLTKRFVGDENGVVKGLEIVRVRWEKDATGRFQFKEIEGSEEIIEADLILLAMGFLGPEPTIAEKLGMERDNRSNFKAEYGRFSTSVSGVFAAGDCRRGQSLVVWAISEGRQAAAQVDNYLSNEDIEHIAGNPDELIKHQQDLTKRGTVAVANTQ

SEQ ID NO: 833 - protein, 92 aa, Medicago truncatula
MDEGPPDDTLAKTRSHGQWSIDHGSRVAETATSYANSVEAEDRGELSSMSQSNDIDGSFQSATDPIVPESYAEHMMLAMAVFIVEGRAMSDG

SEQ ID NO: 834 - protein, 502 aa, Moorella thermoacetica ATCC 39073
MPTLSLMPPEFSVVRDENKCIKCLACVRQCGFDAQKYDAEDDRLYTIDANCVNCQRCVSICPAGALTIYKNPPPMRPNAYWSEGHLRNIIKQAETGGVLLTGMGNDQPYPSYFDRLLLNASQVTNPSIDPLREPMELRTYLGSRTEPVSLEERQDKTRTPLVPLETPIMFSAMSYGSISHEAFESLARAAKEFGTMFNTGEGGLPEDLYQYADHAVVQVASGRFGVHADYLNAGRIIEIKIGQGAKPGIGGHLPGEKITAAVSATRMIPEGTDALSPAPHHDIYSIEDLKQLVFTLKEATRYQKPVSVKVSAVHNVAAIASGIARAGADIITVDGFRGGTGAAPTMIRDHVGIPIELAIAAVDQRLREEGIRNKVSLVAAGGFRSSADVVKAIALGADAVYIATAALIALGCHLCQKCYTGKCSWGIATQDPYKTRRLNPEIGAERLYNLLRGWSHEIKEMLGGMGINSIESLRGNRLHLRGVGLNEVELKLLGVKHAGEAI

SEQ ID NO: 835 - protein, 2196 aa, Phaseolus vulgaris
MSNALSFTLPALNNPQISAFNSPNKARLHLRSRVARCPASTVEKKRLFGAQVRSSGFDRIRLLQSGRLPKWRVAVRSAFSAVPEKPLGLYDPAMDKDSCGVGFVAELSGECNRRTVTDALEMLVRMTHRGACGCEANTGDGAGILVALPHVFYQEVVDFELPPQGKYAVGMFFLPKSENRRKESKKLFSKVAESLGHTVLGWRSVPTDNTGLGKSALQTEPVIEQVFLTPSAESKVDLERQMYILRKLSMAAITSALNLQNDGITDFYICSLSSRTVVYKGQLTPAQLRDYYFADLGNERFTSYHGPDTFTVFYKYFSIAGIVLNLCVYIGHNGEINTLRGNVNWMKAREGLLKCKELGLSENKLKKLLPIVDANSSDSGAFDGVLEFLLHSGKSLPEAVMMMIPEAWQNDKNMDSQRKAFYEYFSALMEPWDGPALISFTDGHYLGATLDRNGLRPGRFYVTHSGRVIMASEVGVVDIPPEDICRKGRLNPGMMLLVDFEKHAVVNDDALKEQYSLARPYEDWLKNQKIELKDIVDSVPKSGRVPPPIAGVAPPSNDDEDMVNMGIHGLLAPLKAFGYSVESLEMLLLPMAKDGVEALGSMGNDTPLAVMSNREKLTFEYFKQMFAQVTNPPIDPIREKIVTSMQCMVGPEGDLTEITEEQCHRLSLKGPLLYTEEMEAIKKMNYRGWHSKVIDITYSKERGKGGLEEALDRICAEAHDAISEGYTTLVLSDRAFSRKRVAVSSLLAVGAVHQHLVKTLERTRVALIVESAEPREVHHFCTLVGFGADAICPYLAIETIWRLQVDGKIPPKSSGEFHSKEELVKKYFKASNYGMMKVLAKMGISTLASYKGAQIFEALGLSSKVIEKCFAGTPSRVEGATFETLARDAFQLHELAFPSRVFSPGSAEAVTLPNPGDYHWRKGGEVHLNDPLAIAKLQEAARTNSVDSYKQYAKFIHELNKACNLRGLLKFKETAVKIPIDEVEPASEIVKRFCTGAMSYGSISLEAHTALAMAMNKIGGKSNTGEGGEQSSRMEPLPNGTMNPKRSAIKQVASGRFGVSSYYLTNADELQIKMAQGAKPGEGGELPGHKVIGDIAVTRNSTAGVGLISPPPHHDIYSIEDLAQLIHDLKNANPTARISVKLVSEAGVGIIASGVVKGHADHVLISGHDGGTGASRWTGIKNAGLPWELGLAETHQTLVANDLRGRTVLQTDGQLKTGRDVAIATLLGAEEFGFSTAPLITLGCIMMRKCHKNTCPVGIATQDPVLREKFAGEPEHVINFFFMVAEEMREIMSQLGFRTVNEMVGRSDMLEVDKEVIKSNEKLENIDLSLLLRPAAELRPEAAQYCVQKQDHGLENALDNKLISLSNAALEKGLPVYIETPIYNVNRAVGTMLSHEVTKRYHLAGLPSDTIHIRFTGSAGQSFGAFLCPGITLELEGDSNDYVGKGLSGGKIVVYPPKGSNFDPKENIVIGNVALYGATQGEAYFNGMAAERFCVRNSGAKAVVEGVGDHGCEYMTGGTVVVLGETGRNFAAGMSGGIAYVLDLDGKFQSRCNLELVDLDKVEEEEDVYTLRMLIQQHQRHTNSLLAKEVLDDFENLLPKFIKVFPREYKRVLASVKSEEASKDAVVQAAKDAEDQDDEAQAVEKDAFEELKKLATVSLNEKQSQAETPKRPSQVTDAIKHRGFVAYEREGVQYRDPNVRMADWNEVMEETKPGPLLKTQSARCMDCGTPFCHQENSGCPLGNKIPEFNELVYQNRWREALERLLETNNFPEFTGRVCPAPCEGSCVLGIIENPVSIKSIECAIIDKAFEEGWMVPRPPVKRTGKRVAIVGSGPSGLAAADQLNKMGHAVTVYERADRIGGLMMYGVPNMKSDKVDVVQRRVNLMAEEGVDFVVNANVGNDPLYSLDRLREENDAIVLAVGSTKPRDLPVPGRELSGVHFAMEFLHANTKSLLDSNLEDGSYISAKGKKVVVIGGGDTGTDCIGTSIRHGCSSIVNLELLPQPPPTRAPGNPWPQWPRIFRVDYGHQEAAAKFGKDPRSYEVLTKRFLGDENGVLKGLEVIRVCWEKDETGRFQFKEIEGSEEIIEADLVLLAMGFLGPEPTIAEKLGLDRDNRSNFKADYGRFSTNVKGVFAAGDCRRGQSLVVWAISEGRQAAAQVDNYLVKDDDEHRNQDGLVKRQQGLNKKQQGSSKHTVMT

SEQ ID NO: 836 - protein, 271 aa, Chlamydomonas reinhardtii
HTPPNQSKSHTCSSHMHRAIADHYASLEQVQEDLRKNGLESSNLIVAVDFTKSNEWTGKRSFGSRSLHAIGDQPNPYEEAIGVIGRTLSAFDDDGLIPCYGFGDVTTGDSSVFSFLADDKPCRGLEHALWRYRELCPYIRMAGPTSFAPAVRQASRIVEASGGQYHILLLVADGQVSRPSGLMDHQKSEQEQDTIDAIVEASSLPLSIVMVGVGDGPWDLMKDFDDALPERAFDNFQFVNFSELMATTQGDRARREALFALRALMEIPEQY

SEQ ID NO: 837 - protein, 139 aa, Yarrowia lipolytica
MSDRETSGNDDLSLPKATVQKIVSEIIPSDLAFAKDTRDVLIECCIEFIMMLSTESNEIAEKESKKTIAPEHVIKALQELGFIDYIEPIKDLIVEHKEALKSREKKVGKLEQSGMTEEELLRKQEEMFAAARSKLNNNA

SEQ ID NO: 838 - protein, 1567 aa, Xanthobacter autotrophicus Py2
MAATDRTDGLNGSVARTAAAVKDTAIVGRPEPFGLFDPAHERDACGVGFIADIKGRKSHRIIQDGINILLNLEHRGAVGADPRAGDGAGMLVQIPHKFFLKEAARLGFSLPEPGLYAVGHIFLPRDPEGEQIVRATYERAVAEEGLVILGWRDVPTDNSSLGWSVLPTEPKHAQVFIGRGEFAGDEDGFERRLFVLRKVISNTVYGAKDPRTAGYYPVSLSCRTLVYKGMFLADQLGAYYADLHDPDFESALALVHQRFSTNTFPAWPLAHPYRMVAHNGEINTLRGNVNWMAARQASVDTELFGADISKLWPISYEGQSDTACFDNALEFLTQGGYSLPHAAMMLVPEAWAGNPLMDEERRAFYEYHAALMEPWDGPAAIVATDGRQIVATLDRNGLRPARYMVTSDDTIVLASEMGVLTLPEERIVTKWRLQPGKMLLVDLVEGRLVPDEEIKTQLARANPYKEWLKHTQLVLEDLRPVEAREVRTDVALLDRQQAFGYTQEDLKLLMAPMAITGQEAVGSMGTDTPISVLSNKSKLLYTYFQQNFAQVTNPPIDPIREELVMSLVSFIGPRPNIFDLEGTARRKRLEVRQPILTNEDLEKIRSIGFMEERFDTRTLDITYPSDKGAAGMSDAVERLCERAEAAVHGGYNIIILSDRLVGPDRIPIPALLATAAVHHHLIRKGLRTSVGLVVETGEAREVHHFACLAGYGAEAINPYLAFETLLSMKDEIPEEVDDKEIVKRFIKSIDKGLLKVMSKMGISTYQSYCGAQIFDAVGLSSELVNKYFFGTATTIEGVGLAEIAEESERRHTLAFSDAPIFRMALDVGGEYAYRIRGEDHAWSPESVAELQHAVRGNARDKFRAFSTMINDHDSRLLTVRSLFRIKSAEELGQAPVDLSEVEPAADIVKRFVTGAMSFGSISREAHTTLAIAMNRIGGKSNTGEGGEEPERFKPLPNGDSMRSAIKQVASGRFGVTAEYLVNSDVMQIKVAQGAKPGEGGQLPGHKVDAVIAKVRHSTPGVGLISPPPHHDIYSIEDLAQLIYDLKNVNPDADVSVKLVSEVGVGTVAAGVAKARADHITISGFEGGTGASPLTSIKHAGSPWEMGLAETQQTLVANRLRSRVALQVDGGLRTGRDVIIGALLGADEFAFSTAPLIAAGCIMMRKCHLNTCPVGVATQDPVLRKRFKGTPEHVINYFFFVAEEVREIMASLGFRKMDEMVGRSEVLDQNAAINHWKAKGLDFSRIFAKPDMPPEVGIRHTERQHHPIERVLDRTLIAQAAPALERGERVEIKTPIRSVDRSAGAMLSGAVAKAYGGQGLPDDTIHVELSGTAGQAFAAFLAAGVTFDLIGEANDYVGKGLSGGRIIVRPPANAAIVPEDSIIVGNTVMYGATEGECYFRGIAGERFAVRNSGAIAVVEGTGDHGCEYMTGGIVVVIGQTGRNFAAGMSGGVAYVLDEDKSFAKRCNLSMVDLEPVEEEEDLLERLHHHGGDLEFKGRIDVQGDMSRHDEERLHQLIAKHLHYTGSARAQAILDNWAEYRSKFVKVMPVEYRRALRDMEKRRGLAAAE

SEQ ID NO: 839 - protein, 1521 aa, Rhodopirellula baltica SH 1
MTKQPLFHLPPAQGLYDPEHEKDACGVGFVAHIKGAPSHQIVIDADTILQNMDHRGACGCEPNTGDGSGIMCGLPHKFLQKVAKADLGVELPEEGKFSAGLIFLPTDEAERKVCKDTIARLIEETGQKLIGWRDVPQETDAADVGPTARQSEPVIEQLFVGAADGITNEEFERQLYLIRKQASHELRGGTKIKQALMFYVCSLSTKVIIYKGMLTPAQVMPYFPDLRDEDFETHLAMVHSRFSTNTFPSWDRAQPLRFMSHNGEINTLRGNANWMRAREGTAASEIYGDELKKLFPVVEPHLSDSGTFDNVLEFLLMNGRTLQEAIMMMVPEAWQKHETMPEEKRAFYEYFSCMMEPWDGPASIAFTDGKCIGATLDRNGLRPSRYYITHDDRVIMASEVGVLPVDPSIVREKGRLQPGKMFLIDFEAGRLIPDEELKADFARKKPYGKWLKQQRIRLADLHPEAEGHGFDGDTLLPRMQAFGYTAETMNFMLRPLVEQLRDPVGSMGNDSALACLSDKPRMIYDYFKQLFAQVTNPAIDSIREEVIMSLECYIGPEQNLLAATPEHCHRLLIDHPILTNEEVAALKHVDHERWHSRVIDTTFDRSEGKAGLTKTLDRICAEAEAAVDEGLQIIVLSDRDVSHDRVPVSMLLATGAVHHHLVAKAKRTRVGIAVETGEAREVHHHCLLIGYGADAINPYLAFEALWQAHRDGLMSPTLDDDKIVAAYRKGVAKGMLKVMAKMGISTLQSYKGAQIFEALGLRDEVIKRCFVGTASRIQGVTFDVIAEETLRRHKLGFPDKESDRLTQLPNLGEFHWRAEGEKHAWSPQAISSLQIAARNNNEDAYWKFSHEINEDNRTRCTLRGLLDFKEGVGGPALPLDEVQSAKDIVKRFCTGAMSLGSISAESHETLAIAMNRLGGKSNTGEGGEDPKRFLPLPNGDTKRSAIKQIASGRFGVTIEYLTNADELQIKVSQGAKPGEGGELPGKKVDNYIANIRYSTPGVGLISPPPHHDIYSIEDLAQLIHDLKNSNPAARVSVKLVSEVGVGVIASGVAKAHADHILISGDTGGTGASPLTSIKHAGLPWELGIAETHQVLVLNDLRSRVVLQTDGGLKTGRDVVIAALLGAEEFGFSTAPLITLGCIMMRKCHLNTCPVGIATQDPELRKMFSGKPEHVVNYLFMVAEEARRIMARLGFRTIDEMVGRSDVLSTDDAIKHWKSDGLDLTSVLSPAQRPHDKVEVICTRGQDHGLEKSLDMTKLVAEAMPAIENGESVRITSPIININRTVGTILSHEIAKRHGQAGLPDDTIHIDLTGSAGQSLGAFLAHGVTIELEGDANDYVGKGLSGGRIMVYPPRESTFEAANEIIVGNVCLYGATSGEAYFSGRAAERFCVRNSGARTVVEGVGDHGCEYMTGGRVVCLGETGRNFAAGMSGGIAYIWDRKGDFNLHCNLATVELEKIEDEAELADVKGMIEKHHEYTKSALAAEALADFDKFVSQCVKVMPIDYKRVLAEMAAEKDAVSV

SEQ ID NO: 840 - protein, 2152 aa, Candida glabrata CBS 138
MLSSDPYDPMEDAYETSGNIPDYAHDELYHNSENKSWGQVVPGKVGLYDPDYEHDACGVGFVANVNGLQSHKIVSDARSLLCNMTHRGAVSSDGNGDGAGILVGIPHGFIKREFKLDLGIEVPERGQYAVGNVFFKKDDSDDETLSEKSKAEIRVMQQKFEDTARNFNLNVVGWRNVPHDSSILGDVALSREPVILQTLVVPLDSNELVEFNETVFKTNLYLFRKFITKQFKPEDCFYVCSLSNSTIVYKGQLTPNQVYNYYHDLTNAHFESHMALVHSRFSTNTFPSWDRAQPLRWVAHNGEINTLRGNKNWMRSREGVMVSETFKDKLDSLYPIIEEGGSDSAALDNVLELLTINGTLSLPEAIMMMVPEAYHSDMDSDLKAWYDWAACLMEPWDGPALLTFTDGRYCGAILDRNGLRPCRYYVTSDDRVICASEVGVIPIDNSLVLQKGKLKPGDVFLVDTQQGQIVDTKKLKSDFSKREDFKSWLSKVIKLEDLLQKTENCEPEDFVLNAPSLKVQSDPRLLAHGYTFEQFSMLLTPMALTGKEALGSMGNDAPLACLNQDPVLLYEYFRQLFAQVTNPPIDPIREANVMSLDCYVGPQGNLLEMHPSQCERLLLKSPILKWNEFKAIQNIEKVNPSWSVANIDITFEKSEGIEGYINAVERITKDASIAIEEGKKILIISDRRMGEHRVALSSLLAVSSIHHHLIRNKQRTEVALILETGEAREIHHFCVLLGYGCDGIFPYLAMETLIRMNREGLVRNVNNDDHDLTDQELVENYKHAIDSGILKVMSKMGISTLASYKGAQIFEALGIDSSVIDLCFTGTSSRIKGVTFEYIAQDAFSFHEKGYPSRMTITRSVNLPETGEYHWRDGGYKHVNDPTAIAALQDSVRHKNDDAWSLYVKKEMEAIKDCTLRGLLELDFENSTPIPIEQVEPWTEIARRFASGAMSYGSISMEAHSTLAIAMNRLGAKSNCGEGGEDAERSLVHPNGDTMRSAIKQVASARFGVTSHYLSDADEIQIKIAQGAKPGEGGELPAHKVSKSIAKTRHSTPNVGLISPPPHHDIYSIEDLKQLVYDLKCANPRAGVSVKLVSEVGVGIVASGVAKAKADHILISGHDGGTGASRWTSIKYAGLPWELGLAETHQTLVLNDLRRNVVVQTDGQLRTGFDIAVAVLLGAESFTLATIPLIVMGCVMLRRCHTNTCAVGIATQDPYLRSKFKGQPEHVINFFYYLIQDLRQIMARLGFRTIDEMVGHSEKLRRRADANPKVINIDLTPILTPAHTIRPGVATRFTKKQDHKLHTRLDNKLIDEAEVTLDKGLPVNIDANIVNTDRALGSTLSYRVSKRFGENGLPRDTIVANINGSAGQSFGAFLASGITFILDGDANDYVGKGLSGGIIVVRPPKNSKFKSDENVIVGNTCFYGATSGTAFIAGSAGERFAVRNSGATIVVERVKGNNAFEYMTGGRALVLSQLESINAFSGATGGIAYCLTSDYDAFLSKINKETIELEHLEDPVEIAYVKNLIQEHYNFTKSELASNILGNFNHYLKKFVKVIPSDYKKVLLKEAEEKAKEKENATAEYLKKLGSPAEPGLDATNGEVAKMQAAKRQAISRAVISNKSTLHEPKVLDLEEAVPDAKQMEKNAEKVVKMNGFMKYNVRHEGHRDPATRTKDWKEFTKPVSKRDAKYQTARCMDCGTPFCQSDTGCPLSNIIPKFNELVFKNQWKLALDKLLETNNFPEFTGRVCPAPCEGACTLGIIEDPVGIKSIERIIIDNGFKEGWIIPTPPSTRTGRRVAIIGSGPAGMACADMLNRAGHSVTVFERADRCGGLLMYGIPNMKLDKSIVQRRLDLLSAEGIEFVTNTEIGKDITVDELKSNYDSVVYAIGSTIPRDLPIKGRELKNIDYAMNLLTENTKALLSNDLETIRKQIEGKRVLVIGGGDTGNDCLGTSVRHGAKSVVNFELLPQPPNERAKDNPWPQWPRIMRVDYGHAEVKEHYGRDPREYCILSKEFIGDEEGNVTGIKTARVEWKKSQSGVWQMVEVPNSEELYEADIVLLSMGFVGPELLNNDTNIKKTRRGTIETLSHSSYNIDGGKMFAAGDCRRGQSLIVWAIQEGRKCAAAVDEFLMGDTYLPGSGGIVKRDYRLLEELAATV

SEQ ID NO: 841 - protein, 525 aa, Staphylococcus aureus subsp. aureus MRSA252
MTFLTVMQFIVNIIIIGFLLTVMVIGLIWLIKDKRQSQHSVLRNYPLLARIRYISEKMGPELRQYLFSGDNEGKPFSRNDYKNIVLAGKYNSRMTSFGTTKDYQDGFYIQNTMFPMQRNEISVDNTTLLSTFIYKIANERLFSREEYRVPTKIDPYYLSDDHAIKLGEHLKHPFILKRIVGQSGMSYGALGKNAITALSKGLAKAGTWMNTGEGGLSEYHLKGNGDIIFQIGPGLFGVRDKEGNFSEGLFKEVAQLTNVRAFELKLAQGAKTRGGHMEAEKVNEEIAKIRNVEPYKTINSPNRYEFIHNAEDLIRFVDQLQQLGQKPVGFKIVVSKVSEIETLVRTMVELDKYPSFITIDGGEGGTGATFQELQDGVGLPLFTALPIVSGMLEKYGIRDKVKLAASGKLVTPDKIAIALGLGADFVNIARGMMISVGCIMSQQCHMNTCPVGVATTDAKKEKALIVGEKQYRVTNYVTSLHEGLFNIAAAVGVSSPTEITADHIVYRKVDGELQTIHDYKLKLIS

SEQ ID NO: 842 - protein, 1542 aa, Methylococcus capsulatus str. Bath
MSHHTLPYKQGLYDPRHEHDACGVGFIAHIKGKKSHDIILQGLEILKNLTHRGAVGADPLAGDGAGILLQLPDAFLRKECAKLGITLPEAGHYGVGMLFLPRDAQKRRSCEEILTQYVTAEGQTVLGWRDVPVDNTGIGETVKAVEPFIRQVFIGRGTGCADQNAFERKLFVIRKQAENAIRDGQLAGDGMFYLPSLSSRTIVYKGMLLADQVGSYYLDLRDESLVSALALVHQRFSTNTFPTWDLAHPFRMIAHNGEINTIRGNINWMAARRQSMKSELLGEDLDKIWPLIAEGQSDSACFDNALELLVASGYSLVHAMMLLIPEAWAGNPLMDAKRRAFYEYYSALMEPWDGPAAVAFTDGRQIGATLDRNGLRPARYLITDDDYVIMGSEMGVLNVPQHKIVKKWRLQPGKMFLIDLEQGRIIEDQEIKDELAGRHPYQEWLDKTQINVQNLPTEVAAMAPDHATLLDRQQAFGYTQEDIKVFFKPIALSGQEPVGSMGTDAALAVLSDRPRMLYDYFKQGFAQVTNPAIDPIREELVMSLVSHIGPRPNLLALDNGGNNKRLEVHQPILSNGDLEKIRRIEARTQGAFKTKTLSICFPADAGAPGMEPALEALCKRAEQAVLEGNNILILSDRSMDAGHIAIPALLATSAVHHHLIRAGLRTHSGLVVETGEAREVHHFALLAGYGAEAVNPYLAFDTLSDLLGSLPEKISEDEAHKRYIKAIGKALLKIMSKMGISTYQSYCGAQIFNAVGLGENLLDRYFHGTECTTGGIELREVAEETVRRHRLAFGNAPLYRKALDVGGEYAYRLRGEGHMWTPETIAKLQHATRANDPATYAEYARLINEQNEQLLTLRGLMDFRFAVEPVPLDEVEPAREIVKRFATGAMSFGSISYEAHTTLAIAMNRIGGKSNTGEGGELPERFVPLANGDSLRSAIKQVASGRFGVTAEYLVNADDIQIKISQGAKPGEGGQLPGHKVDAVIAKVRHSTPGVGLISPPPHHDIYSIEDLAQLIHDLKNVNPAARISVKLVSEVGVGTVAAGVAKAHADHVTISGYDGGTGASPITSIKHAGLPWEIGLAETHQTLVLNRLRGRICVQADGGMRTGRDVVIAALLGADEVGFATAPLIVEGCIMMRKCHLNTCPVGVATQDPELRKRFTGQPEHVVNYFFFVAEEVRQLMARLGFRRYEEMVGRSDLLDMRKAIDHWKASRIDLSKILYKPEAGPGVAIFNCETQDHGLDKALDRKLIEFARHALEDKKPVHIDIDIRNYNRTVGAMLSGEIAKRYGHAGLPDDTIHIKAHGTAGQSFGAFLAAGVTLELEGEANDYVGKGLSGGRLAIYPPADCPITPEQNIIVGNTVLYGAISGECYFRGVAGERFAVRNSGAIAVVEGVGDHGCEYMTGGVVVVLGATGRNFAAGMSGGVAYVLDESGDFERRCNLSMVELEPVPAEDDALEHFEHQGGDLETHGMVDIMRDMTRNDMRRLRFLIEKHLRYTGSGRARLILDDWGCYAAKFVKVMPVDYRKALEKMQQTRTGAAAPH

SEQ ID NO: 843 - protein, 498 aa, marine gamma proteobacterium HTCC2143
MDMNSIRNFTEVFLEITGVIFTVGVFLLVFVIIYMYIVDVTQTSQTIRRNYPVVGRFRYFFEHMGEFFRQYFFAQDREELPFNRAQRSWAYRAAKNVDSTVAFGSTHALNLPGDYLFLNGFIPPLDEEFQAPSAIVFGEGFAKSPYTTTSFFNISAMSYGALSGPAVRALSLGAKQAGIWLNTGEGGISPFHLEGGCDIVFQMGTAKYGVRDEQGKLCDQKLRAIASHEQVRMIEIKLSQGAKPGKGGILPGGKVTEIIAMTRGIPVGEDSISPNRHKDIGSIDDLLNMIHRVREVTGKPVGIKAVIGAVEWLEEICLAINTRGLQYAPDFITVDSADGGTGAAPQSLMDYMGLPVKISLPMVVNKLIEHGLRQRIRIICSGKMINPAGVAGALCLGADCVNSARGFMFALGCIQALQCNKNTCPTGITTHDEDLQRGLVPKDKAVRVADYAKNIMHEVAMIAHSCGVVEPRLLNRSHVRIINEAGVPIPLSDFVVQQ

SEQ ID NO: 844 - protein, 1487 aa, Parvularcula bermudensis HTCC2503
MTQQPPFGFYDPRDEHDACGVGLVAAIDGTPRREVVTRAVAALKAVWHRGAVASDGKTGDGAGLRIDVAQNFFREQVERSGHSAKDLDVCVGMIFLPRTDFAAQDRARAIVETHILNFGFRLFGWRQAPVEPGVIGAKANAARPEIEQILFFDPKGRDADELERTLYIVRRRIEKQALTERLPDFYVCSLSPRDIIYKGMFLAGDIDSFYLDLQDDRFVSSFAIFHQRYSTNTFPEWRLAQPFRMLAHNGEINTVRGNIAWMKAHEAKMAGAAFGDYGEDIKPVIQPASSDSAALDAAFELLVRAGRSAPMAKALLVPEAWSKRESVLGPEIRALYEYCNAVMEPWDGPAALCAFDGRWAIAGLDRNGLRPLRYARTTDGLLAVGSESGMCPLDGKEVIERGAVPAGGMICADLKEGKFYGIQESLDRLVEAHPYTDWLKEVTDLDPLIGPGPEDRLFDSETLNRRQLAAGYSQEDLELILKPMVMEAKEAIGSMGDDTPLAVLSSQYRPLSHFFRQRFSQVTNPPIDPLREGRVMSLKTRFKNLGNILAQDETQSDVYVLEGPILTNGMYDRLCERLDPVVIDCTYTEAKGDGRALSACVDRIRKEACDAVRSGASHIVLSDENQGPSRLPLPMILAAGGVHRRLIDEGLRSDCSFTVRSSEAIDSHYAAVLIGVGATCVSPYLAFETIADRLEAGKYRNVTLSEAVLAYKTAIENGLLKILSKMGVSVLSAYRGGCNFETLGLSRPLIAEFFPDASSRISGMGFVGLEQSMMRLHDSAWPREDEGSVKRLPVGSFYRVRTGGEAHAYEASSIKDLQIAVRENDQDAYRRFSTHLQKQSPIQLRDLLDFTKSGKPIPLESVESVNSIRQRFVTPGMSLGALSPEAHGVLNVAMNRIGAKSVSGEGGEDPKRYTPMPNGDNMNSAVKQVASGRFGVTAEYLNQCREIEIKVAQGAKPGEGGQLPGFKVNAYIASLRHSTEGVTLISPPPHHDIYSIEDLAQLIYDLKQIAPKARVCVKLVSSAGVGTIAAGVAKAKADAILISGNVGGTGASPQTSIKFAGSPWELGLAEANQILTLNDLREDVTLRTDGGLRTGRDIVIAAMLGAEEYGIGTLSLVAMGCLMVRQCHSNTCPVGVCTQDEALRKKFVGTADQVVNLMTFIADEVREILASLGVACLDDIIGRTDLLAQVGRGSPLLDDLDLNPLLVRATGGVPPRSDRTKRNEVAPTLDENIVKDAGAVWERREKMQLTYTVRNTHRAVGTRTSHHIVKHFGELPDGHLTVRLRGSAGQSLGAFGAKGLRIEVEGDSNDYVGKGLSGAHIVVRGFKDEPSGSVLIGNTCLYGATDGRLFVAGKAGERFAVRNSGAVAVVEGVGSNGCEYMTGGTVVILGEIGDNFAAGMTGGKAFVYDEHDLFVGRTNPEHVTWRALGDHEKACRTLIEQHLLETGSPKARDLLSNWDQVMPKFRFVLPKSLADKLDHQEVSAVSA

SEQ ID NO: 845 - protein, 432 aa, Desulfotalea psychrophila LSv54
MTNYLCPVCGYLHAGDIDFCFCPVCMASARIFIHDTNADNFGRWDLNSRPIIRSMAEMGSYHQEGRVTARTFLGMDDLIFLPAQVNNFPLGHEVEIDSRVVLGKRARQPVFLQTPILNAAMSCGPLSKEASMALALGSFLAGTIVHTGDGGMGDEEMALTNRVTVQFPTDRFGVSEESLRGADMVEIKISQGVKFGIGGKVRRGKVIAEIAAVSRLGQGKMPQSPAMRQDIKSAKDLSKKILELRRLLDGKPISLKLAGGHLQNDLEAIFSQDCIPDVLVIDGGEGCLDTVSVTVGEHVGLPLIYSLPRVGDFLDLTGLRERVTLIAAGGIRHSGDIAKAIALGADGVYMSGALKIALGPSSLSVAQGGQSLSEGLDIHDGGMRVANFISAATEEVKAIARLCGKRSIHDLNRDDLVSLDSELSRITGVSMA

SEQ ID NO: 846 - protein, 1529 aa, Mycobacterium tuberculosis CDC1551
MGMTPKRVGLYNPAFEHDSCGVAMVVDMHGRRSRDIVDKAITALLNLEHRGAQGAEPRSGDGAGILIQVPDEFLREAVDFELPAPGSYATGIAFLPQSSKDAAAACAAVQKIAEAEGLQVLGWRSVPTDDSSLGALSRDAMPTFRQVFLAGASGMALERRCYVVRKRAEHELGTKGPGQDGPGRETVYFPSLSGQTLVYKGMLTTPQLKAFYLDLQDERLTSALGIVHSRFSTNTFPSWPLAHPFRRIAHNGEINTVTGNENWMRAREALIKTDIFGSAADVEKLFPICTPGASDTARFDEVLELLHLGGRSLAHAVLMMIPEAWERHESMDPARRAFYQYHASLMEPWDGPASMTFTDGTVVGAVLDRNGLRPSRIWVTDDGLVVMASEAGVLDLHPSTVVRRMRLQPGRMFLVDTAQGRIVSDEEIKADLAAEHPYQEWLDNGLVPLDELPEGKDVRMPHHRIVMRQLAFGYTYEELNLLVAPMARLGAEPIGSMGTDTPVAVLSQRPRMLYDYFHQLFAQVTNPPLDAIREEVVTSLQGTTGGERDLLNPDQNSCHQIVLPQPILRNHELAKLVSLDPNDKVNGRPHGLRSKVIRCLYRVSEGGAGLAAALEEVRGAAAAAIADGARIIILSDRESDEEMAPIPSLLAVAGVHHHLVRERTRTQVGLVVESGDAREVHHMAALVGFGAAAINPYLVFESIEDMLDRGVIEGIDRTAALNNYIKAAGKGVLKVMSKMGISTLASYTGAQLFQAVGISEQVLDEYFTGLTCPTGGITLDDIAADVAARHRLAYLDRPDERAHRELEVGGEYQWRREGEYHLFNPETVFKLQHSTRTGQYKIFKEYTRLVDDQSERMASLRGLLKFRTGVRPPVPLDEVEPASEIVKRFSTGAMSYGSISAEAHETLAIAMNRLGARSNCGEGGEDVKRFDRDPNGDWRRSAIKQVASARFGVTSHYLTNCTDLQIKMAQGAKPGEGGQLPGHKVYPWVAEVRHSTPGVGLISPPPHHDIYSIEDLAQLIHDLKNANPSARVHVKLVSENGVGTVAAGVSKAHADVVLISGHDGGTGATPLTSMKHAGAPWELGLAETQQTLLLNGLRDRIVVQVDGQLKTGRDVMIATLLGAEEFGFATAPLVVAGCIMMRVCHLDTCPVGVATQNPLLRERFTGKPEFVENFFMFIAEEVREYLAQLGFRTVNEAVGQAGALDTTLARAHWKAHKLDLAPVLHEPESAFMNQDLYCSSRQDHGLDKALDQQLIVMSREALDSGKPVRFSTTIGNVNRTVGTMLGHELTKAYGGQGLPDGTIDITFDGSAGNSFGAFVPKGITLRVYGDANDYVGKGLSGGRIVVRPSDDAPQDYVAEDNIIGGNVILFGATSGEVYLRGVVGERFAVRNSGAHAVVEGVGDHGCEYMTGGRVVILGRTGRNFAAGMSGGVAYVYDPDGELPANLNSEMVELETLDEDDADWLHGTIQVHVDATDSAVGQRILSDWSGQQRHFVKVMPRDYKRVLQAIALAERDGVDVDKAIMAAAHG

SEQ ID NO: 847 - protein, 509 aa, Geobacter metallireducens GS-15
MLYKSVTESFNEFIIDRSDATCIRCKVCVRQCAYEVHAYEAKADALTEDNTLCIGCRRCSALCPTGAITIRSNEEVFKRNESWSNAHIRNLYAQADTGGILLAAMGNPAKYPIYWDHMLLDASQVTNPSIDPLREPMELRTYLGKKPHSIEVVRDEQTGKPKLATKLTPQIKMEYPFIFSAMSYGALNLNAHKAMAMAAKELGTLYNTGEGGLHRDLYQYGSNVMVQVASGRFGVSEAYLNAGVAIEIKVGQGAKPGIGGHLPGEKVNDQISETRMIPAGADAISPAPHHDIYSIEDLRQLIFALKEATNYTKPVSVKIAAVHHVAAIASGVARAGADIITIDGFRGGTGAAPQVIRDNVGIPMELALAAVDARLRDEGIRNQVSIVVGGGVRSSGDAIKAIALGADAINMGTSTLLALGCTLCQRCYTGKCPWGITTNNPYLAKRLNPELGAERLVNLVHAWGHEMKEILGGMGLNALESLRGNRYKLRALGLTEKDMNILGVMPAGE

SEQ ID NO: 848 - protein, 1522 aa, Verrucomicrobium spinosum DSM 4136
MTKHPYYDEPIPNEGTLHNMDMERDACGVGFVAQVDGKRSRKILDYALGGCCAVVHRGAMEADMKTGDGAGVLTQIPHKLLLPEVEKFGVKLEHELDLGVGMFFLPQDETARLRIQLVAESVVDKRDVTVIGWRKVPVNERELGEKARRTMPFITQLLVRRPEDMDDAAFERVLFLARREIELKGKQQGLADFYIPSMSHRTVIYKALVVATALEKFYYDLQDENYETALAVFHQRFSTNTFPTWALSHPFRMLAHNGEINTVRGNRNWMASRASDFEHPWWEGDEHLLKGLCDPKQSDSASLDAALELLVLSGRSVTESMSMLVPPAYGIDPTTTEEEKSYYEYHSCFSEPWDGPAGLIYTDGRVIAATLDRNGLRPSRYKLTEDGVFALGSEVGIVPLDDAKVIKKGRLSPGEMISVDISKGVVTYNEEIKQQLVSRQPYGEWLTEQRVELTAQAPHAPKEDLDILGLSQKQVTFGWNKEEVEMAFAPMLARGEEAVYSMGDDAALSILSKQPKLLFTYFKQLFAQVTNPPIDPIRERGVMSLDVVLGWQRNWLAETPEHAHVVHLTSPFLFENELETLKGLKDFPCRVLDITFPVSEGPEGLKKAVDRLCSEAEQAVNDDIRILILSDRAVDHTRVPVPSLMATGAVHHHLNRKQVRMRLSLVVDSGEARDTHQMALLFGFGASAVCPYLAFETVQEVLEKDKTARKPILEGFDFAKALTYYRKGLEKGVLKIMSKMGISVLSSYTGAQIFEAVGLGKELMDKCFTGSPSQIAGIGFNEVAEESLARHAAGYGTAVPEAGAIELADPGFYRPRREGEMHAVTGPVIRNFHTFVKSGKPEDYESYVKAQLENTPVALKDLMEFVPSSDGPIPLDEVEPIEDIRVRFTTAAMSLGAISPEAHEALAIAMNSIGGKSDSGEGGEDPRRFKPFENGDWAMSKIKQVASGRFGVTAEYLANAWELEIKMAQGAKPGEGGQLPAMKVNRLIARLRNTQPGVTLISPPPHHDIYSIEDLAQLIHDLKEVNPRARVCVKLVAESGVGTVAAGVAKANADIILISGHDGGTGASPLSSIKHAGLPWELGLAEAQQVLMLNGLRDRVTLRTDGGLRNGRDIAMAAILGAEEFNFGTIALIALGCVYVRQCHLNNCPVGVATTDPKFRSRFKGKPEHVVNFFNSVAHEVRQIMAQLGIAKMNDLIGRPEFLRQRHVPDHKKANLLDLSRILRDVGKEADEDLPRICRVNSNERINNHPLDDKILQAAQVAISDKRKIKPLSYKVVNTNRNIGTGLSGEIAFHHGNHGLPDGTIQVNLEGSAGQSFGTFLCGGVKLNLTGEANDYVGKGLCGGEIVIRTPNKTHPSFKSWENSILGNTVMYGATSGSLYAAGRAGERFCVRNSGGTAVVEGIGDHGCEYMTNGLVAVLGSFGKNFGAGMSGGVAYLLDEAGMFDKLHNPEMIRGVQVSEPEDIKQLQQLIYNHLEKTDSARAKDILDRWDHFRPLFVKVTPKVEPVALPPEEEAPATLVTA

SEQ ID NO: 849 - protein, 553 aa, Bordetella bronchiseptica RB50
MNWIAGRYTTFALMLIGAALTSALAVHSSRAWLWAAVPFVLLSLLGVYDLLQTRHAIRRNYPVLGNLRFLFEFIRPEIRQYFLEDDTHASPFSRAQRSIVYQRAKQDIDKRPFGTQEDVYGDRYEWINHSMTPAHVADADFRVTVGGPECRQPYSMSAFNISAMSFGALSANAVLALNEGARIGDFAHDTGEGGISRYHRERGGSLVWNIGSGYFGCRDAHGAFSEEAFVKNACTPQVKMIEIKLSQGAKPGHGGILPAGKVTPEIAEARGVPAWQDCNSPSSHSAFDSPVGLLHFVARLRELSGGKPVGFKFCVGHPWEWFAIVKAMLQTNITPDFIVVDGAEGGTGAAPVEFVDHVGTPLREALRLVHNTLIGMNLRDRIKLGASGKIITAFDMARAMAMGADWCNAARGFMFAIGCIQAQACHTGKCPTGVTTQDPLRQRALVVPDKAQRVANFHGNTLHALAELLGAAGLTHPGQLRPHHIARRISSSEVRLLSALFPELAPGELLRGEFRHHVFQVGWGMAQADSFQPAMDISAALAALRPAGAPAHA

SEQ ID NO: 850 - protein, 1538 aa, Porphyra yezoensis
MFNQKIVDQAPRKLTSRLTNSSSLISIEKERDACGVGFIADVNNVANHKIVVQALEALTCMEHRGACSADRDSGDGAGITTAIPWNLFQKSLQNQNIKFEQNDSVGVGMLFLPAHKLKESKLIIETVLKEENLEIIGWRLVPTVQEVLGKQAYLNKPHVEQVFCKSSNLSKDRLEQQLFLVRKKIEKYIGINGKDWAHEFYICSLSCYTIVYKGMMRSAVLGQFYQDLYHSEYTSSFAIYHRRFSTNTMPKWPLAQPMRFVSHNGEINTLLGNLNWMQSREPLLQSKVWKDRIHELKPITNKDNSDSANLDAAVELLIASGRSPEEALMILVPEAFQNQPDFANNTEISDFYEYYSGLQEPWDGPALVVFTNGKVIGATLDRNGLRPARYVITKDNLVIVSSESGVVQVEPGNVKSKGRLGPGQMISVDIFSHKILNNKEIKTSVTTKIPYGELLTDARQILEHKPFLSDQQVDIKKLMQLQTAFGYTNEDVELVIEHMASQAKEPTFCMGDDIPLSILSEKSHILYDYFKQRFAQVTNPAIDPLRESLVMSLAIQIGHKSNLLDDQPTLAKHIKLESPVINEGELNAIFESKLSCIRINTLFQLEDGPKNFKQQIQQLCENASQAILDGNNILVLSDKNNSLDSEKVSIPPLLAVGAVHHHLINKGLRQEASILVETAQCWSTHHFACLIGYGASAICPYLAFETARHWWSNPKTKMLMSKGRLPACNIQEAQANYKKAVEAGLLKILSKMGISLLSSYHGAQIFEILGLGSEVVNLAFKGTTSQIGGLSMIELGRETVNIHSKAFSEVKTKKLANYGFVQYRPGGEYHINNPEMSKALHQAVRGYNPEYYNNYQSLLQNRPPTALRDLLKLQSNRAPISIDEVESIEDILQKFCTGGMSLGALSRETHETLAIAMNRIGGKSNSGEGGEDPVRFKILNDVNSSGTSPLLPHLKGLKNGDTASSAIKQIASGRFGVTPEYLMNAKQLEIKIAQGAKPGEGGQLPGKKISPYIATLRKCKPGVPLISPPPHHDIYSIEDLSQLIFDLHQINPKAKISVKLVSEIGIGTIAAGVAKGNADIIQISGHDGGTGASPLSSIKHAGSPWELGLSEVHQLLAENQLRDRVTLRVDGGLRTGSDIVLAAIMGAEEFGFGTVAMIATGCIMARICHTNKCPVGVATQREELRARFSGVPEALVNFFLFIGNEVREILASLGYKSLDDITGQNHLLIKNTDINLTKTNGIQLDTLININNNTWTKFNSVHTNGPVMDDDILAIPEVSNAIKLETEITKHFKIANTNRTVGTRLSGIIAKNYGNTGFKGLIKLNFYGSAGQSFGAFLASGINLKLMGEANDYVGKGMNGGSIVIVPPAGTIYEDNNQVIIGNTCLYGATGGYLFAQGQAGERFAVRNSLAESVVEGVGDHACEYMTGGVIVVLGKAGRNVGAGMTGGLAYFLDEDENFIDRVNSEIVKIQRVITKAGEEQLKNLIENHAAKTGSLKAHTILEKWNSYLPQFWQVVPPSEANIDETNPTYSSNTIAAC

SEQ ID NO: 851 - protein, 2231 aa, Magnaporthe grisea 70-15
MSSPSPGATAALQEIIQDLRSKYGLPTNTISRRAANRLRELVLAVQRDSAPDQFQAFWTTVLDRIINELFQKHDGSASSIADRFGGIYAFDVFVECEAIDYTRDFAKIQGPLIKIMTGRETVCMQPAAMVIGKLARPGGAMVSDFVQYLTNFAIECLQPPRVEEARYSAALLLRELCRNGPTLMYNSVHNVLECIWVGLRDIRLLIRATSAEAVSAAFRIIRERDQDVKNQYMSKMYQQAIAGLKLNSVEATHGSLLVLRELLELGGMFMQKHYPEACDIVFKYKDHKDSTIRKTVVQLIPNLAHYAPTEFCSNYLHNFMIYLAGLSVASRRRGISVDPVFECLSRLAVAVGQTLAKYMEALMDPIFECDINPKLTQALVDLAFYIPPLRPAIQQRLLDMISKVLCGEPFKALGAPQSHTLSSVPIIPKDPKDPLAHETRKFEVKLALNTLGSFDFSGHVLNEFVRDVAIKYVEDDDPEIRQAAALTCCQLYVVDPIVNQVSYHALQVVGDVVDRLLTVGISDPDHNIRKTVLAAMDDRFDRHLAKAENIRTLFFALNDESFPIREVAIEIIGRLAHHNPAYIVPALRKTLIQMLTELEFSDVARNKEESARLLSLLVRNAQGLIRPYVEPMINVLLPKANDSPPTVSATILEAIGELCAVGGEEMMRFKEKLMPMIIEALQDQSSVIKREAALHTLGKLASNSGYVIAPYLEYPHLLELLQGIIRGEATNTELRRETIKLLGILGAIDPYKHQQVQEKNPDASLRVEATQMTDISLMMTGLTPSSKEYYPTVVINALLGILKDSSLVQYHQPVIEAIMNIFRTLGLECISFLDRIIPAFLQVIRSSSATKVESYFAQLATLVGIVRQHIRVYLPDIVDIIQEYWSRAMLQSTLISLIEAISKSLEGEFKIFLAGLLPLMLGVLEKDNNNKRAPSEKVLHAFLVFGTSAEEYMHLIIPVIVRTFEKQGQTVLMRRMAIETIGKISKQVNLNDFAAKIIHPLTRLLATGDSALKQTAVDTLCSLIQQLGRDYLHFASTVNKALAGVPVNRTNYDQLLSKLQAGETLPAPLNETRFQSDETPFADQAPKKLEMNAVHLKAAWDTKGKSTKDDWQEWIRRFSTTLLAESPNHALRACAMLANNYNPLARELFNSAFVSCWSELYEQYQEELISNIESAIRSENVPPDLLGLLLNLAEFMEHDDKALPIDIRTLGREAARCHAYAKALHYKELEFLQDHNGGAVEALIVINNQLQQSDAAIGILRKAQSYQDALHLKETWFEKLERWDEALEFYNKREKETPAGTSVPVEVIMGKMRCLHALGEWDTLAQLAGATWSNSSSELQRRFAPLATTAAWGLGKWDSMDAYLQSMKRTSPDRSFFQAILAIHRNQFGEAVRWIDQAREGLDTEISALMSESYTRAYTTIVRVQMLAELEEIITYKQCDAKKQATIRATWEARLQGCQRNVEVWQRMLRLRALVIQPMENMQMWIKFANLCRKSGRMGLAEKSLRQLIGVDAPIEHTVPGWDMTESDSSEPRRRDGAQFSTPIPPQVTYAVLKYQWDLGNQPAHKGNGVAEKSLDCLRAFALENAARIESARQQFTMRTPSNNMELNNGHINGHNQFAPFPEVADLSPDHHRFIKEQTTLLAKCFLRQGEWMKALNKDDWQYTHVNDILQSYQQATRYNPDWYKAWHAWALANFEVVQALTNRTPNDAYPVHANHVNVIEHVVPAVKGFFKSIALSQGSALQDTLRLLTLWLAHGSTPDVNHAVTEGFTKVNVDTWLEVIPQLIARINQPNRRVQTSVQNLLADVGRAHPQALVYPLTVATEKSEHSKKSAAASVIMESMKQHSLRLVEEAAIVSRELIRVAVLWHEMWHEGLEEASRLYFGDQDIEGMFRALAPLHEALDKGPETLREISFAQAFGRDLTEAREWCRQYQHTRDINDLNFAWDLYYQVFRRIYKQLPQVTSFELAYVSPKLLHATNLALCVPGTYKSGQPVVSIASFDPTFVVISSKQRPRKLNMMGSDGASYTFLLKGHEDIRQDERVMQLFGLCNTLLASDSESYKRHLSIQSYPAIPLSHSSGLLGWVPNSDTIHALIREYRESRKILLNIEHRIMLQMAPDYDNLTLMQKVEVFGYALDNTTGQDLYRVLWLKSKSSEAWLERRTNYTRSLGVMSMVGYILGLGDRHPSNLMLDRVTGKIIHIDFGDCFEVATKREKYPERVPFRLTRMLTYAME

SEQ ID NO: 852 - protein, 426 aa, Picea sitchensis
MGNKLSRRRSQQQPSSSQSQTTYRQLVPERLNTRRRQSQQQLAHTQQVPEVSLKEKYAFIPDQYETIDQVTAALRDSGLESSNLILGIDFTKSNEWTGRHSFNGRSLHEIGSIMNSYEQAISIIGRTMSPFDEDNLIPCYGFGDATTHDVNVFSFYENNRPCHGFEQVLERYKEIVPHLILAGPTSFAPVVEASMDIVEASGGQYHVLVIIADGQVTRSSDTRPEQLSPQEQKTIEAIANASRYPLSIILVGVGDGPWDMMRQFDDKLPRREFDNFQFVNFTSIMSKNLPQSAKEAAFALAALMEIPTQYKATIELKILGHQIGRVPNIVPRNPPLPTIQHDAAPSSLPDSTNFQSTASHNISSTENSPAGLSSESQSQACPVCLTNSREMAFGCGHMTCRNCSQNLSNCPLCRMPISTRLRVYSS

SEQ ID NO: 853 - protein, 1526 aa, Halobacillus halophilus
MQKNGYPVPQGLYHPENEHEACGIGMIANIDGTKSHSIVENAITILCNLEHRGGQSADISTGDGAGILTQIPHYFFKKQCEKEDIELPEPGEYGIGMFFLPEDHDTRMECKRIFERIVEEEGQTFLGWRTVPINDSFVGDDAKKTKPFIRQGFVAPSENIKTQMDLERRLYIIRKRAEIEIAGKEGYDDFYMSSLSSNTIVYKGMLIPEQLDSFYIDLNHPDFKTALALVHSRFSTNTFPSWKRSHPNRFTIHNGEFNTLRGNVNWMRARQKLCSSEYFSEEDLQKILPIIDSEGSDSSMFDNAFEFLYLSGRSLAHTAMMMVPEPWANDDTIHEDKKSFYEYHSTLMEPWDGPAALAYTNGKQIGACLDRNGLRPARYYVTKDGMIVLGSEVGALDIFADDILYKDRLHPGKMLLVDLEEGKIIPDEEIKLQTAREHPYQEWIDNHKYDLEDLPEPTEEHRPVNPLIDQQLAFGYTTEELNKIIVPLVSSQKDPVGSMGYDSPLAVLSKKPQLLYSYFKQLFAQVTNPPIDAIREKLITMVETTIGAEGNLVEPKPDSCRQIRLETPVLTNRQLEQLRQQSLKGFEARTLSILFEAKENKMEQALDRLFEEADQAVEEGTTLLILSDRGVNEGEAAIPALLAVSGLHHHLIRQGTRTKVSLLIESGEPREVHHHAALLGYGAEGINPYLAYDTIRDLVDRGDIQVDSYEAAVHTYVKSATDGIIKVLSKMGISTIQSYRGAQIFEAVGIQKDVVDKYFTRTASRLGGIGLDIIEKEVLMRHEKAYTENRGGNRKLEAGDEFQYRENGEDHQYNPQTIATLQHACRSNDYDLFKQYSNMLTDENNNLQSLRGLLSFKSRPSVPIEEVESVEDICSRFKTGAMSYGSISQEAHEALAIAMNRVGGSSNTGEGGEDPDRFTPDDNGDTRRSSIKQVASGRFGVTSHYLVNADEIQIKIAQGAKPGEGGHLPGKKVYPWIAEVRGSTPGVELISPPPHHDIYSIEDLAELIYNLKNANPRARVSVKLVSAVGVGTIAAGVAKGRADLVLISGYDGGTGAAPRTSIKHTGLPWEIGLAETHQTLVLDRLRDRIVVETDGKMMTGRDVVVATLLGAEEYGFSTAPLVVLGCVMMRVCHLNTCPVGVATQDPELRKKFTGEADHLENFMRFIAQEARELMAELGFRTINEMIGRTDVLQANEAIDHWKAKGVDLSALLYQPVVPDNYGRYAIRKQDHGLEKTLDVEELIPLCKKAIETGEPVEGTGSIRNIHRVTGTILGSEITRKYGAEGLPEDTIRLTFKGSAGQSFGAFIPKGMTLRLVGDANDYVGKGLSGGKIIVHPSPRSTFVPEENTIIGNVSFYGASGGEAYINGLAGERFCVRNSGAEVVVEGVGDHACEYMTGGKVVVLGGTGRNFAAGMSGGVAYVLDETEEVFETKCNHELVHTQKLTDSKEIQELYEMIEKHMTYTNSTNAQRILNNWDAFVSKFVRVIPADYLAMQERIQSLREEGMEKFDAEMTAFEESNKPVETVK

SEQ ID NO: 854 - protein, 529 aa, Frankia sp. EAN1pec
MLPLVTVLVLAVLTAVAVGAALLAAAGWWAAAAVAGALLAVAVHDVVQRQHAILRYHPVLGHARFLLETIRPEIQQYFVERNYDGRPFDRATRTMIYQRAKGTHGDQAFGTERDVNEVGYEYLPHSTAPAPVAPGSAPPRVRIGGPDCTQPYDMALLNVSAMSFGSLSANAVLAMNRGAAAGGFAHDTGEGGLTEYHLRHGADLVWEIGSGYFGTRTPDGDFDPARFKDVAALPTVRMVELKLSQGAKPGLGGVLPAAKVTASIARARGVPEGVACISPSFHRVFATPRELVLFVGRMRELAGGKPAGFKLCVGSRRELLAICRAMVEEGITPDFIVVDGSEGGTGAAPLEYEDHVGTPLTEGLITVHNALVGVGLRDRVRIGAAGKVASGVDVVKRLAQGADYTNAARAMMMAVGCIQAQRCHTNTCPVGVATQDPRRARALDVTDKSERVRRYQAATVAQAVQVMASLGCTGPEQLHPGMLMRRVTHTDTRSYAELYEWLEPGELLAEAPRSWAADWAAADPDSFRP

SEQ ID NO: 855 - protein, 534 aa, Mycobacterium sp. JLS
MKKRTLAVLAPAATLAGVALQDLIQKEHALRRNFPVLARFRYLLESIGPELRQYIITSNDAERPFSRDQRRWVYTSAKKENNYFAFGTDNDTENAAYPIIKQATFSDVVPASPIHGRDIDLPGAKVLGGPRGRRHAFRPASVVNVSAMSFGSLSPQAIEAINKAAKIAGFWHNTGEGGLSDHHRQGGDLVFQIGTGYFGCRDEHGRFDLDRLVDVVGSGPVRAIEIKLSQGAKPGLGGHLPGAKVNAEIARIRGVQEGKDVASPSRHTAFRNVDEMLDVVERIAETTGLPVGIKSAVGGLQFWHELADQMADGQRGVDFIAIDGGEGGTGAAPLVFADHVSFPFRLGFAEVYGLFARAGLHDRVTWIGSGKLGLPGNAMVAFAMGVDLLNVAREAMLAIGCIQAQKCHTDHCPTGVATQNPWLARGLDPEQKAHRLANYVLTLRRDLLKVSEAAGVRHPAMVGPADIEILDGDRGHRTLAEVYGYQQGWGVPGPEITRDIDEYMSRYDDRPGTDEVVEHAPLEVATEPNQATEP

SEQ ID NO: 856 - protein, 1527 aa, Mycobacterium sp. MCS
MGPVPSGLYNPAYEHDSCGVAMVADMHGRRSRDIVDKAITALLNLEHRGAQGAEPNTGDGAGILLQVPDEFFRAVVDFDLPEPGSYATGIAFLPQSSKDAATACEQVQKIAEAEGLTVLGWRDVPTDDSSLGALARDAMPTFRQVFMAGASGMDLERRAYVVRKRAEHELGTKGPGQDGPGRETVYFPSLSGQTFVYKGMLTTPQLRAFYLDLQDERLTSALGIVHSRFSTNTFPSWPLAHPFRRVAHNGEINTVTGNENWMRAREALIRTDVFGTQADLDKIVPVCTPGASDTARFDEVLELLHLGGRSLPHAVLMMIPEAWERHESMDPARRDFYRYHASLMEPWDGPAAVCFTDGTVIGAVLDRNGLRPSRIWVTEDGLVVMASEAGVLDLDPSTVVQKMRLQPGRMFLVDTAQGRIVSDEEIKAELAAEHPYGEWLEAGLFQLEELPPGDYVRMPHHRVVLRQQAFGYTYEELNLLVAPMARTGAEPIGSMGTDTPVAVLSQRPRMLFDYFQQLFAQVTNPPLDAIREEVVTSLQGVIGPEGDLLNPTAESCRQIVLPQPILRNAELSKLICVDPDHEIRGHKHGMRAAVIRCLYPVNRGGQGLKEALNNVRAKVSAAIRDGARIIVLSDRESDEQMAPIPSLLSVSAVHHHLVRERTRTQVGLVVEAGDAREVHHMAALCGFGAAAINPYMAFESIEDMVDRGVITGISSDQAKANYVKAAGKGVLKVMSKMGISTLASYTGAQLFQAIGIDQKVLDEYFTGLNCPVGGIDLDDIAAEVAARHALAYLDRPDERAHRELEVGGEYQWRREGEYHLFNPDTVFKLQHSTRTGQYSVFKEYTQLVDDQSERMASLRGLLKFKDGVRQPIPIDEVEPASEIVKRFSTGAMSYGSISAEAHETLAIAMNRLGGRSNSGEGGEAVTRFDRDDNGDWRRSAIKQVASGRFGVTSHYLSNCTDIQIKMAQGAKPGEGGQLPGHKVYPWVAEVRHSTPGVGLISPPPHHDIYSIEDLAQLIHDLKNANPQARVHVKLVSENGVGTVAAGVSKAHADVVLISGHDGGTGATPLTSMKHAGAPWELGLAETQQTLLLNGLRDRIVVQVDGQLKTGRDVVIAALLGAEEFGFATAPLVVSGCIMMRVCHLDTCPVGVATQNPVLRERFNGKPEFVENFFMFIAEEVRETMAQLGFRTVNEMVGQVGVLDTTEAAEHWKAHKLDLSPVLHEPESAFMNQDLYCSSRQDHGLDKALDQQLIVMCREALDAGTPVKFSTTIANVNRTVGTMLGHEVTKAYGGQGLPDGTIDITFDGSAGNSFGAFVPQGITLRVYGDANDYVGKGLSGGRVVVRPAENAPADYVAEDNIIAGNVILFGATSGEMFLRGQVGERFAVRNSGAVAVVEGVGDHGCEYMTGGKVVILGPTGRNFAAGMSGGMAFVYDPAGELPDNLNAEMVELDALDDENVSWLHGMLQAHVNATDSAVGQRILNNWEEELKHFVKVMPRDFKRVLAAIAEAERTGADKNEAIMAAASG

SEQ ID NO: 857 - protein, 82 aa, Medicago truncatula
MDEGPPDDTMATTRSHGQWSIDHGSRVAETATSNANFVEAEDRGELSSMSQSNDIDGSFQSATDPIVPKSYEEHMMLALASL

SEQ ID NO: 858 - protein, 1527 aa, Mycobacterium tuberculosis H37Rv
MTPKRVGLYNPAFEHDSCGVAMVVDMHGRRSRDIVDKAITALLNLEHRGAQGAEPRSGDGAGILIQVPDEFLREAVDFELPAPGSYATGIAFLPQSSKDAAAACAAVQKIAEAEGLQVLGWRSVPTDDSSLGALSRDAMPTFRQVFLAGASGMALERRCYVVRKRAEHELGTKGPGQDGPGRETVYFPSLSGQTLVYKGMLTTPQLKAFYLDLQDERLTSALGIVHSRFSTNTFPSWPLAHPFRRIAHNGEINTVTGNENWMRAREALIKTDIFGSAADVEKLFPICTPGASDTARFDEVLELLHLGGRSLAHAVLMMIPEAWERHESMDPARRAFYQYHASLMEPWDGPASMTFTDGTVVGAVLDRNGLRPSRIWVTDDGLVVMASEAGVLDLHPSTVVRRMRLQPGRMFLVDTAQGRIVSDEEIKADLAAEHPYQEWLDNGLVPLDELPEGKDVRMPHHRIVMRQLAFGYTYEELNLLVAPMARLGAEPIGSMGTDTPVAVLSQRPRMLYDYFHQLFAQVTNPPLDAIREEVVTSLQGTTGGERDLLNPDQNSCHQIVLPQPILRNHELAKLVSLDPNDKVNGRPHGLRSKVIRCLYRVSEGGAGLAAALEEVRGAAAAAIADGARIIILSDRESDEEMAPIPSLLAVAGVHHHLVRERTRTQVGLVVESGDAREVHHMAALVGFGAAAINPYLVFESIEDMLDRGVIEGIDRTAALNNYIKAAGKGVLKVMSKMGISTLASYTGAQLFQAVGISEQVLDEYFTGLTCPTGGITLDDIAADVAARHRLAYLDRPDERAHRELEVGGEYQWRREGEYHLFNPETVFKLQHSTRTGQYKIFKEYTRLVDDQSERMASLRGLLKFRTGVRPPVPLDEVEPASEIVKRFSTGAMSYGSISAEAHETLAIAMNRLGARSNCGEGGEDVKRFDRDPNGDWRRSAIKQVASARFGVTSHYLTNCTDLQIKMAQGAKPGEGGQLPGHKVYPWVAEVRHSTPGVGLISPPPHHDIYSIEDLAQLIHDLKNANPSARVHVKLVSENGVGTVAAGVSKAHADVVLISGHDGGTGATPLTSMKHAGAPWELGLAETQQTLLLNGLRDRIVVQVDGQLKTGRDVMIATLLGAEEFGFATAPLVVAGCIMMRVCHLDTCPVGVATQNPLLRERFTGKPEFVENFFMFIAEEVREYLAQLGFRTVNEAVGQAGALDTTLARAHWKAHKLDLAPVLHEPESAFMNQDLYCSSRQDHGLDKALDQQLIVMSREALDSGKPVRFSTTIGNVNRTVGTMLGHELTKAYGGQGLPDGTIDITFDGSAGNSFGAFVPKGITLRVYGDANDYVGKGLSGGRIVVRPSDDAPQDYVAEDNIIGGNVILFGATSGEVYLRGVVGERFAVRNSGAHAVVEGVGDHGCEYMTGGRVVILGRTGRNFAAGMSGGVAYVYDPDGELPANLNSEMVELETLDEDDADWLHGTIQVHVDATDSAVGQRILSDWSGQQRHFVKVMPRDYKRVLQAIALAERDGVDVDKAIMAAAHG

SEQ ID NO: 859 - protein, 369 aa, Aspergillus nidulans FGSC A4
MEYSPQYQQQHGQHPHPASHMTGAYPTAPQNPGSALGSMTSPTNPQTHIQQAHPTHQASPVVPSQSHYQQAQNAPGSMHQQMNFPQSYGVTTAMPPQPYGISPTQAAAMATAAASGQFYPTHGDSIAGQMAQGPRGSPRMAGVPVKTDRNPRSPPQIPGQMPPMGSQVPLTPTAQMQQRRMSHVGSPHVQNAQPVMNHVGRPSVPPPMPPPQHPVQQTQTSPDMMPSGAEESPLYVNAKQFHRILKRRVARQKLEEQLRLTSKGRKPYLHESRHNHAMRRPRGPGGRFLTADEVAAMEKKNAAGGQENADPNASKAVSDSSPASQKRKASDGNNENPNSAKKAKTGAQKASNNADESEAESGGPSDEDG

SEQ ID NO: 860 - protein, 536 aa, Burkholderia xenovorans LB400
MFSRRYLAMWCAAALFAVCAAFAATHHISWFWIIVPLALVALGLFDLTQQRHAILRNYPLWGHFRFLFEFIRPEIRQYFVEGDTDEKPFSRAQRSIVYQRAKNDVDSRPYGTELDVKAVAHEWISHSLAPTRLDSHDFRIVVGPDRAQPYSMSIFNVSAMSFGSLSANAIMALNLGAKKGNFAHDTGEGSMSKYHREHGGDIIWEIASGYFGCRNEDGTFSAEKFAKQAAEPQVKMIEVKLSQGAKPGHGGVLPAAKITPEIAETRGVPMGRDCISPATHSEFSTPRGLLEFVDRLRTLSGDKPTGFKLCIGHPWEFFGIAKAMLETGILPDFIVVDGAEGGTGAAPLEFTDHVGVPLQEGLLLVHNTLVGIGLRQRIRIGASGKMITAFDITKTLAIGADWVNAARGFMFAVGCIQAQTCHTGRCPTGVATQDPVRQRALVVPDKADRVFNFHHNTLHALKEIIQAAGLKHPAELRAHHIVRRVSSHEVQLMSELLKYLDPNDLLNGNYRYSLFEKYWPVAQSDSFSPKVELAAT

SEQ ID NO: 861 - protein, 1689 aa, Oryza sativa Japonica Group
MSKIPESSIGLYDPSMERDSCGVGFIAELSGEYSRKTVDDAIEMLDRMAHRGACGCEKNTGDGAGILVALPHNFFREANLLEVTKDAGFELPPPGEYAVGMFFMPTDDKRREKSKLLFREKAELLGHTVLGWRRVPTDNSGLGQSAVDTEPVIEQVFVTKSASSKADFERQMYVLRRFSVMSIREVLGVKNGGTKDFYMCSLSSRTIVYKGQLKPSQLKGYFFADLGDESFTSYMALIHSRFSTNTFPSWDRAQPMRVLGHNGEINTLRGNKNWMKAREGLLKCEGLGLTRDEMLKLLPIVDATSSDSGAIDNVLELLIQSGRSAPEAVMMMIPEAWQNDVNMDPERKALYEFFSALMEPWDGPALISFTDGRYLGATLDRNGLRPGRFYVTYSGRVIMASEVGVVDVPPQDVSRKGRLNPGMMLLVDFENHCVVNDDELKKEYSKVRPYGEWLKRQRIQLTDIIESVNEAERIAPSISGALPITKENKADMGICGILTPLKAFGYTREALEMLMLPMAKDGQEALGSMGNDTPLAVMSNREKLTFEYFKQMFAQVTNPPIDPIREKIVTSMECMIGPEGDLSETTERQCHRLTLKSPLLNTNEMEAIKKMNYRGWRSKVLDITYPKKNGRMGLKQTLDKICAQAREAIHEGYTILVLSDRERVAVSSLLAVGAVHQHLVSHLERTRIGLLVESAEPREVHHFSTLIGFGADAICPYLAIEAIWRLQIDGRIPPNDGKPYTQEQLIEKYFYASNYGMMKVLAKMGISTLASYKGAQIFEALGLASEVVSKCFEGTPSRVEGATFEMLAQDALRLHEIAFPSRTLPPGSADANALPNPGDYHWRKNGEVHLNDPFSIAKLQEAARINSREAYKEYSRRIYELNKACTLRGMLKFREIPNQISLDEVEPAKEIVKRFCTGAMSYGSISLEAHTSLAEAMNTLGGKSNTGYITIKNGSKGQLTTQTLTFFRGTVEPFALGRWCCENFVPFNLNTNDAQSLCAFPKKNNPRISAIKQVASGRFGVSIYYLTNAVEVQIKMAQGAKPGEGGELPGHKVIGDIAVTRNSTAGVGLISPPPHHDIYSIEDLAQLIHDLKNANPGARISVKLVSEAGVGIVASGVVKGHADHVLISGHDGGTGASRWTGIKNAGLPWELGLAETHQTLVANGLRGRAVLQTDGQMKTGRDVAVACLLGAEEFGFSTAPLITLGCIMMRKCHTNTCPAGIATQDPVLRAKFAGKPEHVINYFFMLAEEVREIMAQLGFRTVNEMVGRSDMLEIDPKVLEGNEKLENIDLSRLLKPAAEISPGAVQYCVEKQDHGLDMALDNKLIASSTAALRKGVRVFIETPVRNINRAVGTMLSHEVTKRYHIHGLPSDTIHIKLNGSAGQSFGAFLCPGITLELEGDSNDYVGKGLSGGKIVVYPPRNSRFNPQDNIVIGNVALYGATKGEAYFNGMAAERFCVRNSGAQAVVEGIGDHGCEYMTGGTAVILGKTGRNFAAGMSGGIAYVYDVDGKFSSRCNYELVDLYAVVEEDDITTLRMMIQQHRLHTQSDLARDILLNFDTLLPKFIKVYPRDYKRVLDKLKEEKAAKEAEQKAREVVDKKPVEVIQAPNGISVKTEKVMNEEPSSRPSRVSNAVKYRGFIKYEREGTSYRDPNERVKDWNEVAIELVPGPLLKTQSARCMDCGTPFCHQVN

SEQ ID NO: 862 - protein, 1512 aa, Vibrio vulnificus CMCP6
MVDREQSSQGLYTPELEHDACGIGFVAHLKNRKSHQVVTQALDMLARMEHRGGQGCDPCSGDGAGILLQKPHEFLLEEAVKLGIKLPSFEKYGVGVVLFPKDEYKREQCRDILERNAKRLDLDIIGYRVLPTDNSMIGADPLSTEPQFEHVFISGGPGTSPEELERKLYVLRNYTVRVCLESVSNIGDDFYINSMSYKTLVYKGQLTTEQVPQYFQDLQNPTMVTALALVHSRFSTNTFPKWRLAQPFRYIAHNGEINTVRGNLNWMKAREAILESKLFTQAEIDMLLPICQEGASDSANFDMVLELLVLSGRSLPHALMMMIPEAWQENKAMDPKRRAFYQYHANIMEPWDGPASVCFTDGVQVGATLDRNGLRPSRYTVTKDNMLIMASESGVVEIPPENVEYRGRLQPGRIFVADLEQGRIISDEEVKDSIANAQPYEQWVTDNLLSLKSLPDADNVHSQPSPERLLHRQQAFGISAEEVNEIILPLAQTGYEPLGSMGADWPVAILSHQSQHLANYFKQLFAQVTNPPIDPIRERMVMSLNTYIGKDQNLLAESPVHCRKVELESPVISNAELEKLRAIDNEHLQAKTLDIVFQANEDAGKLERALKRICQYAEDAVIDGYSIILLTDRAVNSNHAAIPAMLAVGAVHHHLIRKGLRAKCGIVVETGDARETHHFATLVGYGANAVNPYLVTETIVDLQRRKKLDANVSVEEYFNNYRKGVNGGLLKIFSKMGISTLQSYHGAQIFEALGISKAVVEKYFTGTVTRIQGLTLDDIAKEVLVRHRVGYPTREIPIQMLDVGGVYQWKQRGEKHLFNPETIHLLQHSTRNKDYAEFKKYAAEVDRQGDKAVTLRSQLDFVKNPAGSIPIDEVEPVESIVKRFATGAMSFGSISYEAHSTLAVAMNRLGAKSNSGEGGEDPIRFSPNENGDSERSAIKQVASGRFGVTSYYLTNSDEIQIKMAQGAKPGEGGQLPGDKVDDWIGATRHSTPGVGLISPPPHHDIYSIEDLAQLIYDLKNANRKGRVNVKLVSEAGVGTIASGVAKAKADVVLIAGHDGGTGASPISSIRHTGLPWELGLAETHQTLLKNGLRNRIVVQADGQMKTPRDIAIATLLGAEEWGVATAALVVEGCVMMRKCHKNTCPVGIATQNKTLRERFDGRVEDVVTFFLYMAQGVREIMAELGFRTVDEMVGQAQKLKVRDNVSHWKYKNLDLSPVLFLEQPREQDGIYCQTKQNHQLEAVLDRQLIQVATPALEDGLAVTAEFPIINTDRSVGTMLSNEISKVYKDQGLPQPMNVKFKGSAGQSFGAFLAKGVTFEVEGDANDYWGKGLSGGTLVLYPDSNSTLVPEDNIVVGNVCFYGATSGESYIRGLAGERFCVRNSGAKVVVEGVGDHGCEYMTGGVAIILGSTGRNFAAGMSGGVAYVWDKSGDFQSKLNPELVDLDPIEQEDKDLLLDMLNKHVQFTGSEVAQAFLANFETSLKSLVKVMPRDYKAVLQKRKAEAKQREAEAV

SEQ ID NO: 863 - protein, 1567 aa, Burkholderia vietnamiensis G4
MNDHQKPLAAVPAAQGLYDPQNEHDACGVGFVAHIKGKKSHEIIQQGLKILENLDHRGAVGADPLMGDGAGILIQIPDAFYREEMSKQGVTLPPAGEYGVGMIFLPKENASRLACEQELERTVRAEGQVVLGWRDVPVDHAMPISPTVKASEPLIRQIFIGRGKDIMVTDALERKLYVIRKTASHRIQALKLKHGKEYFVPSMSARTIVYKGLLLAGQVGVYYRDLQDARVVSALALVHQRFSTNTFPAWELAHPYRMIAHNGEINTVKGNVNWLNARTGAIASHVLGDDLPKLWPLIYPGQSDTASFDNCLELLVMAGYPLVHAVMMMIPEAWEQHTLMDENRRAFYEYHAAMMEPWDGPAAIAFTDGRQIGATLDRNGLRPARYIVTDDDLVIMASEAGTLPIPESKIVKKWRLQPGKMFLIDMEHGRIIDDKELKDNLANAKPYKSWIDAVRIKLDEIEPKAEDVAAGRTQGAALLDRQQAFGYTQEDLKFLMAPMAAQGEEAVGSMGNDSPLAVMSNKNKTLYHYFKQLFAQVTNPPIDPIRENMVMSLVSFIGPKPNLLDTNNINPPMRLEVSQPVLDFKDIAKIRAIDQYTGGKFSAYELNICYPVAWGKEGIEARLASLCAEAVDAVKSGYNMLIVSDRKTDADHVAIPALLATSAIHTHLVQQGLRTSTGLVVETGSARETHHFALLAGYGAEAVHPYLAMETLAKMAEGLPGDLSPEKAIYNFTKAVGKGLQKVMSKMGISTYMSYTGAQIFEALGLSSDLVEKYFKGTASKVGGIGLFEVAEEAIRLHRDAFGDNPVLRDMLDAGGEYAYRVRGEDHMWTPDSIAKLQHATRSNSYQTYKEYAHLINDQTKRHMTLRGLFEFKVDPTRAIPIDDVEPAKEIVKRFATGAMSLGSISTEAHATLAIAMNRIGGKSNTGEGGEDDKRYRNELRGIPIKAGETLKSVIGDEIVSDIPLKDGDSLRSKIKQVASGRFGVTAEYLASADQIQIKMAQGAKPGEGGQLPGHKVSEYIGKLRYSVPGVGLISPPPHHDIYSIEDLAQLIHDLKNVNPSSSISVKLVSEVGVGTVAAGVAKAKADHVVIAGHDGGTGASPLSSVKHAGTPWELGLAETQQTLVLNRLRGRIRVQADGQMKTGRDVVIGALLGADEFGFATAPLVVEGCIMMRKCHLNTCPVGVATQDPVLRAKFKGQPEHVVNYFFFVAEEVREIMAQLGIAKFDDLIGRPDLLDTRKGIEHWKAKGLDFSRVFYQPEGCEDVARRHVEGQDHGLERALDHVLIEKAKAAIENGEHVSFIQPVRNVNRTVGAMLSGVIAKKHGHDGLADDAVHIQLKGTAGQSFGAFLAKGVTLDLVGDGNDYVGKGLSGGRIIIRPTNDFRGKSEENIICGNTVMYGALEGEAFFRGVAGERFCVRNSGATAVVEGTGDHGCEYMTGGTVVVLGETGRNFAAGMSGGVAYIYDPEGTFAAKCNKAMVALDPVLQQAEQERTVDRALWHAGTTDEALLKGLVERHFQFTGSPRAKSLLENWDAARRQFVKVFPNEYKRALGEIGAKKAAKQALAA

SEQ ID NO: 864 - protein, 365 aa, Oryza sativa
MGNRIGGRRKAGVEERYTRPQGLYEHRDIDQKKLRKLILEAKLAPCYMGADDAAAAADLEECPICFLEEQKVIEAQMRMRQQALQDEEDKMKRKQNRCSSSRTITPTKEVEYRDICSTSFSVPSYRCAEQETECCSSEPSCSAQTSMRPFHSRHNRDDNIDMNIEDMMVMEAIWRSIQEQGSIGNPVCGNFMPVTEPSPRERQPFVPAASLEIPHGGGFSCAVAAMAEHQPPSMDFSYMAGSSAFPVFDMFRRPCNIAGGSMCNLESSPESWSGIAPSCSREVVREEGECSADHWSEGAEAGTSYAGSDIVADAGTMPQLPFAENFAMAPSHFRPESIEEQMMFSMALSLADGHGRTHSQGLAWL

SEQ ID NO: 865 - protein, 1487 aa, Vibrio vulnificus CMCP6
MALYDPSLEKDNCGFGLIAHMEGEPSHKLVRTAISALDRMTHRGGIAADGKTGDGCGLLLQKPDSYLRLIAKENSFNLAKQYAIGMIFFSQDPVKAQTARDIINKELAKETLTVAGWRKVPTNPAVLGPIAADSLPDIQQVFISAPAGWRERDIERRLYIARRRIEKQITDDRDFYVCSLSTQVIVYKGLCMPADLPRFYLDLADLRMESAICLFHQRFSTNTQPRWPLAQPFRYLAHNGEINTIEGNRQWARARGYKFASPLLPDLQSAAPFVNETGSDSSSLDNMLDLFLAGGMDIFRAMRMLVPPAWQNHPDMDPDLRAFYDFNSKHMEPWDGPAGIVLSDGRYAACNLDRNGLRPARYVITKDKLITLASEVGIWDYAPDEVAEKGRVGPGELLVIDTRKGKLWQSSEIDNDLKSRHPYREWMDNNVRRLTPFSELPEDQVGERSFDSDTLKTYQKQFAMSNEEVDQVLRVLGDMAQEAVGSMGDDTPMAVLSSKERLVTDYFRQKFAQVTNPPIDPLREQHVMSLATSIGQEMNVFCETDGHAHRVTFGSPVLLYSDMQQLLELSDDHYRNTILDINYDPSEKDLKQAILDLCDQAEQVVRDGTVLIVLSDRPLVAGKLPIPAAMAVGAVQTRLVNANLRCDANIVVETATARDPHQFAVLLGFGATAVYPYLAYEVLGKLIDDGALEKSYREVMQNYQYGINKGLYKIMSKMGISTVASYRCSQLFEAVGLSRDVVELCFKGVTTRIEGAGFTDFQQDLFNLSRKAWAKRKSIEHGGLLKYVHGGEYHAYNPDVVGTLQKAVKSGESGDYQQFAQQVNQRPVAMLRDLMQLKKADQPLALEKIEPSTELFKRFDSAAMSIGALSPEAHEALATAMNRLGGYSNSGEGGEDPRRFGTERNSRIKQVASGRFGVTPHYLTNADVLQIKVAQGAKPGEGGQLPGHKVTAEIAKLRYSVQGVTLISPPPHHDIYSIEDLAQLIFDLKQVNPKALVSVKLVSEPGVGTIATGVAKAYADLITISGYDGGTAASPLTSVKYAGSPWELGLAETQQALVANGLRHKIRLQVDGGLKTGLDVVKGAILGAESFGFGTAPMVAMGCKFLRICHLNNCATGVATQDETLRKEYFKGLPEMVMNYFIGLADEVRGLLAELGVEKLTDLIGRTDLLEVVQGMTAKQSKLDLSGILEAPVSPQNLPLFWTEPNAPFDKAVLNQKIIEDALDAVENRQSASFFYNVINTDRSIGARLSGEIAKRYGNQGMAASPIKLYLDGTAGQSFGVWNAGGVELYLTGDANDYVGKGMAGGKIVIKPHLGTAFRCNDATIIGNTCLYGATGGKLFAAGKAGERFGVRNSGTITVIEGAGDNACEYMTGGIVAILGATGVNFGAGMTGGFAYVLDENEDFQGRVNSESVEAISLSDLYIHQEHLRGLIAEHLEETGSVHAEDILANFDAWIPKFYLVKPKAADLNTLLGHQSRSAAELRVQAQ

SEQ ID NO: 866 - protein, 495 aa, Oryza sativa Indica Group
MGGGQSRSPRDGSGHGRYGHSPSFQQQWGGGGGGGGGGGGGYPYGQDAHGGGYYGAPAPQGGYAAPYPAYQQPPPPMSSPAATQPPARAGGASKPRLDRRYSRIADDYHSVDQVTDALAQAGLESSNLIVGIDFTKSNEWLGKFSFHGRSLHHISNAPNPYEQAISIIGQTLSKFDEDNLIPCFGFGDATTHDQDVFCFYPDLRPCNGFSEALSRYRELVPHLRLAGPTSFAPIIEMAMTIVEQSGGQYHVLLIIADGQVTRSVDTASGQLSSQEQKTVDAIVRASELPLSIVLVGVGDGPWDMMKEFDDNIPSRAFDNFQFVNFSEIMNKNMPQSRKEAAFALSALMEIPQQYKATVELGILGRRSFKSPERVPLPPPGGSHDAYSYGSKSFSKPSTYPQSSTSSSSYPHYETAQSSSPAAPSSTYDNQVCPICLVNPKDMAFGCGHQCNPCKAFERLADKPVKYWVCIDKDRKASNPLLQDCGAGDVSSIETH

SEQ ID NO: 867 - protein, 1486 aa, Pectobacterium atrosepticum SCRI1043
MLYDASQERDNCGFGLIAHIEGEPSHKVVRTAIHALARMQHRGAILADGKTGDGCGLLLQKPDRFFRLVAEEHGWRLAKNYAVGMMFLNQDEELARATRRIVEEELQNETLSVLGWREVPTNPDVLGEIALSSMPRIEQIFVNAPAGWRQRDMERRLFMARRRIEKRIEDKEFYVCSFSNLVTIYKGLCMPADLPRFYLDLADLRLESAICLFHQRFSTNTVPRWPLAQPFRYLAHNGEINTIAGNRQWARARAYKFKTPLIPDLQDAAPFVNETGSDSSSLDNMLELFLSGGMDIIRAMRLLVPPAWQNNPDMDPELRSFFDFNSMHMEPWDGPAGIVMSDGRYAACNLDRNGLRPARYVITKDKLITCASEVGIWDYQPDEVVEKGRVGPGELMVIDTRSGRILHSAETDNDLKSRHPYKEWMEKNVKRLVPFEELPDEQVGSREFNDELLETYQKQYGYSSEELDQIIRVLGENGQEATGSMGDDTPFAVLSSRPRIIYDYFRQQFAQVTNPPIDPLREAHVMSLATSIGREMNVFCEAEGQAHRLSFKSPILLYSDFTQLTSQDELHYRADTLDLTFDPSQQTLQQTIEKLCDEAESKVRDGAVLLVLSDRGISESRLPVPAPMAVGAVQRRLVEKSLRCDANIIVETASARDPHHFAVLLGFGATAIYPYLAYETLARMVDNHTIDKPYRAVMLNYRNGINKGLYKIMSKMGISTIASYRCSKLFEAVGLHKDVSTQCFLGVVSRIGGANYSDFEQDLLNLSKRAWLKRKTLEQGGLLKFVHGGEYHAYNPDIVTTLQTAVKSGEYSDYEQYAKLVNERPVATLRDLLALRPQEGAAIAIDNVEPATEMFKRFDTAAMSIGALSPEAHESLAEAMNGLGGFSNSGEGGEDPARYGTNKVSRIKQVASGRFGVTPAYLVNADVIQIKVAQGAKPGEGGQLPGDKVTPYIARLRYSVPGVTLISPPPHHDIYSIEDLAQLIFDLKQVNPKAMISVKLVSEPGVGTIATGVAKAYADLITIAGYDGGTGASPLSSVKYAGCPWELGLVETQQALVSNGLRHKIRLQVDGGLKTGLDIVKAAILGAESFGFGTGPMVALGCKYLRICHLNNCATGVATQDEKLRRDHYHGLPERVTNYFHFIAHETRVLMAELGVSRLVDLIGRTDLLVELDGFSAKQNKLDLSPLLHAAQPQPGKALHCTESNLSFDKGLLNKELLAQAQPHIDAKQGKALYFDIRNTDRSVGATLSGAIAEKHGDQGLAGDPIKAHFSGTAGQSFGVWNAGGLELKLIGDANDYVGKGMAGGSISVRPPVGSAFRSHEASIIGNTCLYGATGGKLFAAGRAGERFAVRNSGCITVVEGIGDNGCEYMTGGIVCVLGRTGVNFGAGMTGGFAYVLDEDGEFRKRVNPELVEVLDVEELAIHEEHLRGLITEHVQNTGSHRGEEILANWPIWAPKFALVKPKSSDVKALLGHRSRSAAELRVQAQ

SEQ ID NO: 868 - protein, 2482 aa, Lentisphaera araneosa HTCC2155
MIKNKLLYDADKYHDNCGVGFITRKDGLQSHDVLLKGHEALCVIPHRGGMSAEGIGDGAGVNIDLSLKFFQKVLEDDKIQLGEFGVGNFFFPEDHSQDNKAREIIETVFDKYKITILKWRDVPVNIKALNEASAKAQLPIYQIIFAKPESCKTQNDFENLINDALTEIESAGYSDSALNGFYPMSLSSKTIVYKGRLNSGEVVPYFKDLSDLDMEIRVFLFHTRFSTNTAPATFMAQPFRRMAHNGELNTDKKNRLSEDAIAKQKNKKVIFPKGQSDSARLDQTLQRRVIEDEMDIATAVLAMMPPAWENKQDIDPLIRDMYEYFSLYEEKNDGPAALLFSDGTKVGARLDRLGLRPLRSIETTEYVCVMSEAGQIDFPPEEVVTRGRIEAGGMLYFDHETGESYTTETIEKSLAKKADYKVLLEKKKLALEDLPKVELPEQNSELDTYERAVAYGMNQESFRFLLDPMIQGAAEKISAMGYGVSLNVLNADEGGMSRYFSQRFAQVTNPPLDSIREKDGMTLRVSLGAKPNFSESDSKQIVIQNPYLTLAELSSVRAQKDLTTCTVDILYTPSKDKEENESKLNSALEQICKEVEVAARAKNGIIILSDKNISKSKAAIPLLLAIAASNQHLIEQGLRFNSSLIAETGQIASSHDVATALGFGSSAICPLTIEDRAQSLMPNEVDKALSNYRKAIAKSLMKIMGKFGLCTAESYIGGEIFESNYLNTEDPQLKKHFPNITSPVGGVGYAEIAASASEWHFKAFGIKDENDIPHLGLFKERQGGAGHSFGLVAVREYINMTEEEVLYSIDEELEDIFERFELKEVFPNALADLKKIYKRIGKDIMHESDLIAALSDIFADAELSMHQAAMRSIASVLDRNLIRDTEIADSEDYTSDIDEFLTEAPHPEDDPLGHLTYKKYGERQRTPEEIDSHRITQAYRQFAGNVYTERKVRPAALRDIMYFPADINKAKDAVKFKAILNKQALKGNNCFKIKGLSVKPVKDNTFKLTMSLSSDERVQWLKEYFEERFGSLIQAKVQDSSVTIQTSDEDILFYLNNIRTAKDSIDKSLVQDAHKVTATFSSAAMSHGALVAEAHEAVSQGANIAGALSNSGEGGEKRVRYNTIKASSIKQVASGRFGVWAGYFADPYLEQVEIKIAQGAKPGEGGQLPSFKVTVMIASSRGGTPKIELVSPPPHHDTYSIEDLGQLIHDCKASRAKVIVKLVSSEGIGTIAVGVAKAGADVINVAGNTGGTGAAAVTSLKNTGRSAELGIAEVHQALALNGLRDKVILRSSNAHQTGIDVIKSAILGADSFEFGTSALMMLKCVMAKNCNIKCPAGITTNPELFTGDARALAQYFLNVAQEVRELLAYLGHKSIDEVRGKTELLHLVNHDKIIGQLNFKALLAEVDEVKIEDPIYLEADFSIDDKILGKVEKELLYGKETKLLLKGAEYKLNNRHKSVGGQLSVDIERIVNHRFKDSDFNSSIAVIQNDTGRRYLAPESLTIQTNGSAGQSYGALLNNGMLLQHFGTCNDGVGKLQSGGIITVKSPGGGSSLAGENVLIGNFALFGATGGRCYINGEAGDRFAVRNSGAMAVVEGVGDFFCEYMTSGTILNLGTFGKGWGNGMSGGNAYQYDPDNKLPVFYNQDSVIIKKFDGSKDSEVHAKIVHYLLQEQVKYNQSEIAEKILNKWEEEKANFYYAIPLALFETQTWECLLKNSSRKEMLEELASNYTHIQIEQIKDAYKNETRLFNGQTPALGDTNTALIFRLISRYSIFCKASTITLDKMNKFELALKDETLAKYIKNIIFTEDKGLMELLLKVSRDVLSKFDDELLAKSLADKRVYDYKKALYLRDVLENNSLGSYAWIMEQDLKNQEAIAARMTFLKGFAAQVSLALVKDALNKETGLPLIPENVPFSEGQLKWLNGYFNGLSFGVASSEDSSPKGKELNILFGTQTGNSESLANDCAALAANFGMLAQVHDMGNISADDLKVMERVLIITSTYGEGEQPDNAQALYTAMTSADAPSLEGMFFSICSLGDSSYDLFCEAGKQWDEVLEKQGALRAFKRVDCDVDFEDPFEEWACESLPALSALGDQSAGDVAGGPNVATKKDDNAFGKKKPFPAKLLKKVTLTSDESSKEVVHYEISLDGSDYDYKAGDALNVIPVNEESLVDDIIEVLAEDPEKILDLGKDGKVSFRDALLHKFEIKTPTKDLINKVAQNSQDKELLSLVEDKDALSNFLWGRDLIDFLAHYEHGLEAQSFIPLLKKLQARAYSISSSPKKHPGEVHLTVGSVRYSSHGRTRHGVASTFLADRVVENETDILCYMHANKAFAVPENDGLPMIMVGPGTGIAPFRAFLEEREMRQANGKNWLFFGDRNEANDFFYKEQLKDLQDNNYLEKLSLAFSRDQEEKIYVQDRMRENGAELFQWLEEGGYFFVCGDAYRMAKDVDQALHDVIAEHGKMSDDEAIAYVDKMKADKRYVRDVY

SEQ ID NO: 869 - protein, 442 aa, Arabidopsis thaliana
MDSTVFINNPSLTLPFSYTFTSSSNSSTTTSTTTDSSSGQWMDGRIWSKLPPPLLDRVIAFLPPPAFFRTRCVCKRFYSLLFSNTFLETYLQLLPLRHNCFLFFKHKTLKSYIYKRGGTNDDDSNKAEGFLFDPNEIRWYRLSFAYIPSGFYPSGSSGGLVSWVSEEAGLKTILLCNPLVGSVSQLPPISRPRLFPSIGLSVTPTSIDVTVAGDDLISPYAVKNLSSESFHVDAGGFFSLWAMTSSLPRLCSLESGKMVYVQGKFYCMNYSPFSVLSYEVTGNRWIKIQAPMRRFLRSPSLLESKGRLILVAAVEKSKLNVPKSLRLWSLQQDNATWVEIERMPQPLYTQFAAEEGGKGFECVGNQEFVMIVLRGTSLQLLFDIVRKSWLWVPPCPYSGSGGGSSGGGSDGEVLQGFAYDPVLTTPVVSLLDQLTLPFPGVC

SEQ ID NO: 870 - protein, 522 aa, Bacillus cereus E33L
MSETLLVIISILLLLLLLLIVFFIITFFIKKRTHHSILKLHPYLGRMRYLLEKIGPEFRQYWFDHDTDGKPFSRYDFQSVMFLAKYRSEILGFGSKRDFEASGYYIANTLFPVLTEELSVNVTQEREGKKYVIHKEGLFSRREKLTADTTNLWLYEEDDAIIVGENRKYPWKLYGMFGASATSYGSIGENYILASGFGAKMAGGSWINTGEGGVIPEHLHTGANIVAQIGPGLFGYRDEDGNFSMEKFMGKAKESNIKAFELKFGQGAKIRGGHLEGQKVNEKIAFVRNVREGETINSPNRFSFLNNAAETLYFIQQLQENGGKPVGMKIVIGQQEPLENLFKTMKELNIYPDFITIDGSEGGSGATYKSMADSMGMPLIPALLTFIDTANHYDIRDKFKVFAAGKLITPDKVAIALAIGADAVNSARGFMMASGCIMALQCNSGQCPSGVATTNPHYQKALDPYEKKWRVMNYIISMRYSLFSLAAAAGVKSPRHLKRDHIVFKDEMGRVVPLSELFPTSK

SEQ ID NO: 871 - protein, 360 aa, Magnetospirillum magnetotacticum MS-1
MGESYGPDLGPFQRVSSVSLPDMPAVTDGDPADLRGLSASRGRGTRPSPGYLSELEPASEIVKRFATGAMSYGSISKEAHETLAIAMNSFVVRSNSGEGGEEPRRFVPGPDGRSRRSAIKQVASGRFGVTTEYLVNGDMIQIKVSQGAKPGEGGQLPGHKVDAKIAKVRYATPGVGLISPPPHHDIYSIEDLAQLIFDLKNVNPAADISVKLVSEVGVGTVAAGVAKARADHITISGFDGGTGAAPLTSIKHAGGPWETGLAETQQTLVMNGLRGRVALQADGGIRTGKDVMIAVLLGADQIGFSTAPLIAAGCIMMRKCHLNTCPVGVATQDPVLRKRFKGTPEHVINYFFFVAEELRE

SEQ ID NO: 872 - protein, 2144 aa, Aspergillus nidulans FGSC A4
MGLNLEEIYGQTIVEEQRPNEYSEYQPKKGYGWANTLPERQGLYDPEYEKDACGVGFAANIKGKASHKIVSDARNLLCNMTHRGAVGSDARDGDGAGVMTSIPHKFFIKNFAREVGVDLPPLGQYAVGNLFFKPDEEALKESIKQFEEIATSLGLRVLGWREVPRDSTILGPAALSREPTILQPFVVLKSAYGEGNKPDITDPEQFDTKTFELQLYVLRKRATHIIGLANWFYLCSLSNRNIVYKGQLAPIQVYQYYHDLVNVDYEGHFALVHSRFSTNTFPSWDRAQPLRWAAHNGEINTLRGNKNWMRAREGLLKSDIFGEELESLLPIVEDGGSDSAAFDNVLELLMINGVLSLPEAVMIMIPEAWQDNPAMDPAKAAFYEWAACQMEPWDGPALFTFSDGRYCGANLDRNGLRPCRFYVTDDDRIICASEVGAVDIDQERVVQKGRLQPGKMLLVDTVAGRIIDDSELKYTVAHRHDFSSWLNKELVKLPAITEKLVEQNMDLRHDLDNTTVQNDPRLKAFGYSFEQVTLLLGPMGADSKEALGSMGNDAPLACIAKQPRLLYEYFRQLFAQVTNPPIDPIREAVVMSLECYVGPQGNLLEMDPSQCRRLLLPSPILSIPEFNALKNINTVHKDWTVRLIDITFEKKKGVPGYIEALDRICDAATEAIQQGDKILILSDRATSADRVPVSALLATGLVHHHLVRNKWRSLAALIVETAEAREVHHMCVLVGYGADGINPYLAMECILKMNREKLIRKELSDEKVIENYKASCDGGILKVMSKMGISTLASYKGAQIFEALGIDDSVIDRCFTGTASRIRGMNFELIAQDAFAIHERGYPSRAIVDIPGLNESGEYHWRDGGEDHINDPVSIANIQDAVRTKNDKSYEAYAKAAHEQIKNCTLRGMLEFDFDQRTPIPIDQVEPWTEIVRRFVTGAMSYGSISMESHSTLAVAMNRLGGKSNTGEGGEDPERSKRMENGDTMRSAIKQIASGRFGVTSHYLADADELQIKMAQGAKPGEGGELPGHKVVGPIAHTRYSTPGVGLISPPPHHDIYSIEDLKQLIYDLKCSNPRARVSVKLVSEVGVGIVASGVAKAKADHILISGHDGGTGASRWTGIKYAGLPWELGLAETHQTLVLNDLRGRVIVQTDGQIRTGRDVAVACLLGAEEFGFATTPLIAMGCIMMSKDPCPVYVSLQPLIWCIGKCHLNTCPVGIATQDPELRKKFEGQPEHVINFFYYIANELRAIMAKLGIRTINEMVGRAELLKVRDDLTNPKQENIDLSLILTPAHSLRPGVATYNVRKQDHRLHTRLDNKLIAESELALEKGLPCRVECDVVNTDRALGATLSYQVSRRYGGEGLPQDTIHSNIKGSAGQSFGAYLAPGITLELEGDANDYVGKGLSGGRLIVYPPRGAAFKAEENVIVGNTCLYGATRGTCFFRGVAAERFAVRNSGATAVVEGVGDHGCEYMTGGRVVVLGSTGRNFAAGMSGGIAYILDMNQDFLSKVNMEMVECSGLEDPAEIAFLRGLIEDHHHYTGSELAARILLDFTRALPHFIKVLPTDYKRTLEEEAAKAAAAKKAETTIPQLPSVPVEKQKPKAEGDAKKAELLDIEDSVTDSKVEKKRTALILDKTRGFMKYNRRSEKYRNPATRTRDWAELSSRLTEDELKYQSARCMDCGVPFCQSDTGCPISNIIPKWNELVFQNQWQDALNRLLMTNNFPEFTGRVCPAPCEGACVLGINEDPVGIKSIECAIIDRGFEMGWMVPRPPPVRTGKTVAIIGSGPAGLAAADQLNRVGHSVTVYERADRIGGLLMYGIPNMKLDKKIVQRRVDLMAAEGVKFVTGVSVGPDSEVSLDSLRKSNDAVIIATGATVARDLKVPGRELEGIHFAMQFLHKNTKSLLDSELADGAYISAKDKHVVVIGGGDTGNDCIGTSVRHGAKSVVNFELLPQPPPERARDNPWPQWPRIYRVDYGHSEVKTHMGKDPREYCIMSKEFVDDGNGRVKGINTVRVEWTKSATGGWDMKTVEGSEQFFPADLVLLSMGFLGPEDRLLGEEIERDARKNVKTPPGHYGTNVPGVYAAGDCRRGQSLIVWGINEGRQCAREVDTFLSGISSQLPVTGGIVRRPAVDAVRQATETVTIAA

SEQ ID NO: 873 - protein, 544 aa, Desulfococcus oleovorans Hxd3
MSANGSISPSTLSLKDLPWQILWDKEKCTLCGRCTSVCPVRTLELGVFRKRVVKPNIHISHASSSSFEVYYGIRQQTAPANACVGCAMCTLVCPNDAILPVRGDEADKLMFHVNQGGTPRQRGGRRNAPGGILDRIKFIRISMLTDPALDAGRHEFELRTLLGRVLPPEENLAHLRENGWIPPVREIYPLIIGGMSFGALSPNMWEGLQMGVAYLNEEINMPVRMCTGEGGCPPRLLRSRFLQYVILQIASGYFGWDEIVHAIPEMKVDPCAIEIKYGQGAKPGDGGLLMWYKVNKLIAAIRGVPEGISLPSPPTHQTKYSIEEAVAKMIQSMYMAWGFRVPVYPKISATSTALAVLNNLSRNPYAAGLAIDGEDGGTGAAYNVSMNSMGHPIASNIRDCYLNLVKLGKQNEIPLLAGGGVGKSGNLAANAAALIMLGASGVQAGKYVMQAAAGCLGSETDRCNICNIGQCPKGITSQDPRLYRRLDPEDVAQRIVDMFLSFDTELKKIVAPLGRSTSLPIGMADALGIDDIAAAERLRIKYVV

SEQ ID NO: 874 - protein, 1527 aa, Mycobacterium bovis AF2122/97
MTPKRVGLYNPAFEHDSCGVAMVVDMHGRRSRDIVDKAITALLNLEHRGAQGAEPRSGDGAGILIQVPDEFLREAVDFELPAPGSYATGIAFLPQSSKDAAAACAAVQKIAEAEGLQVLGWRSVPTDDSSLGALSRDAMPTFRQVFLAGASGMALERRCYVVRKRAEHELGTKGPGQDGPGRETVYFPSLSGQTLVYKGMLTTPQLKAFYLDLQDERLTSALGIVHSRFSTNTFPSWPLAHPFRRIAHNGEINTVTGNENWMRAREALIKTDIFGSAADVEKLFPICTPGASDTARFDEVLELLHLGGRSLAHAVLMMIPEAWERHESMDPARRAFYQYHASLMEPWDGPASMTFTDGTVVGAVLDRNGLRPSRIWVTDDGLVVMASEAGVLDLHPSTVVRRMRLQPGRMFLVDTAQGRIVSDEEIKADLAAEHPYQEWLDNGLVPLDELPEGKDVRMPHHRIVMRQLAFGYTYEELNLLVAPMARLGAEPIGSMGTDTPVAVLSQRPRMLYDYFHQLFAQVTNPPLDAIREEVVTSLQGTTGGERDLLNPDENSCHQIVLPQPILRNHELAKLVSLDPNDKVNGRPHGLRSKVIRCLYRVSEGGAGLAAALEEVRGAAAAAIADGARIIILSDRESDEEMAPIPSLLAVAGVHHHLVRERTRTQVGLVVESGDAREVHHMAALVGFGAAAINPYLVFESIEDMLDRGVIEGIDRTAALNNYIKAAGKGVLKVMSKMGISTLASYTGAQLFQAVGISEQVLDEYFTGLTCPTGGITLDDIAADVAARHRLAYLDRPDERAHRELEVGGEYQWRREGEYHLFNPETVFKLQHSTRTGQYKIFKEYTRLVDDQSERMASLRGLLKFRTGVRPPVPLDEVEPASEIVKRFSTGAMSYGSISAEAHETLAIAMNRLGARSNCGEGGEDVKRFDRDPNGDWRRSAIKQVASARFGVTSHYLTNCTDLQIKMAQGAKPGEGGQLPGHKVYPWVAEVRHSTPGVGLISPPPHHDIYSIEDLAQLIHDLKNANPSARVHVKLVSENGVGTVAAGVSKAHADVVLISGHDGGTGATPLTSMKHAGAPWELGLAETQQTLLLNGLRDRIVVQVDGQLKTGRDVMIATLLGAEEFGFATAPLVVAGCIMMRVCHLDTCPVGVATQNPLLRERFTGKPEFVENFFMFIAEEVREYLAQLGFRTVNEAVGQAGALDTTLARAHWKAHKLDLAPVLHEPESAFMNQDLYCSSRQDHGLDKALDQQLIVMSREALDSGKPVRFSTTIGNVNRTVGTMLGHELTKAYGGQGLPDGTIDITFDGSAGNSFGAFVPKGITLRVYGDANDYVGKGLSGGRIVVRPSDDAPQDYVAEDNIIGGNVILFGATSGEVYLRGVVGERFAVRNSGAHAVVEGVGDHGCEYMTGGRVVILGRTGRNFAAGMSGGVAYVYDPDGELPANLNSEMVELETLDEDDADWLHGTIQVHVDATDSAVGQRILSDWSGQQRHFVKVMPRDYKRVLQAIALAERDGVDVDKAIMAAAHG

SEQ ID NO: 875 - protein, 454 aa, Desulfotalea psychrophila LSv54
MLKIDIYSRGASMTSQRCPVCGYLHSGPIDFHLCPVCNSPATIFIHDSGAENFGRWDLNTRLMIRSMAETGTYYLEGKGTTRKFLGMDDLIFLPAQLETLPLGDEVEVDSTLVLGKVAGQPVLLQTPILNAAMSYGALSKEAKMALALGSSLAGTIANSGEGGMLDEERALADRITLQYATGRFGVSEERLQLADMIEIKISQGAKPGMGGKLPGAKVTAEIAAVRQIAPGKMAQSPAVHEDIRDVKDLSAKILELRSLIGGKPISLKFVGGHLQNDLAAIFSQENIPDVLVIDGSEGGTGAAPVTVKDHVGMPLIYSLPRIAEFLDRNGLRDRVTLIAAGGIRHPGDIAKAIALGADGVYMGGALKIAIGCTYLRQCHLDNCPYGIATQDGSLRKRLDVQAAGQRVANFIGAATEEVKSIARICGKSSIHALNRDDLGSLDPELSRITGIPML

SEQ ID NO: 876 - protein, 2517 aa, Debaryomyces hansenii
MSTTQLQIVDGIALTQIFNGLKSNKEEERNRYALELRNYLASIARDLSPEQFNRYNNDINKTIFEFLHSNETSEKLGGIAALNSLIDFDSGVGEENATKTARFSNYLGSLILSNDLTIMKQATMTLGKLATPGGTLTGDFVDFEAKRAIEWLQSDNKQHENRRHAAILIITALVDNAPTLLYNFINQILEHLWIPLRDSKLVIRTDAAIALQKCMRIIYDRDINSRRFWIKHFIDMASKILNENVARNPTSESNDSSNNGSGNNSVNSVNAAASTAYNLIYSTATGSQTNESIHGSLLVYRELITFHSDPYIHSKFELIYENTVLYRNHKQAIIRQELTKIIPLLCKVNTELFVEKYLHRTLLHYLSQLKQLKSQHSETANNDKSAIFRSIGLISLEVGNQMATYLDAILDNIRDGLSYPSNPSVQSILVNAVSNNGDNPLSGAVTSSNGSSQSTINGLNSISTSGSGPTKYRLSRKNTEPAIFDCISKLSIAVGPALTKHLQRDILDMMFSNCSLSVYMQNVLQTLIVNIPMLTNLISMKLLNLLSLVLSGKIFQPPGSPYGSIKMNESLARDYRLIMISRDTGLSINSILNDADDYENYDSAILVQALNMLAFFEFENYQLNEFVRYCTITYLEHNVPKVRQTATITSCEIFIKDPICQQTSVNALNAVNEVLDKLLSIAITDPIPEIRLEGLNCLANAGNFDPQLSQANNVRLLFIALNDEVFSIRKIAIKILGRLSSINPAYIVPSLRKTLIQLLSRLEYSPTSRKKEESATLISLLISNSKELTRPYVKPIVEALLPKAKDPSSSVAASAINCLGELAVVGGEDLQPFIPDLMPLILETFQDQSSSYKRDAALKTLGQLASSSGYVIKPLLDYPQLLGMLVGILKSESSPHIRRETVRLLGILGALDPYKHREVEQNSKNIPSEQNAPPVDVALLMQGMSPSNDEYYPTVAINNLMKILKDPSLTAHHNKVIQAIMYIFQTLGLRCVSFLPQIIPGIINVMNTCQPSMLKFYFQQLGALILIVKQHIRPFLPEIFEVIKESFNINIQLNVQVIIINLIESISRALEGEFKMHLPDVLNLMLNVFEDDKSVKREPSLHVLKAFVVFGSSIEEYVHIIVPNIVKMFEMGPIVLRRAAIETIGRLSKQVLLNDMASRIIHPILRVLRQGNDELKTTAMNTLSYLLLQLGNEFSVFIPVIKSLLIQQKIHSAIFEQLVNKLLSGDPLPAYLNIYKDYDIHVNHFDVPDVDMPSKKLPVNQGALKAAWDSSSRQTKEDWQEWIGRLSKELLKQSPSHAIRACAGLATDYHPLAKDLFNASFASCWSELYSQHQEELVESFCIALSSANNPPEIHQILLNLAEFMEHDDKSLPIAITTLGQYAQRCHAYAKALHYQELEFYVEPTTPTIESLISINIQLQQSDAAVGILKHAQLHHDLQLKETWYEKLQRWDDALRAYSLREKQEPDNMEITMGKMRCYHALGEWEQLSELAQSKWNNSSSDIKRGVAPLAAAAAWGLGQWDRMDACIKVMKTESPDKAFFNAILSLHRNSFEDASNHILKARDLLVTEITALVSESYNRAYGVVVRVQMLAELEEIIKYKCLPQGSEKRVIMRKTWNTRLLGCQRNVDIWQRMLKVRALVIKPKQDMDMWIKFANLCRKSGRLNLAEKSLNYLLEEGSPENPSRAPPQVVYAQLKYMWAKGQQREALRHLVDFTTRMSQDLGLNPNDLITQPLPSEGPGIPKHVEEYTKLLARCFLKQGEWQILLNNNWRTETSEIILGAYLLATHFDDKWYKAWHNWALANFEVISLFTSQNNNGNNGTINVSQGEIMDQNDQVVTSSDEQSQQPQRQIQPANIIPMDVVQRHVVPSIKGFFHAIALSNTNSLQNTLRLLTLWFKFGGIPEAAQAMNEGFNMVKIDNWLEVVPQLISRIHQPNQTVSRSLIGLLSDLGKAHPQALVYPLAVAVTSESVSRKRAALSIIDKMRLHWATLVDQSDLVSHELIRVAVLWHEQWYEGLEDASRLFFGEKNTEKMFEVLEPLHQMLQKGPETMREASFNNAFGRELADAYEWVLNFRRTKDITNLNQAWDIYYNVFRRISRQLPQLSSLELQYVSPKLEEANNLELAAPGTYHAGKPTIKIVKFDPTFSVISSKQRPRKLSCKGSDGKEYQYVLKGHEDIRQDNLVMQLFGLVNTLLVNDPECFKRHLDIQQYPAIPLSPKVGLLGWVPNSDTFHVLIREYRESRKILLNIEHRIMLQMAPDYDSLTLLQKVEVFTGALDNTRGQDLYKVLWLKSKSSEAWLDRRTTYTRSLAVMSMVGYILGLGDRHPSNLMLNRITGKVIHIDFGDCFEAAILREKYPEKVPFRLTRMLNYAMEVSGIEGSFRITCEHVMRVLRDNKESLMAILEAFAYDPLINWGFDFPTKAVAEATGINVPQVNIAELLRREQIDEQEAARLTRQNEIEIRNARAALVLKRITDKLTGNDIKRLNDLDVPTQVDKLIQQATSVESLCQHYIGWCSFW

SEQ ID NO: 877 - protein, 502 aa, Pyrococcus furiosus DSM 3638
MRTHVLPEFLVERDDKRCIKCGACIYQCPFGVYKWNADKSDITIDYTKCVGCQRCVVFCPTDALIVRPYPGSYKPNAYWNREVISDIKRQAEGGGVLLTGTGNDKPYKVYFDHILLNASQVTNPPIDPLREPIELRTFIGGKPEKLEVDLENIEIKTEIPPNIEIEVPIMFAGMSYGALSYNAFLAIAMAAKEFGTMFSTGEGGLPRELRRKYGDHAIVQVASGRFGVDPDYLNSAAAIEIKIGQGAKPGIGGHLPGEKVTEGIARTRMIPPGTDAISPAPHHDIYSIEDLATLIHAIKEATNYEKPVFVKVAAVHNIAAIASGIARAGADAIVIDGFRGGTGAAPKRIRDNVGIPIELALASVDRRLREEGIRNRVSLIVSGGIRNAADVVKAIALGADAVYIGTAALIAIGCTMCQKCYTGKCPWGITTQDPILSRRLDPNEASKRLINLLKAWSLEIKEMLGAMGINAIESLRGNREHLRGIGLEKWELEVLGIKGAGE

SEQ ID NO: 878 - protein, 1624 aa, Burkholderia thailandensis E264
MGFICYSLDSSRIFRIPAVAGSPAPARPATSRSTRRGTTGNKQMVSTAARPLSDGVPMIDHQQPKSALPAAQGLYDPQNEHDACGVGFVAHIKGKKSHEIIEQGLKILENLDHRGAVGADPLMGDGAGILIQIPDAFYREEMARQDVTLPPAGEYGVGMIFLPKESASRIACEQELERTVKAEGQVVLGWRDVPVDHAMPISPAVKASEPVIRQIFIGRGKDVMVTDALERKLYVIRKTASHRIQALKLKHGKEYFVPSMSARTVVYKGLLLAGQVGVYYRDLQDERVVSALALVHQRFSTNTFPAWELAHPYRMIAHNGEINTVKGNVNWLNARTGAIASHVLGDDLPKLWPLIYPGQSDTASFDNCLELLVMAGYPLVHAVMMMIPEAWEQHTLMDDNRRAFYEYHAAMMEPWDGPAAIAFTDGRQIGATLDRNGLRPARYIITDDDLVIMASEAGVLPIPESKIVKKWRLQPGKMFLIDMEHGRIIDDKELKDNLANAKPYKSWIDAVRIKLDEIEPEAGDVAAERRSAAALLDRQQAFGYTQEDLKFLMAPMAQQGEEAVGSMGNDSPLAVMSNKNKTLYHYFKQLFAQVTNPPIDPIRENMVMSLVSFIGPKPNLLDTNNINPPMRLEVSQPVLDFKDIAKIRSIDRYTGGKFSAYELNICYPVAWGKEGIEARLASLCAEAVDAVKSGYNILIVSDRKTDAENVAIPALLATSAIHTHLVQQGLRTSTGLVVETGSARETHHFALLAGYGAEAVHPYLAMETLAKMAQGLPGDLSPEKAIYNFTKAVGKGLQKVMSKMGISTYMSYTGAQIFEALGLATDLVEKYFKGTASKVGGIGLFEVAEEAIRLHRDAFGDNPVLADMLDAGGEYAFRVRGEDHMWTPDSIAKLQHATRGNSYQTYKEYAHLINDQTKRHMTLRGLFEFKVDPAKAIPIDEVEPAKEIVKRFATGAMSLGSISTEAHTTLAIAMNRIGGKSNTGEGGEDENRYRNELRGIPIKVGDTLKSVIGDEIVRDIPLKEGDSLRSKIKQVASGRFGVTAEYLASADQIQIKMAQGAKPGEGGQLPGHKVSEYIGKLRYSVPGVGLISPPPHHDIYSIEDLAQLIHDLKNVNPVASISVKLVSEVGVGTVAAGVAKAKADHVVIAGHDGGTGASPLSSVKHAGTPWELGLAETQQTLVLNRLRGRIRVQADGQMKTGRDIVIGALLGADEFGFATAPLVVEGCIMMRKCHLNTCPVGVATQDPVLRAKFSGQPEHVVNYFFFVAEEAREIMAQLGIAKFDDLVGRADLLDMRRGVEHWKAKGLDFSRVFYQPEGCEGIARRHVESQEHGLERALDHTLIEKAKAAIENGEHVSFIQPVRNVNRTVGAMLSGVIAKKHGHDGLADDAVHIQLKGTAGQSFGAFLAKGVTLDLVGDGNDYVGKGLSGGRIIIRPTNDFRGKSEENIICGNTVMYGALEGEAFFRGVAGERFCVRNSGATAVVEGTGDHGCEYMTGGTVVVLGETGRNFAAGMSGGVAYVYDADGTFAAKCNKSMVALDPVLQQAEQERTVDPALWHAGATDEALLKGLVERHFQFTGSPRAKSLLENWDAARRQFVKVFPHEYKRALGEIGAKKKAGEVLAA

SEQ ID NO: 879 - protein, 524 aa, Alcanivorax sp. DG881
MFPEYLEPWLNSTIAWLELGFLLLVLLLTVVAVGLWLQDRFFQKRHAIRRNYPLIGRFRYFFETLGEFFRQYFFAMDREELPFNRAQRAWVYRAAKDLSNTMAFGSTKQTGAGRVIFMNCPYPTLEKDAAKTLPLMIGPHCEQPYAARSFFNVSGMSFGALSRPAVQALSHGAAIANCWMNTGEGGLSPYHLEGGCDVVFQVGTARYGVRDAEGNLNDERLAAIAARPQVKMIEIKLSQGAKPGKGGILPAAKVTQEIAAIRGIPAGEASISPNGQPDVHSAEDLLDLIAHVREVSGKPTGIKCVLGAWAWVEDLFLAIHARGLESAPDFITIDSGDGGTGAAPMSLMDDVGLYLAESLPLLVDLRDGYGLTDRIRIIASGKLITPSMVAWAIAVGADFCVSARGYMFALGCIQALQCNRNTCPTGVTTHNPRLQRGLVPAEKSQRVAHFHDNLVKEVETIAHSCGVSEPRQLRRYHARMLSSNGESIPLDRLWPQVESGIYLREGRPSEKQPFVRWQGIGTGP

SEQ ID NO: 880 - protein, 2470 aa, Saccharomyces cerevisiae
MEPHEEQIWKSKLLKAANNDMDMDRNVPLAPNLNVNMNMKMNASRNGDEFGLTSSRFGGVVIGSNGDVNFKPILEKIFRELTSDYKEERKLASISLFDLLVSLEHELSIEEFQAISNDINNKILELVHTKKTNTRVGAVLSIDTLISFYAYTERLPNETSRLAGYLRGLIPSNDVEVMRLAAKTLGKLAVPGGTYTSDFVEFEIKSCLEWLTASTEKNSFSSSKPDHAKHAALLIITALAENCPYLLYQYLNSILDNIWRALRDPHLVIRIDASITLAKCLSTLRNRDPQLTSQWVQRLATSCEYGFQVNTLECIHASLLVYKEILFLKDPFLNQVFDQMCLNCIAYENHKAKMIREKIYQIVPLLASFNPQLFAGKYLHQIMDNYLEILTNAPAKKIPHLKDDKPQILISIGDIAYEVGPDIAPYVKQILDYIEHDLQTKFKFRKKFENEIFYCIGRLAVPLGPVLGKLLNRNILDLMFKCPLSDYMQETFQILTERIPSLGPKINDELLNLVCSTLSGTPFIQPGSPMEIPSFSRERAREWRNKSILQKTGESNDDNNDIKIIIQAFRMLKNIKSRFSLVEFVRIVALSYIEHTDPRVRKLAALTSCEIYVKDNICKQTSLHSLNTVSEVLSKLLAITIADPLQDIRLEVLKNLNPCFDPQLAQPDNLRLLFTALHDESFNIQSVAMELVGRLSSVNPAYVIPSIRKILLELLTKLKFSTSSREKEETASLLCTLIRSSKDVAKPYIEPLLNVLLPKFQDTSSTVASTALRTIGELSVVGGEDMKIYLKDLFPLIIKTFQDQSNSFKREAALKALGQLAASSGYVIDPLLDYPELLGILVNILKTENSQNIRRQTVTLIGILGAIDPYRQKEREVTSTTDISTEQNAPPIDIALLMQGMSPSNDEYYTTVVIHCLLKILKDPSLSSYHTAVIQAIMHIFQTLGLKCVSFLDQIIPTILDVMRTCSQSLLEFYFQQLCSLIIIVRQHIRPHVDSIFQAIKDFSSVAKLQITLVSVIEAISKALEGEFKRLVPLTLTLFLVILENDKSSDKVLSRRVLRLLESFGPNLEGYSHLITPKIVQMAEFTSGNLQRSAIITIGKLAKDVDLFEMSSRIVHSLLRVLSSTTSDELSKVIMNTLSLLLIQMGTSFAIFIPVINEVLMKKHIQHTIYDDLTNRILNNDVLPTKILEANTTDYKPAEQMEAADAGVAKLPINQSVLKSAWNSSQQRTKEDWQEWSKRLSIQLLKESPSHALRACSNLASMYYPLAKELFNTAFACVWTELYSQYQEDLIGSLCIALSSPLNPPEIHQTLLNLVEFMEHDDKALPIPTQSLGEYAERCHAYAKALHYKEIKFIKEPENSTIESLISINNQLNQTDAAIGILKHAQQHHSLQLKETWFEKLERWEDALHAYNEREKAGDTSVSVTLGKMRSLHALGEWEQLSQLAARKWKVSKLQTKKLIAPLAAGARWGLGEWDMLEQYISVMKPKSPDKEFFDAILYLHKNDYDNASKHILNARDLLVTEISALINESYNRAYSVIVRTQIITEFEEIIKYKQLPPNSEKKLHYQNLWTKRLLGCQKNVDLWQRVLRVRSLVIKPKQDLQIWIKFANLCRKSGRMRLANKALNMLLEGGNDPSLPNTVKAPPPVVYAQLKYIWATGAYKEALNHLIGFTSRLAHDLGLDPNNMIAQSVKLSSASTAPYVEEYTKLLARCFLKQGEWRIATQPNWRNTNPDAILGSYLLATHFDKNWYKAWHNWALANFEVISMVQEETKLNGGKNDDDDDTAVNNDNVRIDGSILGSGSLTINGNRYPLELIQRHVVPAIKGFFHSISLLETSCLQDTLRLLTLLFNFGGIKEVSQAMYEGFNLMKIENWLEVLPQLISRIHQPDPTVSNSLLSLLSDLGKAHPQALVYPLTVAIKSESVSRQKAALSIIEKIRIHSPVLVNQAELVSHELIRVAVLWHELWYEGLEDARRQFFVEHNIEKMFSTLEPLHKHLGNEPQTLSEVSFQKSFGRDLNDAYEWLNNYKKSKDINNLNQAWDIYYNVFRKITRQIPQLQTLDLQHVSPQLLATHDLELAVPGTYFPGKPTIRIAKFEPLFSVISSKQRPRKFSIKGSDGKDYKYVLKGHEDIRQDSLVMQLFGLVNTLLKNDSECFKRHLDIQQYPAIPLSPKSGLLGWVPNSDTFHVLIREHRDAKKIPLNIEQWVMLQMAPDYENLTLLQKIEVFTYALDNTKGQDLYKILWLKSRSSETWLERRTTYTRSLAVMSMTGYILGLGDRHPSNLMLDRITGKVIHIDFGDCFEAAILREKYPEKVPFRLTRMLTYAMEVSGIEGSFRITCENVMRVLRDNKESLMAILEAFALDPLIHWGFDLPPQKLTEQTGIPLPLINPSELLRKGAITVEEAANMEAEQQNETRNARAMLVLRRITDKLTGNDIKRFNELDVPEQVDKLIQQATSIERLCQHYIGWCPFW

SEQ ID NO: 881 - protein, 1560 aa, Cyanothece sp. ATCC 51142
MTCMDERTIMNMTQNTHNQPNATYMGIPSLVEERDACGVGFIADVKGNGSHKLIQQTLTALSCMEHRGGCSADNDSGDGSGIMTAIPRELLGDWFEANGLTMPPVEQLGVGMVFLPQDSSKRQEERSHVETVVKRANLTVLGWREVPVNPDVLGVQAKENQPHIEQIMVTSGEGLSGDDLDRVLYIVRSQIGKRLADDFYICSFSCRTLVYKGMVRSAVLGEFYQDLNDPNYISRFAVYHRRFSTNTMPKWPLAQPMRLLGHNGEINTLIGNINSMATREVKLTVPGWKAEELEALTPIVNTANSDSYNLDSTLELLVRTGRSPLEAAMILVPEAYKNQRDLKDYPEITDFYDYYSGFQEPWDGPALLAFSDGKMVGACLDRNGLRPARYCITKDDYVVVGSEAGVVDLPEADIVEKGRLGPGQTIAVDLTTQEVLKNWDIKQRIAQTHPYGEWLQHHRQNITPQAFADQILLTESGQLLQQQTAFGYTAEDVEMIVVPMATQGKEPTFCMGDDIPLAVLSDKPHLLYDYFKQRFAQVTNPPIDPLRESLVMSLEMLLGSKGNLLDPQPEDAKLLKVESPVLNETELEQIKTSDFNTTELSTLFDIKTGPDGLKAALERLCNQATQAVEKGAKILILSDRFSGVGSINETNSYIPPLLAVGTVHHHLITQGLRLETSLVVDTAQCWSTHHFACLVGYGASAVCPYLTLETIRQWWSDPKTQKLMANGKLETITLEDALGNYRHAVEAGLLKILSKMGISLLASYHGAQIFEAIGLGMELVDMAFKGTTSRVGGLNIAELAQEIIAVHSRAFPSLTDKKLKNFGFINYRPGGEYHMNSPEMAKSLHKAVKAYKIGENGANAEAYDHYELYQKYLEERPITALRDLLEFKGDQPSIPVEEVEPVEAIVKRFCTGGMSLGALSREAHETLAIAMNRLGGKSNSGEGGEDPTRFITLSDVDESGNSATFPHLNGLRNGDTASSAIKQVASGRFGVTPEYLMNGQQIEIKMAQGAKPGEGGQLPGKKVSPYIAMLRRSKPGVTLISPPPHHDIYSIEDLAQLIFDLHQINPSAKVSVKLVAEIGIGTIAAGVAKANADIIQISGHDGGTGASPLSSIKHAGCPWELGVTEVHRMLMENKLRDRVILRADGGLKTGWDVMMAALMGAEEYGFGSIAMIAEGCIMARICHTNNCPVGVATQQEKLRKRFTGVPENVVNFFYFIAEEVRSILAKLGYRSLDEVIGRSDLLKMRKNANLTKTQSINLDCLLNLPDVKSDRSWLNHEDVHSNGPVLDDELLADAAVSSAINTHGRVSKNVKIVNTDRTVGARISGTLAKKYGNTGFSGELKFNFTGAAGQSFAAFNLPGMIMYLEGEANDYVCKGMHGGEVVIVPPKDATYKAADNVIVGNTCLYGSTGGVLYANGRAGERFGVRNSMGKAVIEGAGDHCCEYMTGGVIVVLGSVGRNVGAGMTGGLAYFLDEDNNFPEKVNPEIVEIQRICTEAGEAQLKGLIEAHFERTGSKKAEHILNNWGEYVGQFWQVVPPSEANSPETNPNPVMVEEKTLTPAK

SEQ ID NO: 882 - protein, 523 aa, Legionella pneumophila str. Lens
MRRQWYIGFGVILLCLFALFAMLQDIVWFFAFLIPVVILWIYDVLQTKHTILRNFPVLGHVRYFLEFLRPEIQQYFIATDESELPFNRETRSMIYQRAKNVRDTIPFGTERDILSVGYTWALHSLSPKHSSEVEPRIDVGGPDCKKPYNASRLNVSAMSFGSLSANAIMALNKGAKLGGFYHNTGEGGLSPYHLQGGDIVFQIGTAYFGCRDDKGDFDENEFIKEASRDEVKMIEIKLSQGAKPSHGGILPAAKLTEEIAKVRKVPMGKDVLSPIAHTAFDNPVGLLHFVKRLRDLSGGKPIGFKLCLGRRHEFMAICKAMLKTNILPDFITIDGAEGGTGAAPVEYTNFIGTPLEAGLVFVHNALVGTGVRDKIRVICSGKVTNGFDLLTNIALGADICNSARAMMMSIGCIQSKQCNANTCPTGVATQKKRLQYGLVVDEKKFLVANFHNNTIKSFLEMVGALGLNNPSDLKPSHIMRRIGVDEVKSFDKIYTYVKPGQFLQGDIPDDYRIHWEHADPDKF

SEQ ID NO: 883 - protein, 447 aa, Oryza sativa Japonica Group; identical to SEQ ID NO: 765

SEQ ID NO: 884 - protein, 2470 aa, Saccharomyces cerevisiae
MEPHEEQIWKSKLLKAANNDMDMDRNVPLAPNLNVNMNMKMNASRNGDEFGLTSSRFDGVVIGSNGDVNFKPILEKIFRELTSDYKEERKLASISLFDLLVSLEHELSIEEFQAVSNDINNKILELVHTKKTSTRVGAVLSIDTLISFYAYTERLPNETSRLAGYLRGLIPSNDVEVMRLAAKTLGKLAVPGGTYTSDFVEFEIKSCLEWLTASTEKNSFSSSKPDHAKHAALLIITALAENCPYLLYQYLNSILDNIWRALRDPHLVIRIDASITLAKCLSTLRNRDPQLTSQWVQRLATSCEYGFQVNTLECIHASLLVYKEILFLKDPFLNQVFDQMCLNCIAYENHKAKMIREKIYQIVPLLASFNPQLFAGKYLHQIMDNYLEILTNAPANKIPHLKDDKPQILISIGDIAYEVGPDIAPYVKQILDYIEHDLQTKFKFRKKFENEIFYCIGRLAVPLGPVLGKLLNRNILDLMFKCPLSDYMQETFQILTERIPSLGPKINDELLNLVCSTLSGTPFIQPGSPMEIPSFSRERAREWRNKNILQKTGESNDDNNDIKIIIQAFRMLKNIKSRFSLVEFVRIVALSYIEHTDPRVRKLAALTSCEIYVKDNICKQTSLHSLNTVSEVLSKLLAITIADPLQDIRLEVLKNLNPCFDPQLAQPDNLRLLFTALHDESFNIQSVAMELVGRLSSVNPAYVIPSIRKILLELLTKLKFSTSSREKEETASLLCTLIRSSKDVAKPYIEPLLNVLLPKFQDTSSTVASTALRTIGELSVVGGEDMKIYLKDLFPLIIKTFQDQSNSFKREAALKALGQLAASSGYVIDPLLDYPELLGILVNILKTENSQNIRRQTVTLIGILGAIDPYRQKEREVTSTTDISTEQNAPPIDIALLMQGMSPSNDEYYTTVVIHCLLKILKDPSLSSYHTAVIQAIMHIFQTLGLKCVSFLDQIIPTILDVMRTCSQSLLEFYFQQLCSLIIIVRQHIRPHVDSIFQAIKDFSSVAKLQITLVSVIEAISKALEGEFKRLVPLTLTLFLVILENDKSSDKVLSRRVLRLLESFGPNLEGYSHLITPKIVQMAEFTSGNLQRSAIITIGKLAKDVDLFEMSSRIVHSLLRVLSSTTSDELSKVIMNTLSLLLIQMGTSFAIFIPVINEVLMKKHIQHTIYDDLTNRILNNDVLPTKILEANTTDYKPAEQMEAADAGVAKLPINQSVLKSAWNSSQQRTKEDWQEWSKRLSIQLLKESPSHALRACSNLASMYYPLAKELFNTAFACVWTELYSQYQEDLIGSLCIALSSPLNPPEIHQTLLNLVEFMEHDDKALPIPTQSLGEYAERCHAYAKALHYKEIKFIKEPENSTIESLISINNQLNQTDAAIGILKHAQQHHSLQLKETWFEKLERWEDALHAYNEREKAGDTSVSVTLGKMRSLHALGEWEQLSQLAARKWKVSKLQTKKLIAPLAAGAAWGLGEWDMLEQYISVMKPKSPDKEFFDAILYLHKNDYDNASKHILNARDLLVTEISALINESYNRAYSVIVRTQIITEFEEIIKYKQLPPNSEKKLHYQNLWTKRLLGCQKNVDLWQRVLRVRSLVIKPKQDLQIWIKFANLCRKSGRMRLANKALNMLLEGGNDPSLPNTFKAPPPVVYAQLKYIWATGAYKEALNHLIGFTSRLAHDLGLDPNNMIAQSVKLSSASTAPYVEEYTKLLARCFLKQGEWRIATQPNWRNTNPDAILGSYLLATHFDKNWYKAWHNWALANFEVISMVQEETKLNGGKNDDDDDTAVNNDNVRIDGSILGSGSLTINGNRYPLELIQRHVVPAIKGFFHSISLLETSCLQDTLRLLTLLFNFGGIKEVSQAMYEGFNLMKIENWLEVLPQLISRIHQPDPTVSNSLLSLLSDLGKAHPQALVYPLTVAIKSESVSRQKAALSIIEKIRIHSPVLVNQAELVSHELIRVAVLWHELWYEGLEDASRQFFVEHNIEKMFSTLEPLHKHLGNEPQTLSEVSFQKSFGRDLNDAYEWLNNYKKSKDINNLNQAWDIYYNVFRKITRQIPQLQTLDLQHVSPQLLATHDLELAVPGTYFPGKPTIRIAKFEPLFSVISSKQRPRKFSIKGSDGKDYKYVLKGHEDIRQDSLVMQLFGLVNTLLKNDSECFKRHLDIQQYPAIPLSPKSGLLGWVPNSDTFHVLIREHRDAKKIPLNIEHWVMLQMAPDYENLTLLQKIEVFTYALDNTKGQDLYKILWLKSRSSETWLERRTTYTRSLAVMSMTGYILGLGDRHPSNLMLDRITGKVIHIDFGDCFEAAILREKYPEKVPFRLTRMLTYAMEVSGIEGSFRITCENVMRVLRDNKESLMAILEAFALDPLIHWGFDLPPQKLTEQTGIPLPLINPSELLRKGAITVEEAANMEAEQQNETKNARAMLVLRRITDKLTGNDIKRFNELDVPEQVDKLIQQATSIERLCQHYIGWCPFW

SEQ ID NO: 885 - protein, 152 aa, Oryza sativa
MGNVAIGVGRRRRRWPEVEERLTQPRRLLRQLSDVDSGRLRRLIRSGDLAPCFDAAEDDAGLDEDCPICFYFYPSLNRSKCCGKGICTECFLQLIPSKSSKVVHCPFCKTASYAVEYRGNRAKREKKLDQQKEQNTSESKKKIQSKSQIADE

SEQ ID NO: 886 - protein, 202 aa, Neurospora crassa
MSDSPQSNSKDVEQGAPSPGEEPQMNDPQDPHSSGLNQYEFEVKEQDRWLPIANVARIMKNALPENAKIAKEAKECMQECVSEFISFITSEASEKCQQEKRKTVNGEDILFAMTSLGFENYAEALKIYLSKYREQQNQTNRSENQQNRPSSQGYGAPQGQNQPGQGGFSSNDLGGQQESGDASGYNLYGAQTGHNGGGAEGY

SEQ ID NO: 887 - protein, 1486 aa, Salmonella enterica subsp. arizonae serovar 62:z4,z23:--
MLYDKSLEKDNCGFGLIAHIEGEPSHKVVRTAIHALARMQHRGAILADGKTGDGCGLLLQKPDRFFRIVAQEHGWRLAKNYAVGMIFLNKDPEMAAASRHIVEEELQQETLSIVGWRDVPTNEGVLGEIAISSLPRIEQIFVNAPAGWRPRDMERRLFIARRRIEKRLQDDKDFYVCSLSNLVNIYKGLCMPADLPRFYLDLADLRLESAICLFHQRFSTNTVPRWPLAQPFRYLAHNGEINTITGNRQWARARTYKFQTPLIPDLQSAAPFVNETGSDSSSLDNMLELLLAGGMDIIRSMRLLVPPAWQNNPDMDPDLRAFFDFNSMHMEPWDGPAGIVMSDGRFAACNLDRNGLRPARYVITKDKLITCASEVGIWDYQPDEVVEKGRVGPGELMVIDTRSGRILHSAETDDDLKSRHPYKAWMEKNVRRLVPFEDLPDEEVGSRELDDDLLASYQKQFNYSAEELDSVIRVLGENGQEAVGSMGDDTPFAVLSSQPRIIYDYFRQQFAQVTNPPIDPLREAHVMSLATSIGREMNVFCEAEGQAHRLSFKSPILLYSDFKQLTTMAEHHYRADRLDITFDVTETTLDATVKALCDKAEQMVRNGTVLLVLSDRNIGRNRLPVPAPMAVGAVQTRLVEQSLRCDANIIVETASARDPHHFAVLLGFGATAIYPYLAYETLGRLIDSQAIAKNYRTVMQNYRNGINKGLYKIMSKMGISTIASYRCSKLFEAVGLHDDVVNLCFQGVVSRIGGASFDDFQQDLLNLSKRAWLARKPISPGGLLKYVHGGEYHAYNPDVVRTLQQAVQSGEYRDYQQYARLVNERPAATLRDLLAINPNGDAVAIDEVEPASELFKRFDTAAMSIGALSPEAHEALAEAMNCLGGNSNSGEGGEDPARYGTNKVSRIKQVASGRFGVTPAYLVNADVIQIKVAQGAKPGEGGQLPGDKVTPYIAKLRYSVPGVTLISPPPHHDIYSIEDLAQLIFDLKQVNPKAMISVKLVSEPGVGTIATGVAKAYADLITIAGYDGGTGASPLSSVKYAGCPWELGLVETQQALVANGLRHKIRLQVDGGLKTGVDIIKAAILGAESFGFGTGPMVALGCKYLRICHLNNCATGVATQDEKLRKNHYHGLPFKVTNYFEFIAHEVRELMAELGVTRLVDLIGRTDLLKELDGFTAKQQKLALSRLLETAEPHPGKALYCTENNPPFDNGVLNAQLLQQAKPFVDARQSKTFWFDIRNTDRSVGASLSGYIAQTHGDQGLAADPIKAYFSGTAGQSFGVWNAGGVELYLTGDANDYVGKGMAGGLIAIKPPVGSAFLSHKASIIGNTCLYGATGGRLYAAGRAGERFGVRNSGAITVVEGIGDNGCEYMTGGIVCVLGKTGVNFGAGMTGGFAYVLDEDGEFRKRVNPELVEVLDVDSLAIHEEHLRGLITEHVQHTGSPRGEEILSRWSSFSTQFALVKPKSSDVKALLGHRSRSAAELRVQAQ

SEQ ID NO: 888 - protein, 1488 aa, Idiomarina loihiensis L2TR
MGLYDPADVRDNCGFGLIADINGEAQQGLISTAVKALDRMQHRGGIGADGKTGDGCGLLLQMPEQFFRQYAETQGWQLSKKFAVGMVFFSRDKDKRESARHLIEQELQRETLAVTGWRKVPVNNQVLGEGAKSSEPVIEQVLVSAPPGWRKKDLERRLYMARRRVEKLMPNQDELYISSLSSLVLVYKGLMMAADLPAYYTDLADAEMKTSICVFHQRFSTNTEPRWPLAQPFRFLAHNGEINTIRGNRQWTQARAYKFQTPLLPDLQDAKPLVGLSGSDSASLDNMLELLLAGGMDLFRAMRLLIPPAWQGDATMSDDMRAFYEFNSLHMEPWDGPAGVVMSNGRHVACSLDRNGLRPARYVLTRSGILTIASEVGIWDYDEQEVIEKGRLGPGQMMAVDTYTGKIWYNDQIEEELKQRHPYKQWLEQHRRHLIPFERSHADKLGKRLYDDETMLVFHKAYLYSEEEIQQIISVLAKDGQEAVGSMGDDTPTAVLSKQPRLLYDYFRQQFAQVTNPAIDPIRERHVMSLSTIIGREHNVFNEASGDADRVVFESPILMYTDLKQLRELDEQHYRATTLSLGFKPEQQNLQQAIDSLVEQAKTAVKDEQTVILVLSDRDLQREQLTIPAAMAVGAVQQVLVKNDLRCDSNIIIETASARDPHHMAVLIGLGATAVYPYLAYETVEQLVARGKVTLDIKEALLNYRKGLNKGLLKILSKMGIATVAGYRGSSLFEAVGLNEDVRRLCFENVPARIDGTGFDDIQQDLQQSFHRAWLTRKKLAQGGLLKYVHGGEYHAYNPDVVTSLQRAVATGEQRDYDVYAKFVNERPVTHLRDLLSIKLPEKAKIKKEKVEAKELLFQRFDTAAMSIGALSAEAHEALAIAMNTIGGHSNSGEGGEDPKRFNNAKNSRIKQVASGRFGVTPHYLVNADIIQIKVAQGAKPGEGGQLPGEKVTAEIAQLRYAVAGTTLISPPPHHDIYSIEDLAQLIFDLKQVNPKALVSVKLVSTPGIGTIATGVAKAYADLITVSGYDGGTGASPMTSVKYAGSPWELGLVEVHEALVANNLRHKIRLQVDGGLKTGMDIVKAAILGAESFGFGTAPMIALGCKYLRICHLNNCATGVATQDETLRREHFSGLPERVVKLFEFMAEEVRDILAQLGLEKLTDAIGRVDLLERLTGETKRQQQLQLNALLHSAGVRSEHSLYCTEKNPPFDQGQLNQRLLELCKESIYKRSGGHWSLTIRNYDRSVAASVSGYIASQHGNQGMAVAPITLGFIGTAGQSFGAWNAGGLKLHLTGDANDYVGKGMAGGEITIKPPAGCRYNTHEAVIMGNTCLYGATGGKLYAAGCTGERFAVRNSGATAVVEGIGDHGCEYMTGGIVVVLGECGINFGAGMTGGFAYLRDSDGDLHRRLNHELVEAVAVDTPIIQEHLRGLIHEHHEATGSHYSRELLNNFGQVVDSFYIVKPKAADVKELLGHRARSTAELRVQVM

SEQ ID NO: 889 - protein, 295 aa, Debaryomyces hansenii
MDPNNINPHEVELREQDRWLPIANVARLMKNTLPQTAKVSKDAKECMQECVSEFISFVTSEASDKCLKEKRKTINGEDILYSMHDLGFENYAEVLKIYLAKYREQQALKQERNETKPSKRQRKAASVTEPLSHTTSNTQDEHSPAGSSLREHLHGLKQEDIDNHQYMGTQEPNSHQITGHEANNNGILGSNSSSDSSIGSPESFFNHYESNGQENEAGNGGLNGHDKEIKHEERNTDPNHKDEGYGYEDFINDPNEEQIGHHQHIDELTKLTNEEPDIDTLTAGITNGNSNNAYF

SEQ ID NO: 890 - protein, 503 aa, Methanosarcina mazei Go1
MTLGSVPPKFKVSIDRDQCMDCGRCIENCSYGVYRREGDKILIESRKCTACLRCVSMCPRDAISITEKPVDYRSHPVWTREAREDIINQARSGKIILSGMGNARDLPIIYDRLLLDACQVTNPSIDPLREPMELRTYIGKKPAKLKFRKTESGDVELDTKLAPNLKLDTPIMIGHMSFGAISLNSQLSMAKAVAETGTFMGTGEGGLHKDLYPYQNHMIVQVASGRFGVNIDYLERGAAIEIKIGQGAKPGIGGHLPGEKVNDEVSRTRMIPLGSDAISPAPHHDIYSIEDLVQLIRSLKEATEWKKPVFVKIAAVHNVAPIAAGIARSSADAVVIDGFRGGTGAAPKVFRDHVGIPIEAAIASVDQKLRDQGVRNEISIIASGGIRSSADLAKSIALGADAVYIGTAALVALGCRVCGNCYRNLCPWGIATQRPDLVSRLDPEAGAAQVSNLIHGWTLELSELMGAAGINSIESLRGNRDRLRGYMLDEGMLKILDVLPAGA

SEQ ID NO: 891 - protein, 476 aa, Ashbya gossypii ATCC 10895
MGNVPGKLEAEEYGAMNGRRGGSQKQFRSLSQSSTASSGSAAADSGRSRRATSLVGNLLSSGGVSRAESYGGSAYRRRVAREKDRLREQHALRLVVRSEETVDGGYLAPYGSYRLEKLDYDAPVVQGLIVERRLAPFYTPLQDFDEGWTREELVRVVDSLLLHAPFEEEPEEFEGVPLGNLGVADIDALVDKTLSRREQRRQRSKIFRARLHRKRILWQEEENSKFLELKLEARRTGVSSACLPSDDAKWDLYRNGAECPICFLYFPEPMNVSRCCLQPICTECFVQIKRQEPHWSHDEVDPAQPDEDKDPDLLISTPASCPFCATPNFGVTYKPPADRILGIQGGPPSSYVSACSDPPHHHTEPPPRRTSVAHDHSSVVTSDMIRPDWETELIKERTKLARRAANATAIHVSNRLVDPGHTRGYSNSFASASSTYASNSSMTADFEEEMIRHVMRLSLLDQQPNATSISPGPVDR

SEQ ID NO: 892 - protein, 1490 aa, Physcomitrella patens subsp. patens
MEHRGGCLADNDSGDGAGIMTRIPWELFDQWFKEQGLPLPDKAKTAVGMVFLPTDSDSRAAAKAVVEGILEKEGIEVLGWRQVPVDVSVLGPIAKKTLPLVEQVFVKVSMEQAGDDIERELFITRKLIEKAKEKEPWSEDLYFCSFSSRTIVYKGMMRSTVLGTFYSDFHNDSYVTPFAIYHRRFSTNTSPRWPLAQPMRFLGHNGEINTIQGNLNWMRSREASMTSPVWRGREEDIRPFGNAKASDSANLDMVAELLMRSGRSPEETLMMLIPEAYMNHPTLQIKYPEAVGFYEYYKGQMEPWDGPALVVFSNGRTVGACLDRNGLRPARFWRTKDDIIYVASEVGVMDIDDSEIVLKGRLGPGMMISANLETGELYENTEVKRRVANAKPYSKWFAEGSRALEASEYLSPSSLTIEALFKQQQCFGYSSEDVQMVIENMASQGKEPTFSMGDDTPMPVLSQKSHWLYDYFKQRFAQVTNPAIDPLREGLVMSLEIAVGKKENLLEVGPQNAAQVTLLSPVLNEKELELLKMDNVLKAKTLRTYFNISKGIPGALQSALDSLCRAADDAVRAGSQLIILSDRNNHLDPEKPAIPPLLAVGAVHHHLISNGLRMSASIIVDTAQCFSTHHFACLIGYGASGICPYLALETCRQWRGSTKTIALMKNGKIPTSSVEQVQANYVKAAKVGLLKILSKMGISLMTSYHGAQIFEIYGLGREVVDLAFRGSVSRIGGLTLDEVAWETVSFWSKGFGEDSARKLENYGFIQSRPGGEYHGNNPEMSKLLHKAVREGNRDAYAVYLEYLASRPVNVLRDMLEFKSDRKPIPVEDVESASNIVSRFCTGGMSLGAISRETHEVIAVAMNRIGGKSNSGEGGEDPVRWKHLEDVVDGLSPLLPHLRGLKNGDHASSAIKQVASGRFGVTPTFLANADQLEIKIAQGAKPGEGGQLPGKKVSPYIATLRNSKAGVPLISPPPHHDIYSIEDLAQLIYDLHQVNPKAKVSVKLVAEVGIGTVACGVAKANADIIQISGYDGGTGASPISSIKHAGGPWELGLTETHQDLLKNGLRERVMLRVDGGFKSGVDVMMGAAMGADEYGFGTVAMIATGCIMARICHTNNCPVGVASQREELRARFPGVPGDLVNYFLYVAEEVRGMLANLGYQKLDDIIGRTDLLRPRNVKLRKTNPLDLSFLLKSVGLPKWSSTQIRGQEVHSNGVILDDILLSDPEIAEAIEKAKTFEKTIKIFNVDRSVCGRLAGVISKKYGDNGFPGRLNLTFVGSAGQSFGCFLTPGINLRLIGEANDGVAKGMAGGEVVVVPYDNCGYVPEEATIVGNTCLYGATGGQLFVRGKAGERFAVRNSMAEAVIEGTGDHCCEYMTGGCVVSLGKVGRNVAAGMTGGLAYFLDEDDTFTPQVNREIVKMQRVTTPAGQAQLRLLIQSHTEKTGSAKGKYVLENWDKVIPQFWQLVPPSEDSTPEAKAGSDDKQIDRLVAHAA

SEQ ID NO: 893 - protein, 1530 aa, Listeria innocua Clip11262
MKQTNLPKKHGLYNPENEHDACGIGFVANIKKISSHKIVEQGIHMLCQLKHRGGEVGGDTGDGAGILLEISDSFFRRECSKLGITLPEKYHYAVGMFNFPQNKAQRECLMSETEKLIASEGQTFLGWRKLPTDVTKVGAGARKTEPAMYQLFIQKNAELDEAGFERALYLIRKQVEKFAATSELITETFYVPSLSTRTVIFKGMLLPEQINQYYLDLADPAYVSAFALVHSRFSTNTFPSWERAHPYRYLIHNGEINTQRGNVNWMKAREKRAESALLGKDLAKVLPVIDESGSDSATLDNALEFLVQAGRSLPHAAMMLIPEPWDKNPHMTDPKRAFYEYHSTLMEPWDGPTSISFTNGRVIGTILDRNGLRPARYYETKDHTIIYSSETGVVPVDPSEVIRKETVGAGTMLLIDLEAGRIVTDSELKDELTTEKPYREWLDLEMTEIADLVTADLRYESMDKSERFKKQRAFGYTQDELNKILIPMVTEKKDPMGAMGYDAPLAVLSQRPQVLFNYFKQLFAQVTNPPIDGIREETVTSAMTLLGDEGNILNPTAKNANRIRLKTPILSRKEFAALTLQTKFAKPTATLPILFKAEERDGLEACLEELFEAADKKIANGAELLVLSDDGVNAEWIGIPALLAVSGLHHHLVKAGTRTKVSIIVKTAEARDVHQCALLIGYGADAVFPSLAIDTFDGLIKEGRIKGFTLDEAESRYIEAITDGILKIMSKMGISTVQSYRGAQIFEAIGIGDEVINTYFPGTASQIGGIPLEVIAQEAWLRHREAYHDIGYQSFTLNTGGEYQWRSNGEYHVYNPLAIHSLQQATRENDRETYNLYSDLMQNQSNAFLRGLLTFTSDRKPIPLDEVEPAESIFKRFKSGAMSYGSISQEAHEALAIAMNRIGGKSNSGEGGENPNRFTPDENGDWRRSAIKQIASGRFGVTSHYLVNAEELQIKMAQGAKPGEGGHLPGKKVYPWISKTRGSTTGVGLISPPPHHDIYSIEDLSQLIFDLKNANQNARVNVKLVSKTGIGTIAAGVAKGNADVILVSGYEGGTGAAARTSIRHAGVPWEIGLAETHQTLLLNGLRNKVVVETDGKLMTGKDVLVAAMLGAEEFGFATAPLVTLGCVMMRVCHLDTCPVGVATQNPELRKKFNGSADYVVNFFHFIVAEMREMMAELGFRSLTEIIGHKEFLTTHEKKEAHWKAKYIDFSNMLYSDDFYKNQVQYCTKQQDHKIDQTLDMREIVPLIKPALENGEKVTGTFAVRNVDRAIGTIAGSFISKKYGAVGLPEDTISLDFVGSAGQSFGAYTPLGMTLRIHGDANDYFGKGLSGGKLIVSPDHRTPIKAHDSAIVGNVTLYGATGGHAYMHGKAGARFAVRNSGATAVVEGIGDNGCEYMTGGTVVILGEIGENFAAGMSGGVAYIYTKNSQETTTKINHELVNSRSTLSAPELAKLKQLIEQHANLTRSEFAQEILSNWEDEKANFIFVIPNEYEMMLTRITSLEQTGKTHDEAELQAFYEHKDGKLIAGVAK

SEQ ID NO: 894 - protein, 494 aa, Methanococcus maripaludis S2
MAKYRCNVCNVFEYDESRGDSVTNIKPGTKIKDFPNNWKCPICGSDSTHLIQIAETNISKKLKGTFECPECKSKSEIEISMPIKMDSSYLGEWKREYDDMEEHMFDIHKISVTGESIIEPMRTKKPVISWESIFIKGAQLAKFPLNNDEEVITKTIIGPKAKHPLIIETPIFITHMSYGALSKNVKIALSKGSAAVKTAMCSGEGGMLEESFENAYKYILEYVPNQYSITDENLKKVDAVEIKIGQSSKPGMGGHLPAEKVSEEIAKLRGFKVGQDIVSPSKFHDINNKDDLKNKVSNLREKSGGKPIGIKIAAGDIEADLEVATYAKPDFITIDGRPGATAASPKFIKDSTSVPTIFALYRAREFFNKNGITDISLVITGGLRISSDFAKAIAIGADAIAIGTAALMATACQQYRICDTGECPVGVTTQKPELKDRLKIELSAKKLSNYLRVSTEELKTFARLTGNKNIHDLSVDDLCTSDSEISNFTSIKHV

SEQ ID NO: 895 - protein, 496 aa, Neptuniibacter caesariensis
MNDQVTSFAINFIAFVGIAFLVVFVIALFAAIVLYQIDKHQTAQTIRRNYPLIGRFRYLFEHIGEFFRQYFFAMDREEMPFNRAQRSWVYRAAKNVDSTIAFGSSRDLRIPGTYYFLNCPFPTLKEDAVKTQALRIGPYCQHPYDAPSFFNISGMSYGAMSKPAIQALAQGAKKAGCWMNTGEGGVSPFHLEAGCDIVYQIGTAKYGLRDENGNFTDEKLKEKGDLPQVKMFEIKLSQGAKPGKGGILPAEKVTPEIAAVRGIPVGEDSLSPNRHPDIASVDDLLDMIERVRRVTGKPCGFKLVMGDSEWLDDFCEAVNKRGVESAPDFITLDSADGGTGAAPMPLMDSVGLPLRESLPILVNKLMAHNLRDRVRVIASGKLINPTDVGAALCMGADFAVTGRGFMFALGCIQALQCNKNTCPTGITTHDPDLQRGLVPEVKADRVANYHNHLVHEVEMIAHSCGVTEPRKLKRKHCAIVVEGSRSIPLNILYPEY

SEQ ID NO: 896 - protein, 660 aa, Ustilago maydis 521
MAGIGVATGAALSSGINGSNDANATPSPWAASSSSSSSNITVGVLAIQGAFREHASHINRLNTLHPLHTIRSTLVRTPEQLADCDALIIPGGESTAISLGCERIGLLEPLRKWVRDGRPVWGTCAGMIMLAREASGGKKGGQQLIGGVDVRVGRNGFGSQIDSFETGLEIHGLDRPQELFNGVFIRAPVVDALLLPSDLEKVAVDQPTLVKRVDPNTLADSVRTPVTNTNAVPISATADLPANASEPALAKTTIADPALRIVVAPPLYDTSDPISSAQKRPPIEILATLPEPVTTPASPSNRPVSAHVAQRDPRMDVARRPDHDSQIVALRQGNILMTSFHPELTPDTRLHSLFVTKLVIPYKKQLQQHYIWLTGASHTFYLASSVQAPLGVCTAYAHCASKLSLDFGRKVNAKGSSNASATVQRSSQVLGLGSAVTRFDEGASTLLDAPISGTCTPVSYASPSPNPASHTHTHSHLHHSTTASNHDTSTPSSTTSIDLSNLASHPTYTALFPDPDLPIANISRIMKRSLPENAKIAKDAKECVQACVSELISFITSEASDKCAAEKRKTINGDDILYAMRVLGFDNYEEVLRVYLSRYRMDQESNPRQKKRAKTGTKIIDDDDDDDDEEDDDDAAEPDLTTRPHSLFHSPAFHHDSSNP

SEQ ID NO: 897 - protein, 539 aa, Pseudomonas fluorescens PfO-1
MSLSLLSRYAFFAVCVMFTLASLPFLEHDWLWPITAVTGVLSLIGLFDLMQSPHAVRRNYPILGNIRYLVEGIRPEIRQYLLESDSDALPFSRAQRSLVYSRAKNETADKPFGTLIDVYQSGFEFIGHSMRPAPLSDPSSFRVTVGGPQCTQPYSASVFNISAMSFGSLSANAIRALNQGAKLGNFAHDTGEGSISPYHREHGGDLTWELGSGYFGCRTSDGRFDPERFAAQAQTPQVRMIEIKMSQGAKPGHGGILPKHKVTQEIADTRGILMGEDCISPSRHSAFSTPIEMMHFIQQLRELSGGKPVGFKFCLGHPWEFMGIAKAMLETGILPDFIVVDGKEGGTGAAPVEFTDHIGVPMREGLLFVHNTLVGLNLRDKIKLGASGKIVSAFDIASVLAIGADWANSARGFMFAIGCIQSQSCHTNKCPTGVATQDTLRQRALVVPDKAQRVYNFHRNTLKALAEMLAAAGLDHPSQLSAKHLVRRMSATEIKLFSQLHVFLKPGELLTGEVNGEFYSRMWQMARADSFEPQEIAAA

SEQ ID NO: 898 - protein, 483 aa, Kluyveromyces lactis NRRL Y-1140
MGNVPGKIDSPQDPANRKQQRSESLNFGSQGPKNLNRNRRATSLVGNLLSASGRARSDSYNSANGYNGNSPNPYKKKSLKEKEKLKEKHARQLVVKYNETVDGGFLAPFGCYNFDKLDYEADIVKNLIIERRLAPFYTPLQEFDQTWTREEVIKIVDGLPLHCSFQQDPEEFEGVPTGDLADDEFDYLLDSTASKREQRRQRSKISKARLYFKRVGWQERANERYLELKLMNKKHTEAKNPALPSDDLKYTLYKNGAECPICFLYFPKPLNISRCCKQPICTECFVQIKRAAPHFPHEEVDPTQDQEPDELKDPNLLVSEPANCPYCATAEFGVTYEPRRDVRTGINGIYASEYKIAEYKDREGLVSDSSSNEDDELVTIEQIRRGSIAADDPSVITSDSIRPDWEINLTKERLRLARRSAKATAIHMSNQLIDPEHPSRHASISSSVGGPDGGNSPQRRQKTLEELDDEMLQQAIKLSLQDH

SEQ ID NO: 899 - protein, 1499 aa, Staphylococcus aureus subsp. aureus MW2
MHNEKLIKGLYDYREEHDACGIGFYANMDNKRSHDIIDKSLEMLRRLDHRGGVGADGITGDGAGIMTEIPFAFFKQHVTDFDIPGEGEYAVGLFFSKERILGSEHEAVFKKYFEGEGLSILGYRNVPVNKDAIAKHVADTMPVIQQVFIDIRDIEDVEKRLFLARKQLEFYSTQCDLELYFTSLSRKTIVYKGWLRSDQIKKLYTDLSDDLYQSKLGLVHSRFSTNTFPSWKRAHPNRMLMHNGEINTIKGNVNWMRARQHKLIETLFGEDQHKVFQIVDEDGSDSAIVDNALEFLSLAMEPEKAAMLLIPEPWLYNEANDANVRAFYEFYSYLMEPWDGPTMISFCNGDKLGALTDRNGLRPGRYTITKDNFIVFSSEVGVVDVPESNVAFKGQLNPGKLLLVDFKQNKVIENNDLKGAIAGELPYKAWIDNHKVDFDFENIQYQDSQWKDETLFKLQRQFAYTKEEIHKYIQELVEGKKDPIGAMGYDAPIAVLNERPESLFNYFKQLFAQVTNPPIDAYREKIVTSELSYLGGEGNLLAPDETVLDRIQLKRPVLNESHIAAIDQEHFKLTYLSTVYEGDLEDALEALGREAVNAVKQGAQILVLDDSGLVDSNGFAMPMLLAISHVHQLLIKADLRMSTSLVAKSGETREVHHVACLLAYGANAIVPYLAQRTVEQLTLTEGLQGTVVDNVKTYTDVLSEGVIKVMAKMGISTVQSYQGAQIFEAIGLSHDVIDRYFTGIQSKLSGISIDQIDAENKARQQSDDNYLASGSTFQWRQQGQHHAFNPESIFLLQHACKENDYAQFKAYSEAVNKNRTDHIRHLLEFKACTPIDIDQVEPVSDIVKRFNTGAMSYGSISAEAHETLAQAMNQLGGKSNSGEGGEDAKRYEVQVDGSNKVSAIKQVASGRFGVTSDYLQHAKEIQIKVAQGAKPGEGGQLPGTKVYPWIAKTRGSTPGIGLISPPPHHDIYSIEDLAQLIHDLKNANKDADIAVKLVSKTGVGTIASGVAKAFADKIVISGYDGGTGASPKTSIQHAGVPWEIGLAETHQTLKLNDLRSRVKLETDGKLLTGKDVAYACALGAEEFGFATAPLVVLGCIMMRVCHKDTCPVGVATQNKDLRALYRGKAHHVVNFMHFIAQELREILASLGLKRVEDLVGRTDLLQRSSTLKVNSKAASIDVEKLLCPFDGPNTKEIQQNHNLEHGFDLTNLYEVTKPYIAEGRRYTGSFTVNNEQRDVGVITGSEISKQYGEAGLPENTINVYTNGHAGQSLAAYAPKGLMIHHTGDANDYVGKGLSGGTVIVKAPFEERQNEIIAGNVSFYGATGGKAFINGSAGERFCIRNSGVDVVVEGIGDHGLEYMTGGHVINLGDVGKNFGQGMSGGIAYVIPSDVEAFVENNQLDTLSFTKIKHQEEKAFIKQMLEEHVSHTNSTRAIHVLKHFDRIEDVVVKVIPKDYQLMMQKIHLHKSLHDNEDEAMLAAFYDDSKTIDAKHKPAVVY

SEQ ID NO: 900 - protein, 2121 aa, Coccidioides immitis RS
MGLPEIAHDSIIEEEQPYVYSEYKSEKGYGWAEALPQRQGLYDPELEKDACGVGFTAHIKGKPSHKIITDARYLLCNMTHRGAVGSDARDGDGAGVMTSIPHKFFIKHFARDVGVELPPLGQYAAGNLFFKPDPEALKESKAIFEDLARSLDLRVLGWREVPRDSTLLGPAALSREPYIIQPFVVLHSAYGDGSTPDRRHAELFDERTFERQLYVLRKRATHVLGLANWFYICSLSNKNIVYKGQLAPIQVYEYYHDLLSVDYEGHFALVHSRFSTNTFPSWDRAQPLRWAAHNGEINTLRGNKNWMRAREGVLRSDIFGDELEHLYPIVEEGGSDSAAFDNVLELLTINGVLSLPEAVMLMVPEAWQDNPAMDSKKAAFYEWAACLMEPWDGPALFTFSDGRYCGANLDRNGLRPCRYYVTDDDRIICASEVGTIAIDPERVIEKGRLQPGKMLLVDTAAGRIIDDRELKRTVANRQPFQDWIETHLLSLPKIHKKAAEKGSLAPALDDTTIQQDPRLKAFSYSFEQVSLLLGPMAADSKEALGSMGNDAPLACLAQQPRLLYEYFRELFAQVTNPPIDPIREAIVMSLECYVGPQGNLLEIDPSQCDRLHLPSPILSIDEFNALKMLPTLHREWTVKTIDITFEKSKSIQGYIDALDDICAAATEGIANGDRILVLSDRATSADRVAVSALLATGLVHHHLVRNKWRSLAAIVVETAEAREVHHMCVLVGYGADAICPYLAMECILKMNRENLIRKELSDEQVITNYKASCDGGILKVMSKMGISTLQSYKGAQIFEALGIDDSVIDRCFAGTPSRIRGMTFKQIAQDAFAFHERGYPTRQITQIPGLPESGEYHWRDGGEAHINDPVSIANIQDAVRTKNDKSYEAYARSEHEQIRNCTLRGLLDFDFEQRTPVPIEQVEPWTEIVRRFVTGAMSYGSISYESHSTLAVAMNRLGGKSNTGEGGENAERSKILENGDTMRSAIKQIASGRFGVTSAYLADADELQIKMAQGAKPGEGGELPGSKVTGPIAQTRRSTPGVGLISPPPHHDIYSIEDLKQLIYDLKCSNPQARVSVKLVSEVGVGIVASGVAKAKADHILISGHDGGTGASRWTGIKYAGLPWELGLAETHQTLVLNDLRGRVIVQTDGQLRTGRDVAIACLLGAEEWGFATAPLIAMGCIMMRKCHLGTCPVGIATQDPALREKFEGTPEHVINFFYYVANELRAIMAKLGMRTINEMVGRAELLRIRDDLPSPKLENIDLSLILTPAHSLRPGVATYSVRKQDHRLHVRLDNKLIAEAELALEKGLPCRVECDIVNTDRAMGATLSYHVSKRYGDTGLPQDTIHANIKGSAGQSFGAYLAPGITLELEGDANDYVGKGLSGGRLIVYPPRGAVFKAEENIIIGNVCLYGATGGSCYFRGVAAERFAVRNSGATAVVEGVGDHGCEYMTGGRVLILGSTGRNFAAGMSGGIAYVLDVNGDFHTRVNTEMVELSGIEDPAEVASVRSLIEDHHHYTGSEIAARILSDFTRALSHFVKVLPTDYKRVLEEEATKKAGAKKIAFTPAQSPNLASKEHREEAKKSDILDIEDSITDSKTEKKRTTLILDKTKGFMKYHRRNEKYRSSKTRTRDWAELSQRLNEDELKYQSARCMDCGVPFCQSDTGCPISNIIPKWNELVFQNQWQDALNRLLMTNNFPEFTGRVCPAPCEGACVLGINEDPVGIKSIECAIIDRGFEMGWMVPKPPPVRTGKTVAVIGSGPAGLAAADQLNRAGHSVVVYERADRIGGLLMYGIPNMKLDKKIVQRRVDFMAAEGIKFVASTPVGPDCDVTLQSLRKGNDAVIIATGATVARDLKIPNRELQGIHFAMEFLHKNTKSLLDSELADGAYISAKGKNVIIIGGGDTGNDCVGTSVRHGAKSVTNFELLPQPPPERAGDNPWPQWPRVYRVDYGHSEVKAHFGQDPREYCVMSKEFVGDEHGNVKGINITRVEWTRSASGGWDMKTVEGSEQFFPADLVLLSMGFLGPEERVLGSEVELDARKNIKTPAGQYSTNVPGVFAAGDCRRGQSLIVWGINEGRQAAREVDSYLMGSSSHLPVTGGIVRRSAIDSVPVTPQPQVQPVFA

SEQ ID NO: 901 - protein, 1493 aa, Thiomicrospira crunogena XCL-2
MNSLNSLQGLYSPEFERENCGFGMIAQMDDKPSHWAVQTAIESLANMTHRGGVAADCCTGDGCGLLIKKPNTFLRQEAKDLGFTLSENYASGMIFLNQEANKAAFARAELEKALESKGLSIAGWRKVPVASEVLGAQAAGMEPLIEQVYINAPVEMSDGEFNRALFVARRKTEMAVEPNDETFYIASLHSQLISYKGLVMPKELPEFYLDLKDERFESSLISYHQRFSTNTLPQWRLAQPFRFLAHNGELNTIKGNRNWALARQSKFETPLIPELSDLKPLVAQEGSDSNSLDNMLEVLMMGDMPVFQALRLLIPPAWQNMPHMDPDLKAFLEYNSMHMEPWDGPAGMVINTGKYAICGVDRNGLRPTRYVITKDRHITFASEIGVYNYAPEDVVEKGRLKPGQVIAVDLEAGKLLKPEDIDAGLKAAKPYREWMDKGYMHLEERLDTEDHTFDWDSNEADIYQKYYQVTFEERDQVIRVLAEAGQEATGSMGDDAPLPVFSHKERSVFDYFRQMFAQVTNPPIDPLRENIVMSLNTCFGRELNMFDEGEDHARRLESQSPILSPSMMKHLTSIVDDNYRNQRISLHYNPENTDLKAATIAVCDQAVEAVKSGVTLLILSDLNIEKGLITVPAAMATGAVHHRLISEGLRPEANIIVETGTARDPHHFAVLFGYGATAVYPYLAYESLQDMIRTKELDEKVGISKYIKNYRKGINKGLFKILSKMGISTITSYRGSQLFEAVGLSKEIVDLCFKGTPTRIEGTRFEHLQADLIKTSKYAFNPRKFLQPGGLLKYIHGGEYHAYNPDVVNFLREAVQKGDQIAYNKFAKLVNERPAMTVRDLITFKDGLKPINLSEVEPVESIYKRFDSAGISLGALSPEAHEALAIAMNRIGARSNSGEGAEDPARYGTEKMSKIKQIASGRFGVTAHYLRNAEVLQIKVAQGAKPGEGGQLPGHKVDATIAKLRHSVEGVTLISPPPHHDIYSIEDLAQLIFDLKQVNPNALVSVKLVAEPGVGTIAAGVAKAYADLITISGYDGGTGASPLTSVKYAGNPFEMGLAEAHQVLRANDLRGQVILQADGGLKTGLDVVKAAILGAESFGFGTAPMVALGCKYLRICHLNTCAVGVATQDERLRKEHFIGMPEMVINYFRFVAEETREWLAKLGVARLEDLVGRVDLLKMIDKPLTDKQTSIDLTPFITDGGVPKDKPQTVQVTRNNPWDDGHIAEEMVKTVLPAIENKTGGEFGFHLVNTGRSIGARIAGEIAQRYGNHGMKDAPITLSLTGIAGQSFGVFNVDGLNLYLEGDANDYVGKGMSGGEIVVRPVKEHGFDPHSTPIVGNTCLYGATGGKLFANGTGGERFAVRNSGATAVVEGLGDHGCEYMTGGCVVSLGQVGVNFGAGMSGGMAFILDLDRTLPDRLNTEMVEAVRIDTESTEAYRVYLQELLTEYVEKTGSQFGQEVIDNFSRYLHNFWLVKSRAINVDKLLDLFAHGGDGE

SEQ ID NO: 902 - protein, 83 aa, Physcomitrella patens subsp. patens
MGNKITRRRHVIDERYTRPQGLYPHRDVDQRKLRRLILESKLAPCFPGEEESATDLEECPICFLHYPSLNRSKCCTKGICTGT

SEQ ID NO: 903 - protein, 1505 aa, Streptococcus mutans UA159
MREVIKKAKQTTLWDPSFETDACGMGFVAQIDGIASHQLVDYALTMLERMNHRGGTGAEPDTGDGAGMLLAMPDEFFRLKAKEEEIDLPPLGDYAVAQLFLPQDKVAKTILEDSLISEIKRLGFHVLLSRDVPFNYDNCGPAAQEIMPSFVQLFIEKPTETNSGCAFEDSLFRLRRKLEKTFAADELFICSLSSKTIVYKGMLHAFQVRLFYPDLSDEMFKSHIALTHSRFSTNTFPSWDRAQPFRFLAHNGEINTLRGAENWMHSHQIEVYNEENSDSAKLENCLEYLYRHGRDIPQSLLMMVPEAWGKDAGLSKELTAFYEYASSFVAPWDGPAALVFTDGEMVGARLDRNGLRPSRYSRTKDNFLICSSESGVVDIAPSQVVEKGVLGPGNMMLIDTKKNLVLKNDEVKEHYSKQHPYQQWVQENVTLLDDFAAQEEIVNDYDVNQMWKIFGYTDETIRTVILPMSEKGEEPVISMGFDSPLAVLSKKPQSLFTYFKQQFAQVTNPPIDAIREQLVVSTTVFLGGDGDIRQDNADNCVKVRVDSPVLSSQDFAKLANLTDERYKATTLSTVYDLGDSDNNRLQYALEDLFKKADEAINQGSKIIILSDRGVTKGRIAIPILLAVSGLNNYMVVKGKASQFSIVVDTAEAFEVHHFATLVGFGATAIHPYGAYATLKAFDKTNDSFEKYRKAAEKGIVKVMSRMGISTVLGYKGAQLFEAIGLSADVVNQYFRGTATRIEGLSLKQIEKEYLERVDFAFGPRANDFLPSGGSYQYKTDGEYHLFNPRSIYNFQQSIRRGDYGLFKQYSTELDNEALKQPTTLRSLWEFHSKRPKVDLAEVEPAKEIVKRFKVGAMSFGSLSKEAHETIAQAMNTIGAKSNSGEGGENRKRFKPQVDGRNINSKIKQVASGRFGVNAEYLMSAEELQIKLAQGAKPGEGGQLPGQKVFPWIAEIRGATPGVRLISPPPHHDIYSIEDLAQLIYDLKAINPYAKINVKLVSSTGVGTIATGCVKAGADKVVISGYDGGTGASPRNSVRDAGLPWEMGLAEAHQTLSMNRLRQRMTLETDGKLMTGRDIAIATLLGAEEYSFASLALISVGCVMMRVCSLNTCPVGVATQNPELRKNFSGKPEHVINMMTFLAEELREYMAELGFRSVDEMVGHAEVLKSRFVAQGKAKSLNFSRVIGNSFPIDRKNEDPFAEERQWKELDGFAAAAIEKGISVTIENTINNVDRSVGSRMAGWMAERYGNDAVKEGLIKYHYTGIAGQSFASYLTQGLEYTLIGEANDYIAKSMSGGRLIVKPPHDAAYDVENSPIVGNVSLFGAVKGEAYFAGRAGERFCVRNSGAKVVVEGVGAHGCEYMTGGVAVILGTTGRNFAAGMSGGVAYVYDVHGDFAQKVNMEMVDLYQIGETRGDDILKDMIEKHYEYTESVKAKRLLDNWDEEVKRFIKVYPSDFHEINDIEYALSQKGMSGDELELRTFEVATGGDATAQERQALLASVTGGK

SEQ ID NO: 904 - protein, 715 aa, Cryptococcus neoformans var. neoformans JEC21
MGNTPSSHAAPPPSSSTNTASASERERASSSAQPINPSTAGRIQRPSVSFHSGLTPPTSPPSPPPPSTPPLLPYAGHLSPQNPHCLSHPQAHDYSKSAVTKLILDGKLAPFYRGLEDFEEDWTEEDIGRILTETREKDYAEGVANSYTERAKEEREGGSSIGNVTKKMGIHKSKELRREGEKEERERRERRAYLNAVECPICFLSYPPNINTSRCCQQPVCTECFVQIKRSEPTITHLESEPACCPFCVEADFGVIYERPPTPMSSLSSTALATSPAEAGTPSFGQAFSVGSDAELAVGPGMNPIQKETIRRKSVSSKAKEVVTIDEIRPDWEHKLNSVKAAAARRASRRIIMRQVGDRLVPIGYTSSRAPGTADFSMSVPQIQNSVQSGADESGSNPQHQRRQADDLRNNSTTSNVAPSTPPSDAPANTSTVVQSPGPPPGPSTAAAFAATAPSTSSPTESPRRLSGQSDKQSGASKLLSKFSNVRARANSSASSKGLGSGDFKNTFGRTRDNSGGTQTLSSSPALVATQTSASASTSNSAGSSAAPSPIPSISPLATTHTQPLNKTSVPTHSSGLSLTTSVPAAPITTLASPGASGQNTGEADLLGGPSAPITQADAPVGLPHLSADMPTLIPDAPGDRAATAFTSVVLPEGDPGTALPNSDTAPPPSTLSDSSAPTSRVGMHRSHSCITEVTEPEAEGNGPGYARLDTDEER

SEQ ID NO: 905 - protein, 553 aa, Alkalilimnicola ehrlichei MLHE-1
MSKTLWPVPGRYVPYLICIAAFVISLLCLQVSATWGWGVALFGGLSLLGTWDLLQPRRTISRNYPVIAHLRYCLEGIGPEIRQYFIESDTDERPFSREQRSVVYQRAKNQLDKRPFGSLLNLYGDGYEWVSHSVQPVAVDPSAYRVEIGGRCQQPYSASVFNISAMSFGALSANAILALNKGARLGGFYQDTGEGGISRYHLEHGGDLVWEIGSGYFGCRTPDGSFSPERFAETAGLDSVRMIEIKLSQGAKPGHGGILPAAKVSPEIAAARGVPEGEDVISPPRHSAFSTPRELMQFIGQLRELSGGKPVGFKLAIGHPWEWFALAKAMQASDERPDFIVVDGGEGGTGAAPLESINRLGMPLDEALLLVHNTLVGTGLRDHIRLGAAGKLTSGFKVARTLALGADWCNAARGFMFALGCIQSLSCHTDRCPSGVATQDRRRSRGLHVGDKALRVRNFHAGTVEALGSLLAAAGLSHLDQLTPDHIYRRLSGTEVRSFAELYPFVEKNALLSGAPAYPAVFREYWPRASPDTFHPVTPKHHPSEEAAMKGTA

SEQ ID NO: 906 - protein, 218 aa, uncultured archaeon GZfos14B8
EAVLGSSLFSPFPFHSVYSVEDHKKHVDWIKEINPDAIVSVKVSTPTDVDMVAVGSYYAGANIIHLDGSYGGTGAAPDIAKKNIAMPIEYAIPKVHEFLKEQGMRDKMTLIASGGIRTAHDVAKAIALGADGVVIGTAELVALGCVRCGNCESGRGCPRGIATTDPELSRAVDTEWGAQRLINLYAAWRSEIVDILKRFGMRCIKELVGRYDCLYASV

SEQ ID NO: 907 - protein, 144 aa, Saccharomyces cerevisiae [sequence omitted]

SEQ ID NO: 908 - protein, 179 aa, Impatiens balsamina
LYLQVPNKLHTWFIFLMQNVRAASMTSDGINSRRYKPTFEAYLLNPDEPSWHRIHFPMIPPGYSPAASSGGLICWVSNEPGSKSLLLSNPIIGSISPLPPTLVPRLFPSVGLTVTNASVDVTVAGDDMVSPYAVKNISSESFHLDNGGFYSVWGTTSCLPRLCSLESGQMVHARGKFYC

SEQ ID NO: 909 - protein, 475 aa, Oryza sativa Japonica Group
MGGGQSRSPRDGSGHGRYGHSPSFQQQWGGGGGGGGGGGGGYPYGQDAHGGGYYGAPAPQGGYAAPYPAYQQPPPPMPSPAATQPPARAGGASKPRLDRRYSRIADDYHSVDQVTGALAQAGLESSNLIVGIDFTKSNEWLGKFSFHGRSLHHISNAPNPYEQAISIIGQTLSKFDEDNLIPCFGFGDATTHDQDVFCFYPDLRPCNGFSEALSRYRELVPHLRLAGPTSFAPIIEMAMTIVEQSGGQYHVLLIIADGQVTRSVDTASGQLSSQEQKTVDAIVRASELPLSIVLVGVGDGPWDMMKEFDDNFPSRAFDNFQFVNFSEIMNKNMPQSRKEAAFALSALMEIPQQYKATVELGILGRRSFKSPERVPLPPPGGSHDAYSYGSKSFSKPSTYPQSSTSSSSYPHYETAQSSSPAVPSSTYDNQVCPICLVNPKDMAFGCGHQTCCDCGQSLESCPICRSPISTRIKLY

SEQ ID NO: 910 - protein, 398 aa, Zea mays
  misc_feature (392)..(392): Xaa can be any naturally occurring amino acid
MAQGAKPGEGGELPSHKVIGDIAITRHSTAGVGLISPPPHHDIYSIEDLAQLIYDLKNANPGARISVKLVSEAGVGVVASGVVKGHADHILISGHDGGTGASRWTGIKHAGLPWELGLAETHQTLVANGLRARVVLQTDGQLKIGRDVVIACLLGAEEFGFSTAPLIVLGCLLMRQCHTNTCPVGIATQDPILREKFAGKPEHIINFFFMLAEEVREIMSQLGFRTINEMVGRSDMLEVDSDVLKGNEKLQNIDLSLILKPAAEISPEAVQYCVEKQDHGLDMALDNKLIASSRAALEKRFRVFIEAPVKNTDRAVGTMLSHEVTKLFRVSGLPPDTIRVKLNGSAGQSFGAFLCPGVTLELEGDSNDYVGKGLSGGKIIVYPPKNSRFIPXDNIVIG

SEQ ID NO: 911 - protein, 422 aa, Vitis vinifera
MGNKLGRRRQVVEDKYTRPQGLYQHKDVDHKKLRKLILDSKLAPCYPGDEEATNDFEECPICFLFYPSLNRSRCCTKGICTECFLQMKNPNSTRPTCPYCKTANYAVEYRGVKTKEEKGMEQIEEQRVIEAKIRMRQKEIQDEEERMQKRQEISSSSSILAQGEVEYSTTAVPSFRSPVEGDEIDSSQDPRAASMIIQTLPPRQNRDEEFDLDLEDIMVMEAIWLSIQDNGRHRNPLYGDTTTAEQYVTEEHYVLPAMAPQVESSSSPSGGLACAIAALAERQQMGGESSTNYNGNMPAFNMPPGSSRFSNRVEQYPENYPPIESSMDALPDGGLAVTKDDGEWGVDRGSEVAEAGTSYASSDATDEAGGVAALPPTDEAEGSFQNVGGPIVPESFEEQMMLAMAVSLAEARARTSTQGVWQ

SEQ ID NO: 912 - protein, 1498 aa, Corynebacterium efficiens YS-314
MKKQGLYNPAFEHDSCGVAFVADIHGRASRRIISNALEALCRMEHRGAAGAEKTTGDGAGILLQIPDALYRADTDFDLPEPGHYATGIAFLPRARMAMLDAQKEIARIATEEGATVLGWREVRVDPRGIGEMAAEAMPSFSQLFLTVPGTSGTELDRVMFFIRKRCERELGTTGDRPTVYFPSLSARTVIYKGMLTTAQLERFYRDLQDPRMESAIAVVHSRFSTNTFPSWPLAHPYRLVAHNGEINTVRGNENWMRAREALIDSHVLGPLNRVLPVCTPGGSDTALFDEALELLHLGGYELPHAVAMMIPQPWEHSTSMNQELRDFYEYHSCLMEPWDGPAALAFTDGRYVGAVLDRNGLRPGRIAITSDGLVVMASESGVLDLDESSVVKRTRLVPGQMFLVDTAQGRVIPDDEVKRGLQASAPYGEWIRENFVHLSGLPRTRYEYMPHQRAVLRQRVFGITEEDVDLLILPMARTGAEAIGSMGSDTPIAAISQRPRMLYDFFAQRFAQVTNPPLDSIREKPVTSMYTLLGAQSDVLNPGPEAARRIRLESPVIDNHELATLIHANDHGEWDTFGAAVISGLYPVAHHGAGMKAAIARVRREVSEAIRQGSTLIVLSDRESNEQLAPIPALLLTSAVHQYLVQQRTRTRCSLVVESGDAREIHHLAMLISFGADAINPYMAFETIDELRMKGQLGDLDLDEACRNYVTAATTGVLKVMSKMGIATVSSYRGAQLADVTGLHQDLLDDYFGGIPSPISGIGLDEVAADVEARHRSAFLPRPEEHAHRELDLGGEYKWRREGEYHLFNPETIFKLQHATRTGQYAIFKDYTAKVDGQSARLGTIRGLFEFSTDRQPIPVEEVEPVSSIVRRFSTGAMSYGSISAEAHEVLAIAMNRLGGMSNSGEGGEDARRFTPEPNGDWKRSAIKQVASGRFGVTSHYLNNCTDIQIKMAQGAKPGEGGQLPPEKVYPWIAEVRITTPGVGLISPPPHHDIYSIEDLAQLIHDLKNANPDARIHVKLVAEQGVGTVAAGVSKAHADVVLISGHDGGTGASPLTSLKHAGGPWELGLAETQQTLLLNGLRDRIRVQCDGQLKTGRDVMIAALLGAEEFGFATAPLVVEGCIMMRVCHLDTCPVGIATQNPDLRAKFTGQAEHVVNFFTFIAQEVREYLAQLGFRTLDEAVGQSQVLRKRADIPADSRAAHLDLTPIFHRPVAPHFPEQDIRCTTTQDHDLEAALDNRFIEQAADTIARAAAGEQARTTLTARVSNVNRSVGTMLGSVLTRAAGASGLDDDTITLNLTGCAGNSFGAFIPAGITLTLTGDANDFVGKGLSGGRIIIRPSERAPKQLKNSPDIIAGNVLGYGATSGEMFIRGEVGERFCVRNSGATAVVEGIGNHGCEYMTGGRVLVLGPVGENFGAGMSGGIAYLLDEPDLEKKINRGLVDVEKLTPDEALWADRLIARHVALTGSTTTVRAKDLVKVMPRDYKRVLLSTLTLEEAH

SEQ ID NO: 913 - protein, 355 aa, Arabidopsis thaliana
MDKKVSFTSSVAHSTPPYLSTSISWGLPTKSNGVTESLSLKVVDARPERLINTKNISFQDQDSSSTLSSAQSSNDVTSSGDDNPSRQISFLAHSDVCKGFEETQRKRFAIKSGSSTAGIADIHSSPSKVPVYLLRVTISSTCDCLLTSCVILWFQANFSFHYADPHFGGLMPAAYLPQATIWNPQMTRVPLPFDLIENEPVFVNAKQFHAIMRRRQQRAKLEAQNKLIKARKPYLHESRHVHALKRPRGSGGRFLNTKKLQESTDPKQDMPIQQQHATGNMSRFVLYQLQNSNDCDCSTTSRSDITSASDSVNLFGHSEFLISDCPSQTNPTMYVHGQSNDMHGGRNTHHFSVHI

SEQ ID NO: 914 - protein, 1562 aa, Herminiimonas arsenicoxydans
MRAQGLYDPANEHDACGVGFVAHIKGKKSHSIVEQGLLILKNIDHRGAVGADKLMGDGAGILIQIPDQYYREEMAKQGINLPPAGEYGVGMVFLPKEHASRIACEQELERSVLAEGQVVLGWRDVLVDKDMPMSPTVREKEPVIRQIFIGRGQDIMVTDALERKLYVIRKSSGHAIQALHLLHGQEFFVPSMSARTVVYKGLLLADQVGEYYKDLQDPRCVSALALVHQRFSTNTFPEWPLAHPYRLIAHNGEINTVKGNFNWMRAREGVMKSAVLGDDLKKLFPLIYEGQSDTACFDNALELLVMAGYPIAQAMMMMIPEAWENHTLMDANRRAFYEYHAAMMEPWDGPAAMAFTDGRHIGGTLDRNGLRPARYIVTDDDLVVMASESGVLPIPESKIIQKWRLQPGKMFLIDLDAGRIIDDKELKDTYANAKPYKQWIQSVRIKLNELKPEPAEAKPTTALLDLQQAFGYTQEDLKFLMSPMAITAEEATGSMGNDSPLAVMSNKDKTLYNYFRQLFAQVTNPPIDPIREAMVMSLVSFIGPKPNLLDTNNINPPMRLEVSQPVLDYADIARLRNISAHTGGKFKSHELNICYPVAWGKDGIEARLASLCAQAVDAVASGHNILIISDRRIDENQVAIPALLATSAIHLHLVSKGLRTSTGLVVETGSARETHHFALLAGYGAEAIHPYLAMDTLSHMAKDLSGDLSPEKAIANFQKAVGKGLMKVMSKMGISTYMSYCGAQIFEAIGLNKSLIEKYFKGTSSNVEGIGVFEVAEEALRLHKAAFSADPVLAHALDAGGEYAYRVRGEEHMWTPDAIAKLQHSTRANNFSTYKEYAQIINDQSKRHMTLRGLFEFKLDPASAIPLDEVEPAKEIVKRFATGAMSLGSISTEAHATLAIAMNRIGGKSNTGEGGEDTKRYRNELRGIPIKDGSTLASVIGHDVVEVDTPLLPGDSLRSKIKQVASGRFGVTTEYLTSAEQIQIKMAQGAKPGEGGQLPGHKVSEYIAHLRFSVPGVGLISPPPHHDIYSIEDLAQLIHDLKNVNPAASISVKLVAEVGVGTVATGVAKAKADHVVIAGHDGGTGASPLSSVKYAGSPWELGLAETQQTLILNGLRTRIRVQADGQMKTGRDVVIAALLGADEMGFSTAPLVVEGCIMMRKCHLNTCPVGVATQDPVLRAKFSGKPEHVVNYFFFIAEEARQIMAQLGIRTFDELIGRADLLDKSKAITHWKAKGLDFSRMFYQPAVAEGVARYQTEEQDHALEKALDNKLIVQAKAAIEHGEKVSFISPIKNVNRTVGAMLSGEVAKKYGHEGLPDDTIHIQLQGTAGQSAGAFLAHGITLDLVGEGNDYVGKGLSGGRIIVRPNTEFRGRAVENIIAGNTLLYGAVAGEAFFNGVAGERFAVRNSGAIAVVEGTGDHGCEYMTGGTVVVLGETGRNFAAGMSGGIAYVYDPKGEFAGKCNMAMVSLEHVQTTAEQESKAEHGTWHSHKRGTEAQTDEAILKNLIERHFKYTGSTRARALLDEWNTARSKFVKVFPSEYKRALTEMHANQAEQAVSTKVAV

SEQ ID NO: 915 - protein, 1517 aa, Spinacia oleracea
CGVGFIANLDNKGSFQIVKDALTALGCMEHRGGCGSDNDSGDGSGVMTAIPWDLFNDWGKDQGIGPFDRSHTGVGMVFLPKDDLLAEEAKKVVLDTFAQEGIEVIGWRSVPTNVSVVGRNAKETMPNIQQVFVRIIKEDSTDDIERELYICRKLIERAASSHTWASELYFCSLSNQTIIYKGMLRSEVLGMFYYDLQNERYTSPFAIYHRRYSTNTSPRWPLAQPMRFLGHNGEINTIQGNLNWMRSREPSIQSPVWRGRENEIRPYGNPKASDSANLDSAAELLIRSGRTPEEALMILVPEAYKNHPTLMIKYPEAVDFYDYYKGQMETWDGPALLLFSDGKTVGACLDRNGLAPARYWRTVDNVVYVASEVGVLPMDESKVTMKGRLGPGMMISVDLSSGQVYENTEVKKRVASSNPYGKWVKENLRSLKAVNFLSRALLENDTILRNQQAFGYSSEDVQMVIESMASQGKEPTFCMGDDIPLAVMSQKPHMLYDYFKQRFAQVTNPAIDPLREGLVMSLEVNIGKRGNILEVGPENASQVILPSPVLNEGELEALVNDPLLKAQMLPIFFDIRKGVEGTLEKRLNRLCEAADEAVRNGSQMLVLSDRSEELEPTRPAIPILLAVGAVHQHLIQNGLRMYTSIVVDTAQCFSTHQFACLIGYGASAICPYLALETCRQWRLSNKTVNLMRTGKIPTVTIEQAQNNFCKAVKSGLLKILSKMGISLLSSYCGAQIFEIYGLGKDVVDIAFQGSVSKMGGLTLDELARETLSFWVKAFSEDTAKRLENFGFIQFRPGGEYHVNNPEMSKLLHKAVRNKSESAYAVYQQHLANRPVSVLRDLLEFKSDRAPISVGKVEPATSIVERFCTGGMSLGAISRETHEAIAIAMNRLGGKSNSGEGGEDPIRWRPLTDVVDGYSSTLPHLKGLQNGDTATSAIKQVASGRFGVTPTFLVNADQIEIKIAQGAKPGEGGQLPGKKVSAYIARLRNSKPGVPLISPPPHHDIYSIEDLAQLIYDLHQINPKAKVSVKLVAEAGIGTVASGVAKGNADIIQVSGHDGGTGASPISSIKHAGGPWELGLSETHQTLISNGLRERVILRVDGGLKCGVDVMMAAAMGADEYGFGSLAMIATGCVMARICHTNNCPVGVASQREELRARFPGVPGDLVNFFLYVAEEVRGILAQLGFEKLDDIIGRTDILKPRDISLMKTQHLDLSYILASAGLPTMSSTAIRKQEVHTNGPVLDDQILSDPEIIDAIENEKIVNKTVKIFNVDRAVCGRIAGVIAKKYGDTGFAGQLNLTFEGSAGQSFAVFLTPGMNIRLVGESNDYVGKGMAGGELIVTPAENPGFRPEDATIVGNTCLYGATGGQIFVRGKAGERFAVRNSLAEAVVEGTGDHCCEYMTGGCVVILGKVGRNVAAGMTGGLAYILDEDDTLIPKVNKEIVKIQRVTAPVGQMQLKNLIEAHVEKTGSSKGASILKDWDKYLPLFWQLVPPSEEDTPEASAMFEQMTSEGASLQSA

SEQ ID NO: 916 - protein, 158 aa, Cryptococcus bacillisporus
NIDVWLEVIPQIIARIQTPRQSIQQLIVQLLHDIGKAHPQALIYPLTVASKSTVAARRNVAQNITHKMREHSPKIVDQAELVSTELIRAAILWHEMWYDGLEEASKHYFGDHDIPGMLGVLEPLHEIVENGPQTLRETSFIQSFGHDLRIAREHLKRY

SEQ ID NO: 917 - protein, 1487 aa, Moritella sp. PE36
MSVYDPSLEKDNCGFGLIAHQEGEASHKLVRVAISSLDRMQHRGGIAADGKTGDGCGLLMQKPDSFFRAIAIENDWNLGNNYAVGMIFLNQDTDKSAAAKQIMKEELERETLKVVGWREVPLDTSVLGEIAMSSLPQIQQVFINAPAGWAPKDIERRLYITKRRIEKRITDDSDFYIASLSNLVTIYKGLCMAGDLPKFFLDLADLRMQSSICLFHQRFSTNTSPKWPLAQPFRFMAHNGEINTIEGNREWARARSYKFSSPLLPDMHDAAPFVNTKGSDSSSMDNMLELFLAGGMDIFRAFRLLVPPAWQNHPNMDDDLRAFYDFNSMHMEPWDGPAGIVLTDGRYAACGLDRNGLRPARYVRTTDGFITVASEVGIWDYTADEVIEKGRVGPGELLVIDTETGKLWTSWDIDQELKGRNPYREWLSNNSTKLTPFEALPKEAIGTRTFNDEQLATYQKQFDYSREELDQIIRVLGENAQEATGSMGDDTPMAVLSTKTRSLYDYFRQKFAQVTNPPIDPLRENHVMSLATCIGREHNVFNETDGHAHRVLFDSPVLLFSDFKQVTELSNEYYKTAKINLCFNGQDETLARAVARITAEAIELAASGVVLLVLTDRTLAKNNLPIPAAMAVGAVQKALVDANLRCDTNIVIETASARDPHHFAVLIGFGATAVYPYLAYESLRKLVEIETIQQDIAKTLLNYRNGINKGLYKIMSKMGISTIASYRCSQLFEAVGLADEIIELCFRGTSSRIKGADFSDFHIDQQKLSKLAWTKRKPTSQGGLLKYVHGGEYHAYNPDVVSTLQTAVQSGKYEDYLQYSTEVNERPIATLRDMLQLKKSDNPIELDAVEHEDNLFKRFDTAAMSIGALSPEAHEALAIAMNTLGGNSNSGEGGEDPRRFGTLKVSKIKQIASGRFGVTPHYLMNAEIIQIKVAQGAKPGEGGQLPGHKVTTEIAKLRNAVPGVTLISPPPHHDIYSIEDLAQLIFDIKQINPTVLVSVKLVSEPGVGTIATGVAKAYADLITISGYDGGTAASPITSVKYAGSPWELGLAETQQALVENGLRHRIRLQVDGGLKTGLDVIKGAILGAESFGFGTGPMVALGCKFLRICHLNNCATGVATQDEKLRQDHFHGLPEMVMNYFKFIAQETREIMASLGVTQLTDLIGRTDLLVQLDGLTDKQRKIDLSGIIYKPQPKAGLGVYCQATNEPYDKAELNEALIAHYLESITEKSGLSSHYPIRNTDRSVGARLSGEIAKQHGNQGMASDPITVNFTGTAGQSFGVWNAGGLHLILTGDANDYVGKGMAGGKIVIRPEPGSAFKSNEAVIAGNTCLYGASGGELYAAGLAGERFAVRNSGANAVIEGIGDNGCEYMTGGIVTVLGETGVNFGAGMTGGFAYIYDVNGQLASRLNNELVEQHAVTDYPMHVEHLRGIIIEHLAQTCSQHAQDLLNEFDTVINKFFIIKPKTADINALLGHKSRSAAELRVQAQ

SEQ ID NO: 918 - protein, 525 aa, Staphylococcus aureus subsp. aureus Mu50
MTFLTVMQFIVNIIVVGFLLTVIVIGLIWLIKDKRQSQHSVLRNYPLLARIRYISEKMGPELRQYLFSGDNEGKPFSRNDYKNIVLAGKYNSRMTSFGTTKDYQDGFYIQNTMFPMQRNEISVDNTTLLSTFIYKIANERLFSREEYRVPTKIDPYYLSDDHAIKLGEHLKHPFILKRIVGQSGMSYGALGKNAITALSKGLAKAGTWMNTGEGGLSEYHLKGNGDIIFQIGPGLFGVRDKEGNFSEGLFKEVAQLSNVRAFELKLAQGAKTRGGHMEAEKVNEEIAKIRNVEPYKTINSPNRYEFIHNAEDLIRFVDQLQQLGQKPVGFKIVVSKVSEIETLVRTMVELDKYPSFITIDGGEGGTGATFQELQDGVGLPLFTALPIVSGMLEKYGIRDKVKLAASGKLVTPDKIAIALGLGADFVNIARGMMISVGCIMSQQCHMNTCPVGVATTDAKKEKALIVGEKQYRVTNYVTSLHEGLFNIAAAVGVSSPTEITADHIVYRKVDGELQTIHDYKLKLIS

SEQ ID NO: 919 - protein, 507 aa, Desulfovibrio desulfuricans subsp. desulfuricans str. G20
MPFKPISQKFTDFVIVRDDSRCINCEVCVRQCSYEAHYWDDTRQRVSFDSSKCTGCHRCAAQCPTSCLTIRRNPSEFRENAFWTPAFIKHIYKQSDTGGILLSGSGSPADKPVYWDNLQLDASQVTNPSIDPLREPMELRTYLGAKPDIAAFEETAGTFRLKGEMPPQIRLEYPLMFAAMSFGSINFNLHKAMAQAATELGIVYNTGEGGLHPSLYGYGANTIVQVASGRFGVHKDYLNAGAAVEIKVGQGAKPGIGGHLPGEKIDEEVSRTRMVPLGSDAISPAPHHDIYSIEDLLQLIYAIKEATRYRVPVSVKIAAVHNAPAIASGIVRAGADIVVIDGFRGGTGAAPTMIRDNVGIPIELALAAVDNRLRDEGIRNHASLVVSGGMRCSADVVKAIALGADAVYIGTAALVAVGCTLCGRCYTGKCPWGIATNEARLKKRQNPDVAARRLANLIRAWGHEIQEMLGGMGLNSIESLRGNRDKLRGIGLNQVELDILGVKHAGR

SEQ ID NO: 920 - protein, 1514 aa, Salinibacter ruber DSM 13855
MQSPARPSLGPRRERSNCGVGVLMDLNGTKSHAMVDEALGLLRRLDHRGARGAEENTGDGAGVLIQKPHAFYQDVVSGLGAVDSYGVGQFFLPTDEHVQSALRDFVDQRVRAEGFESVAWRSVPTDASGLGPTARATEPDVWQLFVRPAESLSPEALDARLYVLRRLLESAVANSGLDDSETFYVCSLDRRRVVYKGLLTNAQVASYYPELTDDRVQSTLALVHSRFSTNTLGAWRLAHPYRTVVHNGEVNTLRGNLNWMRARAADLHTDAFGEDLERIRPITTAAQSDTAVLDNVLELLVESGRSLPHALRMLIPEAWTKDARMSAPRRAWYEYHSTLIEPWDGPLLVAFTDGDRVGAVLDRNGLRPCRYWVTHDDRIVMASEAGVVDLPPDRVARKDRLQPGQLFLADAAAERIVPEDEVFGRLTDEKYERWLDTTRVRLRTLVSADTSNGGASVPEATLSMNGDPDALPRRQRAFGYTREHVRRLVQPMVDDGKDPVGAMGNDTPPAVLSDQSKTLFTYFKQLFAQVSNPPLDYIREELVTSLESHIGRKGNLLTERPEHCRQVHLDSPLLSDAERDALHDIDTNGIRSTTIDTTFGDEMGLEAAVEQMCRDAREAVATGDEILLLSDRGTGPDRLPIPSLLAVGAVHHDLIRAGRRTHAALVVESGQPCAVHHVCTLLGYGADAIHPYLAYATVRDWAGRSDAVPDAETAIERYVGALEQGLLKVMAKMGISTLESYKGAQVFEAVGLDSEFVETYFFGTPSRIEGAGIDELEADLRDRHEKAFGNALPGATDLESGGELYWRRDGEHHQWSPQTIGTLQQAVRQNDRGAYDEFAALINDQSAQHQTLRGLLEFDTDPDAAIPVTDVEPATSIVQRFFTASMSFGSLSPEAHETLAVAMNRIGGRASTGEGGEQVDRFGTERECAIKQVASGRFGVTSTYLKNADAIEIKMAQGSKPGEGGHLPGEKVNDLIAETRYTTPGVSLISPPPHHDIYSIEDLAQLIHDLKSANSAADVHVKLVAAAGIGVIAAGVSKAKADALLISGQSGGTGASPKTSIKSAGLPWELGVSEAQQVLLENNLRSRIRLRVDGGLKTGRDVAVAALLGGEEFGFGTAALVCLGCIMLRKCHCNTCSVGIATQDPELREQFVGAPEHVMRYMHFVAEELREIMAELGVRTVDEMVGRTDLLRQRETDHPKARRLDLGSILHRPVSDDDPRKTTEQDHKLDDKLDHALIEEARPALDQQTPVQIARDIHNWDRAVGAMLSSEVTGRYGPDGLPDGTIEIDLEGVAGQSFGAFLASGVTLRLVGEANDYVGKGLSGGRVILRTPETAGFEADENIILGNVALYGATRGEAYVNGQAGERFAVRNSGVQAVVEGVGDHGCEYMTGGVVVVLGSTGRNFGAGMSGGEAYVLDEDGTFQDTVNREMVHVEALTDERDRRLVRRLVEHHLHHTGSAKATRVLDAWDTCVGRFCKVMPDAFARQVEAHLENGEDIRPPVPPAPGASSTVLA

SEQ ID NO: 921 - protein, 1581 aa, Burkholderia mallei ATCC 23344
MVSTAARPLSDGVPMIDHQQPKSALPAAQGLYDPQNEHDACGVGFVAHIKGKKSHEIIEQGLKILENLDHRGAVGADPLMGDGAGILIQIPDAFYREEMARQDVTLPPAGEYGVGMIFLPKESASRIACEQELERTVKAEGQVVLGWRDVPVDHAMPISPAVKASEPVIRQIFIGRGKDVMVTDALERKLYVIRKTASHRIQALKLKHGKEYFVPSMSARTVVYKGLLLAGQVGVYYRDLQDARTVSALALVHQRFSTNTFPAWELAHPYRMIAHNGEINTVKGNVNWLNARTGAIASHVLGDDLPKLWPLIYPGQSDTASFDNCLELLVMAGYPLVHAVMMMIPEAWEQHTLMDDNRRAFYEYHAAMMEPWDGPAAIAFTDGRQIGATLDRNGLRPARYVITDDDLVIMASEAGVLPIPESKIVKKWRLQPGKMFLIDMEHGRIIDDKELKDNLANAKPYKSWIDAVRIKLDEIEPEGEDVAAERRSAAALLDRQQAFGYTQEDVKFLMAPMAQQGEEAVGSMGNDSPLAVMSNKNKTLYHYFKQLFAQVTNPPIDPIRENMVMSLVSFIGPKPNLLDTNNINPPMRLEVSQPVLDFKDIAKIRSIDRYTGGKFSAYELNICYPVAWGKEGIEARLASLCAEAVDAVKSGYNILIVSDRKTDAENVAIPALLATSAIHTHLVQQGLRTSTGLVVETGSARETHHFALLAGYGAEAVHPYLAMETLAKMAHGLPGDLSPEKAIYNFTKAVGKGLQKVMSKMGISTYMSYTGAQIFEALGLATDLVEKYFKGTASKVGGIGLFEVAEEAIRLHRDAFGENPVLADMLDAGGEYAFRVRGEDHMWTPDSIAKLQHATRGNSYQTYKEYAHLINDQTKRHMTLRGLFEFRVDPAKAIPIDEVEPAKEIVKRFATGAMSLGSISTEAHTTLAIAMNRIGGKSNTGEGGEDENRYRNELRGIPIKVGDTLKSVIGDEIVRDIPLKEGDSLRSKIKQVASGRFGVTAEYLASADQIQIKMAQGAKPGEGGQLPGHKVSEYIGKLRYSVPGVGLISPPPHHDIYSIEDLAQLIHDLKNVNPVASISVKLVSEVGVGTVAAGVAKAKADHVVIAGHDGGTGASPLSSVKHAGTPWELGLAETQQTLVLNRLRGRIRVQADGQMKTGRDIVIGALLGADEFGFATAPLVVEGCIMMRKCHLNTCPVGVATQDPVLRAKFSGQPEHVVNYFFFVAEEAREIMAQLGIAKFDDLVGRADLLDMRRGVEHWKAKGLDFSRVFYQPEGCEGIARRHVESQDHGLERALDHTLIEKAKAAIENGEHVSFIQPVRNVNRTVGAMLSGAIAKKHGHDGLADDAVHIQLKGTAGQSFGAFLAKGVTLDLVGDGNDYVGKGLSGGRIIIRPTNDFRGKSEENIICGNTVMYGALEGEAFFRGVAGERFCVRNSGATAVVEGTGDHGCEYMTGGTVVVLGETGRNFAAGMSGGIAYVYDADGTFAAKCNKSMVALDPVLQQAEQERTVDPALWHAGTTDEALLKGLVERHFQFTGSPRAKSLLENWDAARRQFVKVFPHEYKRALGEIGAKKKAGEVLAA

SEQ ID NO: 922 - protein, 2360 aa, Cryptococcus neoformans var. neoformans JEC21
MSSQSDVLDNIFQRLSARSEDVRAQAGQDLAEHVVAYTQEYPGHDASKGVWAQVFHKTFEFTRSNNQLERLGAIISISQLLQLTKDDTLDRAQQKVLRLYEYLRPLTTCGDSTVMLPASLVVEDMVRNSPTLHTDTFLGKEVGQALVMIDDSRQEVGRFSGALLLYAFARAAPGVFHQYIPKVLEKIWVPLRDSRSVVRERASMLLSTCLDTLKTRGDRPSTDTYRKIFEEARLGLLKASSTESILGSLLAFNSMLQNQQLSMAEYYRSICELTFKYRDSKEVSIRKAVIALIPSMATYDSDDFEAHYLHRSMAYLLQALNRPADRDISYVALGHMAVHLGSKMKPFIDDIMRIIRDHLRMRGKKNAPYEAPIFQCLAMLATSVGPMLTRQMHEILNLMFPWGLSEPLCTALQATASHIPPLLRTIQDRLLEMLSQTLTGHSYRPLGAPAPRGGAQMDLNLLQSTTNAQSADTLKLALRLLARFDFVGHTLSEFVRDAALPYLEHDSVEVRREAVLATTTLFMTDPICQQTSSNSVEIVNDVLSKLLTVAITDPNAGIRRTVLDHLEDKFDRHLAQADDIRCLFIALNDEVFGNRERTISIIGRLAHHNPAYVMPHLRKSLINIVTELEYSTNARQKEESAKLLCLIIGAAAGLVKSYAPTILSVLLRTASSPDSSIGVQAECLKCIGELARVAGEELVPSVRAILDLVIEMLNDQASPAKRDTALKTLGQIASNTGEVIKPYTDYPQLMGVLFRFLRMEANSSVRQETIKTIGMLGALDPFKHKTLLGDVDDPIDEGTTSRVNDIVLLNQHNSSVNDEFFQTVVIHSLVNVLHDSTYKDHYQAVEAIMMIFRTQRLRCVNFLPQIVPAFLNVIRIAHSSRTELYLKQLAQFITIVKLHIRNYLNDVFDLIHEFWNPNSTLQITIISLVEAIAKAVEGEFKAYLPKLLQQILRSFDGDLSAKHLPELKLNTLLQILKAFYVFGESIEDYLHLVLPVIVRSFENPAAPDSLRIAALRTTGQLCRKVNFSDHASQIIHPLVRTLGNSSEELRQTAMETLCVLVLQFGPDYAIFIPMVNKALVENKISHPGYEALITQLLNRERLPPDLGPVERYASDSAVEASAPEPVALKVNQQALKLAWDCSHLLNTSSRTEWISWIIGLGHEMMRESPSQAIRAARSLALSSVAFTKELFNVAFYSCWQELFESYQEDLWHNLDRAIKKDDVPGDVVNMILGATQFLEHDEKEVAIESRVLGSVAANYQALAVALHYKEQEFFLDPSKEVIEDLIDVNQKLQQSDAAWGTLEWAQTEMGMTTEVEWYEKLGRWEEALQVWNERDADASTTFSEWEITEGKVTCLHAMGEWEQLSDFVQARWANRTAEEKKLLSPLAAAASWSLKQWDLMDDYISAMKGDGADRAFFKAILAVHRNQIPAALKQISKARERLDPELTTLTGDSYGRAYDTVVRIQMLAELEEIIAYKDHADEPARQEMQRQTWKKRLAGCQRDVEVWQRILQVRSLVLKPNEDMDTWIEFADLCRTSDRLNLAEKTLTSLVGFQYPSMEDTRGRAPPPIIFAYLRMAWAKNLQIDSREERYETLQHLRDFTDQLTDDVGIGARGPNGRLMLPDQKLYGSYTKLLAQCHVELGQWQATLRESQGSADPSGILHDYSLATELDPEWYQAWHTWALANFEVITQLEVSQQGLSPIHFTTYIIPAVEGFLKSISLSPGNSLQDTLRLLTLWFTYGYSSGVTAAVSQGLPTVNIDVWLEVIPQIIARIQTPRQSIQQLIVQLLHDIGKAHPQALIYPLTVASKSTVAARRTVAQNITHKMREHSPKIVDQAELVSTELIRAAILWHEMWYDGLEEASKHYFGDHDIPGMLGVLEPLHEIVENGPQTLRETSFIQSFGHDLRIAREHLKRYRITQDGTEIQQAWDVYYSVFQRLGKQLKLLNVIELQYVSPKLMAVRDLDIAVPGTYQSGKPIIGIKNVIPTFKVIASKQKPRQCSMRGMDGKEYAYCLKGHEDLRQDERVMQLFGLVNTLLNNDHESAKRHLSIQRFSVTPLSPSAGLLGWVTHSDTIHVLIKQYRDQRKILVDIEHKLMQQMSDESYDSLPLLHKVEIFQYALDNTTGQDLYRILWLKSRNSDIWLERRTTYTRSLGLNSMVGYILGLGDRHPSNLLLDQITGKMVHIDFGDCFEVAQQRDKYPEKVPFRLTRMLIHAMEVCGITGNFSRSCEVSMEVLRDNRESLMAVLEAFVYDPLIAWRLTATDKRPGGVGEVKDLDDPAVYGKQRKNKANETEILNDVENTEVKNDKGLQVIERVRRKLTGRDFKPDVVLDVKSQVEKLVVEATKTENLCVAFLGWCSFW

SEQ ID NO: 923 - protein, 433 aa, Arabidopsis thaliana
MGGSSSKESPRGGGSGRRYERSVSGSSSYSSAWDQSSYYQTPNHPSASPVSSYNSGRQTPKNLERKYSRIADNYRSIDEVTAALSHAGLESSNLIVGIDVTKSNEWTGARSFGRKSLHFIGTTPNPYQQAISIIGKTLSVFDEDNLIPCYGFGDATTHDQDVFSFNPNDTYCNGFEEVLMCYREIVPQLRLSGPTSFAPIIERAMTIVEESGGQYHVLLIIADGQVTRSVDTDNGGFSPQEQQTIDAIVRASEYPLSIVLVGVGDGPWDTMRQFDDNIPARAFDNFQFVNFTDIMSKNIDPARKEAEFALSALMEIPSQYKATLELGLLGQRTGHCPDRIALPPPTYATQSMRNSPRTSRSTSFQNKPYDNGVSSTPPSTTHNESQQQFCPVCLVSAKNMAFNCGHQTCAGCGEDLHVCPICRSSISVRIKLY

SEQ ID NO: 924 - protein, 1524 aa, Erythrobacter sp. NAP1
MVAHIKGERSHSIVEQSLEILEKLDHRGAVGADPLLGDGAGLLMQIPHALIQRWADEHGHELPEPGDYAVAMSFMPKDEVARGFVADRFEKLLAKEGQRLIGWRDVPTTLDGLGDAVIASMPVIQQAIIAKGDSTPDQDAFERKLLAIRKQTLNPLAKLAEKHGLPGLTETYMPSVSTRTIVYKGLLLATQVQSFYDDLRDPECVSAFGLVHQRFSTNTFPSWRLAHPFRFIAHNGEINTVRGNVNWMNARRRTMESDLLGPDLDKMWPLIPHGQSDTACLDNALELLIAGGYSLAHAMMMLIPEAWNKHELMAPELRAFYEYHAALMEPWDGPAAVCFTDGRQIGATLDRNGLRPARFCVTKDDIVCLASESGVLPFAEEDIVRKWRLQPGKMLLIDLEQGRIIEDDELKAELAGAEPYTEWLDQAQVRLDDISEIEPELSELAEEHTTLLQRQQAFGYTQEDIARFLEPMAVKGDDPVGSMGTDTPIAVLSNKARLLYDYFKQNFAQVTNPPIDPIREELVMSLLSMIGPRPNLLGHDAGTHKRLEVDQPILTNDDLAKIRSVEAVMDGAFRCETIDITWDAEAGVEGIELAIREMCWAATEAVLQDHNILVLSDRAQDEGRVPMPALLATAAVHHHLVRQGLRMQTGLVVETGEAREVHHFCVLAGYGAEAINPYVAFETLEDIRRRKHPGATTDAVQQNYIKAVGKGIRKVMSKMGISTYQSYCGAQIFDAVGLSSAFIDKYFTGTATTIEGVGLEQVAEEAIRRHAQAYGDNPLYKGMLDVGGIYQYRLRGEEHAWTPQNVAQLQHAVRGNVSEQYQEFAKSVNEQSERLLTIRGLMEFKTADEPLPLDEVEPASEIVKRFSTGAMSFGSISHEAHSTLAVAMNRIGGRSNTGEGGEEPFRFTPLENGDSMRSRIKQVASGRFGVTTEYLANSDDIQIKMAQGAKPGEGGQLPGHKVDKRIGAVRHSTPGVGLISPPPHHDIYSIEDLAQLIHDLKNVNNEARISVKLVSEVGVGTVAAGVSKARADHVTISGYDGGTGASPLTSLTHAGSPWEIGLAETQQTLLLNDLRSRIAVQVDGGLRTGRDVAIGALLGADEFGFATAPLIAAGCIMMRKCHLNTCPVGVATQDPVLRARFTGEPEHVVNYMFFVAEELRGIMAEMGFRTVEEMVGRVDRLDMTRMHRHWKARGINLERLLHKPELKEGAPLRNTEGQDHGLGAAMDNALIADATDAIEAKTPVQLDYTITNVHRTVGAMLSGAIAKAHGHEGLPADTIRVNLTGVAGQSFGAWLAHGVTLDLVGDANDYVGKGLSGGRIIVRQPDGVPRESSANIIIGNTVLYGAIAGEAYFNGVAGERFAVRNSGAIAVVEGAGDHACEYMTGGVVVVLGKTGRNFAAGMSGGVAYVYDPDGAFSALVNHAQVDLLPVTAERDAEDGTGRPQQRGSSVHDFGMGDMLRHDGERLRILVERHQLHTGSAVASELLADWDKALGAFVKVMPRDYKRALEALEAEREEAASVAAE

SEQ ID NO: 925 - protein, 216 aa, Phaseolus coccineus
MESGGFHGYRKLPNTTSPGLKLSVSDMNNVNTSRQVAGDNNHTADESNECTVREQDRFMPIANVIRIMRKILPPHAKISGDAKETIQECVSEYISFITGEANERCQREQRKTITAEDVLWAMSKLGFDDYMEPLTMYLHRYRELEGDRTSMRGESLGKRTIEYAPMGVGVATAFVPPQFHPNGYYGPAMGAYVAPPNAASSHHHGMPNTEPNARSM

SEQ ID NO: 926 - protein, 1625 aa, Capsicum annuum
MAVNPVANVPQLLYANGQPPKILTGSKDGVFVDFVGLNCKSSKRIRRRIGYAAANRRSFINNRWNAINAVLDLERVASNISQQSASIVPKVADLDDILSERGACGVGFIANLDNKASHGIVKDALVALGCMEHRGGCGADNDSGDGSGLMTSIPWDLFNDWAEKEGIAVFDKLHTGVGMIFLPKDCNQMNEAKKVISNIFNNEGLEVLGWRSVPVDSSVVGYYAKETMPNIQQVFVRIVKEENVDDIERELYICRKLIERAVNSEIWGNELYFCSLSNQTIVYKGMLRSEVLGRFYYDLQSELYTSPLAIYHRRYSTNTSPRWPLAQPMRFLGHNGEINTIQGNLNWMQSREASLKSTVWRDREDEIRPFGNPKASDSANLDSAAELLIRSGRAPEEALMILVPEAYQNHPTLTIKYPEVLDFYNYYKGQMEAWDGPALLLFSDGKTVGACLDRNGLRPARYWRTEDNIVYVASEVGVIPMDDSKVTMKGRLGPGMMISVDLSSGQVFENTEVKKRVALSNPYGEWVKENLRSLKPMNFLSTTVIDGETILRRQQAYGYSSEDVQMVIESMAAQGKEPTFCMGDDIPLAVLSQKPHMLYDYFKQRFAQVTNPAIDPLREGLVMSLEVNLGKRRNILEVGPENASQFILPSPVLNEGELESLLKDSHLKPHVLPTFFDVGKGVDGSLKRSLYKLCEAADEAVRNGSQLLVLSDRFDELEATRPAIPILLAVGAVHQHLIQNGLRMSASIIADTAQCFSTHQFACLIGYGASAVCPYLAFETCRQWRLSTKTVNLMRNGKMPSVTIEQAQKNFCKAVKSGLLKILSKMGISLLSSYCGAQIFEIYGLGKEVVDVAFCGSKSSIGGLTLDELARETLSFWVKAFSEDTAKRLENYGFIQFRQGGEYHGNNPEMSKLLHKAVRQKSESAYSVYQQHLANRPVNVLRDLLEFKSDRSPIPVGRVEPASAIVQRFCTGGMSLGAISRETHEAIAIAMNRLGGKSNSGEGGEDPIRWKPLTDVVDGYSPTLPHLKGLQNGDTATSAIKQIASGRFGVTPTFLANADQLEIKIAQGAKPGEGGQLPGKKVSAYIARLRNSKPGVPLISPPPHHDIYSIEDLAQLIYDLHQVNPKAKVSVKLVAEAGIGTVASGVAKGNADIIQISGHDGGTGASPVSSIKHAGGPWELGLTETHQTLIENRLRERVVLRVDGGFKSGFDVMMAAAMGADEYGFGSVAMIATGCVMARICHTNNCPVGVASQREELRARFPGVPGDLVNYFLYVAEEVRGMLAQLGYEKLDDIIGHTDILRPRDISLMKTRHLDLSYILSNVGLPEWSSSMIRNQEVHSNGPVLDDVLLADPKISDAIENEKVVNKTVEIYNIDRAVCGRIAGAVAKKYGDTGFAGQLNIIFTGSAGQSFACFLTPGMNIRLIGEANDYVGKGMAGGELVVTPVENTGFCPEDATIVGNTCLYGATGGQVFVKGKAGERFAVRNSLAQAVVEGTGDHCCEYMTGGCVVVLGKVGRNVAAGMTGGLAYILDEDETLIRKVNKEIVKIQRVVAPVGQMQLKNLIEAHVEKTGSTKGSLILKDWDKYLPLFWQLVPPSEEDTPEASAEYEQAAVGQVTLQFAEIPLK

SEQ ID NO: 927 - protein, 1480 aa, Azotobacter vinelandii
MKAGLYHPEEFKDNCGFGLIAHMRGEASHHLLQTAIEALTCMTHRGGINADGKTGDGCGLLMQKPDAFLRAKAKEHFGAELPGQYAVGMVFLSQDAAGAEIARARLSEEIAAQGLGLVGWREVPVDTSVLGPLALERLPRIEQVFVAGEGLSDQDFAIKLFFARRRAEVALADQDFYVCSLSHKDIIYKGLMMPADLARFYPDLGDERLATAICVFHQRFSTNTLPRWPLAQPFRFLAHNGEINTITGNRNWAQARRLKFANELLPDLESLAPLVNRTGSDSSSMDNMLELLVTGGMDLFRGLRMIIPPAWQNVETMDADLRAFYEYNSMHMEPWDGPAGVVLTDGRYAVCLLDRNGLRPARWVTTGNGYITLASEIGVWNYAPEDVIAKGRVGPGQILAVDTETGEVLHTDDIDSRLKSRHPYKKWLRQNALRIQANLDESEGTSAYDAEQLKQYMKMFQVTFEERDQVLRPLAEQGQEAVGSMGDDTPMAVLSKRVRSPYDYFRQQFAQVTNPPIDPLRESIVMSLETCLGAERNVFEETAEHANRAILTTPVISPAKWRSLMNLEREGFERHFIDLNYDESLGLEAAVRNIADQAEEAVRGGKVILVLSDRHIVPGKLPAHASLAVGAVHHRLVEKGLRCDCNILVESATARDPHHFAVLLGFGATAIYPFLAYEVLADLIRTGEVLGDMDDVFKYYRKGISKGLLKILSKMGISTVASYRGAQLFEAVGLADEVVELSFRGVASRIKGARFVDLEAEQKLLAAEAWSKRKPIQQGGLLKFVFGGEYHAYNPDVVSTLQAAVQQGDYAKFKEYSALVDQRPVSMLRDLLKVKEVAQPLALDEVEPLGAILKRFDSAGISLGALSPEAHEALAEAMNSLGARSNSGEGGEDPARYGTIRSSKIKQVATGRFGVTPEYLVNAEVLQIKVAQGAKPGEGGQLPGGKVNGLIARLRYAVPGVTLISPPPHHDIYSIEDLAQLIYDLKQVNPQALVSVKLVAEPGVGTIAAGVAKAYADLITISGYDGGTGASPLTSIRYAGSPWELGLAEAHQTLRGNDLRGKVRVQTDGGLKTGLDVIKAAILGAESFGFGTAPMIALGCKYLRICHLNNCATGVATQNDKLRKEHFIGTVDMVTNFFTYVAQETREWLARLGVRSLGELIGRTDLLELLPGETAKQAHLDLSPLLGSAHVPDGKPQFCEVEKNPPFDPGLLAEKMVEMARPAIEARSGGEFALDICNCDRSIGARVSGEIAKVHGNQGMVDAPITFRFKGTAGQSFGVWNAGGLNLYLEGDANDYVGKGMTGGKLVIVPPQGSVFKTQDSAILGNTCLYGATGGRLFAAGTAGERFAVRNSGAHAVVEGTGDHCCEYMTGGFVCVLGRTGYNFGSGMTGGFAYVLDLDNGFVDRVNHELVEMQRISGESMEAHRSHLQQVLAEYVDETGSQWGAHLLENLDDYLRMFWLVKPKAASLQSLLSSTRANPQ

SEQ ID NO: 928 - protein, 293 aa, Triticum aestivum
MEPSRLPPEAAGKPQGLIAKDRWFSIAAYISSGEGGIAAALRKHVEEEARHLSGEDLLSVMDQLYEQISSLLQSTDATESLLALHAIDALVDLPAGGPSKVSKLANVLKNVFEVKRDPEILVPASTVLGHLANAGGALTGHEVERQIITTALGWLGADRVEYRRFAALLILKEMAENAFTVFKNYIPEFVDVILIALSDPKLVIRERAAEAVRALAHSNMQAAADCAAKKAKREGIDLISDLPDETLCTIISFLRTDDAVRTSALSRRWRHLWRSASINLDTAPYPWVLSRAN

SEQ ID NO: 929 - protein, 429 aa, Oryza sativa Japonica Group
MMNPRRLPPLPSSTSSASAADDMDPRVWRRLPQPLVDRILACLPTPSFLRLRAACRRFYHLLFSSPFLHSHLLLSPHLPFFAFVVPAAGHLLLLDPTATASWSRLPLPLPPVAGGPAAFSPAAASAGLLAFLSDASGHKTLLLANPITRLLAALPISPTPRLSPTVGLAAGPTSIIAVVAGDDLVSPFAVKNISADTFVADAASVPPSGFWAPSSLLPRLSSLDPRAGMAFASGRFYCMSSSPFAVLVFDVAENVWSKVQPPMRRFLRSPALVELGGGREGAARVALVSAVEKSRLSVPRSVRLWTLRGGGGGGGGGAWTEVARMPPEVHAQFAAAEGGRGFECAAHGDYVVLAPRGPVAQAPTSALVFDSRRDEWRWAPPCPYVVVAHHGGAGAAGFRVFAYEPRLATPAIGLLDATAPVALHGMHDG

SEQ ID NO: 930 - protein, 1513 aa, Oceanicola granulosus HTCC2516
MTRQYDDAWAAREEAKRKWMAENGLFREDDEKSNCGVGLVVSIDGSRSRQVVENGIKALKAIWHRGAVDADGRTGDGAGIHVQIPVDFFHDQIRRTGHEPRADQLMAVGQVFLPRTDFGAQETCRTIVESEVLRMGYYIYGWRHVPVNIAVLGDKANATRPEIEQILISNSKGVDEETFERELYVIRRRIEKAAAAAQVGQLYIASLSCRSIIYKGMMLAQDVAEFYPDLLDERFESAFAIYHQRYSTNTFPQWWLAQPFRMLAHNGEINTLKGNLNWMKSHEIRMASATFGDMAGDIKPIVSQGSSDSAALDAVFEVLVRSGRNAPMAKTLLVPESWSKQAEELPQAWRDMYAYCNAVMEPWDGPAALAMTDGRWVCGGLDRNGLRPMRYVVTGDGLLIAGSEVGMVPTDEATVKEKGALGPGQMIAVDMQEGGLFHDVEIKDKLAAGQPFGEWVGKIIELDTELASATEAPLFTGAELRRRQIAAGYTIEELEQILAPMAEDAKEAIASMGDDTPPAVLSDRYRPISHYFRQNFSQVTNPPIDSLREYRVMSLKTRFGNLKNVLDEDGSQTEIIVLDSPFVGNAQWEKLKASFSATCTEIDCTFPADGGPEALRNALTRIREEAEDAVRSGAGHLVLTDQFQGEAKVAVPMILATSAIHSWLTRKGLRTFCSLNVRSAECVDPHYFAVLIGCGATTVNAYLAEDSLADRIERGLLDCSLTEAVARYRKAIDAGLLKIMSKMGISVISSYRGGLNFEAVGLSRAMVAEFFPGMHSRISGIGVSGIQKKVEEVHAKGFAGGTDILPIGGFYKARKQGETHAWGATTMHMMQAACDRASYELWTQYSRSMQAMPPIHLRDLLAIKPMGEAVPIEEVESITSIRKRFVTPGMSLGALSPEAHKTLNVAMNRIGAKSDSGEGGEDPAHFVPESNGDNPSAKIKQVASGRFGVTAEYLNQCEELEIKVAQGAKPGEGGQLPGMKVTDLIARLRHSTKGVTLISPPPHHDIYSIEDLAQLIYDLKQINPRCKVTVKLVASSGVGTIAAGVAKAKADVILISGHNGGTGASPATSIKYAGLPWEMGLTEAHQVLAMNNLRERVTLRTDGGLRTGRDIVMAAMMGAEEYGIGTAALIAMGCIMVRQCQSNTCPVGVCTQDEKLREKFTGNADKVVNLITFYATEVREVLASIGARSLDEVIGRADLLTQVSRGAAHLDDLDLNPLLITVDGADHIVYDRTKPRNEVMDTLDAEIIKDAARFLKDGEKMQLQYAVQNTLRTIGTRTSSHIVQRFGMRNDLQPDHLTVKLTGSAGQSLGAFAAPGLKIEVSGDANDYVGKGLSGGTIVVRPPMSSPLVAADNTIIGNTVLYGATGGHLFAAGRAGERFAVRNSGATVVIEGCGSNGCEYMTGGTAVILGPIGANFGAGMTGGMAYLYDPLGSTSALINHETLVTCGVTEEYWHGQLHELVQRHLAETGSRRAADLLQHWEEERGNFLQVCPREMLDKLPHPIGIEETRIPAE

SEQ ID NO: 931 - protein, 190 aa, Vitis vinifera
MKQLGLQLQDQDSSSSQSTGQSHQEPQLVGIAPTRVPLPFDIAEDGPIFVNAKQYHGILRRRQSRAKMEAQNKLVKARKPYLHESRHLHALNRVRGSGGRFLSTKKLQEPDSTSNAGCHSVSGSGHFHQKGDTTEYEVHQSDTGKFVASTTSSSDVTSVSNSDVLFRQPEHSSDFMKYLGTVIEKFSVIL

SEQ ID NO: 932 - protein, 451 aa, Zea mays
  misc_feature (405)..(405): Xaa can be any naturally occurring amino acid
MGQKDSKPSHGYGYSSYDYGSASSGYTSRNTGNSSSSYSVRYAPSSENSVQPETHARLQRKYSKIGDDYRSLSQVTEALAQAGLESSNLIVGIDFTKSNEWTGKISFNRRCLHDIGNTPNPYEQAISIIGRTLSAFDEDNLIPCFGFGDASTHDQEVFSFYPENRPCNGFEEALDRYREIVPTLRLAGPTSFAPMIETAIGIVDSTGGQYHVLLIIADGQVTRSVDTQSGQLSPQERDTIDAIVRASQFPLSIVLVGVGDGPWDMMHQFDDNIPARSFDNFQFVNFTEIMSKSIAADRKEAEFALSALMEIPTQYKATIDLQLLGRRQRITPRIALPPPTRTAYSRSSSFSQQSGVYSRSSSFDQQTSGASQQRSESLKQQKKPAAPKRPDTYASERALEDRIVXLCPICMYKSKDLAFGCGHQATCYECGRNLERCPLCQQNITTRIRLY

SEQ ID NO: 933 - protein, 401 aa, Arabidopsis thaliana; identical to SEQ ID NO: 748

SEQ ID NO: 934 - protein, 228 aa, Glycine max
MKPFLFLNLPNTEFNSSQVDCNHSMAHSSYPYGDPIFAYGPQAISHPQMIPPMLGLASTRVALPLDLAEDGPIYVNAKQYHGILRRRQSRAKLEAQNKLIKNRKPYLHESRHRHALNRVRGSGGRFLSTKQLAQSNAEFVTGAHSGSDPTNRYQKEHLSEVESHSSKDGDNSSFITTCSDRPCLSGNNVNFRQQECMFLGNSANMGGSPQFSGGLTFGGAKQRTSVVR

SEQ ID NO: 935 - protein, 455 aa, Solanum lycopersicum
MEAFHHPPISFHFPYAFPIPTPTTNFLGTPNSSSVNGMIINTWMDSRIWSRLPHRLIDRIIAFLPPPAFFRARVVCKRFYGLIYSTHFLELYLQVSPKRNWFIFFKQKVPRNNIYKNVMNSSNSGVCSVEGYLFDPDNLCWYRLSFALIPQGFSPVSSSGGLICFVSDESGSKNILLCNPLVGSIIPLPPTLRPRLFPSIGLTITNTSIDIAVAGDDLISPYAVKNLTTESFHIDGNGFYSIWGTTSTLPRLCSFESGKMVHVQGRFYCMNFSPFSVLSYDIGTNNWCKIQAPMRRFLRSPSLVEGNGKVVLVAAVEKSKLNVPRSLRLWALQDCGTMWLEIERMPQQLYVQFAEVENGQGFSCVGHGEYVVIMIKNNSDKALLFDFCKKRWIWIPPCPFLGNNLDYGGVGSSNNYCGEFGVGGGELHGFGYDPRLAAPIGALLDQLTLPFQSFN

SEQ ID NO: 936 - protein, 454 aa, Capsicum annuum
MEAFHHAPISFHFPYSFPIPTPTTNFLGTTTTPNSSSINGINTWMDSRIWSRLPHRLIDRIIAFLPPPAFFRARAVCKRFYGLLYSSHFLELYLQVSPQRHWFIFFKQRLPRNNIYKNNSTNLGSSVEGYMFDPDNLSWYRLSFALIPQGFSPVSSSGGLICFVSDESGSKNILLCNPLVGSIIPLPPTLRPRLFPSIGLTITNSSIDLAVAGDDLISPYAVKNLTTESFHIDGNGFYSIWGTTSTLPRLCSFESGKMVHVQGRFYCMNFSPFSVLSYDIGTNNWCKIQAPMRRFLRSPSLVEGNGKLVLVAAVEKSKLNVPRSLRLWALQDCGTMWVEIERMPQQLYLQFAELENGQGFNCVGHGEYVVIMIKNNSDKALLFDFCKKRWLWIPPCPFVGNSNNNNNIDYGGSSNNCCGEFGGGELHGFGYDPRLAAPIGALLDQLTLPFQSFN

SEQ ID NO: 937 - protein, 1497 aa, Solibacter usitatus Ellin6076
MSDYTVSSGLPPAQGLYDPRLEHDACGIGFVANIKGQKSHDIIVKGIQVLINLTHRGACGCDPETGDGAGVLIQIPHKFFARECAKLGFTLPPAGEYGVGMTFLPVEPLARRRAEGVVERIVREAGLTVLGWRDTPIDGGAIGRVARNSQPYIQQIFVARGKGMTEDQLERRLYMVRKCAEAEIAKSDIPEKSFFYVPSLSARTIIYKGLLLAPQIRNFYPELQDPEVISALCLVHQRFSTNTFPTWQLAHPYRYIAHNGEINTVRGNVNWMHARQSILASPLFGADIKKLFPIIQPGGSDSAAFDNALELLVMSGRSLAHAMAMLIPEAWSKNEHMNPQKAAFYEYHASLMEPWDGPAAIAFTDGRSIGATLDRNGLRPARYLVTKDDLVIMSSETGVLPVKPEDVKVKGRLQPGKMLLVDTAEGRIISDKELKRSLYGRNPYQLWIKENQITLDQLADPPREHGTDHTTLVCRQRAFGYTDEDIKMILAPMAERGEEPIGSMGTDTPLACLSDKPQPLFHYFKQLFAQVTNPPIDPIREEMVMSLTSYIGTERNILDETAQHCHTLKLPHPILSNRDLEKLRRVSQGDFLASTLPTLFPVEDGEKGLERALTQLCRRASLAIQSGYTLLILSDRGVDPDYAPIPSLLALTAVHNHLVREETRTQCALIIESGEPREVMHFALLIGYGASAVNPYLALETVGPDEKAIYNYIKSVNKGLLKTFSKMGISTLQSYRGAQVFEAIGLSKSLVEKYFTGTSSRIEGVGLDVLAQEAILKHQYAYAPQTDFDTELGVSGNYQWRANGEYHLYNPQTIQKLQFAVRQDNFATFQEYTDLLDKESRQFCTLRGLLEIKKAGDPVPLEEVEPAKEIVKRFATGAMSYGSISKEAHETLAIAMNRIGGKSNTGEGGEDEARFGTEKRSAIKQVASARFGVTTNYLINADELQIKMAQGAKPGEGGQLPGHKVDETIARVRHSTPGVGLISPPPHHDIYSIEDLAQLIYDLKNVNPRARISVKLVAEVGVGTVAAGVAKAHADVVLISGDSGGTGASPLSSIKHAGAPWELGLAEAHQVLVMNDLRGRVRLQTDGKLQTGRDITIAALLGAEEFGFSTAPLVAMGCIMMRKCHLNTCPVGIATQDPALRAKFEGTPENVINFFFFLAEQVRGYMAQMGFRRFDEMVGRVDMLDVRHANDHWKAKGIDLSTILYNPQMPGRIARRCVQAQDHGLSEALDYKLIDHARDSIENGTPIEIKLPIRNVHRTVGAMLSGEIARRHGSAGLPDNTIHFQFTGSAGQSFGAFLARGVTLELEGDANDYVGKGLSGGRLVVYPPRTATFQPEENILIGNVVLYGATSGEAYFNGMAGERFAVRNSGARAVVEGLGDHGCEYMTGGIVVVLGKCGRNFAAGMSGGIAYVLDEKGDFAEKRCNCAAVDLEPVPAEDADLLCRMITNHTEATGSPRGKWVLENWESMLPKFIKVFPQEYRKVLQTRASRVLEVSRG

SEQ ID NO: 938 - protein, 1528 aa, Xanthomonas oryzae pv. oryzae KACC10331
MRHRINCGLVDHPVTSSNAPRIERCNVAAALLDRKEADMAPRTRQGLNEHGLYNSARDERDACGFGMVAQLDDQPSRSLVDTAIAALSRMTHRGGVAADGLTGDGCGLLIRKPDAFLRVLARDAGITLGTRYAAGVVFLPLDEADAARCRAELQAQLQSAGVQVRGWRVVPTDDSVCGQLARETLPRIEQVFVNAGAKQTEDAFTLALFLARRRAEQALHAVEDFYVTTLSPNGISYKGMVLPDKLSTFYPDLQRSDLSSSAIVFHQRFSTNTLPRWPLAHPFRLLAHNGEINTIEGNRRWAQARSKVWQTPRFDIAEFDPVISMHGSDSQSLDNMLELLIAGGMDLLQALRILVPPATQALEFKDADLAAFYEFYGLNTEPWDGPAGIVACDSRYAACMLDRNGLRPARWMLTSDRHFLVASEAGVWELPAERITRKGKLGPGEMMAIDLKRGDLLDSDAIDRINRARAPYKQWLQQGVTYLQTELIDPSLVEEPFSEQTLRSYHKLFQLSTEEVEQILRPLAETEQEATGSMGDDTPMAVLSRQTRPLYDYFRQAFAQVTNPPIDPLREGIAMSLTTQLGKETNIFHAGAETVNHVILNSPVLSQRKLRQLLKMEQYVARNRLIDLSYSVEEGLKAGLERICQDVEAAARAGAVMLLLSDRYPVPDRPMAHALLATGAVHHHLCKVGLRCEVNLIIETGTARDAHHMACLLGFGATAVYPYLAYQTLFDLGRRGILQLSKGGEQSQIGRRYRKGIYKGLSKIISKMGICTIASYRGAQLFEIVGLDPDVVELCFADTPARIGGVSLSRLDTESRELTARAWNDQLKPEVGGLLKYVHGGEYHMYNPDVVMTLQRATRTGDAGDWQKYVDAVHSRPASTLRDLVQLKRAGTPTPLDDVAPAEDVLRRFDTAAISLGALSPEAHEALAIAMNRLGGRSNSGEGGEDPARYGTEKRSKIKQVASGRFGVTPEYLVNAEVLQIKVAQGAKPGEGGQLPGHKVNELIARLRYAKPGIGLISPPPHHDIYSIEDLAQLIYDLKQVNPSALVSVKLVAHAGVGTIAAGVVKAGADLITVSGHDGGTGASPVSSIRYAGVPWELGVAESHQALVANDLRERTILQTDGGLKTGLDVVKAALLGADSFGFGTAPMIVLGCKYLRICHLNNCATGVATQDERLRAGYFTGLPERVEHFFRLLAEEVRQWLSYLGVRSLDDIVGRTDLLEQLELSPRPGVKVDLSRLLTHAHYDGSHCAAQRLYESPDSLATQMDGLLADAIAHKTGGEHRFLIHNTDRSIGARLSGAIARVHGNHGMSDAPLNLRFRGTAGQSFGAFNAGGLQLELEGEANDYVGKGMAGGRLVVRPPRGARFEARSTPIVGNTCLYGATGGELFAAGRAGERFAVRNSGALAVVEGAGDHCCEYMTDGVVLVLGKVGLNFGAGFTGGLAYVLDIERDFVDRYNHELIDIHRVSAEGFENHRQHLHTLISRHRELTGSIWAQQILDEFRDYIGKFWLVKPKAASIESLTESLRRAA

SEQ ID NO: 939 - protein, 139 aa, Adiantum capillus-veneris
MESGGASSSTTVSGSGREQDRLMPIANVIRMMRKVLPAHVKIADDAKDTIQECVSEFISFVTSEANDRCQREQRRTITAEDIMWAMLKLGFDDYIEPLSLYLQRFRELEGGDHRCSSKREFLPLTKKDPFAIMSSCNWT

SEQ ID NO: 940 - protein, 443 aa, Pisum sativum
MEGFHPSMNMSMSMSMNMNPSFSYTFPITATASGAITNITTTTTTYNTTSTTPWMNSRIWSKLPHRLLDRIIAFLPPPAFFRARAVCKRFYSLLFSNSFLELYLQVSPRFHWFIFFKHKTRSKTHIYKNNTITDNNSFEGYIFDPNEVAWYRISFALIPSGFSPSSSSAGLLCWVSDESGPKTMLLSNPILGSITQLPPTLRPRLFPSIGLTITPSSIDVTAAGDDMISPYAVKNLSSESFHIDASGFYSIWGTTSSLPRLCSLESGRMVYSQGKFYCMNCSPFSVLAYDIATNTWFKIQAPMRKFLRSPNLVECNGKLLLVAAVEKNKLNVPKNLRVWSLQGCGNVWVETERMPQQLYVQFADMENGNGFECVGNGEFIVIMIKGSDKGLVYDIGRKRWQWIPPCPYAGYDGFELHGFAYDPRLATPVTALLDQLAMPLPQF

SEQ ID NO: 941 - protein, 1554 aa, Cyanothece sp. PCC 8801
MKKTNHPQSNPQSSPLSPYQGQKWLVEERDACGVGFIADVKGKGSHKLVQQALIALGCMEHRGGCSADNDSGDGSGVMTAIPREVLAPWFASQNLTMPPAEQLGVGMVFLPQDSNERAAEKAHVEQVVKAENLTVLGWREVPVKPEVLGVQARGNQPHIEQIMVISPEGLSGDALDRVLYIARSRIGKRLADNFYICSFSCRTIVYKGMVRSVVLGRFYADLQNPNYISQFAVYHRRFSTNTMPKWPLAQPMRLLGHNGEINTLIGNINSMATREVHLQVPGWTSDELEALTPIVNTANSDSYNLDSALELLVRTGRSPLEAAMILVPEAYNNQPDLQQYPEITDFYDYYSGLQEPWDGPALLVFSDGKMVGACLDRNGLRPARYCITKDDYVVVGSEAGVVDIPESEIVEKGRLGPGQSIAVDLTTQEILKNWDIKQRIAQQHPYGEWLQSYRQELTPQPFSDKILLQQPGQLLQHQTAFGYTAEDVDMVIVPMASQGKEPTFCMGDDIPLAVLSDKPHLLYDYFKQRFAQVTNPPIDPLRESLVMSLTMLLGEKGNLLDPKPEDAKLLKIDSPVLNETELAAIKNSGFKTAELSTLFDLTTGPGGLKTALDRLCIEATEAVKNGTKIIVLCDRPSGHSINETTSYIPPLLAVGTVHQHLIKQGLRLQASLVIDTAQCWSTHHFACLIGYGASAVCPYLTLETIRQWWNDEKTQKLMGNGKLETITLEKALDRYRHSVEAGLLKILSKMGISLLSSYHGAQIFEAIGLGMELIETAFEGTTSRVGGLSLQELADEIIAVHSQAFPSLTDKKLKNFGFINYRPGGEYHMNSPEMAKSLHKAVEAYKAGGNGANKEAYDHYEMYRKYLEERPITALRDLLEFKVSNTPVPIEEVEPVEAIVKRFCTGGMSLGALSREAHETLAIAMNRLGGKSNSGEGGEDPTRFIPLSDVDSNGNSATFPHLKGLQNGDTASSAIKQVASGRFGVTPEYLMNGQQLEIKMAQGAKPGEGGQLPGPKVSPYIAMLRRSKPGVTLISPPPHHDIYSIEDLAQLIFDLHQINPVAKVSVKLVAEIGIGTIAAGVAKANADIIQISGHDGGTGASPLSSIKHAGCPWELGVTEVHRMLLENKLRGRVILRADGGLKTGWDVMMAALMGAEEFGFGSIAMIAEGCIMARICHTNNCPVGVATQQERLRQRFSGVPAHVVNFFYFVAEEVRSILAKLGYRSLDEVIGRSDLLKVRETAKLSKTKALNLDCLLKLPDVTRDRAWLSHEEVHSNGEVLDDRILADIAVQSAIENQGSVTQNLKIVNTDRTVGARIAGVIAKKYGNTGFEGEIKLNFTGAAGQSFGAFNLPGMMLHLQGEANDYVGKGMHGGEIVIIPPQDANYDPADNVIVGNTCLYGATGGVLYANGRAGERFGVRNSLAKAVIEGAGDHCCEYMTGGIIVVLGSVGRNVGAGMTGGLAYFLDEEGTFPAKVNPEIVEIQRICTEAGEAQLKELITAHVAKTGSQKGQLILNNWKEYVSKFWQAVPPSEANSPETNPNPVMVAEKTLTPVK

SEQ ID NO: 942 - protein, 1622 aa, Arabidopsis thaliana
MAMQSLSPVPKLLSTTPSSVLSSDKNFFFVDFVGLYCKSKRTRRRLRGDSSSSSRSSSSLSRLSSVRAVIDLERVHGVSEKDLSSPSALRPQVANLEDILSERGACGVGFIANLDNIPSHGVVKDALIALGCMEHRGGCGADNDSGDGSGLMSSIPWDFFNVWAKEQSLAPFDKLHTGVGMIFLPQDDTFMQEAKQVIENIFEKEGLQVLGWREVPVNVPIVGKNARETMPNIQQVFVKIAKEDSTDDIERELYICRKLIERAVATESWGTELYFCSLSNQTIVYKGMLRSEALGLFYLDLQNELYESPFAIYHRRYSTNTSPRWPLAQPMRFLGHNGEINTIQGNLNWMQSREASLKAAVWNGRENEIRPFGNPRGSDSANLDSAAEIMIRSGRTPEEALMILVPEAYKNHPTLSVKYPEVVDFYDYYKGQMEAWDGPALLLFSDGKTVGACLDRNGLRPARYWRTSDNFVYVASEVGVVPVDEAKVTMKGRLGPGMMIAVDLVNGQVYENTEVKKRISSFNPYGKWIKENSRFLKPVNFKSSTVMENEEILRSQQAFGYSSEDVQMVIESMASQGKEPTFCMGDDIPLAGLSQRPHMLYDYFKQRFAQVTNPAIDPLREGLVMSLEVNIGKRGNILELGPENASQVILSNPVLNEGALEELMKDQYLKPKVLSTYFDIRKGVEGSLQKALYYLCEAADDAVRSGSQLLVLSDRSDRLEPTRPSIPIMLAVGAVHQHLIQNGLRMSASIVADTAQCFSTHHFACLVGYGASAVCPYLALETCRQWRLSNKTVAFMRNGKIPTVTIEQAQKNYTKAVNAGLLKILSKMGISLLSSYCGAQIFEIYGLGQDVVDLAFTGSVSKISGLTFDELARETLSFWVKAFSEDTTKRLENFGFIQFRPGGEYHSNNPEMSKLLHKAVREKSETAYAVYQQHLSNRPVNVLRDLLEFKSDRAPIPVGKVEPAVAIVQRFCTGGMSLGAISRETHEAIAIAMNRIGGKSNSGEGGEDPIRWKPLTDVVDGYSPTLPHLKGLQNGDIATSAIKQVASGRFGVTPTFLVNADQLEIKVAQGAKPGEGGQLPGKKVSAYIARLRSSKPGVPLISPPPHHDIYSIEDLAQLIFDLHQINPNAKVSVKLVAEAGIGTVASGVAKGNADIIQISGHDGGTGASPISSIKHAGGPWELGLTETHQTLIANGLRERVILRVDGGLKSGVDVLMAAAMGADEYGFGSLAMIATGCVMARICHTNNCPVGVASQREELRARFPGVPGDLVNYFLYVAEEVRGILAQLGYNSLDDIIGRTELLRPRDISLVKTQHLDLSYLLSSVGTPSLSSTEIRKQEVHTNGPVLDDDILADPLVIDAIENEKVVEKTVKICNVDRAACGRVAGVIAKKYGDTGFAGQVNLTFLGSAGQSFGCFLIPGMNIRLIGESNDYVGKGMAGGEIVVTPVEKIGFVPEEATIVGNTCLYGATGGQIFARGKAGERFAVRNSLAEAVVEGTGDHCCEYMTGGCVVVLGKVGRNVAAGMTGGLAYLLDEDDTLLPKINREIVKIQRVTAPAGELQLKSLIEAHVEKTGSSKGATILNEWEKYLPLFWQLVPPSEEDTPEASAAYVRTSTGEVTFQSA

SEQ ID NO: 943 - protein, 186 aa, Emericella nidulans
MSSTSPSKEPEVEQEPHSGEEHEQMDKEQDNQTQGQGEFEVKEQDRWLPIANVARIMKLALPENAKIAKEAKECMQECVSEFISFITSEASEKCQQEKRKTVNGEDILFAMTSLGFENYAEALKIYLSKYRETQSARGEHQNRPPSSGYAGGDPSAELPAALQSCVPGVLQLEAPSPKPLIMQAAL

SEQ ID NO: 944 - protein, 178 aa, Isoetes yunguiensis
MQHDPAMDDFADRDRDHRDRGDRDRENCNVREQDRFMPIANVIRIMRKVLPMHAKISDDGKETIQECVSEFISFVTSEANDRCQREQRKTITAEDILWAMSKLGFDDYIDPLTFYLHRYREVEGDHRGSVRGDSLPKKEMNLHGLQPMMVQPNMFGGLSYYKDESNASFTHDSYTVHK

SEQ ID NO: 945 - protein, 442 aa, Arabidopsis thaliana; identical to SEQ ID NO: 869

SEQ ID NO: 946 - protein, 1510 aa, Silicibacter sp. TM1040
MTKYDENWVRAEEAKRKWMAENGLYAEEEEHSSCGVGLVVSVDGSKSRKVVDAGIDALKAIWHRGAVDADGKTGDGAGIHVQIPVPFFWDQVKRTGHNPREDELLAVGQVFLPRTDFGAQETCRTIVETEVLRMGYYIYGWRHVPVDVTCLGEKANATRPEIEQILISNSKGVDEETFERELYVIRRRIEKAAAAAQVGGLYIASLSCRSIIYKGMMLAEQVAVFYPDLMDERFESAFAIYHQRYSTNTFPQWWLAQPFRMLAHNGEINTLKGNVNWMKSHEIRMASSTFGDHAEDIKPIVASGSSDSAALDSVFEVLVRAGRSAPMAKTMLVPESWSKQAEELPQAWRDMYSYCNAVMEPWDGPAALAMTDGRWVCAGLDRNGLRPMRYVVTGDGLVIAGSEAGMVPIDEASVVEKGALGPGQMLAVDMAKGQLYHDVEIKDKLARALPFGEWVEKVTDLDEVLGGVQETPLFSGEELRRRQVAAGYTIEELEQILAPMAEDGKESLASMGDDTPSAVLSKQYRPLSHFFRQNFSQVTNPPIDSLREFRVMSLKTRFGNLKNVLDEDSSQTEIVVLESPFVGNSQWDKLVENLGSKLAEIDCSFAPGRGALNAALARIRAEAEEAVRSGAGHIVLTDQHSGADKVAMPMILATSAVHSHLTRQGLRTFCSLNVRSAECIDPHYFAVLIGCGATVVNAYLAEDSLADRIERGLLDGSLTENVARYREAIDQGLLKIMAKMGISVISSYRGGLNFEAVGLSRAMVAEYFPGMTSRISGIGVHGIQVKAEEIHAKGWNTQENVLPIGGFYKARKSGETHAWEATSMHMMQMACNKASFELWKQYSAKMQSNPPIHLRDLLDIKPLGKPVPLEEVESITAIRKRFVTPGMSLGALSPEAHKTLNVAMNRIGAKSDSGEGGEDPAHFVPEPNGDNPSAKIKQVASGRFGVTAEYLNQCEELEIKVAQGAKPGEGGQLPGMKVTDLIARLRHSTKGVTLISPPPHHDIYSIEDLAQLIYDLKQINPRCKVTVKLVASSGVGTIAAGVAKAKADIILISGHNGGTGASPATSIKYCGLPWEMGLTEAHQVLAMNNLRDRVTLRTDGGLRTGRDIVMAAMMGAEEYGIGTAALIAMGCIMVRQCQSNTCPVGVCTQDEALRGKFTGNADKVVNLITFYAQEVREILASIGARSLDEVIGRADLLAQVSRGSAHLDDLDLNPLLITVDGSASIVYNRDKDRNAVPDTLDAEIVRDAARFLKDGEKMQLSYAVQNTHRTVGTRTSSHIVQNFGMRNTLQPDHLTVKLQGSAGQSLGAFAAPGLKLEVSGDANDYVGKGLSGGTIVVRPPMASPLNAAENTIVGNTVLYGATDGYLFAAGRAGERFAVRNSGAKVVIEGCGTNGCEYMTGGVAVILGSIGANFGAGMTGGMAYLYDPDGNAETLMNMESIVTCPVTVDHWEAQLKDLIERHVAETGSRKAAEILQHWDSEKTHFLQVCPKEMLNKLPHPISVETSAIPAE

SEQ ID NO: 947 - protein, 466 aa, Desulfitobacterium hafniense Y51
MENTLFIFIFGVVVSFVGWLLLGFVFFFLGKRFFRTGVQRIFNLVVRRLLEDNYSENLMELWSATRRTSVQNIVEIALRAEQGKLIGRPLGSPKPYHNFDNLMFIPAQLVRLPVEREVPIDVSATLGPRVEKPMQLSIPLLIGGMGYGVALSEKAKVALAKAAKQVGTATNSGEGPFLAEERNAAGKFIWQISRYDYGRNPQGIAEADMVEVQMGQGSRLGAHILYPQEIKGKAQKLMGISPVVPLKGYAKLPGINSPLDWPRYVEELRQEAGGKPIGIKIMGGGRLEADLAVAIEAGFDVICIGGAQGGTAASSPTISDDFGLPSLYNLVRAQRYLIEQGVRHEVSLIASGGYDTPGKCLKAIALGADAVNLGTVPLFALVHKQIGKVMPWEPLTQLVYYNSKYKERLDVELAAQNVANVLQSFVLEMEEGIRALGKKSIHDLGPNDLVALDDWTAELTGVPRAW

SEQ ID NO: 948 - protein, 183 aa, Triticum aestivum
IRHEAQGAKPGEGGELPGHKVIGDIAVTRHSTAGVGLISPPPHHDIYSIEDLAQLIHDLKNSNPQARISVKLVSEAGVGVVASGVVKGHADHVLISGHDGGTGASRWTGIKNAGLPWELGLAETHQTLVANGLRGRAVLQTDGQLKTGRDVAVACLLGAEEFGFSTAPLITLGCIMMRKCHTN

SEQ ID NO: 949 - protein, 1530 aa, Bacillus halodurans C-125
MQNYGYPKKQGLYDPQFEHDNCGIGFLAHMKGQKSHKIVEDALHILCNLEHRGGQGDEVNTGDGAGILLQLPHRFFQKVTVSEGISLPEEGKYGVGMLFLPQDESLRRETERKLEAIVNEEGQTFLGWRTVPTDDSMLGNAAKAAMPYIRQLFIQKSENVKAGLDFERKLYVIRKRAENEIGPLVESGSFYFASFSSRTIVYKGMLTTEQVDQFYLDVVDPDFETALALVHSRFSTNTFPSWERAHPNRYMIHNGEINTVKGNVNWMHAREARFESEVFGTDLNKIHPVIDQEGSDSSMFDNTIEFLSLSGRSMAHAAMMMIPEPWQNDEHMSKEKKAFYQFHSTLMEPWDGPTAIVFTDGTQIGACLDRNGLRPSRYYVTKDDYIIMSSEVGVLDIDPENVLYKERLHPGHMLLVDLEEGRIIPDDEIKHQIASEHPYEEWVKENLVQLEDVLETSHVEDTDFGKLRERQLAFGYTYEELTKMIQPMVKEGEDPVGSMGYDSPLAVLSKRPQLLFNYFKQLFAQVTNPPIDAIREKVVTAVGTTIGAERNLLNPEPLSCRHIYLPSPILNNEELAKLKHNKMDGFTSTTLSILFDAKSGAKGLEAALENLFSEADQAIEAGKTLLILSDRKMDETNAAIPSLLAVSGLHHHLIRKGTRTKVSILLESGEPREVHHHCVLLGYGAEAINPYLVFDSIDALLRDGLLDNISYVEAVENYVKAAVKGIMKVLSKMGISTIQSYRGAQIFEAVGVDESVINQYFTWTTTRIGGVTLKEIAEEVRLRHERAFSEQEGVDKALDPGDDLQWRRNGDPHQYNPHTIHMLQHACRKNDYDLYKKYASAINEQEKEQTTLRGLLKFTTDRKPISLEEVEPVEEIVKRFKTGAMSFGSISKEAHETLAIAMNRLGGKSNTGEGGEDPDRFTPDANGDLRRSAIKQVASGRFGVTSHYLVNADEIQIKVAQGAKPGEGGQLPGNKVYPWVAEVRGSTPGVGLISPPPHHDIYSIEDLAELIHDLKNANPQARISVKLVAGTGVGTIAAGVAKGRADHVVISGYDGGTGAAARTSIKHAGLPWEIGLAETHQTLVLNNLRDRISIETDGKLMTGRDVVIAALLGAEEYAFSTAPLVVLGCIIMRVCHLDTCPVGIATQNPELRKKYMGKPEHVVNYMTFVAQEIREIMAELGFRTVDEMIGRTDVLEQNRNIDNWKAVHVDLSSLLYQPKPGQQEKNYKTIEQDHQLEQSLDMTKLLDICRPALERKEKVQAAVSIKNIDRVAGTIVGSEISKRYGAAGLPEDTIELTFKGSAGQSFGAFIPRGMTLHLEGDANDYTAKGLSGGKIIVRPPAGSTFKAEENVIIGNTSFYGATSGEAFIRGQAGERFCVRNSGVNVVIEGMGDHGLEYMTGGRVINLGKVGKNFGAGMSGGVGYIYDYDGTFEKKCNKEMILLESLSDEGDVVFIKSMLERHLAYTDSDLAKSILADWNQARKRFIKVIPKDYKRMLEAIERVKREGLSDTEAVMVAFDENKNDKSRVGGK

SEQ ID NO: 950 - protein, 224 aa, Oryza sativa; identical to SEQ ID NO: 589

SEQ ID NO: 951 - protein, 1538 aa, Oryza sativa Japonica Group
MQAADLNEILSERGACGVGFVANLKNEPSFNIVRDALVALGCMEHRGGCGADNDSGDGSGLMSGIPWDLFNDWANKQGLAPLDRTNTGVGMVFLPQDENSMEEAKAVVAKVFTDEGLEVLGWRTVPFNVSVVGRYAKETMPNIQQIFVKVAKEDNADDIERELYICRKLIERATKSASWADELYFCSLSSRTIVYKGMLRSEILGQFYLDLQNELYKSPFAIYHRRYSTNTSPRWPLAQPMRLLGHNGEINTIQGNLNWMRSREATLQSPVWRGREHEIRPFGDPKASDSANLDSTAELLLRSGRSPAEAMMILVPEAYKNHPTLSIKYPEVIDFYDYYKGQMEAWDGPALLLFSDGRTVGACLDRNGLRPARYWRTSDDFVYVASEVGVIPMDESKVVMKGRLGPGMMITVDLQTGQVLENTEVKKSVASANPYGSWLQQSTRSIKPVNFQSSVAMDNETVLRHQQAFGYSSEDVQMVIETMASQGKEPTFCMGDDIPLAVLSQKPHMLFDYFKQRFAQVTNPAIDPLREGLVMSLEVNIGKRRNILEVGPENADQVTLSSPVLNEGELESLLNDSKLKPKMGSLDKAIKVLCDEADAAVRNGSQLLVLSDRSEALEPTRPAIPILLAVGAIHQHLIQNGLRMSASIVADTAQCFSTHQFACLIGYGASAICPYLALETCRQWRLSNKTVNLMRNGKMPTVTIEQAQRNFIKAVKSGLLKILSKMGISLLSSYCGAQIFEIYGLGQEVVDLAFCGSVSKIGGLTLDEKFFYSIVKDIPVISLHEFCGMEFWAAQACDPGFDPHLRPCEYHANNPEMSKLLHKAVREKSDNAYTVYQQHLASRPVNVLRDLLELKSDRAPIPIGKVEPATSIVERFCTGGMSLGAISRETHEAIAIAMNRIGGKSNSGEGGEDPIRWSPLADVEDGYSPTLPHLKGLQNGDTATSAIKQVASGRFGVTPTFLVNAEQIEIKIAQGAKPGEGGQLPGKKVSAYIARLRNSKPGVPLISPPPHHDIYSIEDLAQLIYDLHQINPKAKVSVKLVAEAGIGTVASGVSKGNADIIQISGHDGGTGASPISSIKHAGGPWELGLSETHQLACLQTLIQNGLRERVVLRVDGGFRSGLDVLMAAAMGADEYGFGSVAMIATGCVMARICHTNNCPVGVASQREELRARFPGVPGDLVNYFLFVAEEVRATLAQLGFEKLDDIIGRTDILKAKHVSLAKTQHIDLKYLLSSAGLPKWSSSQIRSQDVHSNGPVLDETILADPDISDAIENEKEVSKTFQIYNVDRAVCGRVAGVIAKKYGDTGFAGQLNITFTGSAGQSFGCFLTPGMNIRLVGEANDYVGKGMAGGELVVVPVEKTGFVPEDAAIVGNTCLYGATGGQVFVRGKTGERFAVRNSLGQAVVEGTGDHCCEYMTGGCVVVLGKVGRNVAAGMTGGLAYILDEDDTLVPKVIVKVNKEIVKMQRVNAPAGQMQLKGLIEAYVEKTGSEKGATILREWEAYLPLFWQLVPPSEEDSPEACAEFERVLAKQATTVQSAK

SEQ ID NO: 952 - protein, 340 aa, Arabidopsis thaliana
MMHQMLNKKDSATHSTLPYLNTSISWGVVPTDSVANRRGSAESLSLKVDSRPGHIQTTKQISFQDQDSSSTQSTGQSYTEVASSGDDNPSRQISFSAKSGSEITQRKGFASNPKQGSMTGFPNIHFAPAQANFSFHYADPHYGGLLAATYLPQAPTCNPQMVSMIPGRVPLPAELTETDPVFVNAKQYHAIMRRRQQRAKLEAQNKLIRARKPYLHESRHVHALKRPRGSGGRFLNTKKLLQESEQAAAREQEQDKLGQQVNRKTNMSRFEAHMLQNNKDRSSTTSGSDITSVSDGADIFGHTEFQFSGFPTPINRAMLVHGQSNDMHGGGDMHHFSVHI

SEQ ID NO: 953 - protein, 268 aa, Ashbya gossypii ATCC 10895
MIGYEAGEPEVVTSEAERDYPPLDSGLAHYTPRDAAVSQRRDTPRIDAAELHGSSPARHQGTHGGPLEAVLKVPAEPHADMFLYEQPAAGLSSAPAGDDASVDGEPPRVGRDGILHGRGPFFEGAGLDFTSTDQVALESMAAADPAEQPFYVNAKQYYRILKRRYARAKLEENLKISRERRPYLHESRHKHAMRRPRGQGGRFLTAAEIDELKKQELAQSKAKSPAKDTADDRPKSPDTSYPPHKIQPQPPGGAVDKQQVADAAPSRT

SEQ ID NO: 954 - protein, 1517 aa, Escherichia coli CFT073
MTRKPRRHALTVPVRSGSEVGFPQSLGEVHDMLYDKSLERDNCGFGLIAHIEGEPSHKVVRTAIHALARMQHRGAILADGKTGDGCGLLLQKPDRFFRIVAQERGWRLAKNYAVGMLFLNKDPELAAAARRIVEEELQRETLSIVGWRDVPTNEGVLGEIALSSLPRIEQIFVNAPAGWRPRDMERRLFIARRRIEKRLEADKDFYVCSLSNLVNIYKGLCMPADLPRFYLDLADLRLESAICLFHQRFSTNTVPRWPLAQPFRYLAHNGEINTITGNRQWARARTYKFQTPLIPDLHDAAPFVNETGSDSSSMDNMLELLLAGGMDIIRAMRLLVPPAWQNNPDMDPELRAFFDFNSMHMEPWDGPAGIVMSDGRFAACNLDRNGLRPARYVITKDKLITCASEVGIWDYQPDEVVEKGRVGPGELMVIDTRSGRILHSAETDDDLKSRHPYKEWMEKNVRRLVPFEDLPDEEVGSRELDDDTLASYQKQFNYSAEELDSVIRVLGENGQEAVGSMGDDTPFAVLSSQPRIIYDYFRQQFAQVTNPPIDPLREAHVMSLATSIGREMNVFCEAEGQAHRLSFKSPILLYSDFKQLTTMKEDHYRADTLDITFDVTKTTLEATVKELCDKAEKMVRSGTVLLVLSDRNIAKDRLPVPAPMAVGAIQTRLVEQSLRCDANIIVETASARDPHHFAVLLGFGATAIYPYLAYETLGRLVDTHAIAKDYRTVMLNYRNGINKGLYKIMSKMGISTIASYRCSKLFEAVGLHDDVVGLCFQGAVSRIGGASFEDFQQDLLNLSKRAWLARKPISQGGLLKYVHGGEYHAYNPDVVRTLQQAVQSGEYSDYQEYAKLVNERPATTLRDLLAITPGENAVNIADVEPASELFKRFDTAAMSIGALSPEAHEALAEAMNSIGGNSNSGEGGEDPARYGTNKVSRIKQVASGRFGVTPAYLVNADVIQIKVAQGAKPGEGGQLPGDKVTPYIAKLRYSVPGVTLISPPPHHDIYSIEDLAQLIFDLKQVNPKAMISVKLVSEPGVGTIATGVAKAYADLITIAGYDGGTGASPLSSVKYAGCPWELGLVETQQALVANGLRHKIRLQVDGGLKTGVDIIKAAILGAESFGFGTGPMVALGCKYLRICHLNNCATGVATQDDKLRKNHYHGLPFKVTNYFEFIARETRELMAQLGVTRLVDLIGRTDLLKELDGFTAKQQKLALSKLLETAEPHAGKALYCTENNPPFDNGLLNAQLLQQAKPFVDERQSKTFWFDIRNTDRSVGASLSGYIAQTHGDQGLAADPIKAYFNGTAGQSFGVWNAGGVELYLTGDANDYVGKGMAGGLIAIRPPVGSAFRSHEASIIGNTCLYGATGGRLYAAGRAGERFGVRNSGAITVVEGIGDNGCEYMTGGIVCILGKTGVNFGAGMTGGFAYVLDESGDFRKRVNPELVEVLSVDDLAIHEEHLRGLITEHVQHTGSQRGEEILANWSTFATKFALVKPKSSDVKALLGHRSRSAAELRVQAQ

SEQ ID NO: 955 - protein, 561 aa, Coprinopsis cinerea okayama7#130
MGNSSSSSGRHQEDTVDYGALVPPGVYTGPRDWNQAIVSQLIAARKLAPFYRPLEEYDESWDDDQILAARKEFRDSSGDQPDSQSRSDHGSFSSSHHSSKSSHSKRPNGGKEFRPEVAVYRGAIECPICFLYYPPNINHSRCCDQAICTECFVQIKRAEPTTTHLVSEPAACPYCVQENFGIVYNPPPWRAGIGSEGASPITPADVNRRIEQSAIPYHKKRQKSYSADSPEVVTIDQIRPDWEAKLAAVRAAVARRANRRIIMRQVGDRLIPVGIGRVQTPEEAAEGGNSGSRRRRHHPANGELGTIVGMGGQDLEELMLMEAMRLSLIEHEEHQRREAEERKKKEAAERAAAAENGEGEPSDAQGAPSSSQAAPSSSSAAPPPSSSSNDPSGSLAPSGQHSRSPTPDSNNRTPPPFSTMNAALLTSGTATAFLNASSDPSSGSTTPSVPIPAVTLTGDAVPTTGPSPEAPSASSVSSSSVLTGDLPRPASLSSSTTPSSGSSLGPDPSLAGHAVYGTLPSSPESIGQSPPLEASSKSSNDRGNASLPSDSSPTDDGTAPR

SEQ ID NO: 956 - protein, 2141 aa, Oryza sativa Japonica Group
MSAAQGMAYKLRTDAAPTGAGRRARRSHSSVAAPYRAARLLTEERVAARPPRAAARDAEPVRPLSTLPESSIGLYDPSRERDSCGVGFVAELSGDYKRATVNDALEMLERMAHRGACGCEKNTGDGAGILVTKDAGFELPQPGEYAVGMVFLPIDEKRRERSKAEFQKVAESLGHVILGWRRVPTDNSDLGESALQTEPVIEQVFLTKSSSSEADFEQQLYILRRLSILSIRAALNLRRGGKRDFYMCSLSSRTIVYKGQLKPCQLKGYYYADLGHENFTSYMALVHSRFSTNTFPSWDRAQPMRVLGHNGEINTLKGNKNWMKAREGLLECEKLGLTKDQFSKILPIVDATSSDSGAFDGVLELLIRGGRSLPEAVMMMIPEAWQNDVNMEPEKKALYEFLSALMEPWDGPALISFTDGRYLGATLDRNGLRPGRFYVTHSGRVVMGSEVGVVDVPSKDVLRKGRLNPGMMLLVDFENHTVVDDEALKAQYSKAHPYGEWLKRQKIYLKDIVESVPETERVAPGISGSLTQKNEKKEHAGVNGIVTPLKAFGYTVEALEMLLLPMAKDGVEALGSMGNDTPLAVMSNREKLTFEYFKQMFAQVTNPPIDPIREKIVTSMECMIGPEGDLLETTEKQCNRLALEGPLVSIDEMEAIKKMNYRGWRSKVLDITYPKKSGRKGLEETLDRICTEARGAIKKGYTVLVLSDRGFSSDRVAVSSLLAVGAVHQHLVANLERTRVGLLVESAEPREVHHFCTLVGFGADAVCPYLAIEAIWCLQNDGKIPPNGDGKPYSKEELVKKYFYASNYGMMKVLAKMGISTLASYKGAQIFEALGLSSEVIRKCFDGTPSRIEGATFEMLARDALRLHELAFPSRAPPPGSADAKALPNPGDYHWRKNGEVHLNDPLAMAKLQEAARVNSRAAYKEYSRRIQELNKTCNLRGMLKFKDTADMISVDEVEPASEIVKRFVTGAMSYGSISLEAHTALAMAMNKLGGKSNTGEGGEQPSRMEPLANGSMNPKRSAIKQVASGRFGVSSYYLTNADELQIKMAQGAKPGEGGELPGHKVIGDIAVTRHSTAGVGLISPPPHHDIYSIEDLAQLIHDLKNSNPRARISVKLVSEAGVGVVASGVVKGHADHVLISGHDGGTGASRWTGIKNAGLPWELGLAETHQTLVANGLRGRAILQTDGQLKTGKDVAVACLLGAEEFGFSTAPLITLGCIMMRKCHTNTCPVGIATQDPVLREKFAGEPEHVINFFFMLAEELREIMSQLGFRTITEMVGRSDMLEVDPEVVKSNEKLENIDLSLILKPAAEIRPGAAQYCVEKQDHGLDMALDNKLIALSKAALEKEVRVFIETPIQNTNRAVGTMLSHEVTKRYHMKGLPAGTIHVKLTGSAGQSLGAFLCPGITLELEGDSNDYVGKGLSGGKIVVYPPRDSTFIPEDNIVIGNVALYGATIGEAYFNGMAAERFCVRNSGAQAVVEGIGDHGCEYMTGGTVVILGKTGRNFAAGMSGGIAYVYDIDGKFSVRCNHELVDLYHVEEEEDITTLKMMIEQHRLNTGSVVARDILSNFDTLLPKFVKVFPRDYKRVLDNMKAEKAAAKLAKEPKISNGVSVTTKKVQPEQSTNRPTRVSNAKKYRGFISYERESISYRDPNERVKDWKEVAIESVPGPLLNTQSARCMDCGTPFCHQESSGAGCPLGNKIPEFNELVHQNRWREALDRLLETNNFPEFTGRVCPAPCEGSCVLGIIENPVSIKSIECAIIDKGFEEGWMVPRPPLQRTGKKVAIIGSGPAGLAAADQLNKMGHFVTVFERADRIGGLMMYGVPNMKTDKIEIVQRRVNLMAEEGITFVVNANVGSDPLYSIERLRSENDAVILACGATKPRDLGIPGRELSGVHFAMEFLHANTKSLLDSNLEDGRYISAKGKKVVVIGGGDTGTDCIGTSIRHGCTSIVNLELLTKPPSKRAADNPWPQWPRIFRVDYGHQEASSKFGNDPRTYEVLTKRFIGDENGNVKALEVVRVKWEKVDGRFQFKEIEGSNETIEADLVLLAMGFLGPEATIAEKLGLEKDNRSNFKAQFGNFATSVDGIFAAGDCRRGQSLVVWAITEGRQAAAAVDKYLSRNEQDAAEDITPSGAGFVQPVAA

SEQ ID NO: 957 - protein, 165 aa, Solanum tuberosum
MAEPASPGGGGGSHESGGDPSPQSNLREQDRYLPIANIGRIMKKALPANGKIAKDSKDTVQECVSEFISFITSEASDKCQKEKRKTINGDDLLSALATLGFEDYIEPLKVYLTRYREMEGDAKGSARVGDASVRKDVVGSQLGSNTQFMYEGSFAQGLDYGNSQL

SEQ ID NO: 958 - protein, 1562 aa, Anabaena variabilis ATCC 29413
MNDNSTHQNQQITANNDSGDTYQGQRWLVEERDACGVGFIAHRQNHGSHEIVAKALAALTCLEHRGGCSADQDSGDGAGILTAIPWELLQQDYPQGQIDFLSSKNIAVGMIFLPQDAEIAQKAKAIFEQIATEEKFTVLGWRVVPVQPDLLGIQAKENQPRIEQVILSADNSGDALERQLFITRKRLFKAVKSISEEFYICSLSSRTIVYKGMVRSAVLGAFYLDLQNPAYKSAFAVYHRRFSTNTMPKWPLAQPMRLLGHNGEINTLLGNINWMMAREANLSHPIWGDRFDELRPSVLMGNSDSATLDNVLELLVHSGRSPLEALMIMVPEAYQNQPSLRNYPEIVDFYEYYSGLQEAWDGPALLVFGDGKTVGATLDRNGLRPARYLITKDDYIVVASEAGVVDFPEADIIEKGRLGPGQMIAVDLVNHEVLKNWEIKQRIAKQQPYGEWLQKYRQELKQLTSQVNGNGNGNGNGHRVADNGHVSTTKVDKETLLRQQLAFGYTTEDVEMVIQPMAATGSEPTFCMGDDIPLAVLTDKPHLLYDYFKQRFAQVTNPAIDPLREKLVMSLKVELGERGNLLEPKPEYARRLKLESPVLTESELAAIKLSGFATAELSTLFAIANGPDGLKAAVLALQQQAAESVRAGAKILVLSDRAGAGISTEYSYIPPLLAVGAVHHYLIREGLRTKTSLIVDTAQCWSTHHFACLIGYGAGAICPYMTLDTVRNWWSDPATQQFMERGKITSLSLEQAIANYRKAVESGLLKILSKMGISLLSSYQAAQIFEAIGIGGDLLALGFQGTASRIGGLSVSELAQEVLSIHSKAFPELATHKLENLGFVNYRPTGEYHMNNPKLAKALHEAVDGKKYDHYEVYKQYLQGRPITALRDLLDFHSDRAPISLEEVESVSDIVKRFCTGGMSLGALSREAHEVLAIAMNRIGGKSNSGEGGEDPVRYKVLDDVDASGHSPTLPHLRGLRNGDTASSAIKQVASGRFGVTPEYLASAKQIEIKIAQGAKPGEGGQLPGPKVSPYIAMLRRSKPGVTLISPPPHHDIYSIEDLAQLIFDLHQINPKAQVSVKLVAEIGIGTIAAGVAKANADIIQISGHDGGTGASPLSSIKHAGSPWELGLSEVHRVLMENSLRDRVVLRVDGGLKSGWDVLIGALMGAEEFGFGSIAMIAEGCIMARICHTNNCPVGVASQKEELRKRFTGIPEHVVNFFYFVAEEVRHLLARLGYRSLSEIIGRADILTTRKDARLTKTQAINLNCLLQLPDTRENRSWLAHEEVHSNGPVVDDQLLADSDIQAAIRNQSSVTKTLPIVNTDRTLGARLAGAIASQYGDSGFEGQINLNFTGSVGQSFGAFNLPGIILTLEGEANDYVGKGMHGGEIIIKPPAEATYDPAQNVIVGNTCLYGATGGVLFANGLGGERFAVRNSKGVAVIEGTGDHCCEYMTGGTIVVLGKVGRNVAAGMTGGLAYFLDEDGSFPELVNREIVKIQRVLTTAGEKQLQDLIKAHVERTGSPKGQIILDNWQEYLPKFWQLVPPSEAESPEANPQSVVEKYLSSV

SEQ ID NO: 959 - protein, 1508 aa, Roseovarius nubinhibens ISM
MTKFDQNWKAAEEAKRAWMAENGMYSEEEEHSSCGVGLVVSINGKPSRRVVQAGIDALKAIWHRGAVDADGKTGDGAGIHVQIPVPFFYDQIRRTGHEPHEDQLIAVGQVFLPRTDFGAQEVCRTIVETEVLRMGHTIYGWRHVPVDVKCLGEKANATRPEIEQILISNAKGIEEEDFERELYVIRRRIEKAVTAAGVRDFYIASLSCRSIIYKGMMLAEQVAVFYPDLQDERFKSAFAIYHQRYSTNTFPQWWLAQPFRMLAHNGEINTLKGNVNWMKSHEIRMASGAFGDMAEDIKPIIPGGSSDSAALDAVFEVLVRAGRSAPMAKTMLVPESWSKQAEELPQAWRDMYSYCNSVMEPWDGPAALAMTDGRWVCAGLDRNGLRPMRYVVTSDGLLIAGSEAGMVPLDERNVREKGALGPGQMLAVDMKKGLMFRDREIKDKLSQALPFSEWVSRINELDEKLAGITETPLFSGDELRRRQIAAGYTIEELEQILAPMAEDGKEAIASMGDDTPSAVLSKGYRPLSHFFRQNFSQVTNPPIDSLREYRVMSLKTRFGNLKNVLDEDSSQTEILVLDSPFVGNAQWDELQKHFNAEVGQIDCSFEPGPGALRRGLERIRAEAEDAVRSGSGHLVLTDQNVSEGRVGMPMILATSAVHSHLTRKGLRTFCSLNVRSAECIDPHYFAVLIGAGATVVNAYLAEDSIADRINRGLIDGSLTEAVARYRNAIDQGLLKIMSKMGISVISSYRGGLNFEAVGLSRAMCAEFFPGLMSRISGIGVSGIQAKLEAVHAQAYRGGDVLPIGGFYKARKTGETHAWGAQNMHLMQAACNAASYELWKRYSAAMQANPPIHIRDLMAIKPMGEAVPLEEVESVTAIRKRFVTPGMSLGALSPEAHKTLNVAMNRIGAKSDSGEGGEDPAHFTPEPNGDNPSAKIKQVASGRFGVTAEYLNHCEELEIKVAQGAKPGEGGQLPGMKVTDLIARLRHSTKGVTLISPPPHHDIYSIEDLAQLIYDLKQINPRAKVTVKLVAQSGVGTIAAGVAKAKADVILISGHNGGTGASPATSIKYAGLPWEMGLTEAHQVLAMNNLRDRVTLRTDGGLRTGRDIVMAAMMGAEEYGIGTAALIAMGCIMVRQCQSNTCPVGVCTQDEALRDKFTGNADKVVNLITFYAQEVREVLASIGARSLDEVIGRADLLTQVSRGSAHLDDLDLNPMLITVDGSAGLSLDRNRGRNEVPDTLDAEIVRDAQRFLNDGEKMQLHYAVQNTHRTVGTRVSSHIVRNFGMRNALQPNHLTVKLTGSAGQSLGAFAAPGLKLEVSGDANDYVGKGLSGGTIVVRPAMMSPLEASENTIIGNTVLYGATDGYLFAAGRAGERFGVRNSGAKVVIEGCGTNGCEYMTGGVAVILGRIGANFGAGMTGGMAYLYDPEGATELMLNRETVITCPVQEGHYMQQLEELIERHVEETGSAKAKQILQHWDVEKSKFVQVVPKEMLNKLAHPIELPEAIPAE

SEQ ID NO: 960 - protein, 316 aa, Zea mays
CKTLNYAVEYRGVKTKEEKGIEQLEEQRVIEAQIRMRQQEVQDDAERMKNKRTATLGDVVASAQVDSCNTDGASTAVANHPRGNDVLSSEVQHPELISRNSEAFKQMRGNNFEVDLEEVMLMEAIWLSIQDQEALGNPGCVSTTPSSIPSRPFDDGDMTTTAEAASSGGFACAVAALAEQQHMHGESSSASPCQTIRFGTLSRPDRSTTQDLSVAGSSSSDSRVEEPPTSNTHRTIEAAEYSNSNVQWSEVAEAGTSIAESDGTVEAGVDNSSTLAGSNIDSVSVPDSFEEQMMMAMALSLVDARARAGSPGLAWR

SEQ ID NO: 961 - protein, 2384 aa, Penicillium chrysogenum
MAQAGAITDVTQRLFVELKSKNEEARARAAYELYDNVLSVSRDWPSEKFVEFYNAVSQRIAQLVVNGSDANERIGGLLALDRLIDFDGVDAAQKTTRFASYLRSALRSNDNVVLVYAARSLGRLAKPGGALTAELVESEIQSALEWLQSERQESRRFAAVLVIRELAKGSPTLLYGFVPQVFELVWVALRDPKVLIRETAAEAVGECFEIIVARDSQVRQSWFARIHDEALLGLKSHNIDWIHGSILIIKELILKGTMFMKEHYRNACEIILRLKDHRDPKIRTEVVLTIPILASYAPTDFTEIYLHKFMVYLQAQLKRDKERNSAFIAIGKIANAVGTAIGQYLDGIIIYIREGLAMKARNRSGVNEAPMFECISMLSLAVGQALSKYMEALLDPIFACGLSKSLTQALVDMAHYIPPIKPMIQEKLLDMLSIILCGTPFRPLGCPENRLPPMPSFAKDFAPHELHSDSDIALALHTLGSFDFSGHILNEFVRDVAINYVENDNPEIRKASALTCCQLFVHDPIINQTSGHSIQVVSEVIDKLLTVGIGDPDPEIRRTVLWSLDRKFDRHLARPENIRCLFLAVNDEVFDVKEAAICIIGRLSSVNPAYVFPPLRKLLVNLLTGLGFANTARQKEETAQLISLFVSNATKLIRSYVDPMVTALLPKSTDINPGVAATTLKAVGELASVGGHEMRQYLPQIMPIILDSLQDLSSHNKREAALRTLGQLASNSGYVIEPYMEYPHLLAVLINIIKTEQTGSLRKETIKLVGVLGALDPYKYQQISEIEPDVHHINEIQNVSDVALIMQGLTPSNEEYYPTVVIHTLMQNILRENSLAQYHSAVIDAIVTIFKTLGLKCVPFLGQIIPGFILVIRSAPASRLESYFNQMAILVNIVRQHIRTFLPEIIEVIKDFWDASYQIQGTILSLVEAIARSLEGEFRKYLAGLIPLMLDTLDKDTSPRRQPSEKILHALLIFGSSGEEYMHLIIPSIVRLFDRPQNPQSIRKSAIDSLTKLSRQVNVSDFASLMVHSLSRVVAGGDRVLRQAAMDCICALIFQLGQDFTHYIHLLNKVLKTNQIAHTNYQILVTKLQKGDPLPQDLNPEEVYSFPTDDTNFSEIGQKKIVVNQQHLKNAWDASQKSTRDDWQEWIRRFSIELLKESPSPALRACASLAGIYQPLSRDLFNAAFVSCWTELYDQYQEELVRSIEKALTSPNISPEILQILLNLAEFMEHDDKALPIDIRTLGKYAAKCHAFAKALHYKELEFEQDQNSGAVEALITINNQLQQSDAAIGILRKAQAYRDVELKETWFEKLQRWDEALAAYKRREKTDPDSFGITMGKMRCLHALGEWKVLSDLAQEKWNQASLEHRRAIAPLAAAAAWGRGQWELMDSYLGVMKEQSPDRSFFGAILAIHRNQFDEANMYIEKARNGLDTELSALLGESYNRAYNVVVRVQMLAELEEIITYKQNIGDPEKQDAMRKTWNQRLLGCQQNVEVWQRMLKVRALVTAPRENLDMSIKFANLCRKSNRMGLAERSLASLETVVSDANGTRTIAPPEVTYARLKFSWANGHQLESLEMMKEFTSGLTDDFSRYNTLMVSNGEHHGANGVNGVVDQNHPDAISLNERIGDVNKFRKLLSKSYLRQGEWQTALQRGDWRPEHVREVLNAYSAATQYNRDSYKAWHSWALANFEVVTTIANQASREGIPAPVPAHIVTEHVIPAIRGFIRSIALSLTSSLQDTLRLLTLWFNHGGDHEVNTVVTEGFTAVNIDTWLAVTPQLIARINQPNIRVRGAVHRLLAEVGKAHPQALVYPLTVAMKSNVTRRSQSASNIMESMRQHSAKLVEQADLVSHELIRVAVLWHELWHEGLEEASRLYFGDHNVEGMFSTLAPFHDMLDKGAETLREVSFAQAFGRDLAEAKHYCMMYRESEEIGDLNQAWDLYYTVFRKISRQLPQLSTLDLKYVSPRLKDCADLDLAVPGTYQSGKPVIRIMSFDPILHVLQTKKRPRRMTLKGSNGSSYMYLVKGHEDIRQDERVMQLFGLCNTLLDNDGESFKRHLSVQRFPAIPLSQSSGLLGWVSNSDTLHALIKEYRESRRILLNIEHRIMLQMAPDYDSLTLMQKVEVFGYAMDNTTGKDLYRVLWLKSKSSEAWLERRTNYTRSLGVMSMVGYILGLGDRHPSNLLLDRGNGRVVHIDFGDCFEIAMHREKYPERVPFRLTRMLTFAMEVSNIEGSYRITCEAVMRVLREHKDSLMAVLEAFIHDPLINWRLGTQESPDRVSLTADRRQSIMDGVNFEPGAQPPGDYSRRRRPSMLEGGILDAPEGVPQEAREAQNARALQVLARVKEKLTGRDFRNNEELSVSDQVDKLIAQATNVENICQHWIGWCSFW

SEQ ID NO: 962 - protein, 2371 aa, Aspergillus nidulans FGSC A4
MAQAGPITDVTQRLFIELKSKNEETRVRAAYELYENVLAISRDWPPEKFIEFYNAVSQRIAQLVVTGSDAHERIGGLLALDRLIDFDGVDNAQKTTRFASYLRSALRSSDNAVLVYAARALGRLAKPGGALTAELVESEIQSALEWLQSERQEGRRFAAVLVIRELAKGSPTLLYGFVPQIFELIWVALRDPKVLIRETAAEAVRQLWFARIYEEALQGLKSNNVDWIHGSLLVLKELLLKGAMFMNEHYRNACEIVLRLKDHRDPKIRTQVVLTIPILASYAPVDFTETYLHRFMVYLQAQLKKDKERNAAFIAIGKIANAVGVAIAQYLDGIIVYIREGLALKAKNRAAINEAPMFECISMLSLAVGQALSKYMESLLDPIFACGLSESLTQALVDMAHYIPPIKPTIQVKLLDMLSLILDGTPFRPLGCPESRLPPLPSFAKDFTLQELHSDAEIALALHTLGSFDFSGHILNEFVRDVAIHYVENDNPEIRKAAALTCCQLFVHDPIINQTSSHSIQVVSEVIDKLLTVGVGDPDPEIRRTVLWSLDRKFDRHLARPENIRCLFLAVNDEVFAVREAAICIIGRLSSVNPAYVFPPLRKLLVNLLTGLGFASTARQKEESAQLISLFVSNATKLIRSYVDPMVTTLLPKAVDANHGVASTTLKAVGELASVGGSDMKAYLPKLMPIVLDALQDLSSHAKREAALRTLGQIASNSGYVIDPYTDHPHLLAVLIGIIKTEQAGSLRKETIKVLGILGALDPYKYQQISETAPDVHHINEVQVVSDVSLIMQGLAPSNEEYYPTVVIHTLMQNILRENSLAQYHSAVIDAIVTIFKTLGLKCVPFLGQIIPGFISVIRGSPSSRLESYFNQMAILVNIVRQHIRAFLPEIIEVIREFWDTSYQVQATILSLVDAIAKSLEGEFKKYLANLIPPMLDTLEKDNTPRRQPSERILHSFLVFGSSGEEYMHLIVPSIVRLFDRSQNPASIRKSAIDSLTKLSRQVNVSDFASLIVHSLSRVVAGNDRMLRQAAMDCICSLIFQLGQDFNHYIHLLNKVLKHHQVNHVNYQILVTKLQKGDPLPQDLNPDESYAPLADDANYAEIGQKKMVVNQQHLKNAWDASQKSTREDWQEWIRRFSVELLKESPSPALRACASLAGIYQPLARDLFNAAFVSCWTELYDQYQEELVRSIEKALTSPNIPPEILQILLNLAEFMEHDDKALPIDIRTLGKYAAKCHAFAKALHYKELEFEQDQNSGAVEALITINNQLQQSDAAIGILRKAQAYRDVELKETWFEKLQRWEEALAAYKRREKIDPDSFGITMGKMRCLHALGEWKVLSDLAQEKWNQASLEHRKSIAPLAAAAAWGRGQWELMDSYLGVMKEQSPDRSFFGAILAIHRNQFDEAIMYIEKARNGLDTELSALLGESYNRAYNVVVRVQMLAELEEIITYKQNVGDPERQEAMRQTWNRRLLGCQQNVEVWQRMLKVRALVTTPRENLDMWIKFANLCRKSNRMGLAERSLASLETVIPDGNGGTRTISPPEVTYARLKFSWATGRQREALHMLREFTANLTEDFTRFNALVASQSDHNGINGVNGIAEGNHTDIMALRERVGDVNKFRKLLAKSYLRLGEWQTALQRGDWRPEHVREVLNAYSAATRYNRDSYKAWHSWALANFEVVTTIASQASKDGGNLALVPGHIVTEHVIPAIRGFFRSIALSSTSSLQDTLRLLTLWFNHGGDQEVNSVVTEGFTAVNIDTWLAVTPQLIARINQPNFRVRSAVHRLLAEVGKAHPQALVYPLTVAMKSNVARRSQSAGNIMESMRTHSANLVEQADLVSHELIRVAVLWHELWHEGLEEASRLYFGDHNVDGMFATLAPLHEMLDKGAETLREVSFAQAFGRDLAEAKHYCMLYRETEEIGDLNQAWDLYYTVFRKISRQLPQLSTLDLKYVSPKLKDCVDLDLAVPGTYQSGRPIIRIISFDPILHVLQTKKRPRRMTLKGSDGSSYMYVVKGHEDIRQDERVMQLFGLVNTLLDNDSESFKRHLTVQRFPAIPLSQNSGIIGWVTNSDTLHALIKEYRETRRILLNIEHRIMLQMAPDYDNLTLMQKVEVFGYAMDNTTGKDLYRVLWLKSKSSEAWLERRTNYTRSLGVMSMVGYILGLGDRHPSNLLLDRVTGKVVHIDFGDCFEVAMHREKYPERVPFRLTRMLTFAMEVSNIEGSYRITCEAVMRVIRENKDSLMAVLEAFIHDPLINWRLGIRESPDRMPFNAERRQSIVSNVNLEHGVQPSNFSRHRRPSILEGGILDAQEGVPNEAREAQNARALQVLARVREKLTGRDFKPSEELNVSDQVDKLLAQATSVENICQHWIGWCSFW

SEQ ID NO: 963 - protein, 111 aa, Physcomitrella patens subsp. patens
VREQDRFLPIANVSRIMKKALPSNAKISKDAKETVQECVSEFISFITGEASDKCQREKRKTINGDDLLWAMSTLGFEDYVEPLKVYLHKYRELEGEKTSVTKGGDHSAGKE

SEQ ID NO: 964 - protein, 459 aa, Vitis vinifera
MASSLCFLRNPLPWVAALVPVLIFAGFLGFGVLSILITSSALILSTVLFTFSKQRPVVEEESLKEEEKVEEEEEEEEVLRSDHHESLPHMEEVASRTQTETDTITQRDEAQESGMSHQMNEYIDESPDSLSKTESLDQSSTSDESEVEWPFPDNAGQSPECSDGSISDEDSLIEIALLSGHYVDPKQEDPKFNSQKKLPDFTPDSIFQQHSTLMELLAEMNEMNEEENLIEIDISMGSIKCSRRRSKFMADSDNDSGGHNNSNANSELSAREQDRFLPIANVSRIMKKALPANAKISKDAKETVQECVSEFISFITGEASDKCQREKRKTINGDDLLWAMTTLGFEEYVEPLKIYLQKYREMEGEKSSLGGRPGEKDGSGGGGAAAGGGGAMSSGSSGGFNGGGMYGGMMMMGHHQGQAYGSGSFHHMSSSGSGGGGGGGVGRTTPAVRAAAVAGWRQR

SEQ ID NO: 965 - protein, 1516 aa, Streptomyces avermitilis MA-4680
MDARPAAQGMYDPRNEHDACGVGFVATLTGEASHALVEQALTVLRNLEHRGATGSEPDSGDGAGILSQVPDAFLREVAGFELPAAGAYAVGIAFLPEDGTDEAVSQIETIAGDEGLTVLGWREVPVAPELLGATARSTMPAFRQIFVSDGQSQGIDLDRRAFVLRKRAEREAGVYFPSLSARTIVYKGMLTTGQLEPFFPDLSDRRFASAIALVHSRFSTNTFPSWPLAHPYRFVAHNGEINTVKGNRNWMAARESQLVSEKFGSAGSGAKGLERIFPVCTPDASDSASFDEVLELLHLGGRSLPHSVLMMIPEAWENHDSMDAARRAFYQFHATMMEPWDGPACVTFTDGTQVGAVLDRNGLRPGRYWVTDEGLVVLGSEVGVLDIDPARVVRKGRLQPGRMFLVDTAEHRIIEDDEIKAGLAAEKPYADWLEAGEIELEDLPEREHIVHTHASVTRRQQTFGYTEEELRVILAPMAKAGAEPIGSMGTDSPIAALSERPRLLFDYFTQLFAQVTNPPLDAIREELVTSLRSSLGPQGNLLEPTAASCRSVTLPFPVIDNDELAKLIHINADGDMPGMKAATLSGLYRVSGGGESLAARIEEICSEADAAIENGARLIVLSDRHSDAEHAPIPSLLLTAAVHHHLIRTKQRTQVGLLVEAGDVREVHHVALLIGFGAAAVNPYLAMESVEDLVRAGTFLSDIEAEQAIRNLIYALGKGVLKVMSKMGISTVASYRGAQVFEAVGLDEEFVNKYFSGTATKIGGAGLDVIAKEVAARHAKAYPASGIAPAHRALDIGGEYQWRREGEPHLFDPETVFRLQHSTRSGKYDIFKKYTDRVNEQSERLMTLRGLFGFKSGREPISLDEVEPVSEIVKRFSTGAMSYGSISREAHETLAIAMNQLGGKSNTGEGGEDADRLYDPARRSAIKQVASGRFGVTSEYLVNADDIQIKMAQGAKPGEGGQLPGHKVYPWIASTRHSTPGVGLISPPPHHDIYSIEDLAQLIHDLKNANPQARIHVKLVSEVGVGTVAAGVSKAHADVVLISGHDGGTGASPLTSLKHAGGPWELGLAETQQTLLLNGLRDRIVVQTDGQLKTGRDVVIAALLGAEEFGFATAPLVVSGCVMMRVCHLDTCPVGIATQNPVLRDRFTGKAEYVVNFFKFIAEEVREILAELGFRSIEEAVGHAEALDVARAIEHWKAQGLDLAPLFYVPELPEGAALHQVIQQDHGLEKALDNELIKLAADALAANSVTDAQPVRAQVAIRNINRTVGTMLGHEVTKKFGGAGLPDDTIDITFTGSAGQSFGAFLPRGVTLRLEGDANDYVGKGLSGGRVIVRPDRGADHLAEYSTIAGNTIAYGATGGELFLRGRTGERFCVRNSGATVVSEGVGDHGCEYMTGGRAVVLGETGRNFAAGMSGGVAYVIDLDRDNVNVGNAGAVEELTEDDKQWLHDVVRRHAEETGSTVAEKLLAEWSVSAQRFSKIIPSTYKAVLAAKDAAERAGLTETEITEKMMEAATNG

SEQ ID NO: 966 - protein, 1478 aa, Bacillus anthracis str. Sterne
MLNKTNTWTPSLFRDYKNAEHDACGIVSVMEKRKIPTKENIDLCIQSLVKMNHRAGFINGEGDGIGIHIDVPKALWNEKLKSSGYNPTIVDHPHFIVGHFFLNKNENIVDLKNHIRTQLNNENFAILFESDNVINSDALGPLGKQEEPLFWQVALIAENEVVNIEQTLFSVTIKIEENEAIHVASLSRDHVVYKVLGAGDTLVAYYNDLQHPLIASTMTLGHNRYSTNTLSNFFRVQPFSILGHNGEINTIAKLRDQAEMIHVPLTAGGSDSQDLNRTLETLLVQYGYSLFEAMDILFPPIINEIKLYETHLQDLYTYIREAWGHFAQGPAGIISRYKDEAVFSVDSLGLRPVWKVEIESSYIFSSEPGVVSPTEYVAEPKPLAPGEKVGLKWNEQDELVLYEHDDYQTQVYNRFKKKVDVTNYHLHLSIPKTKEIPDACDSMQVETKQYVAFGWDREHIQLLEQMATKGVEPIRSLGHDSPLAALDTDRRNIADFIKESVAVVTNPAIDRDREVEHFSTRTILGERPSLLSDAKKPFVVEMLSPIILEGSVAQSIAQELHTITYEQLIELFNTHSSIATISATFSQAETLQCALSRISSEAITAVNDGASLLLIDDADAHLNERLWIDPHLVTAKVHQVLSENKLRRNCSLVIRSGALRSLHDIVTLHGLGADSINPYLLFATVNDGTKTPITNLYNALNKGLEKVISTIGIHELRGYGRLYSSIGLHEEIANILQITNFLGSNDLAFSLESLAEDAQMRADDYNDPKVRIRKSFHIFPRIWKAIGDVAKGNSYDDYRDKLSELEENNPIAIRHLIQTKETKHVIPTEEVSISIQNHDLPFIISSMSFGSQNEIAFRAYAEAADQLNMISLNGEGGEIKDMIGKYPHTRGQQVASGRFGVNAELLNSSNLIEIKIGQGAKPGEGGHLPGSKVTAKIAEARNATIGSDLISPSNNHDIYSIEDLAQMITEIKTANQLAKVAVKVPVVPNIGTIAVGIAKAGADFINISGFDGGTGAARIHALQHVGLPVEIGVKAAHNALLEANMRHNVEIWADGGIRSVNDALKIMLLGANRIGFGTLSMIAIGCTTCRGCHLDTCHVGIATQIESEAQAKEHGLRRFVPRELESAVAGLLHLFTTFGEELKRLTGNLGYTNLQEIVGRSDLLEQVRGKNLLNLCNLLQTIEHPSVIKTEHVLEKQFEPIHSPHPKELVGVGVEQRVMGGLESCYRVRSKLYEDTKLEPLTLKYTNGSIPGNGLGAYNSENLFIHVNGGAQDGIGKTSFGGGIYITKAKGKDGLYYNGSVGKGFGYGAQKGALYVQGNADARAGIRLSGADMIIGGRMTKPLREKEQGNIGAYSNIKGFAFEYMTNGRALVLGDPGPWICAGMTGGVVYLRHDSSLGLTEQALKRRIAKGANVTLQPISKNGVRDVNELLLDYIRVLNEHEQYEEVALLTPLLDDMQQQFFEIIPKKEQADPSISTE

SEQ ID NO: 967 - protein, 1501 aa, Photobacterium profundum SS9
MSYCLNEQKQGRVAMTLYDPALEKDNCGFGLIAHIEGDTSHKLVRTAISALDRMTHRGGIAADGKTGDGCGLLMKKPESFYRIIANEKDWKLAREFAIGMLFLSQDPVRAEQARAIINDELSKETLSVAGWRTVPINAQVLGPIAKESLPNIEQVFINAPAGWKPRDIDRRLYIARRRIEKRISDDPDFYICSLSSQVTVYKGLCMPADLPRFYTDLGDLRLESSICLFHQRFSTNTQPRWPLAQPFRYLAHNGEINTIAGNRQWARARAYKFASPLLPDLQTAAPFINETGSDSSSLDNMLELFLAGGLDLFRAMRMLVPPAWQNHPDMDPELRAFYDFNSMHMEPWDGPAGIVMSDGRYAACNLDRNGLRPARYVITKDKLITLASEVGIWDYAPDEVSEKGRIGPGELLVIDTKFGKIWHSTDIDNELMGRHPYKEWMDSHVKRLIPFTELGDDQVGSRSLDDNELNTYQKLFGVSHEELDQVLRVVGENGQEATGSMGDDAPMAVLSSKERAITDYFRQMFAQVTNPPIDPLREKHVMSLATCIGREMNVFCETDGHAYRVAFNSPILLYSDLVQLLELDSQYYRNSIIDINYDPSEKDLKQAINDLCDQAERLVRSGTVLLVLSDRGIDKNKFPIPAAMAVGAVQNRLVTTNLRCDANIVIETATARDPHQFAVLIGFGATAVYPYLAYESLGKLIDNGAISKPYRDVMVNFRDGMNKGLYKIMSKMGISTVASYRCSQLFEAIGLHEDIIELCFSGVSSRISGANFDDFQQDLFNLSRKAWLKRKPIEHGGLLKYVHGGEFHAYNPDVVGTLQQAVKSGNYNDYLAFANIVNERPVAAIRDLLALKKSDNPTALEQVEAASALYQRFDSAAMSIGALSPEAHEALAIAMNRLGGYSNSGEGGEDPRRFGTERNSRIKQVASGRFGVTPHYLVNADVIQIKVAQGAKPGEGGQLPGHKVTTEIAKMRFAVPGVTLISPPPHHDIYSIEDLAQLIFDLKEVNPKAMVSVKLVSEPGVGTIATGVAKAYADLITISGYDGGTGASPLSSVKYAGSPWELGLAETQQALVANGLRHKIRLQVDGGLKTGLDVVKAAILGAESFGFGTAPMVALGCKYLRICHLNNCATGVATQDEKLRRDFFKGLPEQVMNYFIGLGQEVRELLAQLGVEQLTDLIGRTDLLVVIGAHTAKQNKLDLSSLLHAPTPIAGKTVYCSEPNTPFDTAQLSNTLIEEALPAIESRSGADLYHDIRNTDRSIGARLSGEIALRYGNQGMAGHPINLYLTGTAGQSFGVWNAGGLNLNLTGDANDYVGKGMTGGKIAIRPPIGSAFKSHEATIIGNTCLYGATGGKLFAAGTAGERFGVRNSGTIAVVEGAGDNACEYMTGGIIAILGKTGVNFGAGMTGGFAYILDEDGDFAGRVNPELIETLPLNNLQIHQEHLRGLIDRHLEETGSSRAQEILADFDQWIPKFYLAKPKSADVNTLLGHQSRSAAELRVQAQ

SEQ ID NO: 968 - protein, 1515 aa, Photobacterium profundum SS9
MSDQELNAQGLYVPELEHDACGIGFVAHLKNRKSHEIVTQALDMLARMEHRGGQGCDPCSGDGAGILLQKPHEFLLEETVKQGIKLPSFDKYGVGVVLFPKDEHKRSQCRDILERNAKRLDLEVIGYRILPVDNSMIGEDPLSTEPQFEHVFITGGANLDPAVLERKLYVLRNYTVRVCLESISNIGDDFYINSLSYKTLVYKGQLTTEQVPQYFLDLQNPSMVTALALVHSRFSTNTFPRWRLAQPFRYIAHNGEINTVRGNLNWMKAREAIIESDLFSQQEINMLLPICQEGSSDSSNFDMALELLVLSGRSLPHALMMLIPEAWQENKTMDPKRRAFYQYHANVMEPWDGPASVCFTDGVQVGATLDRNGLRPSRYTVTKDDFLVMASESGVVKIDPENVQFRGRLQPGRIFVADLEQGRIISDEEVKDSITTAQPYEQWIKDNLLTLKALPEADNMHHQPTPERLLHHQQAFGMSSEEVNEIIVPLAKTGYEPLSAMGADWPLAILSHQSQHLSNYFKQLFAQVTNPPIDPIRERMVMSLNTYLGKDQNLLTETPEHCQKVELESPVLSNAELEKLRAIDKEHLQAKTLDIVFRANGEQGKLERALTRICQYSEDAVNDGYSIIILTDRAVNSNHAAIPAMLAVGAVHHHLIRKGLRAKCDIIIETGDARETHHFATLVGYGANAINPYLVTETLVDLQKKRKLDPELSTDALFNNYRKGVNGGLLKIFSKMGISTLQSYHGAQIFEALGISKSVVDKYFTGTVSRIQGLTIDDIAQEVLIRHRVGYPIREIPIQMLDVGGVYQWKQRGEKHLFNPETISLLQQSTRGKDYKQFQEYCHAVDAQGDNAATLRSQLEFIKNPTGAIPLADVEPIESILKRFATGAMSFGSISHEAHSTLAVAMNRIGAKSNSGEGGEDPVRFDKKDNGDWERSAIKQVASGRFGVTSYYLSNADELQIKMAQGAKPGEGGQLPGDKVDDWIGATRHSTPGVGLISPPPHHDIYSIEDLAQLIYDLKNANRAGRVNVKLVSEAGVGTIASGVAKAKADVVLIAGFDGGTGASPMSSIRHTGLPWELGLAETHQTLLKNGLRNRIVVQSDGQMKTPRDLAVATLLGAEEWGVATAALVVEGCIMMRKCHKNTCPVGIATQNKTLRERFDGRVEDVVTFFQYMAEGLREVMAELGFRTIEEMVGQSHKLKIRSDIGHWKYKNLDLSPVLFIEPPRKGDGIYNQRQQEHNLEHVLDRKLIDIAAPALYQGKQVDAEFDIINTDRSTGTMLSNEISKIYKDQGLPQPMNVKFNGSAGQSFGAFLVKGVNFEVEGDANDYWGKGLSGGTLVLYPDRKSDIIPEDNIIVGNVCFYGATSGESYIRGLAGERFCVRNSGARVVVEGIGDHGCEYMTGGIAVILGQTGRNFAAGMSGGVAYVWDQFDDFETKLNAELVDLDPLEQEDKDLLLGMLTKHAELTGSTVAETFLSNFEANLQNMVKVMPRDYKAVLLKRKAEAENKEELEAVNG

SEQ ID NO: 969 - protein, 219 aa, Aspergillus nidulans FGSC A4
MSSTSPSKEPEVEQEPQSGEEHEQMDKEQDNQTQGQGEFEVKEQDRWLPIANVARIMKLALPENAKIAKEAKECMQECVSEFISFITSEASEKCQQEKRKTVNGEDILFAMTSLGFENYAEALKIYLSKYRETQSARGEHQNRPPSSGYAGGGPVGGAASGPSVVRAGGAAAGGAFPEASDNAGSIMNQGLDPSEQDASAYGYPPMVGQGHNGAGGESY

SEQ ID NO: 970 - protein, 255 aa, Oryza sativa
  misc_feature (217)..(217): Xaa can be any naturally occurring amino acid
MGNVAIGVGRRRRRWPEVEERLTQPRRLLRQLSDVDSGRLRRLIRSGDLAPCFDAAEDDAGLDEDCPICFYFYPSLNRSKCCGKGICTGQGSGYGAWSGPNGGSYTASGHGLGLGSGYGYGSGSAYGAGNGGSASGCGSGSTSCSGSGSGSVGLGTSINVGVGVGANGGTNGGSDCDTGSGSNYGSSTGSSSGYGSGGVSYRSRGHGGSSSIGSGSXGGSSSSSGSGSNSNSIGGSGSSSGAGSGSSASSGYGGS

SEQ ID NO: 971 - protein, 502 aa, Dictyoglomus thermophilum H-6-12
MKTLYESDFIVIRDETKCIRCKVCVRQCANDVHEYDEEEDRIISDNSRCVGCHRCVALCPTKAITIMRNPLEFRENYQWNARAIKDIYKQAETGGILLTGMGNDKAYPIYWDKLLINASQVTNPSIDPLREPMEIKTFIGRKPEKLEFDEEGRLLTKMPPQLELEVPVMFSAMSFGSISLNACESLARAAVEVGTYWNTGEGGLHKKLYPYKHRAIVQCASGRFGVDIEYLYSGAAIEIKIGQGAKPGIGGHLPGEKVGEEVSATRMIPIGTDALSPAPQHDIYSIEDLRQLIFALKEAVNYEKPVGVKIAAVHNVAAIASGIARAGADFIAIDGFRGGTGAAPTRIRDNVGIPIELALAAVDSRLREEGIRNQVSIIVAGSIRNSADVIKAIALGADAVYIGTAALISLGCHLCQNCHTGKCNWGIATQDPKLVKRLNPEIGARRAANLLKAWAHEIKEMLGGMGINAIESLRGNRLMLRGVGLTEKELSILGVKHAGEGM

SEQ ID NO: 972 - protein, 1533 aa, marine gamma proteobacterium HTCC2143
MTNVNNKSRGLYREEFEHDSCGIGFVTNLKGKKSHDIIENALTMLTCMEHRGGTGFDVKSGDGAGILIQIPHDFLVTEASGLGINVPAVGDYGVGMVFFPSAPEHAERCREVLNGAMLELGLSLLGYRPVPADNSMLGAASLESEPQIEQVFIQKPTDLSSEDFERKLFILRKYTAHTINDTIAREADEFYIASMSSSTIVYKGQFTTAQVRQYYLDLQDDRVISGLAMFHSRFSTNTFPAWRRAQPFRYLSHNGEINTVKGNINWMNAREAMFKSVNFTDAELKMLNPICNRGSSDSANLDMAIELLVLSGRPLAQVMMMMVPEAWQTQENMDPVKRAFYEYYACVMEPWDGPASISFTDGKMIGATLDRNGLRPSRYLLTDDGTLIMGSETGALCVDQSTVVEKGRLQPGKIFIADLEKGRIISDDEVKQEICSSQPYGQWLSENKILLSELDAPSASIAQPPLANLRKLQKAFGYSNEDLTVILTQMVGTGKEPLGAMGTDTPLAILSDRPVQLSNYFKQLFAQVTNPPIDPIREELVMSLRGYVGNSHNLLEETPAHCHKLEIDQPVLTNEEFRKLQYIDRGHLQSKTIDITFRATGDKGELKAAVDRLCQYAKDAVNDGYALLLLSDRTVDTDHAAIPSVLATAAVHHYLIRQGLRAKADIILEVGDIRETHHFATVLGYGAAAINPYLALETLYELRDEGVVDAGLNNGQVVAKYIKAVSSGLLKIFSKMGVSTLQSYQGAQIFEALGINSEVIDEYFTGTISRIEGIGLDEIAEEALLRHREGFITDDRIAVDDLLNTGGDYAWRNDGERHLFSPTTIRLLQHSTASNNTEQFKEYAKVVDTQSKEAYTLRGLLEFAPDHQSIPIEDVEPIENIFKRFASGAMSFGSISWEAHTTLAIAMNRIGGKSNSGEGGEDPIRFKPLENGDSLKSRIKQVASGRFGVTSYYLTNADELQIKMAQGAKPGEGGQLPGHKVDAWIGRVRGSTPGVGLISPPPHHDIYSIEDLSQLIYDLKNSNRDARINVKLVSEAGVGTIASGVCKAYADVVLIAGHDGGTGASPLSSIKHAGLPWELGLAETHQTLVRNKLRSRITVQTDGQLKTPRDLAIATLLGAEEWGVATAALVVQGCIMMRKCHLNTCPVGIATQDKELRGRFAGEADIVVNFFTLMAQGLREIMAELGYRTINEMVGQTQSLKLLDNIDHWKYKGVDLSPLLFKEDNADDETLYCSIQQKHLIDDILDRQMMIDSKDALEHQTPVSLEYPVINTDRTIGAMISNEISKKYDAEGLPENTIKVKFNGSAGQSFGCFSAKGLRFELEGDANDYFGKGLSGASLVVYPDKIAKFEPSKNILIGNVALFGATDGKAFIRGVAGERFCVRNSGATAVVEGVGDHGCEYMTGGTAVILGQTGRNFAAGMSGGVAYVLDDDKDFASKCNMEMVELETVESAEDIAHLKGLISEHQETTQSDVAEGLLADWDGALKRFVKVMPVDYKQMQGYMSQARSTGKFETEYDVAVEAFDMHLENLAAQ

SEQ ID NO: 973 - protein, 2248 aa, Ostreococcus tauri
MCAIESEGEDDKDGGVNAGEFALRDRAETEARSADAGIFLGFGTRADTAKKMGGLRAIDQLIDVEFGEEVEKVRKFAEYVLEVMPPGGEERAQTKGEGARHPVDARNPLWGLPSAPQLIELMTAVIGRLVAHGGALTTDIVDSHVQRAVDLLETKEDNKEALSMKHYAAVRTLSELARNAPTIFNVHVQIVVVAIWSALRDPSLQVREAAVSALRDCLMVIEQRETRYRVQWYYSLYESCRVGLRSESSVEAMHGSLLALGELLRYTGEFMLSRYREVAQTIFRLQDCKASIIRRTIVLLIPKLAVFSPRRFAESYLVESCALILTTIRASSDSGAGFEALSQLADAMSHVINLSTISPEKADVGGVLLRYLPEVSAVMYDLFTTRARDQQGTPEALKCAGSLMNSLNEAWKPHFMNLMTPMFMGDLSEALVSGLDFVAKSSPELMPEIQMKLADSIESAISQGPETVTPNRKTVQLALRTMRTFPFEAVALLRAIKKNVVPYLSDSSAETRLEAALTCCSTLRLRVGSSKSATRAVEYIMAALIPVAVGDTDASIRSSLLSDFCRPCASIDSYLGQAKSLRALFLTVNDESVTIRMLGIELLGHLATRNPAYVLPALRAHMLQLLAELEFSSESLHREESAKVLAVLIRSCPRFVAPYLSAILNVLTATLRADEGGSSATSTSTRESMTALKGRLQRTGSSGSGALTSSIPATLRKRRDVTGREKAAVLGTIGELANVSGSEIKPFVQPLLALLLIALKSPSTRDEAVVTLGKLIESSGYVADPFTTHPQLLPQLLRILANERGIARNEVLRTLGCLGALDPYAHKANEIRLHGEGVLSADGVRGVRQASLKLAAGTGEDDILDEFLNNADGDDEIDVLPTLHLTSLSDEYYPTIALNSLLRILRDPTRTSHRLMVIRSIVYIFQVLDTGCVQYLPNVLPVMLNVIRTSDPSRREDMFVELATLVSVVKAHIRRYLTDIFELMHLTWDVTGMSKNTILLCEELSFALNDEFRKNLPTIIPSVVAALGEAERLRKYDLVPHILHALECFGVSLNDHLYLLMPPIMRLLKHSVISVPVEIKKCTLESLRRLLPIMNLSDQAALIVHSLTRVLDDERMELRMEALCVLTSLEVSLGRDYALFLPVVKRAVSKCGVNDPAFDEMVKRVESGNVLLYPDEELETSSVVATARKKPDIQRRLSVNQLAIRRAWESSQRSTKEDWLEWMRQLALDLLKSSPLPSLRACSELAQVQPNLARDLFCASFVSCWAELNESHREVLVRSLEAALGSPTIPPEIVSILLNLCEFMEHDEKPIPVDVRTLGMIAERSRAYAKALHYKELEFVTNPGACVAAIIAINNQLQLPEAARGVLVYAQENLSVVIKESWYEKLEQWDDALEAYKRKMDEVMHVTTPNAMEERREAMAGQLRCLNALAEWEEIHRISEIATKSNVDWDDYSIDVTTIATKAAWYLGDWEQMEVLTDKLERDQRSQGRLPTADRAELVSKHKTSVVNVTDCDFYKSIIAFRKGNQEEARTHLSAARDKLGTELPALVRESYDRSYRALIRAQQLTELDEVIEYAQLTAVASPAALQRQEVIRKMWRDRIYLVKRDVEVWQELLQVRSLVLPMSEETDIWLKFAALNRKQGRDRQSRRTLLRLLGYDPMLCAEETAGFGAGSGRPKVMFAFIKHLWHTGQKRQAFMRLQSLAHELRVTWENQRSSGQPPEVEHNKTVSRAFLKLGKWRWALTDCMNDETLTDVLMAFRTATAADQQWSKAWHHWALFNATAMEHFHRQGGASTQDAMQHVAPAISGFFRSIALGGGKTNAKQGGSLQDILRLLTLWFNHGGTAEVETALIEGFGHVSIDTWLAVIPQIVARIHTHVIPVRNLIYQLLIRVGRQHPQAVLYPLLVACKSQSTSRRAAANAILDNVRQHSALLVEQAQIVSLELIRVAIVWHEAWHEALEEASRLYFGEQNVDGMMAVLTPLHHILERQGAETLQEMGFVQNYGRELQEAHDLCQKYQMSKREEELNQAWDLYYHVFKRITKQLPTMTTLELQYVSPRLLNSRGLELCVPGNYISRATEQAKSERCTDDAYGKDYGYLLKGHEDLRQDERVMQLFGLVNTLLNSNMTTQQKDLGIARYAVVPLSPNSGLIGWVPNCDTLHALIREYREAHKIPLNLEHRMMLAMAPDYDHLPLVNKVEIFMHAVENTSGGDLAHVLWLKSRSSEHHVHGGLPSRTRRSTSIKLDDRSIQR

SEQ ID NO: 974 - protein, 1507 aa, Clostridium acetobutylicum ATCC 824
MTRNIGYPEKQGLYDPAFEKDNCGIGFITSIKGEKSHDIVKKGIEILVNLTHRGAVGADTKTGDGAGIMLQIPDEFFRINCDNLGIELPESGKYAVGMIFLPKETALSYQCEGILERAVEEQGQKVLGWRVVPRDNRSIGETAKGSEPVIKQIFIGSNCENQTDFERNLYIIRKRAESEVKRLVERGSEYFYICSLSSRTIVYKGLLLADQIKSFYMDLNDINFKSAIALVHQRYSTNTFPTWDLAQPFRFLAHNGEINTIRGNRNWMNAREGVLKSDVFGKKISDLFPIVNPKGSDSTSLDNTFELLVADGRPLAQALMMLIPEAWENNESMETWKRAFYEYQGTLIEPWDGPAAVAFTDGQQVGAVLDRNGLRPARYLITKNNIAVLASEAGVLKFEPEEIAYKGRLKPGKMFLIDTKEGRIIDDEEIKKSICLDKEYEKIVEKNKFTLDDFEATVGEEVVNDEVLKEKQQAFGYTLEDLRVILGPMAATGKEPLGSMGNDAPLAVLSNKSQLLFAYFKQLFAQVTNPPIDPIREEMVTSLVNYIGSQGNILNKDTEAVPFIEINSPILTDLEMEKIKNLRNKDFKTTTIPITFKYDTGIDGFKEALEKICERASKRIEEGFNVIVLSDKHIDSYEAAIPSLLALSAVQHHLIKEKTRTKVSIVVETGEARETMHFALLVGYGATAVNPYIAFESIRQIVREKDIEVESQEKAIENYIYAINHGILKILSKMGISTLRSYHGAEIFEAVGLSSKLVSEYFEGTPSRIEGIGIDEVAKEVLNRYKNAFNKIRKPVSVLSVGGQYSWRKNGEYHLFNPDTIYRLQVSARTGNYKMFKEYSHIINDQDKNLCTIRGLFEFKDLKPIPLEEVEPVNEILKRFSSGAMSFGSISKEAHETIAIAMNRIGGKSNSGEGGEDNERYKADANGDLRRSAIKQIASARFGVTAEYLVNADELQIKMAQGAKPGEGGQLPGRKVDVNIAKVRHSTPGIDLISPPPHHDIYSIEDLAQLIFDLKCVNPSSRISVKLVSEVGVGTVAAGVAKAHADSILISGHDGGTGASPISSIKHAGIPWELGLSEAQQVLLLNNLRSRVVLQTDGQLKTGRDVVIAALLGAEEFVFASTILVSLGCVMLRNCHLNTCEMGIATQDPELRKRFKGKPEYVINFLTFIAQEVREYMAQLGFRTINEMVGRVDKIQAKNAVSHWKAKGIDLSKILYKPDMPKRIKPYCTVAQEHGLDRIMDYKLIQIAKDALNSKKSVVGNFEIKNVDRSVGAMLSGKIAKIYGENGLPDDTIRFNFFGSAGQSFGAFGMKGMTIVLEGEANDYVGKGLSGAKIVIKTPERASYKQEENVIAGNTILYGATSGKLFINGMVGERFAVRNSGAYAVAEGTGDHCCEYMTGGIAVVLGETGRNFGAGMSGGMAFILDENDTFNDKCKAETLEITSDYDEEDEKVLRGLIEEHYNYTNSDKAKVILENWGEYKTKIKKVIPTAYKLILEKSKQKAAAVNM

SEQ ID NO: 975 - protein, 503 aa, Methanosarcina barkeri str. Fusaro
MTLGSVPSKFKVSIDRDQCMDCGRCIENCSYGVYRREGDKILIESRKCTGCLRCVAMCPRDAITLTEKPIDYRSHPLWTREVREDIIKQARSGKIILSGMGNARDLPVVYDRLLLDACQVTNPSIDPLREPMELRTYIGKKPSKLNFRKTESGDVELETKLAPNLKLNTPIMIGHMSFGAISLNAQLSMAKAVTELGTYMGTGEGGLHRDLYPYQDHMVVQVASGRFGVNIDYLERGAAIEIKIGQGAKPGIGGHLPGEKVNEEVSRTRMIPVGSDAISPAPHHDIYSIEDLVQLIRSLKEATEWKKPVFVKIAAVHNVAPIAAGIARSSADAVVIDGFRGGTGAAPKVFRDNVGIPIEVAIASVDQKLREQGVRNEISIIASGGIRSSADLAKSIALGADAVNIGTAALVALGCRVCGNCYRNLCPWGIATQRPELVSRLDPERGAVQVSNLIKGWTYELSELMGAAGINSIESLRGNRDRLRGYMLDEEMLKILDVLPAGA

SEQ ID NO: 976 - protein, 175 aa, Brassica napus
MGDSDKDSGGGQNGQSPLSPREQDRFLPIANVSRIMKKALPANAKISKDAKETMQECVSEFISFVTGEASDKCQKEKRKTINGDDLLWAMTTLGFEDYVEPLKVYLQRFREIEGERAGLGRPQTGGEGGEHQRDAGLGDGGGFYGGGGMQYHQHHQFLEQQDRVYGSTGGGGGDG

SEQ ID NO: 977 - protein, 555 aa, Colwellia psychrerythraea 34H
MTIMQKALWFIASVGNFSAGYFYMHSESAFSLILLISTLLYSIIGLYDVFHSRHSLNRLYPVVAYLRYFLESYRVEIQQYFIANDTEERPFNREQRTLVYQRAKNVRDTIAFGTQRNLVEDNYLSLWHSLAPTHIKEAAKRVIIGGDSCQQPYLASYLNISAMSFGSLSSNAIEALNLGAKKAGCYHNTGEGAASPYHLKHGGDIVWQLGTGLFGCRDEQGRFNPATFEKTAKLPQIKMIEIKLSQGAKPGHGGVLPKAKITDEIAHIRHISKDKDCISPAVNPECTSPKDLLAFIEQLRSLSGGKPIGFKLCIGNPAEFLSICKAMLETGITPDFITVDGAEGGTGAAPVEFTNRLGLICLEGISIVNNALVGVGLRDKIKIIASGKTASSFDLLAKIAAGADVVNAARTMMMAIGCIQSRHCNTNLCPTGVATQDPARAKAIDIESKSDRVKNFHDNTVASFFELVGSMGLDDPAKLIPQMIKRRSPYGVQMSMGSIVAPLPAMALVDPLQNKLDLDESWQHWWQASSAEQFYVDDIFILKSPEFHQVKTNRA

SEQ ID NO: 978 - protein, 191 aa, Impatiens arguta
LPNTFLDLYLQIPHKLHTWFIFFMRNVHVANMANDTVNNRRYKPTFEAYLLNPNEASWYRVHFPLIPPGYSPSASSGGLVCWVSNEPGSKSLLLSNPIIGSISPLPPTLVPRLFPSVGLTVTNSSVDVTVAGDDMVSPYAVKNISSESFHLDNGGFYSVWGTTSCLPRLCSLESGQMVHAKGKFYCMNYSL

SEQ ID NO: 979 - protein, 1527 aa, Mycobacterium leprae TN
MTAKRVGLYNPAFEHDSCGVAMVVDMYGRRTRDIVDKAITALLNLEHRGAQGAEPRSGDGAGILIQVPDAFLRAVVDFELPAASSYATGIAFLPQSSKDAAAACAAVEKIAVAEGLHVLGWRNVPTDASSLGALSRDAMPTFRQVFMAGATGLTLERRAYVIRKRAEHELGTKGPGQDGPGRETIYFPSLSSQTFVYKGMLTTPQLKAFYRDLQDERLTSALGIVHSRFSTNTFPSWPLAHPFRRIAHNGEINTVTGNENWMRAREALMKTDIFGSKADMEKLFPICTPGASDTARFDEALELLHLGGRSLVHAVLMMIPEAWERHESMDPARRAFYQYHASLMEPWDGPASMTFTDGVVVGAVLDRNGLRPSRIWITDAGLVVMASEAGVLDLDPSIVVRRMRLQPGRMFLVDTAQGRIVSDEEIKAKLAAEHPYQEWLDKGLVPIDELPAGKYVRMPHHRLVMRQLAFGYTYEELNLLVAPMVRAGSEPIGSMGADTPIAVLSRRPRMLYDYFHQLFAQVTNPPLDAIREEVVTSLQGTTGGEYDLLSPDENSCHQIWLPQPILRNYELAKLVNLDPADEVNGRPHGMRSTVVSCLYPVADAGAGLAAALTEVRAQASAAIVGGARVIILSDRNSDEQMAPIPSLLSVAAVHHHLVRDRTRTHVGLVVESGDAREVHHMAALIGFGAAAVNPYLVFESIEEMLDRGVIDGIDRKTALNNYIKATGQGVLKIMSKMGISTLASYVGAQLFQAVGISEDVLDEYFSGLSCPTGGITLDDIAAEVAVRHRVAYLDRPDERAHRELEVGGEYQWRREGEYHLFNPETVFKLQHATRSGQYKIFKEYTRLVDDQSERMASLRGLLKFRSGVRTPVPLDEVEPASEIVKRFSTGAMSYGSISAEAHETLAIAMNRLGGRSNSGEGGEDVNRFEPDPNGDWRRSAIKQVASARFGVTSHYLTNCTDIQIKMAQGAKPGEGGQLPGRKVYPWIAQVRNSTPGVGLISPPPHHDIYSIEDLAQLIHDLKNANPSARVHVKLVSENGVGTVAAGVSKAHADVVLVSGHDGGTGATPLTSMKHSGAPWELGLAETQQTLLLNGLRDRIVVQVDGQLKTGRDVMIAALLGAEEFGFATAPLVVAGCIMMRVCHLDTCPVGVATQNPLLRKRFNGKPEFVENFFMFIAEEVREYMAQLGFRTFNEAVGQVGALDTTPVREHWKAHSIDLTPVLHEPESAFMNQDLYCSSRQDHGLDKVLDQQLIAVSRDALDFGKPVRFSTTIGNVNRTVGTMLGHELTKAYGAQGLPDGTIDITFEGSAGNSFGAFVPKGITLRVYGDANDYVGKGLSGGRIVVRPSDSVPLNYVAEDNIIGGNVILFGATSGEVYLRGVVGERFAVRNSGAHAVVEGVGDHGCEYMTGGKVVILGRTGRNFAAGMSGGEAYVYDSDGELPANLNFEMVELEPLDFDDAAWLYATIQAHVDATDSAVGQRILAGWSEQQRYFVKVMPKDYKRVLQAIALAERNGVDVNKVIMEPAHG

SEQ ID NO: 980 - protein, 184 aa, Impatiens walleriana
SNTFLDLYLQIPNKLHTWFIFFLQNVHAASMTNDGINSRRYKPTFEAYLLNPNDASWHRIHFPMIPPGYSPAASSGGLICWVSNEPGSKSLLLSNPIIGSISPLPPTLVPRLFPSVGLAVTNASVDVTVAGDDMVSPYAVKNISSESFHLDNGGFYSVWGTTSCLPRLCSLESGQMVLARGKFY

SEQ ID NO: 981 - protein, 1648 aa, Arabidopsis thaliana; identical to SEQ ID NO: 750

SEQ ID NO: 982 - protein, 182 aa, Impatiens arguta
TFLDLYLQIPHKLHTWFIFFMRNVHVANMANDSVNNRRYKPTFEAYLLNPNEASWYRVHFPLIPPGYSPSASSGGLVCWVSNEPGSKSLLLSNPIIGSISPLPPTLVPRLFPSVGLTVTNSSVDVTVAGDDMVSPYAVKNISSESFHLDNGGFYSVWGTTSCLPRLCSLESGQMVHAKGKFY

SEQ ID NO: 983 - protein, 2145 aa, Saccharomyces cerevisiae YJM789
MPVLKSDNFDPLEEAYEGGTIQNYNDEHHLHKSWANVIPDKRGLYDPDYEHDACGVGFVANKHGGQSHKIVTDARYLLVNMTHRGAVSSDGNGDGAGILLGIPHEFMKREFKLDLDLDIPEMGKYAVGNVFFKKNEKNNKKNLIKCQKIFEDLAASFNLSVLGWRNVPVDSTILGDVALSREPTILQPLLVPLYDEKQPEFNETKFRTQLYLLRKEASLQIGLENWFYVCSLNNTTIVYKGQLTPAQVYNYYPDLTNAHFKSHMALVHSRFSTNTFPSWDRAQPLRWLAHNGEINTLRGNKNWMRSREGVMNSATFKDELDKLYPIIEEGGSDSAALDNVLELLTINGTLSLPEAVMMMVPEAYHKDMDSDLKAWYDWAACLMEPWDGPALLTFTDGRYCGAILDRNGLRPCRYYITSDDRVICASEVGVIPIENSLVVQKGKLKPGDLFLVDTQLGEMVDTKKLKSQISKRQDFKSWLSKVIKLDDLLSKTANLVPKEFISQDSLSLKVQSDPRLLANGYTFEQVTFLLTPMALTGKEALGSMGNDAPLACLNENPVLLYDYFRQLFAQVTNPPIDPIREANVMSLECYVGPQGNLLEMHSSQCDRLLLKSPILHWNEFQALKNIEAAYPSWSVAEIDITFDKSEGLLGYTDTIDKITKLASEAIDDGKKILIITDRRMGANRVSISSLIAISCIHHHLIRNKQRSQVALILETGEAREIHHFCVLLGYGCDGVYPYLAMETLVRMNREGLLRNVNNDNDTLEEGQILENYKHAIDAGILKVMSKMGISTLASYKGAQIFEALGLDNSIVDLCFTGTSSRIRGVTFEYLAQDAFSLHERGYPSRQTISKSVNLPESGEYHFRDGGYKHVNEPTAIASLQDTVRNKNDVSWQLYVKKEMEAIRDCTLRGLLELDFENSVSIPLEQVEPWTEIARRFASGAMSYGSISMEAHSTLAIAMNRLGAKSNCGEGGEDAERSAVQENGDTMRSAIKQVASARFGVTSYYLSDADEIQIKIAQGAKPGEGGELPAHKVSKDIAKTRHSTPNVGLISPPPHHDIYSIEDLKQLIYDLKCANPRAGISVKLVSEVGVGIVASGVAKAKADHILVSGHDGGTGAARWTSVKYAGLPWELGLAETHQTLVLNDLRRNVVVQTDGQLRTGFDIAVAVLLGAESFTLATVPLIAMGCVMLRRCHLNSCAVGIATQDPYLRSKFKGQPEHVINFFYYLIQDLRQIMAKLGFRTIDEMVGHSEKLKKRDDVNAKAINIDLSPILTPAHVIRPGVPTKFTKKQDHKLHTRLDNKLIDEAEVTLDRGLPVNIDASIINTDRALGSTLSYRVSKKFGEDGLPKDTVVVNIEGSAGQSFGAFLASGITFILNGDANDYVGKGLSGGIIVIKPPKDSKFKSDENVIVGNTCFYGATSGTAFISGSAGERFGVRNSGATIVVERIKGNNAFEYMTGGRAIVLSQMESLNAFSGATGGIAYCLTSDYDDFVGKINKDTVELESLCDPVEIAFVKNLIQEHWNYTQSDLAARILGNFNHYLKDFVKVIPTDYKKVLLKEKAEAAKAKAKATSEYLKKFRSNQEVDDEVNTLLIANQKAKEQEKKKSITISNKATLKEPKVVDLEDAVPDSKQLEKNSERIEKTRGFMIHKRRHETHRDPRTRVNDWKEFTNPITKKDAKYQTARCMDCGTPFCLSDTGCPLSNIIPKFNELLFKNQWKLALDKLLETNNFPEFTGRVCPAPCEGACTLGIIEDPVGIKSVERIIIDNAFKEGWIKPCPPSTRTGFTVGVIGSGPAGLACADMLNRAGHTVTVYERSDRCGGLLMYGIPNMKLDKAIVQRRIDLLSAEGIDFVTNTEIGKTISMDELKNKHNAVVYAIGSTIPRDLPIKGRELKNIDFAMQLLESNTKALLNKDLEIIREKIQGKKVIVVGGGDTGNDCLGTSVRHGAASVLNFELLPEPPVERAKDNPWPQWPRVMRVDYGHAEVKEHYDRDPREYCILSKEFIGNDEGEVTAIRTVRVEWKKSQSGVWQMVEIPNSEEIFEADIILLSMGFVGPELINGNDNEVKKTRRGTIATLDDSSYSIDGGKTFACGDCRRGQSLIVWAIQEGRKCAASVDKFLMDGTTYLPSNGGIVQRGYKLLKELASQV

SEQ ID NO: 984 - protein, 171 aa, Impatiens nubigena
FYLQIPNQLHTWFIFIPIQTTNIPNNIPNRRYKPTFQAFLLNPNEHSWHQIHFPSIPPGYSPSSSSGGLICWVSTEPGSKNLLLSNPIIGSISILPPTLVPRLFPSVGLTVTNSSVDVTVAGDDMVSPYAVKNISSESFHLDSGGFYSVWGTTSCLPRLCSLESGQMVHAK

SEQ ID NO: 985 - protein, 419 aa, Triticum aestivum
  misc_feature (310)..(310): Xaa can be any naturally occurring amino acid
MGNPGRGRPRRPPVDERYTAPQGLYPHPDIDLKKLRRLILEAKLAPCHPGADDPRPDLDECPICFLFYPSLNRSKCCAKGICTECFLQMKSPTSCRPTQCPYCKMLNYAVEYRGVKTKEEKGVEQIEEQRVIEAQIRMRHQELQDDAERLKNKQVAASTDEVTTARVESCDTGGTSTPAASAAQGNDVVSGQVQHSELLLKNAERLRQLRDNNFDMDLEEVMLMEAIWLSVQDQEALGNPGSIGAVPPTLPLRCYDASGAASAGAAPPGGFACAVAALAEQQHMLGDPSSAATCQTSRHDILSRSQKVLXEDLSIAGSSSSATRVEEPSNGRTPQARDGADYSNNDGWSEAAEASTSCAGSDVTVEAGAASLAAAASDVSSIGSGNVPDSFEEQMMLAMALSLVDARGVGGSPPGIAWR

SEQ ID NO: 986 - protein, 490 aa, uncultured archaeon GZfos23H7
MKTPAIKVASSRFPNEISEIEVKRDVSKCINCGTCAKVCPFGVHERKTGYNRVSKPLSYLCIGTSCEDKPFYCVNHCPRKALSLDISSEYSTIGDYRWTRDLIIGTWKQAETGMPLKGRRYEIGNSGGGFDRIFFNFPKDEDGIEEEDISTEIDLNRRKGKKISIEVPFYGGGMSFGSVSLSVMLARAKAARAWGTFTCTGEGGYPEKLKEYDDNVITQVATGLFGVMEDTIQRVKIVEFKYAQGAKPGLGGHLLGDKVTPEVARMREAVLGSSLFSPFPFHSVYSVEDHKKHVDWIKEINPDVIVSVKVSTPTDVDMVAVGSYYAGANIIHLDGSYGGTGAAPDIAKKNIAMPIEYAIPKVHEFLKGEGIRDKMTLIASGGIRTAHDAAKAIALGADGVVIGTAELVALGCVRCGNCESGRGCPRGIATTDPELSKSVNVEWGAQRLVNLYAAWRSEIVDILGRFGMQSIKELVGRYDYLIENHEIPRD

SEQ ID NO: 987 - protein, 1491 aa, Alkalilimnicola ehrlichei MLHE-1
MDNENLSAPTTLYRPEFEKDNCGFGLIAHMDGEPSHWLVDTAIKALARLTHRGAIAADGKSGDGCGLLITKPDRFLRAVAQEAGIRLGERYAVGSVFLSRDDASAARARQTLEDTLAEQGLEPAGWREVPVDTEACGEEALATLPRIEQLFVNAGAEMDEQALERRLFIARRQAEKALSDDPAFYVPSLSARVLSYKGLVLPENLPVFYRDLQDERLASSMAVFHQRFSTNTLPQWRLAQPFRYLAHNGEINTIQGNRNWANARSHVFETELLDMAEVRPLVNTDGSDSSSLDNMLDVMLNGGMDIFRAMRLLVPPAWQNVDSMDPDLRAFYEYNSMHFEPWDGPAGIVLTDGRHAACVLDRNGLRPARWVITDDRHITLASEVGVWDYAPEQVVAKGRLKPGEMLAADTHTGDLLQPADIDQRVKSAQPYKQWLKRHMRELGSSLPNGTSPRRASLNDRELDTYQKLFNVNFEERDHIIKVLAESGQETVGSMGDDTPLPVLSRKIRSPFDYFRQQFAQVTNPAIDPLRERIVMSLETCIGRERNLFQEKEEYAKRLTVDSPVLSDDKFTALLALGDRDPDYRHVRIDLNYDPDQDLKSAIEAVCDQAEQAVRDGTVLVVLSDRTITRDQLPIHAALATGAVHHRLVARGLRCDANIVVETGTARDPHHFAVLVGYGATLVYPYLAYDCVAQMARSGRIDNQNIAELLRNFRKGINKGLYKICSKMGISTIASYRGAQLFEAVGLHQEVVDLCFTGTTCRIQGTHFEDLEADQKALAAKAWRPSQPIEQGGLLKFVHGGEYHAYNPDIVAWLQRSVESGRYEDYQHYAKLVNERPAAVLRDLFKVKEAPQALPLEEVEPEEAILPRFDSAGMSLGALSPEAHESLAMAMNRLGGRSNSGEGGEDEERYGTDRVSKIKQIASGRFGVTPHYLVNAEVLQIKVAQGAKPGEGGQLPGHKVNEMIARLRYSKPGVALISPPPHHDIYSIEDLAQLIFDLKQVNPEALVSVKLVAEAGVGTVAAGVAKAYADLITIAGYDGGTGASPLTSVKYAGGPWELGLSETHQTLRQNNLRDKVRLQTDGGLKSGLDVIKGAILGAESFGFGTAPMVAMGCKYLRICHLNNCATGVATQQKVLRLKHFIGTPDKVMNFFRFVARETREWMARLGVRRLEDLIGRTDLLEILPGDTPRQQRLDLRPILSDWGLAEDKPQFCLSERNVPYDKGELAEQMVRDALPAIESKAGGTFEYAVKNNNRSIGARLSGEIARRHGNQGMADKPITVQLSGSVGQSFGVWNAGGLNLDLEGDANDYVGKGMAGGRLTLRPPRGSRFDTRETPIMGNTCLYGATGGKLFAAGLAGERFAVRNSGATAVVEGVGDHGCEYMTGGVVCVLGGTGLNFGAGMTGGIAFVLDQDNRFVDRYNHELIDINRLVSENRQAHREYLRRLLSEYVEATDSAWGHEVLDNFRDYVNRFWLVKPKAADINTVLDTLRQAA

SEQ ID NO: 988 - protein, 848 aa, Dehalococcoides sp. VS
IDRVNRARAPYKRWLKQGMTYLHSELIDPNLAAEPFDHETLAGFQKLFQLTREEREQVLRPLAEIEQEATGSMGDDVPMAVLSQQVRPLYDHFRQAFAQVTNPPIDPLREDCVMSLATQIGREGNVFVDGPGNVGHIHLNSPVLAQRKLRQLLAMSPYDQSHRYIDLNYTAEEGLKAALLRLCREAEDATRDGIVLLIVSDRRPRRDALMMHALLATGAIHQHLVRVGLRCEANLIIETGTARDPHHFACLIGFGATAVYPYLAYQTLHDLGARGILRTKHGEVAQIGRSYRRAIKKGLLKIISKMGIATIGSYRGAQLFEIIGLDKEVVELCFTGTPSRISGAGFELLQGDDETLADIAWNPNRLPEIGGLLKYTPGGEYHLFNPDVVTRLQRAVGSGEWSDWQHYAEAVNERPTAALRDLLELEADPARAIPLEDVESVEAIVRRFDSAAMSLGALSPEAHEALAIAMNRLGGRSNSGEGGEDPARYRSDKVSKIKQIASGRFGVTPEYLVNAEVLQIKVAQGAKPGEGGQLPGHKVNELIARLRYAMPGIGLISPPPHHDIYSIEDLAQLIHDLRQVNPEALISVKLVSHAGVGTIATGVAKAGADLITVSGHDGGTGASPLSSIRYAGTPWELGLAEARQALIGNDLRERVILQTDGGLKSGLDVVKAALLGAESFGFGTAPMIALGCKYLRICHLNTAPPAWPLRTTRCAATISPACRNGSRTSSACSPRKCGIGWPRWACARSAKSSAAPTCCANATATARASIGSTCRRCWPAPAWPTVATAGCRRHRPNPKAWRCNSTPNWPRRSRTRPAASTATRSATPTAASARACPGASPEHTVTAA

SEQ ID NO: 989 - protein, 541 aa, Bradyrhizobium sp. BTAi1
MDTLLLPFSPRYIVLTICASTTALLLILGVYDRKILDLVLIPLLIFGALTLLGVRDLLQSSHAVLRNYPISAHLRFLLEEIRPEMRQYFFESEKDGMPFSRDTRAVVYQRAKMVLDKRPFGTQEDVYREGYEWMHHSVAPKPRAEEKYRITIGGPDCAKPYSASVFNISAMSFGALSPNAVRALNGGAKRGGFAHDTGEGGFSPYHAEMGGDIIWEIGSGYFGCRHRDGSFDPDAFARVAATEQIKMVELKVSQGAKPGHGGVLPAAKVSEEISKIRGVAMGEDCISPPAHRAFSTPIGMMQFIGEMRRLSGGKPAGFKLCIGHPWEFLAICKAMLETSIYPDFIVVDGNEGGTGAAPLEFMDHLGMPMREGVNFVHNALIGLNVRDRIKIGASGKVATAFDMARAMSIGADWCNSARGFMFALGCIQSLSCHTDRCPTGVATQDPTRARALVVPHKVDRVYNYHHATLHALAELLAAAGLEHPQDLRPIHFSQRTSTTEVASFAKLYPSLRPGELLDGTQDVRFRDAWAMARPDTFAAVQ

SEQ ID NO: 990 - protein, 43 aa, Zea mays
SANNYLQFYPSLNRSKCCAKGICTECFLQMKSPTSCKPTQYPD

SEQ ID NO: 991 - protein, 496 aa, Shewanella sp. ANA-3
MQELNWFMWGLDLFSGLFLILVGFVVLAIVYMYIADKLQTKQAVRHNYPVIGRFRYLFEKQGEFFRQYFFAQDREELPFNRAERSWVYRAAKNVDRTIAFGSTRPLDSTGAIMFMNTAFPTQDEDITPILPQTIGPHCREPYTTKAICHISAMSFGALSRPAVTALSHGAAQAGCWLNTGEGGLSPYHLKGGCDLVFQIGTAKYGVRNEHGHLDDDKLKEIAAHPEVKMFEIKMSQGAKPGKGGILPGIKVTEEIAKIRGIPQGHDSISPNGHIEFKNVGDILDMIARVREVTGKPTGIKAVLGDVQWLEDFCDEIERRGEASAPDFFTLDSADGGTGAAPQPLMDYVGLPLKESLPILVNILIQRGLRKRIKVIASGKLIVPSRVAWALALGADFIASARGNMFALGCIQALQCNKDTCPTGITTHNKKLQQGLDPRDKSTRVASYNHNLHHDLALIAHSCGVTEPRQLKPSHVRIMLESGLSVSLDKYYSHINQ

SEQ ID NO: 992 - protein, 1527 aa, Mycobacterium avium subsp. paratuberculosis K-10
MTPKRAGLYNPAFEHDACGVAMVVDMHGRRSRDIVDKAITALLNLEHRGAQGAEPRSGDGAGILIQVPDAFLREVVDFELPPEGSYATGIAFLPQSSKDAATACAAVEKIAEAEGLTVLGWRNVPTDDSSLGALSRDAMPTFRQVFMAGASGMTLERRAYLMRKRAEHELGTKGPGQDGPGRETVYFPSLSGQTFVYKGMLTTPQLKAFYLDLQDDRLTSALGIVHSRFSTNTFPSWPLAHPFRRIAHNGEINTVTGNENWMRAREALIKTDVFGTEADVEKLFPICTPGASDTARFDEVLELLHLGGRSLAHAVLMMIPEAWERHESMDPARRAFYQYHASLMEPWDGPASMTFTDGTVIGAVLDRNGLRPSRIWVTEDGLVVMASEAGVLDLDPATVVRRMRLQPGRMFLVDTAQGRIVSDEEIKAELAAEHPYQEWLDRNLVPLDDLPQGDYKRMPHDRLVKRQQTFGYTYEELNLLVAPMVRTGAEPIGSMGTDTPVAVLSQRPRMLYDYFQQLFAQVTNPPLDAIREEVVTSLQGTTGGERDLLTPTELSCHQIVLSQPILRNRELAKLVNLNPDDEVNGRPHGMRSKVIRCLYPVAEGGAGLAAALEDVRAQASAAIADGARVIILSDRESDEKMAPIPSLLAVAGVHHHLVRDRTRTHVGLVVESGDAREVHHMAALVGFGAAAINPYMVFESIEDMLDRGVIEGIDRNTALNNYVKAAGKGVLKVMSKMGISTLASYTGAQLFQAVGISEDVLDEYFTGLSCPIGGITLDDIAADVAARHALAYLDRPNERAHRELEVGGEYQWRREGEYHLFNPETVFKLQHATRTGQYKIFKDYTRLVDDQSERMASLRGLLKFRAGVRPPVPLEEVEPASEIVKRFSTGAMSYGSISAEAHETLAIAMNRLGGRSNSGEGGEDVKRFDRDPDGSWRRSAIKQVASGRFGVTSHYLTNCTDIQIKMAQGAKPGEGGQLPGHKVYPWVAEVRHSTPGVGLISPPPHHDIYSIEDLAQLIHDLKNANPAARVHVKLVSENGVGTVAAGVSKAHADVVLISGHDGGTGATPLTSMKHAGAPWELGLAETQQTLLLNGLRDRIVVQVDGQLKTGRDVMIAALLGAEEFGFATAPLVVSGCIMMRVCHLDTCPVGVATQNPVLRERFTGKPEFVENFFMFIAEEVREYMAQLGFRTLNEAVGQVKSLDTTLARAHWKAHRLDLGPVLHEPESAFMNQDLYCSSRQDHGLDKALDQQLIVMSREALDSGKPVRFSTTISNVNRTVGTMLGHEVTKAYGGQGLPDGTIDITFDGSAGNSFGAFVPRGITLRVYGDANDYVGKGLSGGRIVVRPSDNAPADYVAEDNIIGGNVILFGATSGEAYLRGVVGERFAVRNSGAHAVVEGVGDHGCEYMTGGKVVVLGRTGRNFAAGMSGGVAYIYDPPGEFPQHLNAEMVELESLDDDDIEWLHGMIQAHVDATDSAVGQRILGDWAQQQRHLVKVMPRDYKRVLQAIAEAERDGGDVDKAIMAAAHG

SEQ ID NO: 993 - protein, 242 aa, Vibrio harveyi
LPANKNVGKISQVRGIPEGQSAISPPTFKDLHTAEDFKKFADRVREVTGGIPIGFKLSANHVEEDIQFALDASADYIILDGRGGGTGAAPAMFRDHISVPTIPALARARRYLDAQGVSDRVTLIVTGGLRVPMDFVKAMALGADGVAISNSAMQSIGCVAARMCNTNNCPAGIATQKADLRQRLNVDKASVQLKNFFEASVELMQVMARACGHDDLSKFNQHDLATWNRDMALLSGVKYAGV

SEQ ID NO: 994 - protein, 1498 aa, uncultured marine bacterium 314
MNLYKKNLKKLTEAGAYYPSLEHDACGVGLVASTEGKKSRKIVEFGIQALKAVWHRGAVDADGKTGDGAGIQIEIPADFYKERIAFAGRKHHEGTICVGMIFLPRNDYSSQENCKTLIETELLSKNYYVYRWRQVPINTSVLGVKAENNRPEITQIIFKSNNKNFTGEELEKDLFVVRKKIEKQSNILQLKNFYICSFSSRSIIYKGMFLAEALSEFYPDLMDKRFISRFAIFHQRYSTNTFPSWDLAQPFRTLAHNGEINTLKGNINWMKIHEQDMSSKLFDDIESLKPVITPGNSDSAALDNVFELLVRSGKSVPLVKLMLIPDAWSKRRKTVSKAHQHLFNFLNSTIEPWDGPAAIAATDGKWIIAATDRNGLRPLRYTLSKDKLLFAGSETGMIPIPNDKVIFKGRLGPGQIIAVNLDQGKVYDSKSIKNHISKDYKKYNKQIIDLDKKISISNEKFIYSGDELRRRQYLAGMNIEDLELILHPMVEEAKEAVGSMGDDTPTAVLSDRYRPLSHFFRQNFSQVTNPPIDSLRENEVMSLKTRFGNLRNILDFENVPIDNIYVLNSPILSNSQFKKFTVFFKNNLKVLDCTFNVQNNLKERLDQLSFEAEIAVREGCKHLILSDKQLSEKKVAVPMILAFGAINSKLVNLGIRGFVSINVQTGEVLDTHSFAVLLGIGATTINPYLAFDSIYQRYEKKLFGKFSYEECIQRYIKSVNNGLLKIMSKMGISVLSAYRGGCNFETVGLSRAVVAEYFPGMISRISGIGIFGIETKIKELHKKAFQKNVSILPIGGIYKYRKNGENHQYQGQLIHMLQHAVAINSYETYKKYAQGIYNLPLINLRDLLIFKSPRKSININEVELETSLRKRFGSGSMSHGALSAEAHETLAIAMNRIGAASCSGEGGEDPKRFVKMKNGDSANSSVKQIASARFGVTIEYLNNCNEIEIKIAQGAKPGEGGQLPGFKVSKEIAKLRLSTPGVTLISPPPHHDIYSIEDLAQLIYDLKQTNPKARVGVKLVASTGVGTIAAGVAKAKADVILISGHSGGTGASPQTSIKHVGIPWEMGLTEANQILTLNGLRHQITLRTDGGIKTGRDIVMAAMMGAEEFGIGTTSLVAMGCIMVRQCHSNTCPVGVCTQDENLRKKFTGTPEKVVNLFTFIAQEVREILAELGFKNLNEIIGRTDLLRQVSRGTSNLDDLDLSPLLVQADPGNNDRYCTTNLINEVPPTLDEKIYKDIKNSIGKNKVESNYEIKNVHRSVGTRLSHYIFKKFGNKGIEENIVEINLSGSAGQSLGAFGIKGLKLNVTGDANDYVGKGLSGATIVIKPPADSNLVSNDNTIIGNTVLYGATSGKLFAAGQSGERFAVRNSGAEAVVEGCDSNGCEYMTGGTVVILGKTGDNFAAGMTGGMAFVYDPKHEFENYVNPGSVIWQVPETDYWKSCLNNLVNQHFEETQSHIAKTILENFNNEVQNFKQVCPKEMLDKLTNPLLLKTKVSKAV

SEQ ID NO: 995 - protein, 1578 aa, Bradyrhizobium sp. BTAi1
MSGSKVEHGKLGGAVLAADSHEKPAEITRELHTWRPDAEGLYDPSQEKDSCGVGFIANIKGQKSHQIVADALSILCNLEHRGAVGADPRFGDGAGILVQIPHAFFARKAKELGFTLPAPGEYAIGALFMPRDEAWRNVIKSIIADQIEEEGLVLLGWRDVPTDNSSLGVTVKPTEPRSMQVFIGRNGAAKTEDEFERKLYILRKSISQAIYQRRDRGMSGYYPCSMSCRTVIYKGMFLADQLGKYYADLHEPDFESALALVHQRFSTNTFPTWSLAHPYRMIAHNGEINTLRGNVNWMAARQASVSSELFGKDISRLWPISYEGQSDTACFDNALEFLVQGGYSLPHAVMMMIPEAWAGNPLMSEERRSFYEYHAALMEPWDGPAAIAFTDGRQIGATLDRNGLRPARYLVTKDDRIVMASEMGVLKIPEDQIVTKWRLQPGKMLLVDLEQGRLIPDDEIKAQLAASHPYTEWLARTQIQVEKLPDAPTTGARTNLPLLDRQQAFGYTAEDINILMTPMAATGEEATGSMGNDAPISALSDKPKLLFTYFKQNFAQVTNPPIDPIREELVMSLVSIIGPRPNLFDLEGVASTKRLEVHQPILTDADLEKIRSISEVSDSHFVSRTLDTTFDASLGAAGFEQVLDDLCGRAEAAVREGVNIIILSDRMVSAQRIPIPSLLACAAVHHHLIRTGLRTSVGLVVESGEPREVHHFACLAGYGAEAINPYLAFETIIALKDKLPGALSDYEVVKRYIKSIGKGLLKVMSKMGISTYQSYCGAQIFDAVGLKAEFVQKFFYGTHTRIEGVGLAEIAEETTRRHRDAFGDALVYKTALDVGGEYAYRTRGEDHAWTAESVATLQHAVRGNSKDRYQAFAKLLNEQSERLLTLRGLFRIKSAEDDKRKPVPLDEVEPAKEIVKRFATGAMSFGSISREAHTTLAIAMNRIGGKSNTGEGGEEADRFKPLPNGDSMRSAIKQVASGRFGVTTEYLVNSDMMQIKMAQGAKPGEGGQLPGHKVDATIAKVRHSTPGVGLISPPPHHDIYSIEDLAQLIYDLKNVNPDGQVSVKLVSEVGVGTVAAGVAKARADHVTIAGFEGGTGASPLTSIKHAGSPWEIGLAETHQTLVRERLRSRIVVQVDGGFRTGRDVVIGALLGADEFGFATAPLIAAGCIMMRKCHLNTCPVGVATQDPVLRKRFTGQPEHVINYFFFVAEEVREIMAALGYRSFNEMVGQTQMLDQSRLVAHWKAKGLDFSKLFVKQKAEPGQKIHHAEKQDHHLEAVLDRRLIEQARPALDRGAPVKIEAEINNTDRSAGAMLSGAVAKIYGHAGLPQDTIHVSLKGTAGQAFGAWLANGVTFELEGEGNDYVGKGLSGGRIIVKPPRNSGIVPEESIIVGNTVMYGAISGECFFRGIAGERFAVRNSGAVAVVEGAGDHCCEYMTGGIVVVLGKTGRNFAAGMSGGVAYVLDEAGDFDKHCNMAMVELEPVLSEEMIAEDTYHQMGDLEAHGRVDVFKNLLASDVERLHVLISRHAKATGSKRAADILANWKDYAPKFRKVMPVEYRRALRELAAKADAEPKIAIGA

SEQ ID NO: 996 - protein, 546 aa, Oryza sativa; identical to SEQ ID NO: 703

SEQ ID NO: 997 - protein, 1448 aa, Salmonella enterica subsp. enterica serovar Paratyphi B str.
MQHRGAILADGKTGDGCGLLLQKPDRFFRIVAEERGWRLAKNYAVGMIFLNKDPELAAASRHIVEEELQQETLSIVGWRDVPTNEGVLGEIALSSLPRIEQIFVNAPAGWRPRDMERRLFIARRRIEKRLQDDKDFYVCSLSNLVNIYKGLCMPADLPRFYLDLADLRLESAICLFHQRFSTNTVPRWPLAQPFRYLAHNGEINTITGNRQWARARTYKFQTPLIPDLQSAAPFVNETGSDSSSLDNMLELLLAGGMDIIRAMRLLVPPAWQNNPDMDQDLRAFFDFNSMHMEPWDGPAGIVMSDGRFAACNLDRNGLRPARYVITKDKLITCASEVGIWDYQPDEVVEKGRVGPGELMVIDTRGGRILHSAETDDDLKSRHPYKEWMEKNVRRLVPFEELPDEEVGSRELDDDLLASYQKQFNYSAEELDSVIRVLGENGQEAVGSMGDDTPFAVLSSQPRIIYDYFRQQFAQVTNPPIDPLREAHVMSLATSIGREMNVFCEAEGQAHRLSFKSPILLYSDFKQLTTMSEHHYRADWLDITFDVTETTLDATVKALCDKAEQMVRNGTVLLVLSDRNIGKNRLPVPAPMAVGAVQTRLVDQSLRCDANIIVETGSARDPHHFAVLLGFGATAIYPYLAYETLGRLIDTQAIAKNYRTVMQNYRNGINKGLYKIMSKMGISTIASYRCSKLFEAVGLHDDVVNLCFQGVVSRIGGASFDDFQQDLLNLSKRAWLARKPISPGGLLKYVHGGEYHAYNPDVVRTLQQAVQSGEYSDYQEYAKLVNERPAATLRDLLAIHPDGEAVTIDEVEPASELFKRFDTAAMSIGALSPEAHEALAEAMNSLGGNSNSGEGGEDPARYGTNKVSRIKQVASGRFGVTPAYLVNADVIQIKVAQGAKPGEGGQLPGDKVTPYIAKLRYSVPGVTLISPPPHHDIYSIEDLAQLIFDLKQVNPKAMISVKLVSEPGVGTIATGVAKAYADLITIAGYDGGTGASPLSSVKYAGCPWELGLVETQQALVANGLRHKIRLQVDGGLKTGVDIIKAAILGAESFGFGTGPMVALGCKYLRICHLNNCATGVATQDEKLRKNHYHGLPFKVTNYFEFIAREVRELMASLGVTRLVDLIGRTDLLKELEGFTAKQQKLALSRLLETAEPHPGKALYCTENNPPFDNGVLNAQLLQQAKPFVDARQSKTFWFDIRNTDRSVGASLSGYIAQTHGDQGLASDPIKAHFSGTAGQSFGVWNAGGVELYLTGDANDYVGKGMAGGLIAIRPPVGSAFLNHKASIIGNTCLYGATGGRLYAAGRAGERFGVRNSGAITVVEGIGDNGCEYMTGGIVCVLGKTGVNFGAGMTGGFAYVLDEDGEFRKRVNPELVEVLDVDSLAIHEEHLRGLITEHVQHTGSQRGEEILSRWSSFSTQFALVKPKSSDVKALLGHRSRSAAELRVQAQ

SEQ ID NO: 998 - protein, 442 aa, Nocardia farcinica IFM 10152
MTTLPDPTLRESAIFPRAVIAEIQRAAETGIYDIRGWGAKRPLPHFDDLLFLGASMSRYPLEGYRERCDTDVVLGDRHAKFPLHLDIPITIAGMSFGALSGAAKEALGRGASEVGTSTTTGDGGMTPEERGQSKHLVYQYLPSRYGMNPDDLRKADAIEIVLGQGAKPGGGGMLLGQKITERVARMRTLPQGVDQRSACRHPDWTGPDDLAIKIVELREITDWEKPIYVKVGATRTYYDVKLAVKAGADVIVVDGMQGGTAATQDVFIEHVGIPTLAAIPQAVQALQELGVHRSVQLIVSGGIRSGADVAKAMALGADAVAIGTAALIALGDNSPRYADQYAALGSAAGFYDDFQDGRDPAGITTQDPELARNLDPVAAGRRLANYLRVLTMEAQTLARACGKSHLRNLEPEDLVALTVESAAMARVPLAGTGWIPGRPGQH

SEQ ID NO: 999 - protein, 1601 aa, Opitutaceae bacterium TAV2
MRPTDQGADHTDHHHDLPHFPVKTQLTDHTASAAACAPSGAPATPAALTSPHAPAARHAASSAACSTTSLRPGKQGLYDPWFEHDACGVGFVVDIKGRATHRIVEQGLEVLEKLDHRGATGSETNTGDGAGMLLQIPHEFLVRVCKSVSITLPGRGHYGTGLVFLPRNPTKRRKLEDHLAQIIRSEGQIFLGWRTVPTNNSMLGDTAKSCEPFIRQIFIGRSPKVTDELAFERKLYVIRKRASHEVVSEGLGGADMWYQPSLSSRTIVYKGMLLTTQLNEYFLDLREPDFKTAIALVHSRFSTNTFPSWDRAHPYRYIAHNGEINTLRGNVNWMHARQALFSSELFGDDIKKILPVINPNGSDSAMFDNTLELLHLAGRSLPHAAMMMIPEPWSNHKTMDPARRAFYQYHACLMEPWDGPAAIVFTDGKLIGTILDRNGLRPARYYITKDDLVVLASEAGVLDGIPASEIATKGRLQPGRMFLVDTLKGCILDDEQVKDQLAAEYPYQQWLKDHLVHLKDLPDAPDLPTPDPDTLKQRQLAFGYTYEDERIVLSPMARDGVEGVGSMGNDTPLAVLSNQPRLLYDYFKQLFAQVTNPPIDCIREEIITSAETRLGTEGDLLNPLPSACRRVELDWPVLTNDELAKIRRMQLPGLKVATLPIHFRVVRGEKALTRAMDDLFQQARRLITEDEVSVLILSDRGVNKDNAPIPALLAVAGLHHYLIREGLRTQVSLVIETGEARQVHHFALLIGYGVSAVNPYLAFETIDDLIHQDLLPGLDHKTACKNFVKAAAKGVVKVMSKMGISAIQSYRGAQVFEAVGLSQEVIDLYFTWTPSRIGGIGLDTVAEEILHRHRAAFDPRGAVATQDPALPPGGQFKWRDSGEYHLFNPESIHSLQKSVRTGDYGVFKNYTRLIDDQARNLCTLRGLLDFKPSDAIPIDEVESIESIVRRFKTGAMSYGSISQEAHETLAIAMNRLGGKSNTGEGGEDPARFTPLPNGDSKNSAIKQVASGRFGVTSEYLVSAREIQIKMAQGAKPGEGGQLPGAKVYPWVARTRHTTAGVGLISPPPHHDIYSIEDLAELIHDLKNANRDARISVKLVAEVGVGTIAAGVSKAHADVVLISGHDGGTGASPLNSIWHAGLPWELGLAETHQTLVLNNLRSRIAVETDGQLKTGRDVVIAALLGAEEFGFATTALVSTGCIMMRACQLNTCPAGVATQDPRLRKNFTGKPEHVVNFMTFIATEVRELMAKLGFRTIAEMVGRVDRLEARQAVDHWKAKGLDFSNILYVPDSGPEVGRHCQIPQDHGLEKSLDVMTLLDISRPAIERREKVVAELPVRNINRVVGTITGSEVTRKWGAAGLPDDTIDIRFNGSAGQSFGAFLPPGMTFRLHGDANDYVGKGLSGGRIIIRPPTDATFDPSKNIIAGNVALYGATSGELYVGGMAGERFCVRNSGATAVVEAVGDHGLEYMTGGRVVILGPTGRNLAAGMSGGVAYVLDEHGGFAASINAGMVHLEKVDTPAEAAELRSLIENHAGYTGSVLARRVLDAWDAMLPKFVKVMPKDYKRMLERIEDARSEGLTGDDAIMAAFEANARDLSRVGGN

SEQ ID NO: 1000 - protein, 501 aa, Clostridium thermocellum ATCC 27405
MGINFLYPEYEVVRNMDRCINCRVCERQCANEVHSYDQEKKIMCSDDSKCVNCHRCVALCPTRALKIVKTDHTFKENANWRGSIINEIYKQAESGAVLLSSMGNPNEYPVYFDKILLNASQVTNPSIDPLREPMETKVFLGSKPRSIQRDENGKLVNNLSCGIELSVPIMFSAMSYGSISYNAHESLARAAKEAGILYNTGEGGLHRDLYQYGSNTIVQVASGRFGVHKDYLEAGAAIEIKMGQGAKPGIGGHLPGTKIVGDISRTRMVPEGSDAISPAPHHDIYSIEDLRQLVYSLKEATNYTKPVIVKIAAVHNVAAIASGIARSGADIIAIDGFRGGTGAAPTRIRDNVGIPIELALASVDQRLREEGIRDNVSIVVGGSIRNSSDVVKAVALGADCVYIGTAALIALGCHLCRSCHTGKCNWGIATQEPELVKRLNPDMGYKRLVNLVNAWKHEIKEMMGGMGINSIESLRGNRLMLRGVGLNEKELQILGIKHAGE

SEQ ID NO: 1001 - protein, 536 aa, unidentified eubacterium SCB49
MKKAVAIAKVSELVNKEPVHALVNGLDLVVVKFDEDISVLYGRCLHRGALMSDGHVDGHNLICGVHGWDYRVDSGVSEYNNKEVLHKFSTKIEGDNLLVDEFEIDAYLVNNPQPFNRDEYLGAYADTHPEETEPYTGYIKELAQNGLKNIGHHGFSASMGVDRNTLPKWNDIQFLPAQLATRPLLDEEAVASKVVIGPKAKKPLELDMPLFVSDMSFGALSREAKIALAKGAELAGTGICSGEGGILPSEQANNSKYFYELASAQFGFSWDKLDNVQAFHFKGGQGAKTGTGGHLPGSKVSKEIAEVRGLKEGETAISPAANPNFHSVEDFKIFADKVRERTGGIPIGFKIAASHIEKDIQFALDVGVDYIILDGRGGGTGSAPTILRDHINVPTIPALARARKYMDQVGATDVTLVITGGLRVAEDFAKAMMLGADAIAVSNSALQAIGCLGMRACGSNNCPVGIATQKESLRSRLIIDSSAKQLHNFFDATNNLIKVVARACGYDDVTKFNHQDLSTYNKEMSELTGINYAGIK

SEQ ID NO: 1002 - protein, 175 aa, Physcomitrella patens subsp. patens
MADSYGHNAGSPESSPHSDNESGGHYRDQDASVREQDRFLPIANVSRIMKKALPSNAKISKDAKETVQECVSEFISFITGEASDKCQREKRKTINGDDLLWAMSTLGFEDYVEPLKVYLHKYRELEGEKASTAKGGDQQGGKEGSQGVMGSMDCQPREGVLWSMTGTLIMVLLEE

SEQ ID NO: 1003 - protein, 1501 aa, Candidatus Pelagibacter ubique HTCC1002
MKNYKKNLKILEDGHVYSKEMEHDACGVGLIASTEGKKSRKVVEYGINALKAVWHRGAVDADGKTGDGAGIHLEIPSDFFAEKIEITGHDHDGSEICVGMIFLPRNNYQAQENARTLVESELTKSNFSIYGWRQVPVNPKVLGEKANLTRPEITQVLFKHNNKDLTEKELERKIYESRRKIEKEAIKDAIEGFYICSLSSKSVIYKGMFLAESIADFYLDLKDERFISRFAIFHQRFSTNTAPSWDLAQPFRALAHNGEINTFKGNTNWMKVHEQEMNSPLFDNMENLKPVIQPGSSDSAALDSVFELLNISGQSAPLAKLMLIPDAWSKKSQTLSKDHQQLFNFLNSTMEPWDGPAAIAATDNEWAIVAADRNGLRPMRYTISKDKILCAGSETGMVEIDEKQILKKGRLGPGEILGVRIAKGKVFSNVEIKDYLAKEFKHFNNQIIDLEKKFPIKNEKSTFSGDELKKRQHTFGYSLEDLELILHPMAEDAKEAIGSMGDDTPLAVLSDRYRPLYHFFRQNFSQVTNPPIDSLRENKVMSLKTRFGNLGNILDFTNLTEENIYVLDSPILSNSQLEKFINFFGEKSITIDCTFDKSENLETSIERIRKESEIAVRQGLTQLVLSDKNISEKRLPIPMLLCVGAINTYLIKKKLRGYASINAQTGEALDTHSFATLIGVGATTVNPYLALDSLYQRFEKKLFGKFEYDECIDRYIQSVNYGLLKIMSKMGISVISSYRGGCNFETVGLSRTVASEYFPGILSKISGIGLNGIEKKLRTIHKEAFEGTDVVLPIGGIYRYRKDGEIHQYQGKLIHLLQSAVSSNSFEAYKKYAEGIYNLPPIHLRDLIGFRDKNLNPSLDISEVEPIENILTRFGSGSMSHGALSKEAHETLAIGMNRIKGASCSGEGGEDEKRFIKMENGDSANSRVKQIASARFGVTLKYLNNCNEIEIKIAQGAKPGEGGQLPGFKVTEEIAKLRHSTPGVTLISPPPHHDIYSIEDLAQLIYDLKQANPKARVGVKLVASSGIGTIAAGVAKAKADIILISGHNGGTGATPQTSVKYVGIPWEMGLTEANQVLTLNNLRHKVTLRTDGGIKTGRDVVIAAMMGAEEYGVATTALVAMGCIMVRQCHSNTCPVGVCTQDEKLREKFSGTPEKVVNLFKFIAEEVREILAQIGFKSLNEIIGRTDLLRQVSKASPNLDDLDLNPLFVQTDAGENTRYCTVPEINSVPDTLDQEILPEIKEQIGKVKIIEKEYIIKNTHRTVGTRISNHLYEKYGSEKLDDGFLSLKFKGSAGQSFGAFAIKGLKLILKGDANDYVGKGLSGATVVVKLPDESNLVSHENTIIGNTVLYGATSGKLFAAGQAGERYAVRNSGSISVIEGCDSNACEYMTGGTVVILGDVGDNFGAGMTGGMAFIYDINKKFYKKVNPETVVWQTPETDYWITYLKNLVQEHHQETNSDFSKKIIENFDREISNFIQVCPKEMIDKLKNPISLKSIIKEVS

SEQ ID NO: 1004 - protein, 515 aa, Colwellia psychrerythraea 34H
MTKPIIAAIAPKKVSLNQDEEYYFCTCGRSNNQPFCDGSHAGTDFKPKPFSAQESGDAYLCQCKHTANSPFCDGSHKQFDKDQVGKEGPGVQIQAVDVSNMPTANATKEEPTVEFIHQLAREGLSKLGHHGPMTSMGVPRYQLPHWDDLQVMVAQMATKPLMEDVVVNTELVIGPKAKKPLKLRIPLFVSDMSFGALSEEAKIALATGAELAGTGICSGEGGMLPEEQAANSKYFYELASAQFGYDESKLKNVQAFHFKGGQGAKTGTGGHLPGIKNIGKIAKVRGIEAGTSAISPPTFKDLITVEDFKKFANRVREVTGGIPIGFKLSANHIEEDIQFALDASADYIILDGRGGGTGAAPEIFRDHISVPTIPALARARKYLDEQGANGRVTLIITGGLRVPIDFVKALALGADGVAVSNSAMQAIGCVAARICNTNNCPAGIATQNKDLRQRLNIEKSSVQLKNFFEASTELMSVMARACGHDSFEQFNSNDLATWHREIALLSGVKYSGMGN

SEQ ID NO: 1005 - protein, 385 aa, Vitis vinifera
MGNKLGRRRQVVEDKYTRPQGLYQHKDVDHKKLRKLILDSKLAPCYPGDEEATNDFEECPICFLFYPSLNRSRCCTKGICTECFLQMKNPNSTRPTQCPYCKTANYAVEYRGVKTKEEKGMEQIEEQRVIEAKIRMRQKEIQDEEERMQKRQEISSSSSILAQGEVEYSTTAVPSFRSPVEGDEIDSSQDPRAASMIIQTLPPRQNRDEEFDLDLEDIMVMEAIWLSIQDNGRHRNPLYGDTTTAEQYVTEEHYVESSSSPSGGLACAIAALAERQQMGGESSTNYNGNMPAFNMPPGSSRFSNRVEQYPENYPPIETGTSYASSDATDEAGGVAALPPTDEAEGSFQNVGGPIVPESFEEQMMLAMAVSLAEARARTSTQGVWQ

SEQ ID NO: 1006 - protein, 531 aa, Synechococcus sp. WH 5701
MNLEEGKDYFYCACGRSSDQPFCDGSHEGSGFTPLAFVAERGGKALLCRCKQTATPPYCDGTHTRVPADRVGTTFSVDADGEGDGTEEGDGNDADPEEPDHHGMPEPRATAEEPNLELIHQLAEHGLDRMGAEGPVAAMGVPRSLLPLWDDIQILTAQLARRPLAGDAAVGTELVIGPRARRPLRLEIPLLVSDMSFGALSEEAKQALATGAERAGTGICSGEGGMLPEEQAANHRYLYELAPAMFGYREEVLSQVQAFHFKAGQAAKTGTGSHLPGAKVTARIAEIRGIPEGQPSCSPAVFSDLHSPADFRAFGDRVRELSGGIPVGMKLSAQHIEHDLDFALEAGVDYLILDGRGGGTGGAPLLFRDHIAVPTIPALARARAHLDRSGVGGQVTLIVTGGLRTPADCIKALALGADGVALANAAIQAIGCVGSRICHTNRCPAGVATQDPQLRRRLEVEHAALRLERFLRATVALMQVMARACGHDHLGRLRREDLASWHRDLAELAGIAWSGRSRCQLARSSRRSRPR

SEQ ID NO: 1007 - protein, 1465 aa, uncultured proteobacterium RedeBAC7D11
MDHRGGCGFEENTGDGAGILLALPHEFFKEEAKKLNINLPEKGNYAVGNIFFPQKKSEKDFCKKTIEDVLKQEKLELLGWRQVPIDSKKADVGPAALDCKPGIEQIFIKAPKNIDQNDFERKLYLVRKIFTKKLRQESNLSQALMFYACSLSSRLIVYKGMLTPSQLFPFFPDLEDKSFETHLAMVHSRFSTNTFPSWDRAQPCRYMCHNGEINTLKGNMNLMQSRQGKASSDLYKNKISKLFPIAEPDCSDSGSFDNVLELLIMTGRKLPEAVMMMIPEAWQNDKNMAKAKKDFYQYSSSLMEPWDGPASIVFTDGTQVGAVLDRNGLRPSRFYVTDNDKVIMASEVGVLEVEPKTVLRKGRLQPGKMFLIDFDKGKLISDEEIKKEVANQHPYGNWNSNQIIELDDLPDKSKKHVVSDLISKMKAFGYTTETLEFMLLPLVTELRDPLGSMGNDAALACLSDKPRMIYDYFKQLFAQITNPPIDSIREEIIMSLECLIGPEGNLLSTDENNVKRLRLEHPILSNQELEKIRSIKTKGYKSKTIDITYQKGLRKEGLTKALDKICRESLKAIDEGYSFIILSDKSITSEKLALSTLLACSTVHNFLVKKEKRTQIGIVLESGEAREVHHHCLLIGYGADAINPYLAFAVLEKSLEDGALEDKNLNNSSDLVKAYKKGVAKGMLKVMAKMGISTLQSYKGAQIFEAVGLSDEIIEKSFPGTPSRVQGVTFDILSEEMERRHVMGFPESLEINVTALPNPGDFHWRNGGDSHMWDPKSISALQIAARNNDESAYWNFSNHANEETTKNSTLRGLMKFKYTKNPLPLDKVEPEKEIVKRFATGAMSLGSISTEAHESLALAMNKLGGKSNTGEGGEDPIRFKPLEDGSSKRSAIKQVASGRFGVTMWYLTNADELQIKIAQGAKPGEGGELPGTKVDKYIAKIRHSTPGVGLISPPPHHDIYSIEDIAQLIHDLKNANRSSRISVKLVSEIGVGTIAAGVVKAKTDHLVIAGHDGGTGASPLTSIKHAGLPWELGIAETHQTLVMNNLRSRVVLQTDGQLKTGRDVAIAAILGAEEFGFSTAPLVTLGCIMMRKCHLNTCPVGIATQDKELRKKFKGSPENVVNYLFMVAKELRMIMANLGITKLDDLIGRVDLLEMDNAIDHWKRDGLDLSKILSPAEIIYKDTEVFNTQKQNHNLEKSLDIKLLKKIKNHIKTKKRIVIDSKIGNTNRVFGTIISNEVAKSWGAAGLPNDTLRFNLTGSAGQSFGAWATKGMTLSLEGDANDYVGKGLSGGKLIIYPPADSSFIPEENIILGNVALYGATDGEAYFRGIAAERFCVRNSGAKVVVEGIGDHGCEYMTGGRAVILGPTGRNFGAGMSGGIAYVYDPKNNFKKNCNMSTFDLEKLVINEDKEELKTLIANHHRYTKSDVAKKILSNWNNELANFKKVMPIDFKRVLMETNNQKLKAS

SEQ ID NO: 1008 - protein, 90 aa, Vernonia galamensis
REQDRFMPIANVIRIMRKILPPHAKISDDAKETIQECVSEYISFVTGEANDRCQREQRKTITAEDVLWAMSKLGFDDYIEPLTVYLHRYR

SEQ ID NO: 1009 - protein, 2462 aa, Ashbya gossypii ATCC 10895
MTMLKRKGDKAKKRLVSITTSSDDLFVDSASAAGTAGASSAAVGNGGPGAFVKAAATPGVVDSDSETSFSGFTAIFNRLKSSHNQERKAASFELKNSLISLAREVSTEHFQRFSNELNNKIFELIHGSDSNEKLGGVLAVNTLIDFYAHTDELPNQTSRLANYLRVLIPSNDIEVMRAAAAALGKLAMPGGTLTSDFVEFEVKTCIEWLTTSPENSSSNSKQEYRKHASLLIITAIADNSPYLLYPYLNSVLDNIWRALRDTKLVIRIDAAITLRHCLSIINDRDSVLTNRWVQRLFKSCAYGLNLGTLEAVHGTLLVYRELMSLKGPYLYEKFNEIYETTMRYKDHKSPVIRKEIYAILPLLASFDSDLFTEEYLDDTMVHYLTLLKNVHSGVANSPDRAAILVSIGDIAFQVRSNIAAYLDSILDNIRDGFLTKHKSRKHFESELFYCIAKLACAVGPILSKYLHSDLLDLMLACPLSDYMQDTLETLNQELPALEPLVNEKLLDLICYNLSGDKFRPPGSPTPIKHFSNEKARAYRDQSWLRKTGDINDSNQDALILTQALRMLATINHKYSLAEFGRLVGISYIEHENPQVRKLARLTFCDLFVKENVCQQTSLHALNAVAEVLSKLLTVAITDPVAEIRHEILKHLDSSFDPQLSQPDNARLLFMALNDEVFIIQMQAMKIVGRLASVNPAYIVPSLRKTLIQLLTELKHSSMTRKKEESASMFCTLISSSKDVTRPYIESILDVLLPKCQDSSSAVASTALQAVGELSVVGGENMKDYLDKLMPLIINTFQDQSNSFKRSAALKTLGQLSASSGYVIDPLLDYPQLLGVLVNILKAESSQSIRRETVRLIGILGALDPYKHREVERTSSTPISVEQNAPSIDVALLMQGMSPSNEEYYPTVVINTLMKILKDPSLSSHHTAVIQAVMHIFQTLGLRCVSFLKQIIPGMINVMRSCPPSILEFYFQQLGVMVSIVKQHIRPYVDEIFEVIKEFFPFIKLQITIISVIESISKSLEGEFKPYLPTTLTLFLDVLEKDNSNKKIISIRILKSLVVFGPNLDDYIHLVIPSIVRMCEYGSGNLNRAAIVTIGRLAKSVNLSEMSSRIVQTMIRVLNVSDQQIIRAVMNTLSLLLLQLSTDFTVFIPIINKTLVKAHIQHSIYDQLVGKLMNNEPLPTKVVVDKDFEVPSREVSDTEVPSRKLPVNQAVLKSAWDCSQQRTKEDWQEWMRRLSIQLLKESPSHALRACSGLAGIYYPLARELFNASFASCWTELYTQYQEDLVKSLCSALSSPNNPPEIHQTLLNLVEFLEHDDKSLPISIPTLGEYAQRCHAYAKALHYKELEFIQEPSTSTIESLISINNQLHQTDAAIGILKHAQQHHDLQLKETWYEKLQRWDDALNAYNQREAAGEDTIEVTMGKMRSLHALGEWEQLSQLGAEKWANAKLDIKRIIAPLAAAAEWGLGHWDSIEKYINVMKPQSPDKEFFDAILCLHSNDFEKASEHIFLARDLLVTEMSALVNESYNRAYSVVVRSQMIAELEEIIQYKKLPQNSEKRAIMRKTWNHRLLGCQKNVDVWQRILRVRSLVVKPKQDMQVWIKFANLCRKSGRMGLAQKALNSLLEEGGDPEHPYTARAPPPVVYAQLKYMWATGSRKDALRHLISFTSRMAHDLGLDPSNMIAQNVPHNSVVPACHIEEYTKLLARCFLKQGEWRVMLQPKWRTDTPDAILGSYLLATHFDNTWYKAWHNWALANFEVISLMTDSVRDEHRALSNETESVGQTDGTAQHNSIDVDAVNCNGSECHPDLVQRHVVPAIKGFFHSIFLSESNSLQDTLRLLTLWFTFGGIPEAAQAMHEGFNLIKIDNWLEVIPQLISRIHQPNQTVSRSLLSLLSDLGKAHPQALVFPLTVAIKSESVSRQRAALSIMEKMRMHSSNLVEQAELVSNELIRIAVLWHELWYEGLEDASRQFFGEHNTEKMFATLEPLHEMLKRGPETLREISFQNSFGRDLNDAYEWVMNYKRTQDISNLDQAWDIYYNVFRRISRQLPQLQTLDLQHVSPKLLAANDLELAVPGTYSTGKPVVRISYFEPVFSVISSKQRPRRLSIKGSDGKDYQYALKGHEDIRQDSLVMQLFGLVNTLLQNDSECFRRHLDIQKYPAIPLSPKSGLLGWVPNSDTFHVLIRGYRESRKIQLNLEHRIMLQMAPDYDNLTLLQKVEVFTYALDNTKGQDLYKVLWLKSRSSESWLERRTTYTRSLAVMSMVGYILGLGDRHPSNLMLDRITGKVVHIDFGDCFEAAILREKYPEKVPFRLTRMLTYAMEVSGIEGSFRITCENVMKVLRDNKESLMAILEAFAHDPLINWGFDLPTQAITEQTGIQLPVTNPSELLRNGVITAEEAARMEVQQRAEIRNARATLVLKRITDKLTGNDFRGFRDLDVPEQVDKLIQQATSVENLCQHYIGWCSFW

SEQ ID NO: 1010 - protein, 90 aa, Argemone mexicana
  misc_feature (75)..(75): Xaa can be any naturally occurring amino acid
REQDRYMPIANVIRIMRKVLPTHAKISDDAKETIQECVSEYISFITSEANDRCQREQRKTITAEDVLWAMSKLGXDEYIEPLTLYLQRYR

SEQ ID NO: 1011 - protein, 1513 aa, Hyphomonas neptunium ATCC 15444
MSDYVTKYEQNRQRLIDGHAYNPEDERDACGVGLVVALDGKPRREIVEMGIKALKNVWHRGAVDADGKTGDGAGIRLDVPQDFFREHVSRTGHSPTDDRICVGQIFMPRTDFGAQEAARTLVEREVLHFGFYIYGWRQPPVDVSVIGQKAKDTRPAIEQIMFRDARNRSPEELERALYICRRRIERRAREAAIQSFYICSLSHKSLIYKGMFLAQDIDNFYLDLRDERFVSAFAIYHQRYSTNTFPQWALAQPFRTIAHNGEINTLRGNRNWMKSHEIRMVSETFGDHTQDVKPVIPDGTSDSGALDAVWELLCKSGRPAPMAKAMLIPEAWSKRDSVMPVAHRALYDYCNSVMEPWDGPAAIAAYDGRWAVAGLDRNGLRPLRYSLTTDGILAVGSETGMCPLGNHEVTRRGSIPAGGMIAADLATGKFYDHREIVDFLAAQAPYEEWLQAVTELEPEIGPGPEPVLFNKEELLRRETAAGYTLETLELILAPMVEGGKEALGSMGDDTAPAVLTMAYRPMSHFFRQNFSQVTNPPIDPLREGRVMSLRTRFKNLGNVLDTDKSQQEVFVLESPVLTTGMYQRLIERIGLGTEIIDCTFDAADVTFEGAALKSALERIRREAEEAVRAGREHIILTDENQSASRIAVPMVLATGAVHSHLVAQGLRTFCSITVRSAECLDTHYFAVLVGVGATCVNAYLAQDAIADRHARGLLGDISIGKAVQNYKEAIEAGLLKIISKMGISVISSYRGGYNFEALGLSRALVADYFPGMSSRISGLGLAGLEENALVRHQQAFDEDVISLPVGGFYRLRASDEPHALDGNLIHTLQAACDRGDYSIYRKYVDAVHARDPLQLRDLLDFKAAGPEVPLSQVQSINEIRKRFLTPGMSMGALSPEAHGTLNVAMNRIGAKSVSGEGGEDRARYRPLPNGDNMNSAVKQIASGRFGVTAEYLNECREIEIKVAQGAKPGEGGQLPGFKVTELIAKLRHATPGVTLISPPPHHDIYSIEDLAQLIYDLKQINPEARVCVKLVAQSGVGTVAAGVAKAKADIILIAGGVGGTGASPQTSIKYAGLPWEIGLAEAHQILSLNNLRDKITLRTDGGLRTGRDIVIAAMLGAEEYGIGTASLVAMGCIMVRQCHSNTCPVGVCTQDEALRAHFTGNPDKVVNLMSFIAEDVREILASLGLTSLDEAIGRTDLLKQVSRGATHLDDLDLNPLLVQVDTDSPVIYKPNHREPVPDTLDAQILRDAEPFFERGEKMQLEYGVQNTMRAIGARASSRITRKFGMHALPEGRLHIRLEGSAGQSLGAFSVQGLLLEVLGDANDYVGKGLSGASIVVTPRPRDRRAAVGDAIIGNTCLYGATSGKLFAAGTAGVRFAVRNSGAKTVVEGCGANGCEYMTGGRAVILGPVGDNFGAGMTGGVGFIWDPQERFERVVNPDSIDWYPLADMPDEYVGEAKALIEEHVRRTGSVRGKELLDAWDTTLSQMLMIVPKEIANLLLVRKGDGAKQKQAERA

SEQ ID NO: 1012 - protein, 436 aa, Vitis vinifera
MDAFNTPITLPMSYSFTSSGGSTSSGTAANTNINPWMDSRIWSKLPQRLIDRVIAFLPPPDFFRARAVCKRWYGLLFSSSFLELYLQISPRRHWFLFFKHKSLKSYIYRNSGGGSDRANCEGYLFDPYSNSWYRLSFSLIPSGFSPASSSGGLICWVSDEAGPKGLFLCNPLVGSLSQLPPTLRPRLFPSIGLTVTPSSIDVAVAGDDLISPYAVKNLTTESFHIDGGGFYSIWGTTSSLPRLCSLESGRMVHVQGRFYCMNYSPFSVLAYDIAANNWWKIQAPMRRFLRSPSLVESRGRLILVATVEKSKLNVPKSLRIWGLQACGTTWVEIERMPQQLYLQFAEVEGSQGFDCVGHGEFIAIMIRGSDKALLFNIYGKTWQWIPPCPFLSGSGGSSSSSGEGCELHGFAYEPRLATPVTTLLDQLTLPFQPFNG

SEQ ID NO: 1013 - protein, 2195 aa, Ashbya gossypii ATCC 10895
MSYLAFVYCLHSTSLVLVPTLSYCRLDTPGTHTHTHGYIQASDVTTDQRKVMLHSEPYDALQEAYEGGQPLGEQTELRGQDGHISWANAIPGKQGLYDPDYEKDACGVGFVANIKGEPSHKIVSDAKYLLCNMTHRGAVSTDGNGDGAGILVGIPHEFMQREFRMEAGVEVPAKHQYAVGNIFFKKDAAEVLEASKQTFGQLAESLDLRVLGWREVPHDSSILGSVALSREPTILQPLVVLKETYGQEISGEEFQAKYETTFRMQLYILRKQASTAIGIQNWFYVCSLNNRTIVYKGQLTPAQVYNYYHDLTNAHFKSHLALVHSRFSTNTFPSWDRAQPLRWLAHNGEINTLRGNKNWMRAKEGVMASAVFQDQLEKLYPIIEEGGSDSAALDNVLELLVINGVLSLPEAMCLMVPEAYHKDMDSNLKAWFDWAACLMEPWDGPALLTFTDGRYTGATLDRNGLRPCRFYITSDDRVICGSEVGVIPVANELVVCKGKLKPGDMLLVDTEKGEMVDTNMLKKEFSLRQDFKSWLSKVIKLDDLSEKTKKYTPQAFTPSHSTGHVQQDPRLLALGYTFEQVSLLLIPMALQGKEALGSRGKDVPLAGLNEDPVLVYDYFRQLFAQVTNPPIDPIREANVMSLECFVGPQGNLLEMHPSQCDRLLLRSPVLMWDEFEALKNIEKVHPTWSTAHIDITFQKSEGLLGYTNAIERITQEASDAIEQGKKILMISDRKIDAEHVPISSLIAVGAIHHHLIRNKQRSQVALILETGEAREVHQFCVLLGYGCDGIFPYLAMETLVRMNNEGLVRNVNDDYSDITDEQLLHNYKEAIDGGILKVMSKMGISTLASYKGAQIFEALGIDNSVIDLCFAGTASRIKGVTFEYIAQDAFSLHERGYPSRFTIKRSVNLPEAGEYHWRDGGYKHVNEPSAIAALQDSVRNKNEDAWSMYVQKEMEAIRDCTLRGLLDLDYESSTAIPLEQVEPWTEIARRFATGAMSYGSISMEAHSTLAIAMNRLGAKSNCGEGGEDPERSIVHPNGDTMRSAIKQVASARFGVTSHYLSDADEIQIKIAQGAKPGEGGELPGHKVSKEIAKTRHSTPYVGLISPPPHHDIYSIEDLKQLIYDLKCANPRAGISVKLVSEVGVGIVASGVAKAKADHILVSGHDGGTGAARWTSVKYAGLPWELGLAETHQTLVLNDLRRNVVVQTDGQLRTGFDIAVAILLGAESFTLATIPLIAMGCVMLRKCHLNACAVGIATQDPVLRAKFQGQPEHVINFFYYLIQDLRKIMAKLGFRTVTEMVGHSEKLRKRDDVSTKALNIDLSPILTPGHVIRPGVPTSFTKKQDHKLHVRLDNKLIDEAEVTLDKGLPVTIDASIINTDRALGSTLSYRVSKRFGEHGLPQDTIVVKINGSAGQSFGAFLASGITFILDGDANDYVGKGLSGGRIIIKPPQNSKFESDENVIIGNTCFYGATSGYAFIAGSVGERFAVRNSGATLVVERIKGNNAFEYMTGGRAVVLSQMESLNAFSGATGGIAYCLTSDYDDLVGKINLDTIELQSLSDPVEIAFVKNLIQEHYNYTKSELAARILHNFNHYLKNFVKVIPLDYKKVLENEAAEKTKEKERSANEYLRTFSKKLNLSADATNGEVSKLLSKKNQAAARPISIKATLAEPKVVDLEDAVQNPDQEDNIKKLDRINGFIKYKLRHEEYRNVATRTKDWKELTSAITKKAAKFQTARCMDCGVPFCTSDTGCPISNVIPKFNELVFKNQWKLALDKLLETNNFPEFTGRVCPAPCQGACTLGISEDPVGIKSIERLIIDNAFKEGWIKPCPPEVRTGRTVAIIGSGPAGLSCADQLNRAGHSVTVYERADRCGGLLMYGIPNMKLDKSIVQRRLNLLAAEGIEFVTNTEIGKDITMSELKSKFDSVVYAVGSTIPRDLRIPGRELKNIDFAMTLLKNNTQALLEKDLGTIRKHIEGKKVIVIGGGDTGNDCLGTSVRHGAASVLNFELLPQPPKERAKDNPWPQWPRVMRVDYGHAEVKEHYGRDPREFCILSKEFVGNENGEVTAIKTVRVEWKKSQSGVWQMVEVPGSEETYEADVVLLSMGFVGPELIEDPAVTKTRRGTIGTVSDMSYSVDGGKLFAAGDCRRGQSLIVWAIQEGRKCATAIDNYLMGSTNLPGNGGIVKRDYKLLEELASAF

SEQ ID NO: 1014 - protein, 213 aa, Theobroma cacao
MERGGFHGYRKLPNNTTSGLKVPEMNMRMAEVNHTNNHSNSDDNECTVREQDRFMPIANVIRIMRKILPPHAKISDDAKETIQECVSEYISFITGEANERCQREQRKTTTAEDVLWAMSKLGFDDYIEPLTVYLHRYRELEGERGSIRGEPLGKRAVDYGALSVAAFAPAFHMGHHHGFFGGGGAMGGYLKDASNAGSSQAAVANGEPFGHHK

SEQ ID NO: 1015 - protein, 447 aa, Roseovarius nubinhibens ISM
MAKDDSSAPRTEPIQSWTFSKNINAEIRRAAATGIYDIRGGGAKRRVPHFDDLLFLGASISRYPLEGYREKCDTRVTLGTRYAKKPIELDIPVTIAGMSFGALSGPAKEALGRGATLAGTSTTTGDGGMTPEERGHSKKLVYQYLPSRYGMNPDDLRKADAIEVVVGQGAKPGGGGMLLGQKISDRVAEMRNLPKGIDQRSACRHPDWTGPDDLEIKILELREITNWEKPIYVKVGGARPYYDTTLAVKAGADVVVLDGMQGGTAATQDVFIEHVGQPILACIRDAVQALQDLDMHREVQLIVSGGIRSGADVAKALALGADAVAIGTAALIALGDNDPRWEEEYQRLGTTTGAYDDWHEGRDPAGITTQDPELMARFDPIEGGRRLNNYLKVMTLEAQTLARACGKSHVHNLEPEDLVALTMEAAAMARVPLSGTDWWPGKPGTGF

SEQ ID NO: 1016 - protein, 557 aa, Burkholderia thailandensis E264
MAASEKRYGVPMLSRRYLAMWCAAALFAAVAVLAARHTISWLWIAPVAALVALGLYDLNQDRHAILRNYPLWGHLRFLFEFIRPEIRQYFVEDDTDEKPFSRAQRSLVYQRAKNVADNRPYGTELDVKAVAHEWISHSLAPTKLDGHDFRVRVGATRKQPYDISIFNISAMSFGALSANAIRALNLGAKQGGFAHDTGEGSLSKYHREHGGDIIWEIGSGYFGCRRDDGTFDPDKFEKQARDPQVKMIEVKLSQGAKPGHGGVLPAAKITPEIAETRGVPMGKDCVSPAAHSAFSTPRGLLEFVDRLRELSGGKPTGFKLCVGHPWEFFGIAKAMLETGIVPDFIVVDGAEGGTGAAPLEFTDHVGVPLQEGLLLVHNTLVGIGLRDRVKLGASGKIITAFDIARTLAIGADWVNSARGFMFAVGCIQAQHCHTDRCPTGVATQDPVRQRALVVPDKADRVYNFHRNTLHALQELVQAAGLSHPSELRAHHIVQRVAPHEVRLMSQLLKYLEPGALLNGGHCGFSLYETWWPLARSDSFSPGEGAYARVGKGARAGA

SEQ ID NO: 1017 - protein, 1481 aa, Pseudomonas syringae pv. phaseolicola 1448A
MKAGLYQPDEFKDNCGFGLIAHMQGEPSHHLLQTAVQALTCMTHRGGINADGKTGDGCGLLIQKPDGFLRAMAKEHFGADLPRQYAVGMVFLNQDDAKADAARENMNREILAEGLELVGWRQVPIDTSVLGRLALERLPKIEQVYIGGEGLSDQEFAIKLFSARRRSSVSNAADTDHYICSFSHKTIIYKGLMMPADLTAFFPDLSDERLQTAICVFHQRFSTNTLPKWPLAQPFRFLAHNGEINTITGNRNWAQARRTKFTNDLMDLDELGPLVNRVGSDSSSMDNMLELMVTGGIDLFRGVRMIIPPAWQNVETMDPDLRAFYEYNSMHMEPWDGPAGIVMTEGRHAVCLLDRNGLRPARWVTTKNGYITLASEIGVWDYKPEDVIAKGRVGPGQIFAVDTETGQILDTDAIDNRLKSRHPYKQWLRKNALRIQATMEDNDHGSAFYDSEQLKQYMKMYQVTFEERDQVLRPLGEQGQEAVGSMGDDTPMAVLSRRVRSPYDYFRQQFAQVTNPPIDPLREAIVMSLEICLGAERNIFQESPEHASRVILSSPVISPAKWRSLMNLERPGFERHIIDLNYDESLGLEAAVRSVADQAEEAVRAGRTLIVLSDRHIAPGKLPVHASLAVGAVHHRLTEQGLRCDSNILVETATARDPHHFAVLIGFGASAVYPFLAYEVLGDLIRTGEVLGDLYEVFKNYRKGITKGLLKILSKMGISTVASYRGAQLFEAIGLSEEVCDTSFRGVPSRLKGARFVDIEAEQKALAAEAWSTRKPIQQGGLLKFVFGGEYHAYNPDVVSTLQAAVQQGDYSKFKEYTSLVDQRPVSMIRDLLQVKTLDQPLNIDEIEPLSEILKRFDSAGISLGALSPEAHEALAEAMNRLGARSNSGEGGEDPARYGTIRSSKIKQIATGRFGVTPEYLVNADVLQIKVAQGAKPGEGGQLPGGKVNGLIAKLRYAVPGVTLISPPPHHDIYSIEDLSQLIFDLKQVNPAALVSVKLVAEAGVGTIAAGVAKAYADLITISGYDGGTGASPLTSIKYAGAPWELGLAETHQTLRGNDLRGKVRVQTDGGLKTGLDVIKAAILGAESFGFGTAPMIALGCKYLRICHLNNCATGVATQNEKLRKDHYIGTVDMVINFFTYVAEETREWLAKLGVRTLEELIGRTDLLDILPGETEKQQHLDLTPLLGSDHIPADKPQFSLVDRNPPFDKGLLAEQMVEMAKPAIESLSGGEYELDICNCDRSIGARISGEIARLHGNQGMNKAPITFRFKGTAGQSFGVWNAGGLNMYLEGDANDYVGKGMTAGKLVIVPPKGSPFKTNESAIIGNTCLYGATGGKLFAAGTAGERFAVRNSGAHTVVEGTGDHCCEYMTGGFVCVLGKTGYNFGSGMTGGFAYVLDQDNTFVDLVNHELVEIQRISGESMEAYRTHLQSVLNEYVAETDSEWGRNLAENLDDYLRRFWLVKPKAANLKSLLSSTRANPQ

SEQ ID NO: 1018 - protein, 1542 aa, Mycobacterium smegmatis str. MC2 155
MGMTPSSFGGSGRSSRDNRGLYNPAYEHDACGVAMVADMHGRRSRDIVDKAITALVNLEHRGAQGAEPNTGDGAGILIQVPDAFLRAVVDFDLPEPGSYATGMAFLPQSSRDAAAACESVEKIAEAEGLEVLGWREVPTDDSSLGALARDAMPTFRQLFLGGASGMELERRAYVVRKRAEHELGTKGPGQDGPGRETVYFPSLSGQTFVYKGMLTTPQLKQFYLDLQDERLESALGIVHSRFSTNTFPSWPLAHPFRRIAHNGEINTVTGNENWMRAREALIRTDVFGSDGLDKIVPVCTPGASDTARFDEVLELLHLGGRSLPHAVLMMIPEAWERHEDMDPARRAFYEYHASLMEPWDGPASVCFTDGTVIGAVLDRNGLRPSRIWVTDDGLVVMASEAGVLPLDPAKVVKKMRLQPGRMFLVDTAQGRIVDDEEVKAELAAAEPYQEWLEQGLFHLDELPPGDYVRMPHHRVVLRQQIFGYTYEELNLLVAPMARTGAEALGSMGTDTPIAVLSARPRMLFDYFQQLFAQVTNPPLDAIREEVVTSLQGTVGPEGDLLNPGPESCRQIVLPQPILRNADLSKLICVDPDHEIRGHKHGMRAAVIRCLYPVNRGGVGLKEALDNVRAKVSEAIREGARIIVLSDRESNETMAPIPSLLSVAAVHHHLVRERTRTKVGLVVEAGDAREVHHMATLVGFGAAAINPYMAFESIEDMVDRGVITGLTSDQAKANYVKAAGKGVLKVMSKMGISTLASYTGAQLFQAIGISQQVLDEYFTGLSCPVGGIDLEDIAADVAARHSLAFLDRPDERAHRELEVGGEYQWRREGEYHLFNPDTVFKLQHSTRTGQYSIFKEYTKLVDDQSERIASLRGLLKFREGHRPPVPIEEVEPASEIVKRFSTGAMSYGSISAEAHETLAIAMNRLGGRSNSGEGGEAVHRFNPDENGDWRRSAIKQVASGRFGVTSHYLANCTDIQIKMAQGAKPGEGGQLPGHKVYPWVAEVRHSTPGVGLISPPPHHDIYSIEDLAQLIHDLKNANPAARIHVKLVSENGVGTVAAGVSKAHADVVLISGHDGGTGASPLTSLKHAGAPWELGLAETQQTLLLNGLRDRIVVQVDGQLKTGRDVVIAALLGAEEFGFATAPLVVSGCIMMRVCHLDTCPVGVATQNPLLRQRFNGKPEFVENFFMFIAEEVRELMAQLGFRTVNEMVGQVGALDTTKAAEHWKAHKLDLTPVLHEPDSAFMNQDLYCSSRQDHGLDKALDQQLIVQSREALDSGTPVRFTAKITNVNRTVGTMLGHEVTKAYGGQGLPDGTIDITFEGSAGNSFGAFVPKGITLRVYGDANDYVGKGLSGGRIVVRPADEAPESFAAEDNIIAGNVVLFGATSGEAFLRGQVGERFAVRNSGAVAVVEGVGDHGCEYMTGGRVVILGPTGRNFAAGMSGGIAYVYDPRAALPKNLNPEMVEIEALEEADTEWLRGILASHVDATDSAVGQRILADWDNELKHFAKVMPRDYKRVLAAIAEAEAKGLTGSDIDDAIMAASNG

SEQ ID NO: 1019 - protein, 1246 aa, Glycine max
PRVRSKLIHELNKACNLRGLLKFKEAAVKVSLDEVEPASEIVKRFCTGAMSYGSISAEAHTALATAMNKIGGKSNTGEGGEQPSRMEPLSDGSKNPKRSAIKQVASGRFGVTSYYLTNADELQIKMAQGAKPGEGGELPGHKVVGDIAVTRNSTPGVGLISPPPHHDIYSIEDLAQLIHDLKNANPAARVSVKLVSEAGVGVVASGVVKGHADHVLISGHDGGTGASRWTGIKNAGLPWELGLAEPHQTLVANDLRGRTVLQTDGQIKTGRDVAIATLLGAEEFGFSTRADSARGCIMMRKCHKNTCPVGIATQDPVLREKFAGEPEHVINFFFMIAEEMREIMSQLGFRTVNEMVGRSDMLEVDKEVIKSNEKLENIDLSLLLRPAAELRPEAAQYCVQKQDHGLDMALDNKLIGLSNAALEKGLPVYIESPIHNVNRAVGTMLSHAVTKKYHLNGLPTDTIHIRFNGSAGQSFGAFLCPGITLELEGDGNDYVGKGLSGGKIVVFPPKESTFDPKQNIVIGNVALYGATSGEAYFNGMAAERFCVRNSGAKAVVEGVGDHGCEYMTGGIVVVLGNTGRNFAAGMSGGIAYVLDMDGKFLSRCNHELVDLDKVEEEEDITTLRMLIQQHQRHTNSVLAKEVLADFENLVPKFIKVFPKEYKRVLASIKSKEASKDAAESASKHGEEQDEIELVEKDAFEELKKLATASVNGKPIEAESFKRPSQVIDPVKHRGFVAYEREGVQYRDPNARINDWNEVMKETKPGPLLKTQSARCMDCGTPFCHQENSGCPLGNKIPEFNELVYQNRWREALERLLETNNFPEFTGRVCPAPCEGSCVLGIIENPVSIKSIECAIIDKAFEEGWMVPRPPARRTGKRVAVVGSGPSGLAAADQLNKMGHTVTVYERADRIGGLMMYGVPNMKADKVDIVQRRVNLMAEEGINFVVNANIGHDPLHSLDRLREENNAIVLAVGATKPRDLPVPGRELSGVHFAMEFLHANTKSLLDSNLQDGNFISAKGKKVVVIGGGDTGTDCIGTSIRHGCSSIVNLELLPQPPQTRAPGNPWPQWPRIYRVDYGHQEGAAKFGKDPRSYEVLTKRFVGDENGVVKGLEVIRVRWEKDETGRFQFKEIEGSEEIIEADLVLLAMGFLGPESTIAEKLGIERDNRSNFKAEYGRFSTSLKGVFAAGDCRRGQSLVVWAISEGRQAAAQVDSFLTNEDLEHNVAGSPDELIKKKQQPRDTVAVANKQ

SEQ ID NO: 1020 - protein, 1577 aa, Bradyrhizobium japonicum USDA 110
MNGSQFERANIVAEELSATVASKTTDPIQEHNSRPPAEGLYDPSLEKDSCGVGFIANIKGKRSHKIVSDALSILCNLEHRGAVGADPRAGDGAGILVQIPHAFFSRKAKELGFTLPQPGEYAIGALFMPRDTAWRNVIKSIIADQIKEEGLTLLGWRDVPTDNSSLGVTVKPTEPACMQVFIGRNGTAKTEDDFERRLYILRKSISQAIYQRRDRGLAGYYPCSMSCRTVIYKGMFLADQLGKYYPDLHEADFESALALVHQRFSTNTFPAWSLAHPYRMIAHNGEINTLRGNTNWMAARQASVSSELYGKDINRLWPISYEGQSDTACFDNALEFLVQGGYSLPHAVMMMIPEAWAGNPLMDEKRRAFYEYHAALMEPWDGPAAIAFTDGRQIGATLDRNGLRPARYLVTKDDRIVMASEMGVLTIPEDQIITKWRLQPGKMLLVDLEQGRLIPDDEIKAELAKSHPYKEWLERTQIVLEELPKVPTTGVRSNLSLLDRQQAFGYSQEDITILMTPMAATGEEAAGSMGNDTPISALSDKAKPLFTYFKQNFAQVTNPPIDPIREELVMSLVSIIGPRPNLFDLQGMATTKRLEVRQPILTDADLEKIRSITDVADTHFKSRTLDTTFHAGLGAAGMDQVLDELCARAESAVREGVNIIILSDRMVGTDRVPIPALLACAAVHHHLIRVGLRTSVGLVVESGEPREVHHFACLAGYGAEAINPYLAFETIIAMKDRLPGSLDDYEIVKRYIKSIGKGLLKVMSKMGISTYQSYCGAQIFDAVGLKADFVGKFFAGTHTRVEGVGLAEIAEEAVRRHADAFGEALVYKTSLDVGGEYAYRSRGEDHAWTAESVGLLQHAARGNSLERYRAFAKILNEQSERLLTLRGLFRIKSAEEEKRKPVPLDQVEPAKDIVKRFATGAMSFGSISREAHTTLAIAMNRIGGKSNTGEGGEEADRFKPLPNGDSMRSAIKQVASGRFGVTTEYLVNSDMMQIKMAQGAKPGEGGQLPGHKVDATIAKVRHSTPGVGLISPPPHHDIYSIEDLAQLIYDLKNVNPTGDVSVKLVSEIGVGTVAAGVAKARADHVTIAGFEGGTGASPLTSIKHAGSPWEIGLAETHQTLVRERLRSRIVVQVDGGFRTGRDVVIGALLGADEFGFATAPLIAAGCIMMRKCHLNTCPVGVATQDPVLRKRFTGQPEHVINYFFFVAEEVREIMASLGFRTFNEMIGQVQLLDQTKLVAHWKAKGLDFSKLFVKQKEEKGQKIYHSERQNHHLEAVLDRTLIEQATPALDRGAPVKIDATINSTNRSAGAMLSGAVAKIYGHAGLPHDTIHVSLKGTAGQAFGAWLAHGVTFELEGEGNDYVGKGLSGGKIIVKPPKNSAIVPEESIIVGNTVMYGAIQGECYFRGIAGERFAVRNSGAIAVVEGAGDHCCEYMTGGIVVVLGKTGRNFAAGMSGGIAYVLDETGDFDKLCNLSMVELEPVLSEELINAGTYNHTGDLEAHGRVDVFKGLLDSDVERLHVLITRHAKATGSKRAADILANWKDWLPKFRKVMPVEYRRALREMAANADAEPKIAIGA

SEQ ID NO: 1021 - protein, 303 aa, Populus trichocarpa
MLSFAPDYDNLPLIAKVEVFEYALDNTEGNDLARVLWLKSRTSEVWLERRTNYTRSLAVMSMVGYLLGLGDRHPSNLMLHRYSGKILHIDFGDCFEASMNREKFPEKVPFRLTRMLLKAMEVSGIEGNFRSTCENVMQVLRTHKDSVMAMMEAFVHDPLINWRLFNFNEVPQMSMFTNSHVPAVVNAEESAPSRELPQPQRSARERELLQAVNQLGDANEVLNERAVVVMARMSNKLTGRDFSTPSFTASSIQHAVDHSSLISGDTREVDHGLSVKLQVQKLIIQATSHENLCQNYVGWCPFW

SEQ ID NO: 1022 - protein, 442 aa, Agrobacterium tumefaciens str. C58
MSYHNPFTPPRKSATFDDHTLAEIRRAAATGIYDIRGAGTKRKVPHFDDLLFLGASISRYPLEGYREKCDTTVTLGTRFAKKPITLKTPITIAGMSFGALSGNAKEALGRGATIAGTSTTTGDGGMTDEERGHSQTLVYQYLPSRYGMNPKDLRRADAIEVVVGQGAKPGGGGMLLGQKISDRVANMRNLPKGIDQRSACRHPDWTGPDDLEIKILELREITDWEKPIYIKVGGARPYYDTALAVKAGADVVVLDGMQGGTAATQDVFIENVGMPTLACIRPAVQALQDLGMHRKVQLIVSGGIRSGADVAKALALGADAVAIGTAALVALGDNDPHWEEEYQKLGTTAGAYDDWHEGKDPAGITTQDPELAARLDPVAAGRRLANYLKVMTLEAQTIARACGKNHLHNLEPEDLVALTMEAAAMAQVPLAGTNWFPGKGSF

SEQ ID NO: 1023 - protein, 2481 aa, Arabidopsis thaliana; identical to SEQ ID NO: 347

SEQ ID NO: 1024 - protein, 1616 aa, Zea mays; identical to SEQ ID NO: 472

SEQ ID NO: 1025 - protein, 542 aa, Mycobacterium smegmatis str. MC2 155
MTLESTARDVQLASLADLPDNTPFAANVAGVDLVLIRRGGDVKALYGRCAHRGVLLADGHIDGDTVVCDVHGWRYNVETGISPVNPAVALATFPVQIRDGAVYVDVSAISEFANANPQPYGDDGYQGRWATPANTAEEPFNTDIHELATHGLSRVGKHGPSAAMGVSRTELPSWDSIQLVTAQLARLPLLDQEPVSTETVIGPGAKRPLVLDIPLFVSDMSFGALSEEAKTALAAGAELAGTGICSGEGGMLPEEQQENSRYFYELASGRFGWSFEHLHKVQAFHFKGGQGAKTGTGGHLPGSKVVGKIADVRGLPPGTSAISPARFPDWTSLAEYRDFAAQVRDISGGIPVGYKLSAQHIERDLDAALEIGVDYVILDGRGGGTGSAPTIFPRHISVPTIPALARARRHLDRSESRITLAVTGGIRTPADMVKALALGADAIGVANSAIQAIGCVGMRACHTNACPAGIATQDPHLRARLPVRQAAERLNRYLRSAVDLMVVLARACGHHRLAEFTLDDLTTFDRDFAYLSGVPYGGVTPL

SEQ ID NO: 1026 - protein, 423 aa, Oryza sativa Japonica Group
MGNRIGGRRKAGVEERYTRPQGLYEHRDIDQKKLRKLILEAKLAPCYMGADDAAAAADLEECPICFLYYPSLNRSKCCSKGICTECFLQMKPTHTAQPTQCPFCKTPSYAVEYRGVKTKEERSIEQFEEQKVIEAQMRMRQQALQDEEDKMKRKQNRCSSSRTITPTKEVEYRDICSTSFSVPSYRCAEQETECCSSEPSCSAQTSMRPFHSRHNRDDNIDMNIEDMMVMEAIWRSIQGSIGNPVCGNFMPVTEPSPRERQPFVPAASLEIPHGGGFSCAVAAMAEHQPPSMDFSYMAGSSAFPVFDMFRRPCNIAGGSMCNLESSPESWSGIAPSCSREVVREEGECSADHWSEGAEAGTSYAGSDIVADAGTMPQLPFAENFAMAPSHFRPESIEEQMMFSMALSLADGHGRTHSQGLAWL

SEQ ID NO: 1027 - protein, 1510 aa, Corynebacterium glutamicum
MKPQGLYNPAHEHDACGVAFIADIHGRPSRSIVDRALEALRNIDHRGAAGAEKNTGDGAGILMQIPDGFYREVSGIELPEAGEYATGIAFLPRGRMAMMDAQKEIERIAKQEGADVLGWRMVPFDSRELGSMAEEAMPSFAQIFLTVPGKSGEDLDRVMFFIRKRCERELGTTNGRDTVYFPSLSSRTIIYKGMLTTLQLEGFFEDLGDARLESAIAIVHSRFSTNTFPSWPLAHPYRFVAHNGEINTVRGNENWMRAREALIKNDKLGNLSSVLPICTPEGSDTARFDEALELLHLGGYSLPHAVAMMIPQAWEHNKTLSPELRDFYEYHSCLMEPWDGPAALAFTDGRFVGAVLDRNGLRPGRITITDSGLVVMASESGVLDLREESVVKRTRVQPGRMFLVDTAEGRIVEDEEIKQKLSEAQPYGEWIRDNFVHLDRLPQTRYNYMAHSRAVLRQRVFGITEEDVDLLLLPMARQGAEAIGSMGSDTPIAALSQRPRMLYDFFAQRFAQVTNPPLDSIREKPVTSMFTLLGAQSDVLNPGPDAARRIRLESPIIDNHELATLINANAHGEWDSFGAAVISGLYPVAHHGAGMKAAIARVRREVSEAIRNGKTLIVLSDRESDERMAPIPALLLTSAVHQYLVQQRTRTQCSLVVESGDAREVHHLAMLIGFGADAINPYMAFETIDELRMKGQLGDLSLDEASRNYIKAATTGVLKVMSKMGIATVSSYRGAQLADVTGLHQDLLDNYFGGIASPISGIGLDEVAADVEARHRSAFLPRPEEHAHRELDLGGEYKWRREGEYHLFNPETIFKLQHATRSGSYEIFKDYTRKVDDQSTRLGTIRGLFEFSTDRKPISVSEVEPVSEIVKRFSTGAMSYGSISAEAHEVLAIAMNRLGGMSNSGEGGEDARRFDVEPNGDWKRSAIKQVASGRFGVTSHYLNNCTDIQIKMAQGAKPGEGGQLPPNKVYPWVAEVRITTPGVGLISPPPHHDIYSIEDLAQLIHDLKNANPRARIHVKLVAEQGVGTVAAGVSKAHADVVLISGHDGGTGASPLTSLKHAGGPWELGLAETQQTLLLNGLRDRIRVQCDGQLKTGRDVVIAALLGAEEFGFATAPLVVEGCIMMRVCHLDTCPVGIATQNPDLRSKFTGKAEHVVNFFTFIAQEVREYLAQLGFRSIDEAVGQAQVLRKRSGIPADSRAAHLDLSPIFHRPETPHFPTQDVRCTKTQEHSLEKALDNAFIDKASDTITRAAAGVETSIVIDSSISNVNRSVGTMLGSAVSRVAGAQGLPDGTITLNLQGCAGNSFGAFIPRGITINLTGDANDFVGKGLSGGKIVIKPSAQAPKQLKNNPNIIAGNVLGYGATSGELFIRGQVGERFCVRNSGATAVVEGIGNHGCEYMTGGRVLVLGPVGENFGAGMSGGIAYLANSPDLNQKINGELVDVVPLSADDLTWADELIARHRELTGSETKLRAQDLVKIMPRDFQKVLNIIETAHAEGQDPAIKIMEAVS

SEQ ID NO: 1028 - protein, 1428 aa, Bacillus anthracis str. A2012
MNHRAGFINGEGDGIGIHIDVPKALWNEKLKSSGYNPTIVDHPHFIVGHFFLNKNENIVDLKNHIRTQLNNENFAILFESDNVINSDALGPLGKQEEPLFWQVALIAENEVVNIEQTLFSVTIKIEENEAIHVASLSRDHVVYKVLGAGDTLVAYYNDLQHPLIASTMTLGHNRYSTNTLSNFFRVQPFSILGHNGEINTIAKLRDQAEMIHVPLTAGGSDSQDLNRTLETLLVQYGYSLFEAMDILFPPIINEIKLYETHLQDLYTYIREAWGHFAQGPAGIISRYKDEAVFSVDSLGLRPVWKVEIESSYIFSSEPGVVSPTEYVAEPKPLAPGEKVGLKWNEQDELVLYEHDDYQTQVYNRFKKKVDVTNYHLHLSIPKTKEIPDACDSMQVETKQYVAFGWDREHIQLLEQMATKGVEPIRSLGHDSPLAALDTDRRNIADFIKESVAVVTNPAIDRDREVEHFSTRTILGERPSLLSDAKKPFVVEMLSPIILEGSVAQSIAQELHTITYEQLIELFNTHSSIATISATFSQAETLQCALSRISSEAITAVNDGASLLLIDDADAHLNERLWIDPHLVTAKVHQVLSENKLRRNCSLVIRSGALRSLHDIVTLHGLGADSINPYLLFATVNDGTKTPITNLYNALNKGLEKVISTIGIHELRGYGRLYSSIGLHEEIANILQITNFLGSNDLAFSLESLAEDAQMRADDYNDPKVRIRKSFHIFPRIWKAIGDVAKGNSYDDYRDKLSELEENNPIAIRHLIQTKETKHVIPTEEVSISIQNHDLPFIISSMSFGSQNEIAFRAYAEAADQLNMISLNGEGGEIKDMIGKYPHTRGQQVASGRFGVNAELLNSSNLIEIKIGQGAKPGEGGHLPGSKVTAKIAEARNATIGSDLISPSNNHDIYSIEDLAQMITEIKTANQLAKVAVKVPVVPNIGTIAVGIAKAGADFINISGFDGGTGAARIHALQHVGLPVEIGVKAAHNALLEANMRHNVEIWADGGIRSVNDALKIMLLGANRIGFGTLSMIAIGCTTCRGCHLDTCHVGIATQIESEAQAKEHGLRRFVPRELESAVAGLLHLFTTFGEELKRLTGNLGYTNLQEIVGRSDLLEQVRGKNLLNLCNLLQTIEHPSVIKTEHVLEKQFEPIHSPHSKELVGVGVEQRVMGGLESCYRVRSKLYEDTKLEPLTLKYTNGSIPGNGLGAYNSENLFIHVNGGAQDGIGKTSFGGGIYITKAKGKDGLYYNGSVGKGFGYGAQKGALYVQGNADARAGIRLSGADMIIGGRMTKPLREKEQGNIGAYSNIKGFAFEYMTNGRALVLGDPGPWICAGMTGGVVYLRHDSSLGLTEQALKRRIAKGANVTLQPISKNGVRDVNELLLDYIRVLNEHEQYEEVALLTPLLDDMQQQFFEIIPKKEQADPSISTE

SEQ ID NO: 1029 - protein, 549 aa, Pseudoalteromonas tunicata D2
MTLMQKFYYWIATLGNLGAGYLWLKWPSKTTAFLFSFTMLYTVVGFYDLRYSKHSLNRLYPVVAYIRYFLESFRREIQQYFIANNTEETPFNREQRSLVYQRAKNERDTIAFGTQRDLMAANYLSLWHSLAPTDVHANNKRVLIGGPDCLEPYSADYLNISAMSFGALSANAIEALNLGARIGGFYHNTGEGGVSPYHLKHGGDLVWQIGSGLFGCRGSDGRFDSEKFTAMAQKTSIKMIEIKLSQGAKPGHGGVLPKAKISDEIAQIRGIDKQHDCVSPAAHPECTTPIDLLMFVKQLRELSGGKPIGFKLCLGNPAEFLAICKAMLETNILPDFITIDGAEGGTGAAPVEFSNRLGLTCLESLYLANSALRGCGLRDKITLIGAGKTASSFDLLAKIAVGADVVNAARTMMMALGCIQSLSCNTNMCPTGIATQDDARGKAIDVPVKGQRVANFQRNTLHSFFELVGSMGLDDPKNLTPAMIKRRTQNGLMISYGAAIPLLAENALFDTEQLSYPWSIWWQQASSAQFYVPEGDMLCPPGLKLQHIV

SEQ ID NO: 1030 - protein, 922 aa, Salmonella typhimurium
  misc_feature (188)..(188): Xaa can be any naturally occurring amino acid
LRAFFDFNSMHMEPWDGPAGIVMSDGRFAACNLDRNGLRPARYVITKDKLITCASEVGIWDYQPDEVVEKGRVGPGELMVIDTRGGRILHSAETDDDLKSRHPYKEWMEKNVRRLVPFEELPDEEVGSRELDDDLLASYQKQFNYSAEELDSVIRVLGENGQEPVGSMGDDTPFCVLSSQPRIIYDYXRQQFAQVTNPPIDPLREAHVMSLATSIGREMNVFCEAEGQAHRLSFKSPILLYSDFKQLTTMKEEHYRADMLDITLDVTKTRLEATVKELCDKAEKMRSGGPVLLVLSDRNIGKDRLPVPAPMAVGAVQTRLVEQSLRCDANIIVETGSARDPHHFAVLLGFGATAIYPYLAYETLGRLIDTQAIAKNYRTNMQNYRNGINKGLYKIMSKMGISTIASYRCSKLFEAVGLHDDVVNLCFQGVVSRIGGASFDDFQQDLLNLSKRAWLARKPISQGGLAKYVHGGEYHAYNNPDVVRTLQQAVQSGEYSDYQEYAKLRNERPATTLRHLLAITPGQNAVNEADVEPASELFKRFDTAAMSITALSPEAHELAEAMNSIGGNSNSGEGGEEPARYGTNKVSRIKQVASGRFGVTPAYLVNADVIQIKVAQGAKPGEGGQLPGDKVTPYIAKLRYSVPGVTLISPPPHHDIYSIEDLALIFDLKQVNPKAMISVKLVSEPGVGTIATSGVAKAYADLITIAGYDGGTGASPLSSVKYAGCPWELGLVETQQALVANGLRHKIRLQVDGGLKTGVDIIKAAILGAESFGFGTGPMVALGCKYLRICHLNNCATGVATQDDKLRKNHYHGLPFKVTNYFEFIAREVRELMASLGVTRLVDLIGRTDLLKELEGFTAKQQKLALSRLLETAEPHPGKALYCTENNPPFDNGVLNAQLLQQAKPFVDARQSKTFWFDIRNT

SEQ ID NO: 1031 - protein, 1548 aa, Nostoc sp. PCC 7120
MNDNSTHQNQQITANNNSGDTYQGQRWLVEERDACGVGFIAHRQNLGSHELWLKLCALTCLEHRGGCSADQDSGDGAGILTAIPWELLQQDYPQGQIDFLSSKNIAVGMIFLPQDGEVARKAKAIFEQIATEENLTVLGWRVVPVQPDLFGDTGKENQPRIEQVILSADNSGDALERQLFIARKRLIQSGKKVSLEFYICSLSSRTIVYKAMVRSAVLGAFYLDLQNPAYKSAFAVYHRRFSTNTMPKWPLAQPMRLLGHNGEINTLLGNINWMMAREANLRSSHFFWGDRFDELKPSVLMGNSDSATLDNVLELLVHSGRSPLEALMIMVPEAYQNQPSLRNYPEIIDFYEYYSGLQEAWDGPALLVFGDGKTVGATLDRNGLRPARYLITKDDYIVVASEAGVVDFPEADIIEKGRLGPGQMIAVDLVNHEVLKNWEIKQRIAKQQPYGEWLKKYRPTLKSFTIQVNGKHVTTAKIDKETLLRNGLAFGYTTEDVEMVIQPMAATGSEPTFCMGDDIPLAVLTDKPHLLYDYFKQRFAQVTNPAIDPLREKLVMSLKVELGERGNLLEPKPEYVRRLKLESPVLLESELAAIKLSGFATAELSTLFAIASGPDGLKAAVLALQQQAAESVRAGAKILILNDRAGEGISTEYSYIPPLLAVGAVHHYLIREGLRTKTSLIVNTAQCWSTHHFACLIGYGAGAVCPYLALETVRNWWSDPATQQFMERGKITSLSLEQAIANYRKAVESGLLKILSKMGISLLSSYQAAQIFEAIGIGGDLLALGFQGTASRIGGLSVSELAQEVLSIHSKAFPELATHKLENLGFVNYRPTGEYHMNNPKLAKALHEAVDGKKYDHYEVYKQYLQDRPITALRDLLDFHSDRTPISLEEVESVSDIVKRFCTGGMSLGALSREAHETLAIAMNRTGIGGKSNSGEGGRKTQIRFKVLGRIGHSPTLPHLRGLRNGDTASSAIKQVASARFGVTPEYLMSADQIEIKMAQGAKPGEGGQLPGPKVSQYIAMLRRSKPGVTLISPPPHHDIYSIEDLAQLIYDLHQINPKAQVSVKLVAEIGIGTIAAGVAKANADIIQISGHDGGTGASPLSSIKHAGSPWELGLSEVHRVLMENSLRRSLVLRVDGGLKSGWDVLIGALMGAEEFGFGSIAMIAEGCIMARICHTNNCPVGVASQKEELRKRFTGIPEHVVNFFYFVAEEVRHLLAKLGYRSLSEIIGRADILTTRKDVQLSQTQAINLNCILQLPDTKENRCWLVHEQVHSNGPVVDDQLLADPDIQAAIRNQSAVTKTLPIVNTDRTLGARLAGAIASQYGDSGFEGQINLNFTGSVGQSFGAFNLPGIILHLKGEANDYVGKGMHGGEIIIKPPTEATYDPAQNVIVGNTCLYGATGGVLFANGLGGERFAVRNSKGVAVIEGTNDHCCEYMTGGTIVVLGKVGRNVAAGMTGGLAYFLDEDGLFPELVNREIVKIQRVLTTAGEKPLQDLIQAHAERTGSPKAQMILDNWQEFLPKFWQLVPPSEAESQEANPDVVVEKIILS

SEQ ID NO: 1032 - protein, 847 aa, Chlamydomonas reinhardtii
AICPYLGYETSRQWRLSARTQSLIKAGKVPDISVKVAQKNFKKSLEKGVLKILSKMGISLLSCYHGAQIFEAYGLGKDVMDMCFKGTVSRIGGMSLADLQRESESLWAKGFPQKAMTKLEDYGFIQSKPKGEFHSNNQTMAKLLHKAIGLGNGSAADKDAYKAYQQHFADRRGRLRDCLEFKSDRGPISIDQVEPAAAIMERFCTGGMSLGAISCETHEQIAIAMNRIGGKSNSGEGGEDPIRWLHLSDVDGEGKSAHRLLPGGLRNGDTATSKIKQVASGRFGVTPEYIMNAEQMEIKIAQGAKPGEGGQLPGQKVSPYIAQLRRSKPGVPLISPPPHHDIYSIEDLAQLIYDLHQVNPRAKVSVKLVAEAGIGVVASGVAKANADIIQVSGHEGGTGASPISSIKHAGGPWEMGLAETHQTLVPNELRERVVLPVDGGVRNGRDVLMAALMGADEFGFGTVAMIATGCIMARVCHTNNCPVGVASQREELRARFPGAPEDLVNYFHFVAEEVRAELANLGYRSLDEVIGRADLLKQRSVKLAKTEGLDLSFLTTFAGASGKSSTRRAQEVHDNGPQLDDRILAEPEVMAAIKDHKPCPRPSSRNVDRPARPVAGVYRQAPRRQRLPGKVMTLTGSAGQSFGCFCVKGLEVKLVGEANDYVGKGMNGGIAIVPPANSPFKPEEASLLGNTCLYGATGGRLFVNGRAGERFAVRNSLAEAVVEGAGDHCCEYMTGGCVIVLGSVGRNVAAGMTGGLGYFLDEDGSFTDKVNTEIVSVQRVITKAGEAQLRGLLEAHVAHTGSAKAKSLLANWEASLGKFWQLVPPAEKNTAEVKPLGGAAGGGWRSA

SEQ ID NO: 1033 - protein, 66 aa, Medicago truncatula
MPPGTRRFYNRIGRDMVSYSAAKNLDEGPPDDVMETTSSHGQWSIFHGSQVAEMTTSYANSVDAKD

SEQ ID NO: 1034 - protein, 105 aa, Triticum aestivum
  misc_feature (22)..(22): Xaa can be any naturally occurring amino acid
APCFDAAEEDGRAVECPICFLXYPSLNRSKCCGKGICTECFLQLMPSKASKAVHCPFCKTAAYAVEYRGARTLSEKKLQREEEQSVYEGATRIHSKNAGGHILLP

SEQ ID NO: 1035 - protein, 177 aa, Glycine max
MAESDNESGGHTGNASGSNELSGCREQDRFLPIANVSRIMKKALPANAKISKEAKETVQECVSEFISFITGEASDKCQKEKRKTINGDDLLWAMTTLGFEDYVDPLKIYLHKYREMEGEKTAMMGRPHERDEGYGHGHGHATPMMTMMMGHQPQHQHQHQHQGHVYGSGSASSARTR

SEQ ID NO: 1036 - protein, 1518 aa, Frankia sp. CcI3
MPSAQGLYDPTFEHDACGVGFVVDVHGRRSHELVEQGLTVLRNLDHRGASGSDPDTGDGAGILVQVPDLFLRDVVDFTLPAPGRYAVGIAFLPQVSGERDEAVRTISRIVRQEGLRVLGWREVPVVSHIVGHAAHEVEPRMRQLFLALPGSLPAAGPVEGGAGNGFDQADLERRAFCARKRIRRETGVYLASLSSRTLVYKGMLTTHQLSAYFPDLDDPRFTSAIALVHSRFSTNTFPSWPLAHPYRFVAHNGEINTVRGNRNWMRAREALLASDLIPGDLSRLFPVCADGASDSASFDEVLELLYLGGRSLPHAVLMMIPEAWENHTEMDPALRAFYQFHSTLMEPWDGPASIAFTDGTVIGAVLDRNGLRPSRYWVTDDGLVVMASEVGVLDIPPHKVVQKGRLQPGRMFLVDTAEGRIVSDEEIKSELANAAPYAEWLHAGLIELDDLPEREQLLYGHSSVLRRQQVFGYTLEELRVLVAPMARTGAEPIGSMGTDTPVAVLSSRPRLLFDYFTQLFAQVTNPPLDAIREELVTSLGRVLGPEGNLLAPSPASCRMVHLPYPVISSSQLSKIIGINDDGDMPGFASVTVRGLYDVDGGGAALAARLAEICAGVSEAIADGARIVVLSDRDSDTRKAPIPSLLLTAAVHHHLIRERTRTKVGLIVECGDAREVHHIALLTGYGAAAVNPYLAFESIDSLIAEGEIVGVSREQAEKNMIKALGKGVLKVMSKMGISTVASYTGAQVFEAIGLSQELIDAYFAGTPSRLDGIGLDVIAAEVAARHRRAYPPIASEHAHRTLEVGGEYQWRREGELHLFNPETVFLLQHATRTRQYETFQKYTARVDGLSRENATLRGLFELRTGVRTPVPIEEVEPASEIVKRFATGAMSYGSISAEAHETLAIAMNRLGGKSNTGEGGEDAERFTPDANGDLRRSAVKQVASGRFGVTSEYLANADDIQIKMAQGAKPGEGGQLPGHKVYPWIAKTRHSTPGVGLISPPPHHDIYSIEDLAQLIHDLKNANPKARVHVKLVAEVGVGTVAAGVSKAHADVVLISGHDGGTGASPLTSLKHAGAPWELGLAETQQTLLLNGLRDRIVVQVDGQLKTGRDVIVGALLGAEEFGFATAPLVVAGCVMMRVCHLDTCPVGVATQNPELRRRFTGRPEFVEAFFTFIAEEVRTYLAALGFRSLQEAVGRVDLLDARAAVDHWKASGLDITPLLHTPERPFGGSLNCTSSQDHGLDKALDNSLIQLCEGALDDGRPVWLEMPIRNVNRTVGTMLGYEVTKRFGAAGLPDDTIQLRFTGSAGQSFGAFAPRGMTLTLEGDANDYAGKGLSGGKIFVFPPKESPLRAEENIVAGNVLLYGATGGEAFFRGIVGERFCVRNSGATAVVEGVGDHGCEYMTGGTVLVLGAIGRNFAAGMSGGVAYLYDPVEARINTEMVDVEALDDADETIVRDLLVRHRRETGSTVAARLYTDWDTVRGSFRKVMPRDYKRVLTAIRQAQEQGLVADEVIMAAARG

SEQ ID NO: 1037 - protein, 539 aa, Burkholderia sp. 383
MLSRRYLAMWCAVLLLVAAAALASIHVLSWFWIIIPVALVALGLYDLKQDRHAILRNYPLWGHFRFLFEFIRPEIRQYFVEDDTDEKPFSRAQRSLVYQRAKNVADNRPYGTELNVKAVAHEWISHSLAPTKLPNHDFRVRVGANRAQPYDISIFNISAMSFGSLSANAIRSLNLGAKKGGFAHDTGEGSLSKYHRENGGDIIWEIASGYFGCRNDDGTFNPDKFAKQAADPQVKMIEVKLSQGAKPGHGGVLPAAKITPEIAETRGVPMGKDCISPATHSEFSTPRGLLEFVERLRTLSGGKPTGFKLCVGHPWEFFGIAKAMLETGIVPDFIVVDGAEGGTGAAPLEFTDHVGVPLQEGLLLVHNTLVGIGVRDRVKLGASGKIITAFDVARTLAIGADWVNSARGFMFAVGCIQAQTCHTGRCPTGVATQDPVRQRALVVPDKADRVYNFHRNTLHALQELVQAAGLAHPSELRAHHIVQRIAPHEVRLMSQLLKYLKPGSLLDGNTCGFTLYDKWWPIARSDSFTLGEAVYASIE

SEQ ID NO: 1038 - protein, 2474 aa, Saccharomyces cerevisiae
MNKYINKYTTPPNLLSLRQRAEGKHRTRKKLTHKSHSHDDEMSTTSNTDSNHNGPNDSGRVITGSAGHIGKISFVDSELDTTFSTLNLIFDKLKSDVPQERASGANELSTTLTSLAREVSAEQFQRFSNSLNNKIFELIHGFTSSEKIGGILAVDTLISFYLSTEELPNQTSRLANYLRVLIPSSDIEVMRLAANTLGRLTVPGGTLTSDFVEFEVRTCIDWLTLTADNNSSSSKLEYRRHAALLIIKALADNSPYLLYPYVNSILDNIWVPLRDAKLIIRLDAAVALGKCLTIIQDRDPALGKQWFQRLFQGCTHGLSLNTNDSVHATLLVFRELLSLKAPYLRDKYDDIYKSTMKYKEYKFDVIRREVYAILPLLAAFDPAIFTKKYLDRIMVHYLRYLKNIDMNAANNSDKPFILVSIGDIAFEVGSSISPYMTLILDNIREGLRTKFKVRKQFEKDLFYCIGKLACALGPAFAKHLNKDLLNLMLNCPMSDHMQETLMILNEKIPSLESTVNSRILNLLSISLSGEKFIQSNQYDFNNQFSIEKARKSRNQSFMKKTGESNDDITDAQILIQCFKMLQLIHHQYSLTEFVRLITISYIEHEDSSVRKLAALTSCDLFIKDDICKQTSVHALHSVSEVLSKLLMIAITDPVAEIRLEILQHLGSNFDPQLAQPDNLRLLFMALNDEIFGIQLEAIKIIGRLSSVNPAYVVPSLRKTLLELLTQLKFSNMPKKKEESATLLCTLINSSDEVAKPYIDPILDVILPKCQDASSAVASTALKVLGELSVVGGKEMTRYLKELMPLIINTFQDQSNSFKRDAALTTLGQLAASSGYVVGPLLDYPELLGILINILKTENNPHIRRGTVRLIGILGALDPYKHREIEVTSNSKSSVEQNAPSIDIALLMQGVSPSNDEYYPTVVIHNLMKILNDPSLSIHHTAAIQAIMHIFQNLGLRCVSFLDQIIPGIILVMRSCPPSQLDFYFQQLGSLISIVKQHIRPHVEKIYGVIREFFPIIKLQITIISVIESISKALEGEFKRFVPETLTFFLDILENDQSNKRIVPIRILKSLVTFGPNLEDYSHLIMPIVVRMTEYSAGSLKKISIITLGRLAKNINLSEMSSRIVQALVRILNNGDRELTKATMNTLSLLLLQLGTDFVVFVPVINKALLRNRIQHSVYDQLVNKLLNNECLPTNIIFDKENEVPERKNYEDEMQVTKLPVNQNILKNAWYCSQQKTKEDWQEWIRRLSIQLLKESPSACLRSCSSLVSVYYPLARELFNASFSSCWVELQTSYQEDLIQALCKALSSSENPPEIYQMLLNLVEFMEHDDKPLPIPIHTLGKYAQKCHAFAKALHYKEVEFLEEPKNSTIEALISINNQLHQTDSAIGILKHAQQHNELQLKETWYEKLQRWEDALAAYNEKEAAGEDSVEVMMGKLRSLYALGEWEELSKLASEKWGTAKPEVKKAMAPLAAGAAWGLEQWDEIAQYTSVMKSQSPDKEFYDAILCLHRNNFKKAEVHIFNARDLLVTELSALVNESYNRAYNVVVRAQIIAELEEIIKYKKLPQNSDKRLTMRETWNTRLLGCQKNIDVWQRILRVRSLVIKPKEDAQVRIKFANLCRKSGRMALAKKVLNTLLEETDDPDHPNTAKASPPVVYAQLKYLWATGLQDEALKQLINFTSRMAHDLGLDPNNMIAQSVPQQSKRVPRHVEDYTKLLARCFLKQGEWRVCLQPKWRLSNPDSILGSYLLATHFDNTWYKAWHNWALANFEVISMLTSVSKKKQEGSDASSVTDINEFDNGMIGVNTFDAKEVHYSSNLIHRHVIPAIKGFFHSISLSESSSLQDALRLLTLWFTFGGIPEATQAMHEGFNLIQIGTWLEVLPQLISRIHQPNQIVSRSLLSLLSDLGKAHPQALVYPLMVAIKSESLSRQKAALSIIEKMRIHSPVLVDQAELVSHELIRMAVLWHEQWYEGLDDASRQFFGEHNTEKMFAALEPLYEMLKRGPETLREISFQNSFGRDLNDAYEWLMNYKKSKDVSNLNQAWDIYYNVFRKIGKQLPQLQTLELQHVSPKLLSAHDLELAVPGTRASGGKPIVKISKFEPVFSVISSKQRPRKFCIKGSDGKDYKYVLKGHEDIRQDSLVMQLFGLVNTLLQNDAECFRRHLDIQQYPAIPLSPKSGLLGWVPNSDTFHVLIREHREAKKIPLNIEHWVMLQMAPDYDNLTLLQKVEVFTYALNNTEGQDLYKVLWLKSRSSETWLERRTTYTRSLAVMSMTGYILGLGDRHPSNLMLDRITGKVIHIDFGDCFEAAILREKFPEKVPFRLTRMLTYAMEVSGIEGSFRITCENVMKVLRDNKGSLMAILEAFAFDPLINWGFDLPTKKIEEETGTQLPVMNANELLSNGAITEEEVQRVENEHKNAIRNARAMLVLKRITDKLTGNDIRRFNDLDVPEQVDKLIQQATSVENLCQHYIGWCPFW

SEQ ID NO: 1039 - protein, 191 aa, Cryptococcus neoformans var. neoformans B-3501A
MSEHTNLKSLAPLGNQPEPSANSAGVGPSKPFTEAQVEEFREQDRWLPIANVARIMKSSLPTSAKVSKEAKECVQECVSEFISFITSEAAEKCLNEKRKTLNGEDILTSMRALGFDNYEGVLRVYLAKYRDSHHSIPKRNAQHEDDDEEVQDGRKKRGRGRQPAGGTISTNGHAEGTKSKRKRSDDGKGVR

SEQ ID NO: 1040 - protein, 453 aa, Arabidopsis thaliana; identical to SEQ ID NO: 708

SEQ ID NO: 1041 - protein, 2145 aa, Saccharomyces cerevisiae
MPVLKSDNFDPLEEAYEGGTIQNYNDEHHLHKSWANVIPDKRGLYDPDYEHDACGVGFVANKHGEQSHKIVTDARYLLVNMTHRGAVSSDGNGDGAGILLGIPHEFMKREFKLDLDLDIPEMGKYAVGNVFFKKNEKNNKKNLIKCQKIFEDLAASFNLSVLGWRNVPVDSTILGDVALSREPTILQPLLVPLYDEKQPEFNETKFRTQLYLLRKEASLQIGLENWFYVCSLNNTTIVYKGQLTPAQVYNYYPDLTNAHFKSHMALVHSRFSTNTFPSWDRAQPLRWLAHNGEINTLRGNKNWMRSREGVMNSATFKDELDKLYPIIEEGGSDSAALDNVLELLTINGTLSLPEAVMMMVPEAYHKDMDSDLKAWYDWAACLMEPWDGPALLTFTDGRYCGAILDRNGLRPCRYYITSDDRVICASEVGVIPIENSLVVQKGKLKPGDLFLVDTQLGEMVDTKKLKSQISKRQDFKSWLSKVIKLDDLLSKTANLVPKEFISQDSLSLKVQSDPRLLANGYTFEQVTFLLTPMALTGKEALGSMGNDAPLACLNENPVLLYDYFRQLFAQVTNPPIDPIREANVMSLECYVGPQGNLLEMHSSQCDRLLLKSPILHWNEFQALKNIEAAYPSWSVAEIDITFDKSEGLLGYTDTIDKITKLASEAIDDGKKILIITDRKMGANRVSISSLIAISCIHHHLIRNKQRSQVALILETGEAREIHHFCVLLGYGCDGVYPYLAMETLVRMNREGLLRNVNNDNDTLEEGQILENYKHAIDAGILKVMSKMGISTLASYKGAQIFEALGLDNSIVDLCFTGTSSRIRGVTFEYLAQDAFSLHERGYPSRQTISKSVNLPESGEYHFRDGGYKHVNEPTAIASLQDTVRNKNDVSWQLYVKKEMEAIRDCTLRGLLELDFENSVSIPLEQVEPWTEIARRFASGAMSYGSISMEAHSTLAIAMNRLGAKSNCGEGGEDAERSAVQENGDTMRSAIKQVASARFGVTSYYLSDADEIQIKIAQGAKPGEGGELPAHKVSKDIAKTRHSTPNVGLISPPPHHDIYSIEDLKQLIYDLKCANPRAGISVKLVSEVGVGIVASGVAKAKADHILVSGHDGGTGAARWTSVKYAGLPWELGLAETHQTLVLNDLRRNVVVQTDGQLRTGFDIAVAVLLGAESFTLATVPLIAMGCVMLRRCHLNSCAVGIATQDPYLRSKFKGQPEHVINFFYYLIQDLRQIMAKLGFRTIDEMVGHSEKLKKRDDVNAKAINIDLSPILTPAHVIRPGVPTKFTKKQDHKLHTRLDNKLIDEAEVTLDRGLPVNIDASIINTDRALGSTLSYRVSKKFGEDGLPKDTVVVNIEGSAGQSFGAFLASGITFILNGDANDYVGKGLSGGIIVIKPPKDSKFKSDENVIVGNTCFYGATSGTAFISGSAGERFGVRNSGATIVVERIKGNNAFEYMTGGRAIVLSQMESLNAFSGATGGIAYCLTSDYDDFVGKINKDTVELESLCDPVEIAFVKNLIQEHWNYTQSDLAARILGNFNHYLKDFVKVIPTDYKKVLLKEKAEAAKAKAKATSEYLKKFRSNQEVDDEVNTLLIANQKAKEQEKKKSITISNKATLKEPKVVDLEDAVPDSKQLEKNSERIEKTRGFMIHKRRHETHRDPRTRVNDWKEFTNPITKKDAKYQTARCMDCGTPFCLSDTGCPLSNIIPKFNELLFKNQWKLALDKLLETNNFPEFTGRVCPAPCEGACTLGIIEDPVGIKSVERIIIDNAFKEGWIKPCPPSTRTGFTVGVIGSGPAGLACADMLNRAGHTVTVYERSDRCGGLLMYGIPNMKLDKAIVQRRIDLLSAEGIDFVTNTEIGKTISMDELKNKHNAVVYAIGSTIPRDLPIKGRELKNIDFAMQLLESNTKALLNKDLEIIREKIQGKKVIVVGGGDTGNDCLGTSVRHGAASVLNFELLPEPPVERAKDNPWPQWPRVMRVDYGHAEVKEHYGRDPREYCILSKEFIGNDEGEVTAIRTVRVEWKKSQSGVWQMVEIPNSEEIFEADIILLSMGFVGPELINGNDNEVKKTRRGTIATLDDSSYSIDGGKTFACGDCRRGQSLIVWAIQEGRKCAASVDKFLMDGTTYLPSNGGIVQRDYKLLKELASQV

SEQ ID NO: 1042 - protein, 1557 aa, Erythrobacter sp. SD-21
MQVSAHHNPGEGPLSQGLYDPRNEHDACGVGMVAHIKGEKSHAIIEQALTILANLDHRGAVGADPLLGDGAGILIQTPDPLIRKWAEAHEYDLPAEGDYALAMCFLPQEEEARQFVESQLERFAEKEGQRVVGWRDVPTTLDGLGDAVIASMPVIRQCVIARGMNCASREAFERKLVVIRKQTLNPLAALEAKHNIPGLSQAYIPSFNSRTVVYKGLLLANQVGSFYDDLRDPDCVSALGLVHQRFSTNTFPSWRLAHPYRFMAHNGEINTVRGNVNWMEARRRTMESELLGADLDKMWPLIPHGQSDTACLDNALELLLTGGYSLAHSMMMLMPEAWAKNELMDPARRAFYEYHAALMEPWDGPAAVCFTDGKQIGACLDRNGLRPARWCTTKDDLVVLASESGVLPFEEDEITRKWRLQPGKMLLIDLEEGRIVTDEELKADLAAAEPYEAWLEKAQYKLADLDHIEPDLSEIAESTIPLLNRQQAFGYTQEDISRFLEPMAANGEDPIGSMGTDTPIAVLSEKSRLLYDYFKQNFAQVTNPPIDPIREELVMSLLSMIGPRPNLLGRDGGTHKRLEVSQPILTNTDLAKIRSVEVALDGAFRTATIDITWDASTGADGLAMALKEMCWAATEAVLGDANILILSDRNQGPDRIAMPALLATAAVHHQLVRQGLRMQTGLVIETGEAREVHHFCALAGYGAEGINPYLAFETLEDLRARKLPDLDPEVVQTNFVKAVGKGILKVMSKMGISTYQSYCGAQIFDAVGLSSDFIDTYFTGTATTIEGIGLKEVAEETVRRHAQAFGDSPLYKGMLDVGGIYQYRIRGEDHAWTPQNIANLQHAVRGSDPKNYEEFAKSVNEQSERLLTIRGLMELKKAERPLDIDEVEPAAEIVKRFSTGAMSFGSISHEAHSTLAIAMNRIGGRSNTGEGGEEPERFQPLDNGDSMRSRIKQVASGRFGVTAEYLVNSDDIQIKMAQGAKPGEGGQLPGHKVDKRIGKVRHSTPGVGLISPPPHHDIYSIEDLAQLIHDLKNVQPDSRISVKLVSEVGVGTVAAGVSKSKADHITISGYEGGTGASPLTSLTHAGSPWEIGLAETQQTLLLNDLRSRIAVQVDGGLRTGRDVAIGALLGADEFGFATAPLIAAGCIMMRKCHLNTCPVGVATQDPVLRKRFTGTPEHVINYFFFVAEELRQIMGEMGFRTVEEMVGRVDKLDMRRVRRHWKAHGVDLGRILHEVPLKEGQPLHHTETQDHGLAAAMDVELIEACKPAIESGQAVQLTRSIRNVNRTVGTMLSGRIAEAYGHHGLPQDTIRIDLTGVAGQSFGAWLAHGVTMSLTGDANDYVGKGLSGGRIVVKPPQGVGREPTDNIIVGNTVLYGAIAGEAYFAGVAGERFAVRNSGAVTVVEGTGDHALEYMTGGVVCVLGKTGRNVAAGMSGGIAYVYDPDGEFDRLVNHAQVDILDVKPGDGEGAEKSWGKPQQRAVSVENPGMGDPLYHDAERLKVLVERHHLHTGSGHAKALLDEWGNELKNFRKVMPRDYARALKTLEDEREDAAMEAAE

SEQ ID NO: 1043 - protein, 507 aa, Desulfovibrio vulgaris subsp. vulgaris str. Hildenborough
MRSKPISQHFNDFVVERERARCIDCEVCVRQCSYGVHFWDEARKRVEHDSSKCVGCHRCAAMCPTDCLTIRRKPSDFRENALWTPAFIKNIYKQSDTGGVLLSGMGCPSPKPVYWDNMLLDASQVTNPSIDPLREPMELRTFLGGRPDRLVFEETPQGPKLQTEIGPQLQLEYPIMFAAMSFGAINYNLHEAMAKAATELGTFYNTGEGGLHPDLYPYGANTIVQVASGRFGVHKDYLNAGSAVEIKVGQGAKPGIGGHLPGEKIDEEVSRTRMVPKGSDAISPAPHHDIYSIEDLLQLICAIKEATQYRVPVSVKIAAVHNAPAIASGIVRAGADIVVIDGFRGGTGAAPTMIRDNVGIPIELALAAVDDRLRDEGIRNRASIVAAGGVRCSADVVKAIALGADAVYIGTAALIAVGCTLCGRCYTGKCPWGIATNESRLKKRQNPDEAARRLTNLVRAWGHEIQEMLGGMGLNSIESLRGNRDKLRGIGLGDTELDILGIKHAGR

SEQ ID NO: 1044 - protein, 365 aa, Oryza sativa Japonica Group; identical to SEQ ID NO: 864

SEQ ID NO: 1045 - protein, 525 aa, Mycobacterium sp. MCS
MSRAVRGLATAVASTVAAVGLRDLFQRRHALLRNYPVVGHARYLLEAVGPELRQYIVAANDEERPFTRDQRRWVYASAKKENNYFGFGTDNDVEHTSGYPVIKHRTFGRNGPASAPRAGQEVDLPCAKVMGAARDRPGAFRPASVVNISAMSFGSLSGNAVEALNRGAAMADCLHNTGEGGISRFHRCGGELIFQIGTAYFGCRDDQGRFNLEKLKEVVAGAPVRALEIKLSQGAKPSLGGLLPAPKVSAEIAAARGIPQGRDCVSPSRHAEFSDTDSLLDWVELLAAETGLPVGIKSAVGDLEFWEQLTDLMRDTDRGVDFVSVDGGEGGTGAAPLIFTDSVSLPFQLGFARVYRVFAERNLHEQVTFIGGGKLGLPDNAVVAFALGCDMVNVAREAMLAIGCIQALKCHTDTCPTGVATQNAWLARGLVPDVKAERVANYIKTLRRDLVKVAEACGVHHPGLIGTDSVDILDGRAASVPLHEVYGYTPDMGMPSKADCEEIIRLMTAEKTRGGSAEPSASAVG

SEQ ID NO: 1046 - protein, 303 aa, Daucus carota
MMHPKPRSSNQLEYGSYNLPPISSEPWWQSLGKNSTNTDGIQENGSDSSSQSVDGSEDEDDGSNESQNTGNMPSDPNFAQEHQNQHVATNVPPGNAENPPQASQLELAGQSVAYDPNAYYDPYYYRGMMAAYGQPLVQPHLLDTHHNRMPLPIDMTQEPVYVNAKQYRAILRRRESRAKAELKRKLIKDRKPYLHESRHRHAIRRARASGGRFAKKSDTDASENPQTSEVKGVNISSSVSAQSANSSGSQVFPSNCNLNSHQEARGPDATYVNNSGGYENQEAFRVSTYDLHSNREGGSVCQQ

SEQ ID NO: 1047 - protein, 444 aa, Methylobacillus flagellatus KT
MSDTPKIPQTEPRFSATFDKHTMSEIRRAAATGIYDIRGAGAKRKLPHFDDLLFLGASVSRYPLEGYREKCGTDVVLGTRFAKKPIHLKTPVTIAGMSFGALSGPAKEALGRGASAVGTSTTTGDGGMTPEERGQSSILVYQYLPSRYGMNPDDLRKADAIEVVIGQGAKPGGGGMLLGQKISDRVAKMRCLPKGVDQRSACRHPDWTGPDDLEIKIAELREITDWEKPIYVKVGATRPYFDVALAVKAGADVVVLDGMQGGTAATQEVFIEHVGIPILAAIRPAVQALQDMGMHRKVQLIVSGGIRNGADVAKALALGADAVAIGTAALIALGDNDPRLEEEYNKLGTTAGAYDDWHEGKDPAGITTQDPELMKRLDPVKAGRRLANYLSVMTMEAQVIARACGKSHLHNLEPEDLVALSIEAAAMAKVPLAGTSWIPGVSQF

SEQ ID NO: 1048 - protein, 1534 aa, Gloeobacter violaceus PCC 7421
MIDPNWFADELMHEHDACGVGFLADSRGRASHDLIVRALEAVTCLEHRGGCGADRDSGDGAGLLSAVPWSIIDAWCAGSGLATPDPDRRAVGMLFLPRDAQIQQRCRAIATERFADEGFRVVGWRPVPVRPDHLGLQAASTRPDILQVILESEHPCPPTERERKLYLARKAIRSSIDQGFAREVARDFHFASLSCRTIVYKGMVRSEVLGRFYEDLLDERFESTFVLYHRRFSTNTFPRWPLAQPLRLLGHNGEINTVLGNRNWMSAREPDLKSELWGGRIEKLKPILELEGSDSASLDNAFELLVRSGRDPLHSMMMLVPEAYDNQPALADFPEVAGFYQYHGPLQESWDGPALVVFSDGVQVGATLDRNGLRPARYAITDDGLVIVASEAGVVDVPLERVIEKGRLGPGQMIAVDLESGEILKNWDIKQKVSRRQPYREWVTRHRQTLEAQPYLDGPQLDTHDLLVRQRATGYTLEDVERVILPMAQAGKEPVMSMGDDTPLAVLSQKERLLYDYFKQRFAQVTNPPIDPIREGLVMSLEMYLGPRGSWLEEKPEFARLLRLTSPILNENQLAELRSLDAPFNSRTLALVFALDEGTEALEKRLEALCAEAEQAVRSGASVLILSDRALGGERATLPPLLAVGAIHHHLIAVGLRLRASLVVETAQCWSTHHFACLFGYGASAVCPYLAFETIRNWWAAPTTRELVRNGKIEDQSVTRLQQNYVCSVEAGILKILSKMGISLLSSYSGAQIFEAIGIGAPVIGKAFCGTISRVGGMGFADIAREALQFHIAAYPDVSAQKLVNYGLITYRPGGEFHINNPKMVKALHAAIKLPERAGAERERLYGEYIDQIRSRPPAALRDLLEFKSDRSPIALEAVESVESILHRFCTGGMSLGALGREAHEVLAIAMNRIGGKSNSGEGGEDPVRFKPLTDVLPDTTSPSLPGIVGLRNGDSASSAIKQVASGRFGVTPEYLASARQLEIKIAQGAKPGEGGQLPGHKVDHYIATLRRSKPGVSLISPPPHHDIYSIEDLAQLIFDLHQINPKAFVSVKLVAEVGIGTIAAGVAKANADVIQISGHEGGTGASPLSSIKHAGVPWELGLTEVHQVLLANQLRDRVTLRVDGGLRTGYEVVQAAMLGAEEYGFGSIAMIAEGCIMARVCHLNTCPKGVATQNPELRRRFDGLPEHVVNFFWFIAEEVRSLLASLGYRSLEEVMGRVDLLIEREVPLAKTARLDLTSLLGGPEHAGRDWLAHSECAHGNGPVLDDLILQDPEIEWAIAHHGQVHKFFPVLNTDRSVGARVSGRIAGLYGDTGFGGELVLVFSGSAGQSFGAFNLQGMTLVLTGEANDYVGKGMNGGEILIRPFAGARYEPHRNVIIGNTCLYGATGGALFANGQAGERFAVRNSLATAVVEGCGDHGCEYMTGGVVVVLGPVGRNFGAGMTGGIAYVFDADDSLRAHVNLDSDKVLQRVPRGAGEAQLLGLIQDHYRKTDSDLARRILENWEAHLPLFWQVVPPSEKDSPVARSESVLTPAE

SEQ ID NO: 1049 - protein, 1531 aa, Prochlorococcus marinus str. MIT 9211
MVEFMPLDSSSPKSPYCDSKSPDSMIGEKDACGVGFLAHTKGVPSHWVLQQALRGLECMEHRGGCGGDSDSGDGAGILCEIPWKYLKSIWSAAKTANRYTGLGMIFMPNDEKERNSAKAIFEKEARGLGLISKGWREVPVKTSVLGVLARDTAPFIEQWLIEGQEHGEKLERLLYRLRKRIEKRCIETLGENAKDLYIASLSNRTVVYKGMVRSEVLASFYTDLLDPRFEIAFAVYHRRFSTNTLPRWPLAQPMRLLGHNGEINTLLGNLNWAKATEVHLREIWNDSTDDLKPVVNASSSDSANLDATLELLVRSGRPITESLLTLVPEAFRDQPELEGQSAIKSFYEYSACTQESWDGPALLVFADGCFVGATLDRNGLRPARYCVTKDDLVIMGSETGVVDIEDERILEKGRLGPGQMLAVDLQQGRLLRNWDVKKEAASRHPYKEWLSDNRLNLSKQPWKKETYLSQLDLIQIQTAFGFSAEDLDLVIEAMASEGKEPTYCMGDDIPLAILSSKPHLLYDYFKQRFAQVTNPPIDPLREKLVMSLEMHLGKRGSPLKPKPNAFSVVHINSPILNENDLAQISKASLPVKTLTTLLDIEQGVTGLKESLMQLCNEAEKAVRDGNRILILSDRGICATKTYIPPLLAVGAVHHHLLLHKLRLDASIIVDTAQCWSTHHVGCLIGYGASAICPWLTWESTRHWWEHPKTQKLIQSGKIPNLTINKAQENLKKALEDGLRKILSKIGISLLASYHGAQIFEAVGIGSDLINLAFAGTTSRIAGLSLKELAIETLSFHSKAYPQLDRKRLEFLGFVQYRTGGEYHLNNPEMSKALHAAVKAGPQYNHFTTYKSLLESRPATALRDLLTLRESKKTLPLDQVESAESICKRFCTGGMSLGALSREAHEVLAIAMNRIGGKSNSGEGGEDPDRFKTLNDVDSENQSQILPNIKGLRNGDTACSAIKQIASGRFGVTPEYLRSAKQLEIKMAQGAKPGEGGQLPGPKVDSYIAKLRNSKAGVALISPPPHHDIYSIEDLAQLIHDLHQVHPSAKVSVKLVAEIGIGTIAAGVAKANADVIQISGHDGGTGASPLSSIKHAGLPWELGLTEVHRSLIENGLRSRVLLRTDGGLKTGWDVVIAALLGAEEFGFGSIAMIAEGCIMARICHTNKCPVGVATQQEALRKRFPGLPEHVVNFFLFVAEEVRHILSNLGVARLEDLIGKTELLEPRNLKLPKTNKLDLSSLLKPLETANDRSWLQHKNTAHSNGIVLEDKLLKDSEIKQSIISHANVIKEIPILNTDRSVCARISGEIAQLYGNKGFKGNLNLTFKGSAGQSFGAFLLQGMNIRLVGEANDYVGKGMNGGVLTIVPPSNNQNVSNHVILGNTCLYGGTGGKLFSLGRAGERFGVRNSGVHAVIEGAGDHCCEYMTGGIVVVLGSTGRNVGAGMTGGVAFLLDEEDQATARINQENVGIHGLSTKEQEDLLKPLLEEHLVQTQSTKAHDILNRWAYWKELFKVIVPPSEKSKVGLEAVDIALV

SEQ ID NO: 1050 - protein, 467 aa, Triticum aestivum
  misc_feature (408)..(408): Xaa can be any naturally occurring amino acid
  misc_feature (436)..(436): Xaa can be any naturally occurring amino acid
  misc_feature (452)..(452): Xaa can be any naturally occurring amino acid
EQWTGAEPPARLEMAPMAANAAWHMGEWDQMSEYVSRLDDGDENKLRSLGNTTASGDGSSNGAFFRAVLSVRCKKYEEARVYVERARRCLATELAPLVLESYERAYNNMVRVQQLSELEEVIDYPTLLMESPIADGRRELIRTMWKERIKGTKRNVEVWQALLAVRELVLPPNEDRDTWIKFAKLCWKSGRISQAKSTLVKLLQFDPESSPELTLYHGHPQVVLAYLKYQYAVGDELKRKDAFSRLQDLSVQIATATNSYSGMLVSHGAISSAGVPLTARVYLTLASWKRALSPGLDDDAIQEILVSYKNATLSAKDWGKAWHSWALFNTEVMSRYTLRGRPDIAGKYVVAAVTGYFYSIACASTTKGVDDSLQDILRLLTLWFNHGATSEVQMALEKGFTLVKIEMXGLVVLPQIIARIHSNNRIVRELIPELLXRIGKGHPQALMYPLFXACKSISILRARAAPG

SEQ ID NO: 1051 - protein, 1227 aa, Magnaporthe grisea 70-15
MEHDDKALPIDIRTLGREAARCHAYAKALHYKELEFLQDHNGGAVEALIVINNQLQQSDAAIGILRKAQSYQDALHLKETWFEKLERWDEALEFYNKREKETPAGTSVPVEVIMGKMRCLHALGEWDTLAQLAGATWSNSSSELQRRFAPLATTAAWGLGKWDSMDAYLQSMKRTSPDRSFFQAILAIHRNQFGEAVRWIDQAREGLDTEISALMSESYTRAYTTIVRVQMLAELEEIITYKQCDAKKQATIRATWEARLQGCQRNVEVWQRMLRLRALVIQPMENMQMWIKFANLCRKSGRMGLAEKSLRQLIGVDAPIEHTVPGWDMTESDSSEPRRRDGAQFSTPIPPQVTYAVLKYQWDLGNQPAHKGNGVAEKSLDCLRAFALENAARIESARQQFTMRTPSNNMELNNGHINGHNQFAPFPEVADLSPDHHRFIKEQTTLLAKCFLRQGEWMKALNKDDWQYTHVNDILQSYQQATRYNPDWYKAWHAWALANFEVVQALTNRTPNDAYPVHANHVNVIEHVVPAVKGFFKSIALSQGSALQDTLRLLTLWLAHGSTPDVNHAVTEGFTKVNVDTWLEVIPQLIARINQPNRRVQTSVQNLLADVGRAHPQALVYPLTVATEKSEHSKKSAAASVIMESMKQHSLRLVEEAAIVSRELIRVAVLWHEMWHEGLEEASRLYFGDQDIEGMFRALAPLHEALDKGPETLREISFAQAFGRDLTEAREWCRQYQHTRDINDLNFAWDLYYQVFRRIYKQLPQVTSFELAYVSPKLLHATNLALCVPGTYKSGQPVVSIASFDPTFVVISSKQRPRKLNMMGSDGASYTFLLKGHEDIRQDERVMQLFGLCNTLLASDSESYKRHLSIQSYPAIPLSHSSGLLGWVPNSDTIHALIREYRESRKILLNIEHRIMLQMAPDYDNLTLMQKVEVFGYALDNTTGQDLYRVLWLKSKSSEAWLERRTNYTRSLGVMSMVGYILGLGDRHPSNLMLDRVTGKIIHIDFGDCFEVATKREKYPERVPFRLTRMLTYAMEVSNIEGSFRITCEHAMRVLRENKESVMAVLEAFIHDPLLTWRLTKTPSKAGPNFDSERERDIVGPAATRARRPSILEGPPAEMMAAAAHMNGDGPRGNLAPGGPPGTGRRRAGTTSSAALGSSVGGTAQEMAEVQNERALEVLDRVQQKLTGRDFKPNEELDVVEQVHKLINEATKLENLCQHYIGWCSFW

SEQ ID NO: 1052 - protein, 1482 aa, Shewanella sp. MR-4
MSLYHPSFERDNCGFGLIAQMDGEASHRIVRTAIHGLDRMKHRGGIASDGRTGDGCGLLMQLPLQFFEAIAAENDWHLSRKFAVGMLFLSQDEELADQAKFILERELERETLSIAGWRKVPVNPEVLGEIGKSSLPQIYQVLINAPIGWREKDLERRLYMARRRLEQQITDDKDFYVASLSGQVIVYKGLMMPADLPAFYPDLADIRLKSSICLFHQRFSTNTSPKWPLAQPFRYLAHNGEINTITGNRQWARARAYKFNSPLLPDLQQAAPFVNETGSDSSSLDNMLEMLLSGGMDLYRAMRLLIPPAWQSNPEMDDELKAFYDFNSMHMEPWDGPAGIVMTNGRHAACAVDRNGLRPSRYVITKDRILTLASEVGIWDYAADEVIEKGRVGPGELLVLDTLNGRLYQSFEIDNDLKRRHPYKEWMAKNSRTLIPAEQLATEQHGASELSAEQLLQYQKQFGYTREELEQVIWVLAKQGEEATGSMGDDTPMAVLSKKSRSLYDYFRQKFAQVTNPPIDPLREKHVMSLATCIGREQNLFNETTGHAYRVMFNSPILLFSDFNQLLGLDSTYYRANIVDLNYDPKEGLEHAIRRITSEAERLARSGTTLLILSDRAIDKSAQVIPAAMAVGAVQQMLVSKSLRCDTNIIVETASARDPHHFAVLLGFGATAIYPYLVYESISDLAKRHQLTDTTALMLNFRYGIEKGLRKIMSKMGISTVGSYRCSQQFEAIGIASDVIELCFKGVVSRIEGASFEDIAQDQALLHKAAYRAHVPLPQGGLLKYVDGGEYHCFNPDVVNTLQASLIDKNFATYKKFAELVDNRPVATLRDLIGIKADQAAIELDKVEAASHLFPRFDSAAMSIGALSPEAHEALAIAMNRLGGRSNSGEGGEDARRFNTERNSAIKQIASARFGVTAHYLVNADVLQIKVAQGAKPGEGGQLPGHKVSVEIAGLRHARPGVTLISPPPHHDIYSIEDLAQLIFDLKQINTKALISVKLVSEPGVGTIATGVAKAYADMITISGYDGGTGASPITSVKYAGSPWELGLAEVHQSLVENGLRHKIRLQVDGGLKTGTDVIKAALLGAESFGFGTVPMIALGCKYLRICHLNNCATGVATQDKKLRDNHYHGLPERVMTYFEFVAEEVREWMATLGVSKFEDLVGRSEWLHTLEGQTDKQRGLDLAPILYQPKVRASTSRTWQETNPPADLGLLNQHLLNECQNAVDKGECFDAAYSINNTDRSVGARLSGYIASTLGVKGTKAPIKLSFNGSAGQSFGVWNSPGLELKLCGDANDYVGKGMSGGKIVIYPPLGSPFQSERSAIVGNTCLYGATGGRFFAAGQAGERFAVRNSGAIAVVEGLGDNGCEYMTSGIVVVLGKTGVNFGAGMTGGFAYVFDQFGRFNRRVNNELVDTQKLESPIHQQHLKGLIEEHVAETGSEHAKMILSDFANWLDCFVLVKPKNIAVADLLKLEQSSPELAVKAG

SEQ ID NO: 1053 - protein, 441 aa, Thiomicrospira crunogena XCL-2
MTDKQPGLIESATFSRDVINEIQRAADTGIYDIRGFGAKRKVPHFDDLLFLGASMSRYPLEGYREKCGTDVTLGTRFAKKPIKLDTVVTIAGMSFGALSANAKEALGRGANLAGTSTTTGDGGMTPEERKTSKTLVYQYLPSRYGMNPDDLRKADAIEVVLGQGAKPGGGGMLLGQKISDRVAQMRNLPKGIDQRSACRHPDWTGPDDLAIKIQELREITDWNVPIYIKIGATRTYYDVKLAVKAGADVIVLDGMQGGTAATQDVFIEHVGIPTMAALPQAVRALQEMGMHRKVQLIVSGGIRSGADVAKCMALGADAVAIGTAALVALGCNHPKWDEEYQKIGSAAGYYDDYHEGKCPAGISTQDDDLAARLDPEDAGRRLANYLHVLTLEAQTLARACGKSHLHNLEPEDLVALNVEAAAMAQVPLAGTDWIPGKQGYS

SEQ ID NO: 1054 - protein, 1503 aa, Vibrio vulnificus YJ016
MLVFLSGRQRSKGRIAMALYDPSLEKDNCGFGLIAHMEGEPSHKLVRTAISALDRMTHRGGIAADGKTGDGCGLLLQKPDSYLRLIAKENSFNLAKQYAIGMIFFSQDPVKAQTARDIINKELAKETLTVAGWRKVPTNPAVLGPIAADSLPDIQQVFISAPAGWRERDIERRLYIARRRIEKQITDDRDFYVCSLSTQVIVYKGLCMPADLPRFYLDLADLRMESAICLFHQRFSTNTQPRWPLAQPFRYLAHNGEINTIEGNRQWARARGYKFASPLLPDLQSAAPFVNETGSDSSSLDNMLDLFLAGGMDIFRAMRMLVPPAWQNHPDMDPDLRAFYDFNSKHMEPWDGPAGIVLSDGRYAACNLDRNGLRPARYVITKDKLITLASEVGIWDYAPDEVAEKGRVGPGELLVIDTRKGKLWQSSEIDNDLKSRHPYREWMDNNVRRLTPFSELPEDQVGERSFDSDTLKTYQKQFAMSNEEVDQVLRVLGDMAQEAVGSMGDDTPMAVLSSKERLVTDYFRQKFAQVTNPPIDPLREQHVMSLATSIGQEMNVFCETDGHAHRVTFGSPVLLYSDMQQLLELSDDHYRNTILDINYDPSEKDLKQAILDLCDQAEQVVRDGTVLIVLSDRPLVAGKLPIPAAMAVGAVQTRLVNANLRCDANIVVETATARDPHQFAVLLGFGATAVYPYLAYEVLGKLIDDGALEKSYREVMQNYQYGINKGLYKIMSKMGISTVASYRCSQLFEAVGLSRDVVELCFKGVTTRIEGAGFADFQQDLFNLSRKAWAKRKSIEHGGLLKYVHGGEYHAYNPDVVGTLQKAVKSGESGDYQQFAQQVNQRPVAMLRDLMQLKKADQPLALDKIEPSTELFKRFDSAAMSIGALSPEAHEALATAMNRLGGYSNSGEGGEDPRRFGTERNSRIKQVASGRFGVTPHYLTNADVLQIKVAQGAKPGEGGQLPGHKVTAEIAKLRYSVQGVTLISPPPHHDIYSIEDLAQLIFDLKQVNPKALVSVKLVSEPGVGTIATGVAKAYADLITISGYDGGTAASPLTSVKYAGSPWELGLAETQQALVANGLRHKIRLQVDGGLKTGLDVVKGAILGAESFGFGTAPMVAMGCKFLRICHLNNCATGVATQDETLRKEYFKGLPEMVMNYFIGLADEVRGLLAELGVEKLTDLIGRTDLLEVVQGMTAKQSKLDLSGILEAPVSPQNLPLFWTEPNAPFDKAVLNQKIIEDALDAVENRQSASFFYNVINTDRSIGARLSGEIAKRYGNQGMAASPIKLYLDGTAGQSFGVWNAGGVELYLTGDANDYVGKGMAGGKIVIKPHLGTAFRCNDATIIGNTCLYGATGGKLFAAGKAGERFGVRNSGTITVIEGAGDNACEYMTGGIVAILGATGVNFGAGMTGGFAYVLDENEDFQGRVNSESVEAISLSDLYIHQEHLRGLIAEHLEETGSVHAEDILANFDAWIPKFYLVKPKAADLNTLLGHQSRSAAELRVQAQ

SEQ ID NO: 1055 - protein, 1513 aa, Synechococcus sp. RS9916
MAGEKDACGVGFLAQLQGQTSHWLLQQALRGLGCMEHRGGCGGDSDSGDGAGVLCQIPWAFLREVWPEAEAAKGLGMMFMPTDAVGREDVRRLCGEEAKALGLRSLGWRVVPVDASVLGPLARATAPVIEQWALDTDAGDADFEGLLLRLRRRIGARIRAAFGGDPAHELYVASLSSRTVVYKGMVRSEVLAQYYADLRDPRFAVSFAVYHRRFSTNTLPRWPLAQPMRLLGHNGEINTLLGNLNWAKASEASLENVWGDAADDLIPVVNPAFSDSANLDATLELMVRSGRSITDSLITLVPEAFRNQPDLDSRPDVTAMYEFNAGIQEPWDGPALLVFADGKRVGATLDRNGLRPARWCTTADGFVIMGSETGVVDLSDKTVVQKGRLGPGQMLAVDLESGQLLDNWSVKEDAASRFPYKQWLQQHRRSVAPQPWTQTRQVGELDLLRLQTAMGFTAEDFDLIIEDMAALGKEPTYCMGDDIPLAVLSDKPHLLYDYFKQRFAQVTNPPIDPLREKLVMSLEMHLGERRPALKPQPEAAAVIHLETPVLNEAELTAIAQQGLPVTTLSTQVAVEACTGGLKASLDALCQAAEQAVRGGAQVLVLSDRVDASGASAQLNATTVAMPALLAVGAVHHHLLRQKLRLQCSLVADTAQCWSTHHVACLIGYGASAVCPWLTWETTRHWLEHPKTKKRIEQGKLPALDPDQVQANVRISLENGLRKILSKIGISLLASYHGAQIFEAIGLGADVIETAFSGTTSRVAGMTLAELANETLSMHAKAFPELDRTKLEFMGFVQYRSGAEYHRNNPELSKALHKAVAQGPGYDHFSTYQGLLENRPVMALRDLLEFQLAPTPVPLDQVESVESICSRFCTGGMSLGALSREAHEVLAVAMNRIGGKSNSGEGGEDPARFQVLNDVDSEGRSASFPSIGGLRNGDTACSAIKQIASGRFGVTAEYLRSGKQLEIKVAQGAKPGEGGQLPGPKVDKYIAWLRNSKPGVALISPPPHHDIYSIEDLAQLIHDLHQVHPAAPVSVKLVAEIGIGTIAAGVAKANADVIQISGHDGGTGASPLSSIKHAGGPWELGLTEVHRALLENGLRDRVLLRADGGLKTGWDVVIAALLGAEEYGFGSIAMIAEGCVMARVCHTNNCPVGVATQKENLRKRFTGVPEHVVNFFWYVAEEVRQLMSLLGVTRLEELIGRTDLLKPRQVSLAKTQSVDLSSLLAPISGSEDRSWLRHSAEAHGNGVILEDQLLGDAELMAALENHGSVSRTIEIINTDRSVCARLAGEIAQRHGNRGFKGQLDLNFRGAAGQSFGAFLVQGQNVRLEGEANDYVGKCMNSGRITLVPADGCAAPGEQVILGNTCLYGATGGELFAHGRAGERFGVRNSGARTVVEGAGDHCCEYMTGGVVVVLGSTGRNVGAGMTGGVAFILDDSGGLNARVNHEIVEVCPLSTSEQESMLKGLLESHVEATGSEKASALLADWGAAKARFKVLVPPSERAAMGLVDRAAVAA

SEQ ID NO: 1056 - protein, 349 aa, Oryza sativa Japonica Group
MGNQWEGGGGGGRRWRRVLPQPQPVQVLRQGNLHGCPYCKMASYAVEYRGVKTKEEKGTEQIEEQRVIEAQIRMRQQELQDDAERMKKKQAAALTDVVTTAQVEHCDTGGASTTVKSSGQGSDMLSSQVQHAELLLKTSERLKQMRNNNFDMDPDEVMLVEALWLSLQDQEASGNPTCGNTVSSVHPPRSFEGSMTIPAEAASSSSAFACAVAALAEQQQMYGEASSTATCHTSRCDILSRSDRSFTEDLSINGSGSSGARSEEPSSNKMHQTREGMEYSNERWSEMAEASSSFTGSDLTTEAGAANSGGSDTGAGSIPDSFEEQMMLAMALSLADARAKASSPGLTWR

SEQ ID NO: 1057 - protein, 1512 aa, Vibrio vulnificus YJ016
MVDREQSSQGLYTPELEHDACGIGFVAHLKNRKSHQVVTQALDMLARMEHRGGQGCDPCSGDGAGILLQKPHEFLLEEAVKLGIKLPSFEKYGVGVVLFPKDEYKREQCRDILERNAKRLDLDIIGYRVLPTDNSMIGADPLSTEPQFEHVFISGGPGTSPEELERKLYVLRNYTVRVCLESVSNIGDDFYINSMSYKTLVYKGQLTTEQVPQYFQDLQNPTMVTALALVHSRFSTNTFPKWRLAQPFRYIAHNGEINTVRGNLNWMKAREAILESKLFTQAEIDMLLPICQEGASDSANFDMVLELLVLSGRSLPHALMMMIPEAWQENKTMDPKRRAFYQYHANIMEPWDGPASVCFTDGVQVGATLDRNGLRPSRYTVTKDNMLIMASESGVVEIPPENVEYRGRLQPGRIFVADLEQGRIISDEEVKDSIANAQPYEQWVTDNLLSLKSLPDADNVHSQPSPERLLHRQQAFGISAEEVNEIILPLAQTGYEPLGSMGADWPVAILSHQSQHLSNYFKQLFAQVTNPPIDPIRERMVMSLNTYIGKDQNLLAESPVHCRKVELESPVISNAELEKLRAIDNEHLQAKTLDIVFQANEDAGKLERALKRICQYAEDAVIDGYSIILLTDRAVNSNHAAIPAMLAVGAVHHHLIRKGLRAKCGIVVETGDARETHHFATLVGYGANAVNPYLVTETIVDLQRRKKLDANVSVEEYFNNYRKGVNGGLLKIFSKMGISTLQSYHGAQIFEALGISKAVVDKYFTGTVTRIQGLTLDDIAKEVLVRHRVGYPTREIPIQMLDVGGVYQWKQRGEKHLFNPETIHLLQHSTRNKDYAEFKKYAAEVDRQGDNAVTLRSQLDFVKNPAGSIPIDEVEPVESIVKRFATGAMSFGSISYEAHSTLAVAMNRLGAKSNSGEGGEDPIRFSPNENGDSERSAIKQVASGRFGVTSYYLTNSDEIQIKMAQGAKPGEGGQLPGDKVDDWIGATRHSTPGVGLISPPPHHDIYSIEDLAQLIYDLKNANRKGRVNVKLVSEAGVGTIASGVAKAKADVVLIAGHDGGTGASPISSIRHTGLPWELGLAETHQTLLKNGLRNRIVVQADGQMKTPRDIAIATLLGAEEWGVATAALVVEGCIMMRKCHKNTCPVGIATQNKTLRERFDGRVEDVVTFFLYMAQGVREIMAELGFRTVDEMVGQAQKLKVRDNVSHWKYKNLDLSPVLFLEQPREQDGIYCQTKQNHQLEAVLDRQLIQVATPALEDGLAVTAEFPIINTDRSVGTMLSNEISKVYKDQGLPQPMNVKFKGSAGQSFGAFLAKGVTFEVEGDANDYWGKGLSGGTLVLYPDSNSTLVPEDNIVVGNVCFYGATSGESYIRGLAGERFCVRNSGAKVVVEGVGDHGCEYMTGGVAIILGSTGRNFAAGMSGGVAYVWDKSGDFQSKLNPELVDLDPIEQEDKDLLLDMLNKHVQFTGSEVAQAFLANFETSLKSLVKVMPRDYKAVLQKRKAEAEQREAEAV

SEQ ID NO: 1058 - protein, 1535 aa, Yersinia pseudotuberculosis IP 32953
MRTITRGHWRRAEKQICRKIRVCQPTLSDINMSFTSWFVRVSQSLGRFTDMLYDQSQERDNCGFGLIAHIEGEPSHKVVRTAIHALARMQHRGAILADGKTGDGCGLLLQKPDRFFRMVAEERGWRLAKNYAVGMMFLSQDEELAKASRRIVEEELQNETLSIVGWREVPTNPDVLGEIALSSLPRIEQIFVNAPAGWRSRDMERRLFVARRRIEKRISDKDFYACSFSNLVTIYKGLCMPADLPRFYLDLADLRLESAICLFHQRFSTNTVPRWPLAQPFRYLAHNGEINTIAGNRQWAKARAYKFKTPLIPDLQDAAPFVNETGSDSSSLDNMLELFLSGGMDLIRAMRLLVPPAWQNNPDMDTDLRAFFDFNSMHMEPWDGPAGIVMSDGRYAACNLDRNGLRPARYVITKDKLITCASEVGIWDYQPDEVVEKGRVGPGELMVIDTRSGKILHSAETDNDLKSRHPYKEWMEKNVKRLVPFEDLPEEQVGSRQLDDSQLETYQKQFGYSNEELDQIIRVLGENGQEATGSMGDDTPFAVLSSGPRIIYDYFRQQFAQVTNPPIDPLREAHVMSLATSIGREMNVFCEAEGQAHRLSFKSPILLYSDFQQLTTLEGEHYRADRLDLTFNPAENDLEQAVLSLCDEAERKVRDGAVMLVLSDRAIAPNRLPVPAPMAVGAIQTRLVDKSLRCDANIIVETASARDPHHFAVLLGFGATAIYPYLAYESLAKLVDSQAIDKKYRDVMLNYRNGINKGLYKIMSKMGISTVASYRCAKLFEAVGLHRDLSDLCFQGVVSRIGGASFSDFQQDLQNLSKRAWLKRKPLDQGGLLKFVHNGEYHAYNPDVVSTLQKAVHSGEYSDYQAYAKLVNERPIATLRDLLAIKPQGTPIPVDQVEPAESLFKRFDTAAMSIGALSPEAHESLAIAMNSLGGFSNSGEGGEDPARYGTNKVSRIKQVASGRFGVTPAYLVNADVIQIKVAQGAKPGEGGQLPGDKVTPYIAKLRYSVPGVTLISPPPHHDIYSIEDLAQLIFDLKQVNPKAMISVKLVSEPGVGTIATGVAKAYADLITIAGYDGGTGASPLSSVKYAGCPWELGLVETQQALVANGLRHKIRLQVDGGLKTGVDIVKAAILGAESFGFGTGPMVALGCKYLRICHLNNCATGVATQDEKLRRDHYHGLPERVVNYFHFIARETREIMAELGVSQLVDLIGRTDMLLELDGISAKQNKLDLSPMLKTATPHPGKALYCTESNPPFDKGLLNKELLSQAEPYIEAKQSKTFYFDIRNTDRSVGAALSGAIATKHGDQGLATDPIKAYFSGTAGQSFGVWNAGGVELMLTGDANDYVGKGMAGGRIAIRPPVGSNFRSHEASIIGNTCLYGATGGKLFAAGRAGERFAVRNSGAITVVEGIGDNGCEYMTGGIVCVLGRTGINFGAGMTGGFAYVLDEDGEFRKRVNPELVEVLDVEQLAIHEEHLRGLITEHVQLTGSSRGEEILANWPEWVTKFALVKPKSSDVKALLGHRSRSAAELRVQAQ

SEQ ID NO: 1059 - protein, 2111 aa, Schizosaccharomyces pombe
MAVLSSVQPINHNSALVEARDEQVNTTACSDDLLNAPPYEYDTEGNPSWAGALPKAQALYDPAYEKDSCGVGFTCHIKGQVSHKIVTDARLLLCNMTHRGATGADTRDGDGAGVMTGMPYTFMQKEFGQIGCTLPKSGEYAIGNVFFSPEADVCREAMTAFTQVAEKLGLAILAWRSVPCDNSILGPAALSREPTILQPCVVLKAAYDGEAEFDTDLFERQLYVLRKQSSHLIGKEKWFYICSLHRETIVYKGQLAPVQVYNYFLDLNNAEYVSHFALVHSRFSTNTFPSWDRAQPMRLAAHNGEINTLRGNKNWMHAREGLMKSSRFGEEFASLLPIIERGGSDSAAFDNVIELLCASGVVSLPEAVMLLIPEAWQNDKNISDEKAAFYEWAACQMEPWDGPALFTFADGRYCGANLDRNGLRPCRFYLTSDDMMICASEVGTVGIEPDRIVQKGRLYPGRMLLVDTKEGRIVDDKELKHNIASRYDFRSWLDQELIDMNSIVDSLIESTSVDLTPIVDDVPLADDKTMLAFGYTLEQINMIMAPMANGGKETLGSMGNDAAIACLSDQPRLLYDYFRQLFAQVTNPPIDPIREAIVMSLQCYIGPSGNLLEINQSQCRRLRMPTPILTVEEFNALKNVDRIYPDWKVASIDITFFKSEGVAGYAAAIERICSEADTAVNEGYKAIVLSDRNVNSERVPLASIAACGAVHHYLVQNKLRSRVALVCESGDAREVHHMCTLLGYGADAVCPYLAMEALTKLVRQNAMKPGITEETAIKNFKHAINGGILKVMSKMGISTLQSYKGAQIFEALGIDNEVINKCFLGTASRIRGVTFEHIALDAFALHERGYPTDQSIRSLQIPDMGDFYYRDGGEQHVNHPKAIASLQDAVRNKNEAAYAEFSRTHYEQTRRCTLRGMLDFDFDSSQAIPIEQVEPWTEIVRRFCTGAMSYGSISMESHSSLAIAMNRLGGKSNTGEGGEDPARSQRLANGDTMRSAIKQIASGRFGVTSWYLSDADELQIKMAQGAKPGEGGELPGNKVSESIAKTRHSTAGVGLISPPPHHDIYSIEDLKQLIYDMKSANPRARVSVKLVSEVGVGIVASGVAKAKADHILVSGHDGGTGASRWTGIKYAGLPWELGVAETHQTLVLNDLRGRVVIQTDGQIRTGRDVAIACLLGAEEWGFATTPLIALGCIMMRKCHLNTCPVGIATQDPELRKKFEGQPEHVVNFFYYVAEELRGIMAKLGFRTINEMVGRSDKLKVAEPINNKSKLLDLTPLLTPAFTLRPGAATYNVRKQDHRLYTRLDNKLIDEAEVTLEEGIPSVVECEIINTDRTLGATLSNKISKRYGEEGLPTDSIRVNVFGSAGQSFGAFLAPGVTLQLEGDCNDYVGKGLSGGRLIIYPPRVSPFKPEENMIIGNVCLYGATSGHAFISGVAAERFAVRNSGAIAVVEGVGDHGCEYMTGGRVVILGSTGRNFAAGMSGGIAYVYDMQMDFAGKINTEMVDISSVTDAAEIAFLRGLIQDHRHYTGSQVADRILSDFPRHLSRFVKVLPREYKAVLEREAAKKEEAKRLQYPKAFMPGNPIRQQIEETNAQIADVEDTLGATVKKSAPLDKLRGFMKYQRRSEHYRNPLKRTNDWKELSVRLREDELRVQTARCMDCGTPFCQSDYGCPISNKIFTWNDLVFKQQWKEALTQLLLTNNFPEFTGRVCPAPCEGACTLGIIESPVGIKSVERAIIDKAWEEGWIVPRPPAERTGRRVAIIGSGPAGLAAADQLNRAGHHVVIYERADRPGGLLQYGIPNMKLDKKVVERRIQLMIDEGIEVLTNVEVGKNGDVSLDELHKVYDAVVLASGSTVPRDLPIPNRDSKGIHFAMEFLHKNTKSLLDSELKDGNYISAKGKDVIVIGGGDTGNDCLGTSVRHGAKSVRNLELLPIPPRERAFDNPWPQYPRVFRVDYGHAEVQAHYGQDFREYSILTKSFEKDEDGNVKGINTVRIEWTKNSKGRWIMKEIRNSEEFFPADLVILALGFLGPEEQATAGMNVDRDARSNISTPTKSYETSVPGIYAAGDCRRGQSLVVWGIQEGRQCAREIDLKFQGKTFLPGDGGLVKRTVNC

SEQ ID NO: 1060 - protein, 1535 aa, Blastopirellula marina DSM 3645
MASASDSPRQQGRTERPGKQGLYDPAFEHENCGVGFVAHVKGQRSHQMVLDAETILINMDHRGACGCEPNTGDGAGMMTALPHEFLTKVAKSDLGAELPAAGQYAAGVVFLPQDEASRTFCKSAVEKFIAEGGQKLVGWRPVPTDSKKADIGPTALACEPAMEMLIIAAGDDVADQEDFERRVYTIRKRASQLRANDNLPQSKMFYICSLSTKVIIYKGMLTPAQLVPYYPDLSDEDFTTHLAMVHSRFSTNTFPSWDRAQPCRFMSHNGEINTLRGNKNWMAARQGVVASDIFGADVDKLFPVVEPDCSDSGSFDNVLEFLQMSGRSLQESVMMMVPEAWQKHETMSEEKRAFYEYHSCLMEPWDGPASIVFTDGHYIGAVLDRNGLRPSRYYLTHDDRVIMASEVGVLPVDPAIVKEKGRLQPGRMFLIDFEEGRLIPDKELKDSFAKQRPYAKWLREQRIELAELSPKDEPHGFNPATLLERMQAFGYTTETLQFMLLPMIHQKRDPVGSMGNDSALACLSDKPRMLYDYFKQLFAQVTNPAVDSIREEVVMSLECYIGPEANLLETTPEHAHRLLVPHPILTNEELAALKHIDTRGWKSKTIDITFPLAEGKAGLTSALDRICDEAEQAIDDGFSLIVLSDRGLSAERVPVSTLLATGAVHHRLVNTAKRTRIGIVLETGEAREVHHFCLLVGYGADAINPYLGFEALWQAREDGLCDEEFADDDQIVSAYRKAVAKGILKVMGKMGISTLQSYKGAQIFEALGLQTEVIDRCFAGTASRVQGVDFGVLAEEHIRRHRLGYPERSDGRLPVLPNQGEYHWRAEGERHAWSPQAIASIQVAARNNSVDAYKEFAHTINEDSRNRCAFRGLLKFMDNSTPVPLDEVESAAEIVKRFCTGAMSFGSISAESHESLAIAMNRLGGKSNTGEGGEDIARFTPMANGDSKRSAIKQIASGRFGVTINYLTNADELQIKISQGAKPGEGGELPGKKVDENIARIRHSTPGVGLISPPPHHDIYSIEDLSQLIHDLKNANPSARISVKLVSEVGVGTVAAGVAKAKADHILISGDTGGTGASPLTSIKHAGLPWELGIAEAHQTLVMNDLRSRVILQTDGGLKTGRDVVIAAILGAEEFGFATAPLITLGCIMMRKCHLNTCPVGIATQDPELRKKFSGKPEHVVNYLFMVAEDAREVMASLGVRTLNELIGRVDLLETDAAIQHWKSDGIDLTPLLSPPPKPHDKVEIFNTMKQDHGLQFALDNELIAKAMPSIESRKPIRFASKIININRTVGATLSHEIAKRYGENGLPDDSIHIDFTGSAGQSFGAFLSRGVTLELEGDANDYVGKGLSGGRIMIYPPKVSSFPAEENMIVGNVCLYGATAGQAFFRGRAAERFCVRNSGAQAVVEGVGDHGCEYMTGGRLVCLGNTGRNFAAGMSGGIAYIWDVEEKLLKNCNLGMVELERLENQQDMTEVRTLIQLHQRYTGSLVAEQILSDWDNMIDRFVKVMPIDYKRVLMERMQHEEEEDVQLSGAESHG

SEQ ID NO: 1061 - protein, 2260 aa, Physcomitrella patens subsp. patens
MAACQQTLSQFGSQYSLTYASLPRAPVSTCTHKAHWLKALRFTGLRRASLNLSPRDRLHQRQQSCLHFSDVSPVKGLGLKPVLAGLSGVPEGNLGLYDPSFDKDSCGVGFVAELSAKPNRKIVTDAIEMLVRMKHRGACGCEVNTGDGAGILVSLPHDYFAKVLREDLDLDLPPIGKYAVGMVFLPTIEHRREESKKVFNKVAESLGHKILGWRPVKTNNSGLGKGAIDTEPVVAQVFLTPSSRSTNDFEQQMYILRKTSMIAIRAALNLAYGASKDFYICSLSSRTIVYKGQLKPDQLKNYYYNDLGDERFTSYMGLVHSRFSTNTFPSWDRAQPMRVLGHNGEINTLRGNVNWMHAREGLLQCNALNLTKDELQKLLPIVDAGSSDSGAYDGVLELLMRSGRDLPEAVMMMIPEAWQNDKLMDPERRAMYEYFSCLLEPWDGPALISFTDGRYLGAKLDRNGLRPSRYYITHDQRVIMASEVGVVDVDSKNVFKKGRLFPGMMLLVDFEKHKVVDDEELKKKYQSRYPYAEWLQRQKLTLEEIVESVPEEKRVTPPIIGALEVSYTLLYLSSTAVKTSDETMDHMGTRGIIAPLRAFGYTSESLELLLLPMADDGTEALGSMGNDTPLAVMSDRPRLSFEYFKQMFAQVTNPPIDPIREAVVTSTECMVGPEGDLTEVAESQCHRLSLKSPLLTLKEMEALKKTNYRGWRSKVIDITFPKSDGIDGLEMALDRICAEARLAVSDGYTVLALSDRATSAQRVPVSSLIAVGAVHHHLVASLERTRVALVIETGEPREVHHFCTLVGFGADAICPYLAIESIYSRLQVDGKVAPKKDGTLWSREEIVAKYFKASNSGMLKVLAKMGISTLASYKGAQIFEALGLSTEVVQRCFKGTPCRIEGATFEMLAQDMLRMHELAFPSRHLPDGCADAVALPNPGDYHWRLRAGEIHMNDPDAIAKLQEAARTGSTAAYREYSQIIQKLNRKCNLRGLLKFKDLPESEQIPLDEVEPASEIVKRFVTGAMSYGSISLETHTTLAVAMNRLGGKSNTGEGGEQPERMEPLEDGSMNPMRSAIKQVASGRFGVTSYYLTNSDEIQIKMAQGAKPGEGGELPGHKVIGDIAITRNSTEGVGLISPPPHHDIYSIEDLAQLIYDLKNSNPGARISVKLVSESGVGVVASGVVKGHADHVLIAGHDGGTGASRWTGIKNAGLPWELGLAETHQTLVANGLRGRTTVQTDGQLKNGRDIMVAALLGAEEFGFSTAPLITLGCIMMRKCHKNTCPVGIATQDPVLREKFAGQPEHVINFFFMVAEEAREIMASLGIRKMDDLIGRADLLEMDREAMGENEKVGNIDLSLLLRPAAEIRPGAAQRCVEAQDHNLEEALDQKLIALAQPALTKKVPVYVETPVVNVNRAVGTMLSHEVTKRFNRTGLPTDTIHVKLNGSAGQSLGAFLCSGITLELEGDSNDYVGKGLCGGKIIVYPPADSTFDPKENIVIGNVALYGATSGEAYFNGMAAERFAVRNSGANAVVEGVGDHGCEYMTGGKVVVLGETGKNFAAGMSGGIAYVLDKEGLFPKKCNTELVDLDPVEEEDDIMTLRSLIQQHQRATNSRLARYVLNHFEALLPNFIKVFPRDYKRVVNEKKAKEAAEIAAKEEEIELSKKDAFAELQKLAAQSAPAIAGINAASNERPTKISDPQKHGGFVKYERESLPLRPTEERLQDWDEVVEHGINESLLKTQSARCMDCGTPFCHQDHSGCPLGNKIPEWNELVYQGRWREALDRLLETNNFPEFTGRVCPAPCEGACVLGIIENPVTIKTMECTIIDKGWEMGWMVPRPPEERTGKKVAVVGSGPAGLAAADQLNKAGHTVTVYERSDRVGGLMMYGVPNMKTDKIDVVQRRVDLMAAEGIKFVTNAHVGMDPLYSIDTLRADNDALLLACGATKPRDLPIPGRDLSGVHFAMEFLHANTKSLLDSGLQDGNYISAKGKKVVVIGGGDTGTDCIGTSVRHGCSAMTNLELLPQPPPTRAPGNPWPQWPRIFRVDYGHEESAAKFGTDPRTYEVLTKRFIGNDEGKLTGLEIIQVKWEKDSTGKFQMQEIPGSEKIIEADLVFLALGFLGPEQNIAEKLGLECDPRSNFKADYGQFTTNLEGVFAAGDCRRGQSLVVWAIAEGRQAADKVDNYLMKDVPVEENAKSHVEGNGYGVGKPKERRYPEGLDKAKEEAVEACIAVHGSEDSDALKKCVELSVETAALGDNSVVSEQSY

SEQ ID NO: 1062 - protein, 2218 aa, Physcomitrella patens subsp. patens
MTTCVPALVQFNSRFTLVHANRSRVPQTCSHKLQLLEVTRFTGLRREVPPRLKPEERTRQWKGDWWEFTERFCDKGSGLKPVLVALSGFPDGNLGLYDPALDMDSCGVGFVAELSAQPNRKIVTDAIGMLLRMAHRGACGCEVNTGDGAGILVATPHDYFSQVLMEELDLSLPPLGQYAVGMVFLPQNDQRREESKNVFKKVVAESLGHRILGWRVVKTDNTGLGKGAIETEPIVAQVFLSPSSHSTVDIERQMYVLRKTSMIAIRAALNLQYGAAKDFYICSLSSRTIVYKGQLKADQLEKYFHNDLGDKRFTSYMGLVHSRFSTNTFPSWDRAQPMRLLGHNGEINTLRGNVNWMHAREGLLQCDALKLSKDELQKLLPIVDAGSSDSGAFDGVLEILMRSGRDLPEAVMMMIPEAWQNDNNMDPERRALYEYFSCILEPWDGPALISFTDGRFLGATLDRNGLRPSRYYITHDQRVIMASEVGVVDVDPRNVFKKGRLHPGMMLLVDFDKHKVVDDTELKKKYASRYPYAEWLRRQKIPLQEIVDSVSKGERTPPPIIGAAEVGTSDETMDHMGVKGLIAPLRAFGYTTESLELLLLPMAGDGIEALGSMGNDTPLAVMSDRPKLSFEYFKQMFAQVTNPPIDPIREAVITSTECMVGPEGDLTEVAESQCNRLSLKSPLLTLEEMEAVKKTQHRGWRTKIIDITFPRSGGSEGLEKALDRICAEARLAISDGCTVLVLSDRATSAQRVPVSSLVATGAVHHDLVASLERTRVALMLETGEPREVHHFCTLIGFGADAICPYLAIESIYRLQVDGKIAPKKEGTLYNREEIIAKYFKGSNAGMLKVLAKMGISTLASYKGAQIFEAIGLSTAVVQRCFKGTSSRIEGATFEMLAHDMLRMHKLAFPARLLPDGSAEALALPNPGDYHWRLKGISREVHLNDPDAIAKLQEAARENSPAAYKEYSKITQNMNRKCNLRGLLRFKDLPESEQIPLEEVEPASDIVKRFVTGAMSYGSISLETHTTLAVAMNRLGGKSNTGEGGEQPERLEPLEDGSTNPQRSAIKQVASGRFGVTSYYLTNADEIQIKMAQGAKPGEGGELPGHKVIGDIAITRNSTEGVGLISPPPHHDIYSIEDLAQLIYDLKNANPSARISVKLVSEAGVGVVASGVVKGHADHILISGHDGGTGASRWTSIKHAGLPWELGLAETQQTLVANGLRGRTILQTDGQLKNGHDVIIAALLGAEEFGFSTAPLITLGCIMMRKCHKNTCPVGIATQDPVLRTKFSGLPDHVTNFFFMVAEEAREIMASLGVRRMDDLIGRADLLEMDKTAMTENEKVSNIDLSLLLHPASKIKPDAAQRCVESQDHGLENALDRKLIALSQPALNRNMPVYVETSVFNVNRAVGTMLSHEVTKRYHRTGLPTDTIHVKLNGSAGQSLGAFLCSGITLELEGDSNDYVGKGLCGGKIIVYPHKNSSFDPKENIVIGNVALYGATGGEAYFNGMAAERFAVRNSGANAVVEGVGDHGCEYMTGGTVVVLGETGRNFAAGMSGGVAYVLDRERLFLRKCNTALVDLDSVEEEDDIILLRSLIQQHQRATHSRLARYVLNHFEALLPKFIKVYPRDFKRVVMEKKTKEAAERSARTGEDLSNKDTFAALKDLSTRSEATSPSANGASKVERPTIVYEPTKHGGFVRYGRESLPLRPIGERVQDWDEVIDHEINEPLLKTQSARCMDCGTPFCHQDHSGCPLGNKIPEWNELVYQGRWREALDRLLETNNFPEFTGRVCPAPCEGACVLGIIENPVTIKTMECTIIDKGWEMGWMVPRSPMKRTGKKIAIVGSGPAGLAAADQLNKAGHTVTVYERSDRVGGIMMYGVPNMKTDKVDIVQRRVDLMAAEGVQFAVNAHVGVDPMYSVESLRQDNNALLLACGATKSRDLPIPGRDLKGIHFAMEFLHANTKSLLDSGLQDGKYISAKGKKVVVIGGGDTGTDCIGTSVRHGCSNLVNLELLPQPTSTRAPGNPWPQACELFSEPSINARDWPRVFRIDYGHEEAHAKFGKDPRTYEVLTKKFIGSKKGELIGLEVVHVKWEKDSDKFQMQEIPGSEEVIETDLAFLALGFQGPEQNIAEKLGLERDARSNFKADYGRFATNLQGVFAAGDCRRGQSLVVWAIAEGRQVAEQMDNYLMKDEAVEKGREQLHAANGNRESKKGQRYPEGLCKA

SEQ ID NO: 1063 - protein, 2425 aa, Gibberella fujikuroi
  misc_feature (531)..(531): Xaa can be any naturally occurring amino acid
  misc_feature (1670)..(1670): Xaa can be any naturally occurring amino acid
MAQAQQVALDRLDNISRALKSRTSDDLRKRSAVQLRELVAVCHRDLSPEQFQVFYNSVNNRITQLITHGNDSSERLGGIYALDALIDFDGVDVGVKYTRFTQNLKTILRGKDINPMQPAAIALGKLCRPGGAMISEVVDSEVNTALEWLQNDRIEERRYSAVLVLRELARSAPTLMYQYIPTIFDWIWVGLRDPRQLIRATSAETVSACFRILRERDQDMKQLWMDKIYNEARSGLKVNTVESIHGSLLVLKELLEQGAMYMQEHYQEACEIVFKHKDHRDPTIRKTVVLLIPDLASYSPADFAHTWLHKFMVYLSGMLKKDKERNDAFLAIGNIANSVKSAIAPYLDGVLIYVREGLSLQSRKRGSVDPVFDCISRLAVAVGQTLSKYMEALLDPIFACDLTPKLTQALVDMAFYIPPVKPTIQERLLDMLSVVLCGEPFKPLGAPQPNTLSSVPIIPKDAKDPHAYEHRRAEVKLALNTLGSFDFSGHVLNEFVRDVAIKYVEDEDPEIREAAALTCCQLYVRDPIVNXTSYHALQVVGDVIEKLLTVGVSDPEPNIRRTVLAALDERFDRHLAKAENIRILFFALNDEVFSIREVAISIIGRLARYNPAYVIPSLRKTLIQMLTELEFSDVARNKEESAKLLSLLVQNAQSLIKPYVEPMISVLLPKAKDGNPSVAATILKAIGELATVGGEDMMPYKDRLMPIILDALQDQSSNAKRGAALHALGQLASNSGYVILPYIEYPQLLEILQSIIRTEGQQVPLRQETIKLMGILGALDPYKHQAEERTPDSRRGEANQLTDISLMMTGLTPSNKEYFPTVVINALLAILKDSSLVQHHAAVIEAIMNIFRTLGLECVSFLDRIIPAFLQVIRSATSTRLESYFNQLATLVSIVRQHIRNYLPSIVEILQEYWHTSPSLQTTILSLVEAISRSLEGEFKIYLAGLLPLMLGVLDKDTSAKRTPSERVMHAFLVFGASAEEYMHLIIPVIVRTFEKQGQPTFIRKQAIDTIGKISRQVNLNDFAAKIIHPLTRVLDMGEPVLRTAALDTLCALIQQLGKDYLHFMGTVNKTINQHQIQHSNYELLVSKLQKGEVLPQDLSSGVGFADGADETPFADQGTKKLEMNAIHLKAAWDTKGKSTKEDWQEWLRRFSTTLLTESPNHALRACASLASVYLPLARELFNSAFVSCWSELYEQFQDELIQNIESAIKSENVPPDLLGLLLNLAEFMEHDDKALPIDIRVLGREAARCHAYAKALHYKELEFLQDQSSGAVEALIVINNQLQQSDAAIGILRKAQLYKEGIQLRETWFEKLERWEEALAFYEKREEEVPEDQAIPVDIVMGKMRCLHALGEWEALASLTGSTWANSTPEVQRMIAPLATAAAWGLNKWDSMDNYLSSLKRYSPDRSFFGAILALHRNQFREAIACVQQAREGLDTELSALVSESYNRAYQVVVRVQMLAELEELIVYKQCDEKKQAIMRRTWETRLKGCQRNVEVWQRMLRLRAIVIAPTENMHMWIKFANLCRKSGRMGLAEKSLKQLIGTDAPLISAIPYWNEQRQPASNPRAAPAAQVIYAVLKYQWELGQQLPVNKGSIPEKTLYCLRKFTKRCAHRLEVARAHLAAQAGNDASITGDYGFQNPMEPAIISQHTKRALYDQTVLLAKCYLRQGXWLIALNKDDWQYTQVQDILLSYSQATKYNPRWYKGTGMAWALANFEIVQTLTAGNEGHLSRTDQSMVIDHVVPAVKGFFKSIALSQGSSLQDTLRLLTLWFTHGGSSDVNVAVTEGFANVSVDTWLEVIPQLIARINQPNKRVQQSVHNLLADVGRAHPQALVYPLTVAMKSWQNTRRSRSAAQIMDSMRQHSANLVAQADTVSHELIRVAVLWHELWHEGLEEASRLYFGDSNIEGMFATLAPLHELLERGPETLREISFAQAFGRDLKEAQDWCRQYETSQDVNDLNQAWDLYYQVFRRISRQLPQVTTLELTYCSPKLLNAKNLDLAVPGTYKSGQPIVRIMSFDTTFSVINSKQRPRKLNVNGSDGKSYAFLLKGHEDIRQDERVMQLFGLCNTLLSHDSECFKRHLNIQRYPAIPLSQNSGLLGWVPNSDTLHVLIREYRESRKILLNIEHRIMLQMAPDYDNLTLMQKVEVFGYALDNTTGQDLYRVLWLKSKSSEAWLERRTNYTRSLGVMSMVGYILGLGDRHPSNLMLDRVTGKIIHIDFGDCFEVAMKREKYPERVPFRLTRMLTYAMEVSNIEGSFRITFENVMRVLRDNKESVMAVLEAFIHDPLLTWRLTSAASPTGPNFNSDHDTAMPVPGGVRARRQSILDSDVAPSELLNAPEPSIQTRARARTNSSAGEALTNGGAPEVESQNARAVEVLDRVQQKLTGRDFKTNEELDVIAQVNKLIMEATKLENLCQHYIGWCSFW

SEQ ID NO: 1064 - protein, 1482 aa, Pseudomonas aeruginosa
MKAGLYHPETFKDNCGFGLIAHMQGEPSHQLLQTAIEALTCMTHRGGINADGKTGDGCGLLIQKPDLFLRAVAREAFSVDLPEQYAVGMVFFNQDPVKAEAARENMNREIVAAGLELVGWRKVPIDTSVLGRLALERLPQIEQVFIGGAGLSDQDFAIKLFSARRRSSVANAADSDHYICSFSHKTIIYKGLMMPADLAAFYPDLGDERLQTAICVFHQRFSTNTLPKWPLAQPFRFLAHNGEINTITGNRNWAQARRTKFTNELIPDLEARELGPLVNRVGSDSSSMDNMLELMVTGGMDLFRGLRMIIPPAWQNVETMDADLRAFYEYNSLHMEPWDGPAGVVLTDGRYAVCLLDRNGLRPSRWVTTKNGYITLASEIGVWDYKPEDVIAKGRVGPGQILAVDTETGQVLHSDDIDNRLKSRHPYKQWLRQNALRIQATLDDDHGVASYDADQLKQFMKMFQVTFEERDQVLRPLGEQGQAVGSMGDDTPMAILSRRIRSPYDYFRQQFAQVTNPPIDPLREAIVMSLETCLGVEQNIFEEAPHHANQAILTTPVISPAKWRTIMTLDRPGFDRHFIDLNYDESMGLEAAVRNIADQAEEAVRGGKVLLILSDRHIAPGKLPVHAALAVGAVHHRLVQTGLRCDSNILVETATARDPHHFAVLIGFGASAVYPFLAYEVLADLIRTGEVLGDLYEVFKYYRKGISKGLMKILSKMGISTVASYRGAQLFEAVGLSDEVTDLCFTGVASRIQGARFVDIENEQKLLAAEAWSNRKPIQQGGLLKFVYGGEYHAYNPDVVNTLQAAVQQGDYEKFKEYTALVDQRPVSMIRDLLQVKTAAQPLALDEVEPLEAIFKRFDAAGISLGALSPEAHEALAEAMNTLGGRSNSGEGGEDPARYGTLKSSKIKQVATGRFGVTPEYLVNAEVLQIKVAQGAKPGEGGQLPGGKVNGLIARLRYAVPGVTLISPPPHHDIYSIEDLAQLIFDLKQVNPQALVSVKLVSEPGVGTIAAGVAKAYADLITISGYDGGTGASPITSIKYAGSPWELGLAETHQTLRGNDLRGKVRVQTDGGLKTGLDVIKAAILGAESFGFGTAPMIALGCKYLRICHLNNCATGVATQNDKLRKDHFIGTTAMVINFFTFIATETREWLARLGVRSLGELIGRTDLLEILPGETAKQQNLDLAPLLGSELIPADKPQFCEVEKNPPFDQGLLAEKMVELSKAAIEGLSGGEYELDICNCDRSIGARVSGEIARLHGNQGMAKAPVVFRFKGTAGQSFGVWNAGGLHLYLEGDANDYVGKGMTGGKLVITPPKGSPFKTQESAIVGNTCLYGATGGKLFAAGTAGERFAVRNSGSHAVVEGTGDHCCEYMTGGFVCVLGKTGYNFGSGMTGGFAYVLDMDNTFVDRVNHELVEIQRISGEAMEAYRSHLRKVLVEYVNETASEWGANILENLDDYLRRFWLVKPKAASLGSLLTSTRANPQ

SEQ ID NO: 1065 - protein, 341 aa, Arabidopsis thaliana
MGNKLGRKRQIVDERYTKPQQGLYMSKDVDIKKLKKLILESKLAPCYPGLEETPSSHHDLEECPICFLFALSFWSSLHMKMSTFESSLSYVRCPFCKTSNYAVEYRGGKTKEEKSFEQIEEQRVIEAKIRMRQKEVEDDEERMQKRLESYSSSSSTSAATLDTEYGSAADHSFLAKVICTTVIRVGTLNLSGSYQVTDMWLSGKLFRDGQFDFDLEDIMVMEAIWLSMQEPGIQRNTSPDDISEKDRNEEPSTPSSSSPSGGLACAIAVLAERQQMVGVSSSNQNVNLASQNLVPDNGNNSHYNAIEQDSNHYLQGAGISYTRSDMTDDSGGETSREVTWQ

SEQ ID NO: 1066 - protein, 2471 aa, Saccharomyces cerevisiae YJM789
MEPHEEQIWKSKLLKAANNDMDMDRNVPLAPNLNVNMNMKMNASRNGDEFGLTSSRFGGVVIGSNGDVNFKPILEKIFRELTSDYKEERKLASISLFDLLVSLEHELSIEEFQAVSNDINNKILELVHTKKTNTRVGAVLSIDTLISFYAYTERLPNETSRLAGYLQGLIPSNDVEVMRLAAKTLGKLAVPGGTYTSDFVEFEIKSCLEWLTASTEKNSFSSSKPDHAKHAALLIITALAENCPYLLYQYLNSILDNIWRALRDPHLVIRIDASITLAKCLSTLRNRDPQLTSQWVQRLATSCEYGFQVNTLECIHASLLVYKEILFLKDPFLNQVFDQMCLNCIAYENHKAKMIREKIYQIVPLLASFNPQLFAGKYLHQIMDNYLEILTNAPAKKIPHLKDDKPQILISIGDIAYEVGPDIAPYVKQILDYIEHDLQTKFKFRKKFENEIFYCIGRLAVPLGPVLGKLLNRNILDLMFKCPLSDYMQETFQILTERIPSLGPKINDELLNLVCSTLSGTPFIQPGSPMEIPSFSRERAREWRNKSILQKTGESNDDNNDIKIIIQAFRMLKNIKSRFSLVEFVRIVALSYIEHTDPRVRKLAALTSCEIYVKDNICKQTSLHSLNTVSEVLSKLLAITIADPLQDIRLEVLKNLNPCFDPQLAQPDNLRLLFTALHDESFNIQSVAMELVGRLSSVNPAYVIPSIRKILLELLTKLKFSTSSREKEETASLLCTLIRSSKDVAKPYIEPLLNVLLPKFQDTSSTVASTALRTIGELSVVGGEDMKIYLKDLFPLIIKTFQDQSNSFKREAALKALGQLAASSGYVIDPLLDYPELLGILVNILKTENSQNIRRQTVTLIGILGAIDPYRQKEREVTSTTDISTEQNAPPIDIALLMQGMSPSNDEYYTTVVIHCLLKILKDPSLSSYHTAVIQAIMHIFQTLGLKCVSFLDQIIPTILDVMRTCSQSLLEFYFQQLCSLIIIVRQHIRPHVDSIFQAIKDFSSVAKLQITLVSVIEAISKALEGEFKRLVPLTLTLFLVILENDKSSDKVLSRRVLRLLESFGPNLEGYSHLITPKIVQMAEFTSGNLQRSAIITIGKLAKDVDLFEMSSRIVHPLLRVLSSHTTSDELSKVIMNTLSLLLIQMGTSFAIFIPVINEVLMKKHIQHTIYDDLTNRILNNDVLPTKILEANTTDYKPAEQMEAADAGVAKLPINQSVLKSAWNSSQQRTKEDWQEWSKRLSIQLLKESPSHALRACSNLASMYCPLAKELFNTAFACVWTELYSQYQEDLIGSLCIALSSPLNPPEIHQTLLNLVEFMEHDDKALPIPTQSLGEYAERCHAYAKALHYKEIKFIKEPENSTIESLISINNQLNQTDAAIGILKHAQQHHSLQLKETWFEKLERWEDALHAYNEREKAGDTSVSVTLGKMRSLHALGEWEQLSQLAAIKWKVSKLQTKKLIAPLAAGAAWGLGEWDMLEQYISVMKPKSPDKEFFDAILYLHKNDYDNASKHILNARDLLVTEISALINESYNRAYSVIVRTQIITEFEEIIKYKQLPPNSEKKLHYQNLWTKRLLGCQKNVDLWQRVLRVRSLVIKPKQDLQIWIKFANLCRKSGRMRLANKALNMLLEGGNDPSLPNTVKAPPPVVYAQLKYIWATGAYKEALNHLIGFTSRLAHDLGLDPNNMIAQSVKLSSASTAPYVEEYTKLLARCFLKQGEWRIATQPNWRNTNPDAILGSYLLATHFDKNWYKAWHNWALANFEVISMVQEETKLNGGKNDDDDDTAVNNDNVRIDGSILRSGSLTINGNRYPLELIQRHVVPAIKGFFHSISLLETSCLQDTLRLLTLLFNFGGIKEVSQAMYEGFNLMRIENWLEVLPQLISRIHQPDPTVSNSLLSLLSDLGKAHPQALVYPLTVAIKSESVSRQKAALSIIEKIRIHSPVLVNQAELVSHELIRVAVLWHELWYEGLEDASRQFFVEHNIEKMFSTLEPLHKHLGNEPQTLSEVSFQKSFGRDLNDAYEWLNNYKKSKDINNLNQAWDIYYNVFRKITRQIPQLQTLDLQHVSPQLLATHDLELAVPGTYFPGKPTIRIAKFEPLFSVISSKQRPRKFSIKGSDGKDYKYVLKGHEDIRQDSLVMQLFGLVNTLLKNDSECFKRHLDIQQYPAIPLSPKSGLLGWVPNSDTFHVLIREHRDAKKIPLNIEHWVMLQMAPDYENLTLLQKIEVFTYALDNTKGQDLYKILWLKSRSSETWLERRTTYTRSLAVMSMTGYILGLGDRHPSNLMLDRITGKVIHIDFGDCFEAAILREKYPEKVPFRLTRMLTYAMEVSGIEGSFRITCENVMRVLRDNKESLMAILEAFALDPLIHWGFDLPPQKLTEQTGIPLPLINPSELLRKGAITVEEAANMEAEQQNETRNARAMLVLRRITDKLTGNDIKRFNELDVPEQVDKLIQQATSIERLCQHYIGWCPFW

SEQ ID NO: 1067 - protein, 525 aa, Staphylococcus epidermidis ATCC 12228
MSVLTVMQFIVNIIIMIVLLTIMILGVIWLFKDKGQNQHSVLRNFPVLGRIRYISEKIGPELRQYFFANDNEGKPFSRSDYKNIVLAGKYKSRMTSFGTGKDYLEGFYIQNTMFPLQATELHIDHTEFISTFLYHIENERLFSREEYRKSAQVDPFFLTDEHAVVLGSNLKHPFKIKRLVGQSGMSYGALGKNAITALSMGLAKAGTWMNTGEGGLSEYHLKGNGDIIYQIGPGLFGVRDHDGNFNRDMFINLAEHNNVRAFEIKLAQGAKTRGGHMEGNKVTEEIARIRNVKPYETINSPNRFDFIKNPTDLLNFVNHLQSIGQKPVGFKIVVSKVEEIEALVKTMIEIDTYPSFITVDGGEGGTGATFQELEDGVGLPLFTALPIVSSMLEKYGIRNKVKIFASGKLVTPDKIAIALGLGADLVNIARGMMISVGCIMSQQCHLNTCPVGVATTDPKKEKGLIVDEKQYRVTNYVTSLHEGLFNIAAAVGVHSPTEITSDHIIYRQLDGTTTSIQDYKLKLIS

SEQ ID NO: 1068 - protein, 549 aa, Oceanobacter sp. RED65
MTIMQSVLFVIATLGNSASFTLYYAHPSITTGFLVLFTSLYTLIGLHDLFISKHSLNRLYPVVAYIRYFLENFRTEIQQYFIANNTEELPFNREQRSLVYQRAKNQRDTIAFGTQHNLLEDNYLSLWPSLSPKKVEHENKRITIGGTQCDRPYDASILNISAMSFGALSAQAIEALNLGAKKGGFYHNTGEGGISPYHLKHGGDLVWQIGSGLFGCRDLDGNFDPSLFTQNARRDNVKMIELKLSQGAKPGHGGVLPKSKISEEIARIRNVPMDQDCISPASHPLAQTPIDLLNNITQLRQLSGGKPVGFKMCVGNPAEFLSICKAMLETNQYPDFITIDGAEGGTGAAPVEFSNRLGMTCLDAVYLVNSALIGCGIRDKITLIASGKTASAFDILTKMAAGANIINAARTMMFAVGCIQSRSCNTNHCPTGVATQDPARGKAIDITAKSERVKNFQRNTLHALFELVGSMGLDDPQAVTANMVKRRTPYGLSISLGAIVPTLKPNSLLQKLNTVDDPWQRWWQQANSESFYVHDDCVLYSPELKMREV

SEQ ID NO: 1069 - protein, 79 aa, Arabidopsis thaliana
MGNKLGRKRQIVDERYTLPQHGLYLSNDVDVKRLKRRISESKLAPCKSDLEDTPHLIMIVKRVGCALCSIRVVPGQDVV

SEQ ID NO: 1070 - protein, 373 aa, Aspergillus niger
MMEYPPQYQQPHGQHPHASSHITAPYQTAPQSAGSTVGSMTSPTNPQARMQQAHATHQASPIVPSQSHYQPAQNAPGSVHQQMNFPQSYGVTTAMPQAYGISPTQAAAMATAAASGQFYPLHQDSMAGQMAPGPRGSPRMAGVQVKSDRNPRSPPQIPGQMPSMGSQVQMSQNAQMQQRRMSHVSSPHVQNAQPLINHAGRPSVPPSMPPPPQPPVQQSQPSPDMVAGAAEEPPLYVNAKQFHRILKRRVARQKLEEQLRLTSKGRKPYLHESRHNHAMRRPRGPGGRFLTADEVAAMGKKQASGSTTAGLEGADDYAVKPPGDNPPSAQKRKSSDVNDDTINSSKKTKTSAKPSTSADESENESAELSDEDG

SEQ ID NO: 1071 - protein, 407 aa, Oryza sativa Indica Group
MDPRVWRRLPQPLVDRVLACLPTPSFLRLRAACRRFYHLLFSSPFLHSHLLLSPHLPFFAFVVPAAGHLLLLDPTATASWSRLPLPLPPVAGGPAAFSPAAASAGLLAFLSDASGHKTLLLANPITRLLAALPISPTPRLSPTVGLAAGPTSIIAVVAGDDLVSPFAVKNISADTFVADAASVPPSGFWAPSSLLPRLSSLDPGAGMAFASGRFYCMSSSPFAVLVFDVAENVWSKVQPPMRRFLRSPALVELGGGREGAARVALVSAVEKSRLSVPRSVRLWTLRGGGGGGGGGAWTEVARMPPEVHAQFAAAEGGRGFECAAHGDYVVLAPRGPVAQAPTSALVFDSRRDEWRWAPPCPYVVVAHHGGAGAAGFRVFAYEPRLATPAIGLLDATAPVALHGMHDG

SEQ ID NO: 1072 - protein, 535 aa, Triticum aestivum
  misc_feature (245)..(245): Xaa can be any naturally occurring amino acid
YFGEHNIDGMLAVLEPLHAMLERGAETIKENTFIQAYGHELLEAHECCLKYRATGEDAELTKAWDLYYHVFRRIDKQLPSLTTLDLHSVSPELLKCRKLELAVPGTYSADSPLVTIEYFVPQLIVITSKQRPRKLTIHGSDGEDYAFLLKGHEDLRQDERVMQLFGLVNTLLENSRKTSEKDLSIQRYAVIPLSPNSGLIGWVPNCDTLHALIREYRDARKIFLNQEHRLMLAFAPDYDHLPLIXAKVEVFQHALQNTEGNDLAKVLWLKSRTSEVWLERRTNYTRSLAVMSMAGYLLGLGDRHPSNLMLDRFSGKILHIDFGDCFEASMNREKFPEKVPFRLTRMLVKAMEVSGIEGTFRTTCENVMQVLRTNKDSVMAMMEAFVHDPLINWRLFNFNEVPQVSNYGNAHTHTVVSSEEAAPSEELMQPPRGAREKELLQAVNQLGDANEVLNERAVAVMARMSHKLTGRDFSSGSALSGAGGSSQHGSEHLASVDAREVEPGLSVKVQVQKLILQATSHENLCQNYVGWCPFW

SEQ ID NO: 1073 - protein, 547 aa, Prosthecochloris aestuarii DSM 271
MYNNLKTKKVKVATWSMLEEKKPEYALVAGVDLVVIRSKDQVSVLYGRCHHRGGLMADGHVEGNNLLCPLHGWDYRFDSGVSEYNNEEALQQFTAWIDTDADAVLVDEKEITLWAAEHPQPWSRESYQGLYADMKGTPEEPFNSAIHQLASTPHEAFHAHGSISAMGVPLTDLPRWEDIQILTAQLARPPLQDDTPVDTTLIIGPNARRPLQLSMPLFVSDMSFGALGREIKIALSRGAETAGTGIASGEGGMLEDEQRENSHYFYELAPARFGWDIEKVARCQAFHFKAGQAAKTGVGGLLPAAKVSEEIARVRGVALHHDAVSPAGFADLKTPRDFRRVADEVRRATGGIPVGFKMSAQHIEKDIDFALEAGTDYIILDGRGGGTGAAPDLLKNNIGVPTIAALSRARAHLDKRQADGVTLIITGGLRTESHFIKALAMGADGIAIANAAIQAAGCLSMRACNNNNCPVGIATQDPRLRERIVIERAAARLTNFLLNTMEMMKVMGRACGYSRLADFNQDDLSTWKQEMASLAGIAYAGDTGRQR

SEQ ID NO: 1074 - protein, 1098 aa, Vitis vinifera
  misc_feature (55)..(55): Xaa can be any naturally occurring amino acid
  misc_feature (325)..(325): Xaa can be any naturally occurring amino acid
  misc_feature (895)..(895): Xaa can be any naturally occurring amino acid
  misc_feature (1040)..(1040): Xaa can be any naturally occurring amino acid
MGDETEVVAAAENGNGTTLPEKMESVMEKKEEENNGVKEMEEDSKGDEKVETEAXEAEKMDEDLAAKEEKENKELEEKEEPKTEVMEEDNVSKENEASEEKVESKENVEEKVDGSKEKEKGGEIKDGKGPRKRGKGRSSGERVKDKVKEVEEKKVKEPRTPAASTIARPVRERKSVERLVASIERDSTKEFHIEKGIEFWELSLLRHDYWCNLCVCKFFTAYIKIVAYKLSKRKSDDTFKLLHTILFGRRGKAFQVKNNISRFSGFVWHENEEKQKIKVKEKFDKCVKEKLLEFCDVLDISIAKTTTRKEDIVTKLIEFLVAPHXTTTVLLAEKEQSIKGKKRKRVVKRNSSMSGSTSSKRSAKSRRKTEDTDTMEEKKSIHDSEDDSEEEDDKNEEEENENGIPERSEDEISEHSESEEKGNESEDESEEEIVKRKRDSKKTPVKKESAGKAKTKKTPTPKKSISPPKRSKKLSSNRSKADDDSDTSPKVFSRKKKNEVAKGRSSTPKKSVSKEKPGKKAVKGKDKPKEDKSSPSDDELRNAICEILKEVDFNTATFTDILKQLGMYSPFLLTFMDSMVVLKVGNVRMLKIGLPKLFHVSARQFETDLTARKSSIKLIIQEELTKLADEVDDEDEEGDAEKDEAQPASQELWTFLSDKLVNALQAGEMRVYQLVALGIICFVSTYNCVHYFGIRICCHFSRHIWFWFILDSILLISSAVEGDGDGASKQVAADPPSCVVVADHVPDAISTVQISRLPTNQMAINSSLGTHTYRQTTAQSLPRVALDGLIRAMIQRRTDPPFAPLKPLPPHPFPILPLLRLRSRRRYSDHSTALWLKVFFLLVETLRRHPQNLGFHRYEFNCSLTLLIVLFTAFSLEFEEFAIVSSDSMADSDNXSGGHNNNAGSELSPREQDRFLPIANVSRIMKKALPANAKISKDAKETVQECVSEFISFITGEASDKCQREKRKTINGDDLLWAMTTLGFEDYVDPLKIYLHRFREMEGEKTSMGRQGEKDGPSAAGGNGSVVNPANTGSGGFGEXGMYGAIPSTMMMMGHHQHQGHVYGSSAYHPMAAAGANFGSGKANSGHPGSGPSAGRPR

SEQ ID NO: 1075 - protein, 335 aa, Arabidopsis thaliana; identical to SEQ ID NO: 459

SEQ ID NO: 1076 - protein, 2497 aa, Oryza sativa Indica Group
MKPSPHFPEIGKKPKDLIAKEHGFNIAAYISSGADVIAAALRKHVEEEARDLSGEAFLRFMEQLYEQICSLLQSNDVAENLLALRAIDALIDMPFGEGASKVSKFANFLRTVFEVKRDPEVLVPASAVLGHLAKAGGAMTADEVERQIKTALGWLGGDRVEYRRFASVLILKEMAENASTVFNVHVPEFVDAIWVALRDPKQAVRERAVEALRACLHVIEKRETRWRVQWYYRMCEAAQVGLGKNASVHSIHGSLLAVGELLRNTGEFMMSRYREVADIVLNYLRHRDQLVRRSITSLLPRIAHFLRDRFVTNYLKICMDHILFVLRTPDERASGFVALGEMAGALGAELVPYLPLITSHLHDAIAPRRGRPSLEAISCVGSFAKAMGPAMEPHIRGGLLDAMFSAGLSDKLVEALESISTSIPSLLPTIQERLLDCISQALPKSSVRPGAAVGRGSRSSSLQQFVDSGGPVLVQLALGTLANFNFKGHELLEFARESVILYLEDEDCSTRKAAATCCCKLVAHSLSASSSSQFSSNRPNRMGGAKRRRLVEEIVEKLLMAAVADADVGVRSSVFKALYRNPSFDDFLAQADIMTSIFVALNDEEYHVRELAISVAGRLSEKNPAYVLPALRRYLIQLLTYLDQSMDSKCREESARLLGCLIRSCARLILPYIAPIHKALVARLREGTGPNANNALAAGVLATVGELAKVGGFAMRQYLPELMPLVVDALLDGGAVSKREVAVATLGQVIQSTGYVISPYNEYPPLLGLLLKLLNGELEWSTRLEVLKVLGIMGALDPHAHKRNQHKLPGQHREVLRPTMETAQHIVSMEELPTDFWPSFSASEDYYSTVAISSLMRILHDPSLSSYHQMVVGSLIFIFKSMGLGCVPYLPKVLPELFRAVRMCEDGGLKEFITWKLGTLVSIVRQVLHLVEQLCLALNDEFRMYILHILPSCIQVLGDAERCNDYYYVPDILHTLEVFGGNLDEHMHLVAPVLVRLFKVELVDIRRRAIVTLTKLIPTVQLCITRLLICLSVARNNDDLRKDAAEALCCLAHALGEDFTIFVSSIHKLLVKHHMRYRKWDEIENRLLRREPLISENLSVQKYTQCPPEVISDPLDDFGGVPSEEADETQRQPRSHQVNDVRLRSAGEASQRSTREDWAEWMRHFSIALLKESPSPALRTCARLAQLQPSVGRELFAAGFASCWAQMNETSQEQLVRSLKTAFSSQNIPPEILATLLNLAEFMEHDEKPLPIDTRLLGALAEKCRAFAKALHYKEMEFEAVCSKKMGANPVTVVESLIHINNQLHQHEAAIGILTYSQQHLEVQLKESWYEKLHRWDEALKAYKAKSSQASGPLQNLDATLDLLLGTRLYHTLFLGSLERLFKTRIMGLLGWMMKKRMTTTMNIVMKKHKAFKCRLFYWAVRETLIPIVNNFQDKLIPESKLTLTLMAANAAWHMGEWDHMAEYVSRLDDGDENKLRILGNTTASGDGSSNGAFFRAVLSVRCKKYEEARVYVERARRCLATELAALVLESYERAYNNMVRVQQLSELEEVIDYCTLPMESPIADSRRELIRNMWNERIKGTKRNVEVWQALLAVRELVLPPNEDRDTWIKFAKLCWKSGRISQAKSTLVKLLQFDPESSPELTLYHGHPQVVLAYLKYQYAVGDELKRRDAFCRLQDLSVQLATATNSYSGTLASQVATSNAGVPLIARVYLTLASWKRALSPGLDDDSIQEILVSYKNATLNAKDWGKAWHLWALFNTEVMSRYTLRGRPDIAGKYVVAAVTGYFYSIACASTTKGVDDSLQDILRLLTLWFNHGATSEVQMALQKGFSLVNIEMWLVVLPQIIARIHSNNKIVRELIQSLLVRIGKDHPQDMSSIKRNNLEKILKIEGTEFIAQALMYPLLVACKSISILRQRAAQEVVDKIRQHSGGLVDQAQLVSKELIRVAILWHEMWHEALEEASRMYFGEHNIEGMLAVLEPLHAMLERGPETIKENTFIQAYGHELLEAHECCLKYRATGEDAELTKAWDLYYHVFRRIDKQLPSLTTLDLHSVSPELLECRKLELAVPGTYSADAPLVTIEYFVPQLIVITSKQRPRKLTIHGSDGNDYAFLLKGHEDLRQDERVMQLFGLVNTLLENSRKTSEKDLSIQRYAVIPLSPNSGLIGWVPNCDTLHALIREYRDARKIFLNQEHRCMLSFAPDYDHLPLIAKVEVFQHALENSEGNDLAKVLWLKSRTSEVWLERRTNYTRSLAVMSMVGYLLGLGDRHPSNLMLDRYSGKILHIDFGDCFEASMNREKFPEKVPFRLTRMLVKAMEVSGIEGTFRTTCENVMQVLRTNKDSVMAMMEAFVHDPLINWRLFNFNEVPQVTNYGNAHSHTVVNSEEAANRELMQPPRGARERELLQAVNQLGDANEVLNERAVAVMARMSHKLTGRDFSSGSSLSGAGSSTQHGNEHLASGDTREVEPGLSVKVQVQRLILQATSHENLCQNYVGWCPFW

SEQ ID NO: 1077 - protein, 524 aa, Bacillus cereus G9241
MSETLLVIISILLLLMLLLIVFFIITFFIKKRTHHSILKLHPYLGRMRYLLEKIGPEFRQYWFDHDTDGKPFSRYDFQSVMFLAKYRSEILGFGSKRDFEASGYYIANTLFPVLTEELSVNVTQEREGKKYVIHKEGLFSRREKLTADTTNLWLYEEDDAIIVGENRKYPWKLYGMFGASATSYGAIGENYILASGFGAKMAGGSWINTGEGGVIPEHLHTGANIVAQIGPGLFGYRDEDGNFSMEKFMDKAKESNIKAFELKFGQGAKIRGGHLEGQKVNEKIASVRNVRVGETINSPNRFSFLNNAADTLYFIQRLQETGGKPIGMKIVIGQQQPLEDLFKTMKELNIYPDFITIDGSEGGSGATYKSMADCMGLPLIPALLTFIDTANHYGVRNKFKVFASGKLITPDKVAIALAIGADAVSSARGFMMASGCIMALQCNSGQCPSGVATTNPHYQKALDPYEKKWRVMNYVVSMRYSLFSLAAAAGVKSPRHLTREHIVFKDEVGRVVPLSELFPIINQT

SEQ ID NO: 1078 - protein, 1836 aa, Methylobacillus flagellatus KT
MSALKDPQSENTFGLYDSSLDKDNCGVGFITRKDGVQTHDVLVKGHEALCTIPHRGGMSAEGVGDGAGVSIDLSLPFFRRLTGQALEAGRFGVGNFFLPSDASAYPRAEQIIRRALSEKGFDILLVRDVPVDNSAIRPAAVRYQLPIQQWVFAAPDDIDVQEFDRRIYKALLVIEEQAYTDAGLSGLYPLSMSAHTQVLKGRLNSNEVIPYFHDLVEEDHAVHTMYFHTRFSTNTDPHPSMAQPFRMMAHNGELNTDRKNRIAEAALARARNGKIFRPKGQSDSSRLDQTLNSRLMDDGLDLVTAVVSMMPPAWENDPTLPDNVKAMLEYFSLYEEKNDGPAALIFGNGTVIGARLDRLGLRPLRSVETQEYLCVMSEAGQINFPPESVLRRGRIEAGGMLYYDHSEKRSRGTLETLEMLAAKRDYPALLKQARATLKQLPEVPAEVAGSPQRYHGDLSLYQRFVSYYYNQESFKFMMDPMLATGAEKISAMGYGNAINALTDHEGGVAHYFSQRFAQVTNPPLDSIREADGMTLRVALGAKPNMNKGKGRQIVIDSPILSHLDMLKLREQTETPYRCFEALYTPIVGNAAANEKALEQAIDALADAIVEFAREEGGIAVISDRHVSSTQAAMPLLLVVSATNQRLIDEGLRLDVSIVAESGQIVSSHHVAAALGFGASAIYPLGVQLRAEEKYGAEADKAFKKYAKAAEKSLMKTMGKVGLCTVESYIGGEFFEPNFLNTNDPVLRKYFPNLKTPVGGADFAAIAKMVVDWHQEAQKVTDENSVPLLGLFKERSEGAGHSFGTIAVRGFVEMTEEKIHFDKQGKRAEDDFLRLMTLSKLEDAFSFKKGEAFSGSFDRLSAEEIDNFDITSSYRSFSHMMAEERAKRPSALRDVLDFPADLTGLKTADEFRAVLARYALVGNNSIAVRGLEVQELGNARFNLRLTGPLAEDISRLSSLGQALVAHFGKDISGHWLESGVLTVEAAGKAADYFSLLCPAPASVPLAEVQPASEITRSFASGAMSHGALVAPAHEAVAHGTNMVGGMSNSGEGGEHISRYGTIRASRIKQLASGRFGVWAGYLADPMLEELEIKIGQGAKPGEGGQLPAPKVTVEIAAARGGTPGVELVSPPPHHDTYSIEDLAQLIHDCKAARVRVIVKLVSSEGIGTIAVGVAKAGADVINVAGNTGGTGAAAVTSLKYTGRAAEIGIAEVHHALCANGLRDKVILRCSGAHQTASDVVKSAMLGGDSFEFGTTALMMLKCVMAKNCNVKCPAGLTTNAEAFDGDPRALAQYLLNVAHETREILASIGLRSLREARGRSDLLQLLDHPARVGQLDLRAMLAVVPEVKIENPVYMEKDFTLDDAFIDVLRQALVTDKQSEVQLGEGRRLNNCNKTVGGQLAIDIERLLNHELTEEEALRLPAVVMDKRGRRFLKPESVRVSTSGSAGQSYGAFCNDGMVMHHSGTCNDGVGKGQCGGTIIVTSPGGGSEQAGGNVLVGNFALFGATGGRLFVEGQAGDRFAVRNSGATAVVEGVGDFACEYMTNGAVLNLGAFGKGFGNGMSGGFAYQYDPYGELSRKVAADSVLLGSIADDTEMAQVHSQAIQLLLQWHLEATGSKRAAWLLENWDAERQNFVFVMPRALLLYQDSDEILKAKPRKELLEELSSALAAFQVRKFKLAYRDGKPVAGGKVPSHGDVDSEEMFELLNNYTVLNMAQQVAMAKVSNAQSVTDPAVQKAVRNLLLTEDFLLMQKLQRYAREAIDGYSDQELAVLIADKRLRDYKAALSQRNILSMDSPGTYGWIIHQSLKNSTLLGTLPSLEALFAKASMQELVTTLKSN

SEQ ID NO: 1079 - protein, 1529 aa, Prochlorococcus marinus str. NATL2A
MHQRISRSNWPYCDSTYPDAFSGEKDSCGVGFIASVEGKQNHWVLTQALRGLSCMEHRGGCGGDSDSGDGAGILCEIPWSYFKQVWDKAKHCEPQASGIGMIFMPKDLKNRELAKKICEQEAESLGLTSKGWRDVPVHEEVLGKLARENEPFITQWIVDIKDKEINLEALLFRLRQRISNRANIELKEDELGLYICSLSSKTIVYKGMVRSEILAPFYNDLKDDRFEVSYAVYHRRFSTNTLPKWPLAQPMRLLGHNGEINTLLGNINWAKATETDISSVWKENANDLKPIVDNLYSDSANLDLNLELLVRSGRPITDSLLTLIPEAFRDQPELINKPEITAFYEYAAGTQEPWDGPALIVFTDGTNIGATLDRNGLRPARYCITKNGYVVMGSETGVVELEEDVIQEKGRLGPGQMLAVDLESKRILRNWDVKEESANRYPYLDWLKANRINLNNQSWEINNKFDKQKLLQYQIAFGFSAEDFDYIINSMAANAKEPTYCMGDDIPLAILSNKSHILYDYFKQRFAQVTNPPIDPLREKLVTSLEMNLGVRKAPLRPKEESARLIHLESPILNEKELNSIKNSELSCKQISTLIPINDDKIILEEGLKNLCKEAEDSVINGREILILSDRDINRENSYIPPLLAVGAVHHHLLRKGLRLKTSIIIDTAQCWSTHHIACLIGFGASAICPWLTWETTRHWWQLPKTQKLISDGKLSNLSIEIAQDNVKKAMEDGLRKILSKIGISVLASYHGAQIFEAIGIGADLIDLAFKGTTSRIAGLTLSELSIETISFHKKAFPELEQKKLDFNGFVQYRNSGEFHLNNPEMSKILHAAVKAGPEYDHFKTYQQLLENRPATTLRDLLTFKTATQPLPLDQIESVENICQRFCTGGMSLGALSREAHEVLAIAMNRIGGKSNSGEGGEDPARFNVLEDVDENNQSKTLPNLKGLLNGDTACSAIKQIASGRFGVTPEYLTSGKQLEIKVAQGAKPGEGGQLPGPKVDEYIARLRNSKPGVALISPPPHHDIYSIEDLAQLIHDLHQINPTAKVSVKLVAEIGIGTIAGGVAKANADVIQISGHDGGTGASPLSSIKHAGLPWELGLTEVHRSLLENGLRERVLLRADGGLKTGWDVVIAALLGAEEYGFGTVAMIAEGCIMARICHTNKCPVGVATQQEGLRKRFPGLPEHVVNFFIFVAEEVRQLMSQVGVAKVEDLIGRTDLLIPRNIDLTKTKKVDLSSLLKPIDNPTDRSWLSHEIEAHSNGEVLENALLKDKEVSNAIQTQGSITKEIPIVNTDRSVCARISGEIAKKYGNKGFNGNLNLIFKGSAGQSFGAFILKGMNISLIGEANDYVGKGINGGSITIVPEIINDTSNTQVILGNTCLYGATGGKLFALGIAGERFGVRNSGAHAVIEGAGDHCCEYMTGGVVVVLGKTGRNIGAGMTGGIAFILDKKNELDLRMNKEIVEVHPLTATNHEQFLNDLIYEYHQKTKSPLAQKILADWSSWKELFKAVVPPSEKSKLGIEEVLEKATI

SEQ ID NO: 1080 - protein, 539 aa, Burkholderia vietnamiensis G4
MLSRRYLAMWGAVLLLAAAAALASIHALSWLWIIVPVALVALGLYDLNQDRHAILRNYPLWGHFRFLFEFIRPEIRQYFVEDDTDEKPFSRAQRSLVYQRAKNVADNRPYGTELNVKSVAHEWISHSLAPTRLPNHDFRVRVGANRAQPYDISVLNVSAMSFGSLSANAIRALNLGAKKGGFAHDTGEGSLSKYHREHGGDIIWEIASGYFGCRNDDGTFNPDKFAKQAADPQVKMVEIKLSQGAKPGHGGVLPAAKITPEIAETRGVPMGKDCISPATHSEFSTPRGLLEFVERLRTLSGGKPTGFKLCIGHPWEFFGIAKAMIETGIVPDFIVVDGAEGGTGAAPLEFTDHVGVPLQEGLLMVHNTLVGIGVRDRVKIGASGKIISAFDIARTLAIGADWVNSARGFMFAVGCIQAQHCHTDRCPTGVATQDPVRQRALVVPDKAERVYNFHRNTLHALQELVQAAGLGHPSELRAHHIVQRVAPHEVRLMSQLLKYLKPGALLEGRTCGYTLYDKWWPIARSDSFVLGENAYASIE

SEQ ID NO: 1081 - protein, 1622 aa, Arabidopsis thaliana; identical to SEQ ID NO: 942

SEQ ID NO: 1082 - protein, 1530 aa, Listeria monocytogenes str. 1/2a F6854
MKQTNLPKKHGLYNPENEHDACGIGFVANIKKISSHKIVEQGIHMLCQLKHRGGEVGGDTGDGAGILLEISDSFFRRECSKLGINLPEKYHYAVGMFNFPQDKTERECLMTETEKLIASEGQKFLGWRKLPTDVTKVGAGARKTEPAIYQLFIQKNAKLDEAGFERALYLIRKQIEKFAATSKLITETFYVPSLSTRTVIFKGMLLPEQINQYYLDLADPAYVSAFALVHSRFSTNTFPSWERAHPYRYLIHNGEINTQRGNVNWMKAREKRAESGLLGDDLAKLLPIIDESGSDSATLDNALEFLVQAGRSLPHAAMMLIPEPWDKNPHMTDPKRAFYEYHSTLMEPWDGPTSISFTNGRVIGTILDRNGLRPARYYETKDHTIIYSSETGVVPVDPSEIIRKETVGAGTMLLIDLEEGRIVTDDELKEELTTEKPYRAWLEAEMTEIADLAAADLHYEAMDKSERFKKQRAFGYTQDELNKILIPMVTEKKDPMGAMGYDAPLAVLSQRPQVLFNYFKQLFAQVTNPPIDGIREETVTSAMTLLGDEGNILNPTAQNANRIRLKTPILSRKEFAALEQQTKFAQPTVTLPILFKAEERDGLEARLEALFAEADEKIAAGAELLILSDEGVNADWIGIPSLLAVSGLHHHLVKAGTRTQVSIIVKTAEARDVHQCALLIGYGADAVFPSLAIDTFDGLIKEGRIKGFTLDEAESRYIEAITDGILKIMSKMGISTVQSYRGAQIFEAIGIGDEVIKHYFPGTASQIGGIPLDVIAQEVWLRHREAYHDIGYQSFTLNTGGEYQWRSNGEYHVYNPLAIHSLQQATRENDRETYNLYSDLMQNQNNAFLRGLLTFTSDRKPIPLDEVEPAEAIFKRFKSGAMSYGSISQEAHEALAIAMNRIGGKSNSGEGGENPNRFTPDENGDWRRSAIKQIASGRFGVTSHYLVNAEELQIKMAQGAKPGEGGHLPGNKVYPWISKTRGSTTGVGLISPPPHHDIYSIEDLSQLIFDLKNANQNARINVKLVSKTGIGTIAAGVAKGNADVILVSGYEGGTGAAARTSIRHAGVPWEIGLAETHQTLLLNGLRNKVVVETDGKLMTGKDVLVAAMLGAEEFGFATAPLVTLGCVMMRVCHLDTCPVGVATQNPELRKKFSGSADYVVNFFHFIVAEMREMMAELGFRSLTEIIGHKEFLTTHEKKEAHWKAKYIDFSNMLYSDDFYKNQVQYCTKQQDHKIDQTLDMRELVPLIQPALENGEKVTGTFAVRNVDRAIGTIAGSFISKKYGAEGLPEDTISLDFVGSAGQSFGAYTPLGMTLRIHGDANDYFGKGLSGGKLIVSPDAKTPIKPHDSAIVGNVTLYGATGGYAYMHGKAGARFAVRNSGATAVVEGIGDNGCEYMTGGAVVVLGEIGENFAAGMSGGVAYLYTNNKQATTAKINHELVNSRSTLNTSELANLKQLIEQHASLTGSNFAKDILQNWEAEKANFIFVIPNEYEMMLTRITTLEQTGKTHDEAELQAFYEHKDGKLVAGVAK

SEQ ID NO: 1083 - protein, 200 aa, Salvia miltiorrhiza
MADSPGGHGSHDNGGGGDHSPQSSVREQDRFLPIANIGRIMKKGLPQNGKIAKDAKDTVQECVSEFISFVTSEASDKCQKEKRKTINGDDLLWAMATLGFEDYIAPLKVYLARYRELEGDTKGSARGADGAPKRDTVGTQLGSDASLLIKALLLKASATLTPKSNIKKHNVVWLSTAHFWLSLSQDTMFSCYSFKWLGFL

SEQ ID NO: 1084 - protein, 383 aa, Methanothermobacter thermautotrophicus str. Delta H
MRRQRRSEDDREYLKIVQIKRIAHSGEVPVESMGSEKRLPLGLDDLHFLPAQVSKIPLNAEDPVKTDVIIGPESKRPLRLKSPIIISGMSYGAVSEKTRIAIASVADRLKIGFNSGEGGVLQRELEKAGDYLIIQYSTGRFGITEDVLRGAAAIEIRFGQGAYPGKGSYLPPDKISPDVARVRGLAPGEGSYSPAHHHDIRDQMELEEKVKELRKMSGGAPIGAKIGCGNVEDDVKALLDAGVDFISLDGFGGGTGAVNPHIRDNTGIPLIAAIPRAVKTVINEGHGDRVSLIAGGGLRTAADMAKCLALGADAVYTGTAALIALNCQQHRLCHTGKCPTGITTHDPDLLKHMDLERAIEGLENFIRVSTAEIADFCQDHRKG

SEQ ID NO: 1085 - protein, 561 aa, Oryza sativa
KIAQGAKPGEGGQLPGKKVSPYIANLRRSKPGVPLISPPPHHDIYSIEDLAQLIYDLHQINPAAKVSVKLVAEAGIGVVASGVAKANADVIQISGHDGGTGASPISSIKHAGGPVEMGVAETHQVLVRNELRERVVLRADGGFRSGRDVLAAAALGADEFGFGTVAMIATGCIMARVCHTNNCPVGVASQREELRARFPGAPADLVNFFHFVAEEVRQGLAQLGLRSLDELVGRADYLQQRDAPLAKTGGLDLSFLTTYAGECGTSSIRLAQAVHSNGPVLDDEILADKGIQEAIRTQGTVSKSYDIVNVDRAALGRISGAIAKPYGDNGFKGAINLQLTGSGGQSFGVFLTTGLNVHLTGEANDYVGKGMAGGEIVIVPPPASPFKAESASLVGNTCLYGATGGKLFVNGRAGERFAVRNSRADAVVEGTGDHCCEYMTGGCVVVLGTAGRNVAAGMTGGLAYFYDEEGDFPEKVNTEIVAIQRVVTPAGEQQLKGLIKQHADKTGSAKAKAILADWASAKGRFWQLVPPAEKNTAQVNPAVDDTTVAAAAAPVQVAATA

SEQ ID NO: 1086 - protein, 1481 aa, Pseudomonas syringae pv. tomato str. DC3000
MKAGLYQPDEFKDNCGFGLIAHMQGEPSHHLLQTAVQALTCMTHRGGINADGKTGDGCGLLIQKPDGFLRAMASEHFGVELPRQYAVGMVFLNQDDTKAKAARENMNREILAEGLELVGWRQVPIDTSVLGQLALERLPKIEQVYIGGEGLSDQEFAIKLFSARRRSSVANAADSDHYICSFSHKTIIYKGLMMPADLTAFFPDLSDERLQTAICVFHQRFSTNTLPKWPLAQPFRFLAHNGEINTITGNRNWAQARRTKFTNDLMDLDELGPLVNRVGSDSSSMDNMLELMVTGGIDLFRGVRMIIPPAWQNVETMDPDLRAFYEYNSMHMEPWDGPAGIVMTEGRHAVCLLDRNGLRPARWVTTKNGYITLASEIGVWDYKPEDVIAKGRVGPGQIFAVDTETGQILDTDAIDNRLKSRHPYKQWLRKNALRIQATMEDNDHGSAFYDSEQLKQYMKMYQVTFEERDQVLRPLGEQGQEAVGSMGDDTPMAVLSRRVRSPYDYFRQQFAQVTNPPIDPLREAIVMSLEICLGAERNIFQESPEHASRVILSSPVISPAKWRSLMNLERPGFERHIIDLNYDESLGLEAAVRNVADQAEEAVRSGHTLIVLSDRHIAPGKLPVHASLAVGAVHHRLTEQGLRCDSNILVETATARDPHHFAVLIGFGASAVYPFLAYEVLGDLIRTGEVLGDLYEVFKNYRKGITKGLLKILSKMGISTVASYRGAQLFEAIGLSEEVCNTSFRGVPSRLKGARFVDIEAEQKALAAEAWSPRKPIQQGGLLKFVYGGEYHAYNPDVVSTLQAAVQQGDYSKFKEYTALVDQRPVSMIRDLLQVKTLDQPLNIDEIEPLSEILKRFDSAGISLGALSPEAHEALAEAMNRLGARSNSGEGGEDPARYGTIRSSKIKQIATGRFGVTPEYLVNADVLQIKVAQGAKPGEGGQLPGGKVNGLIAKLRYAVPGVTLISPPPHHDIYSIEDLSQLIFDLKQVNPAALVSVKLVAEAGVGTIAAGVAKAYADLITISGYDGGTGASPLTSIKYAGAPWELGLAETHQTLRGNDLRGKVRVQTDGGLKTGLDVIKAAILGAESFGFGTAPMIALGCKYLRICHLNNCATGVATQNEKLRKDHYIGTVDMVINFFTYVAEETREWLARLGVRTLEELIGRTDLLDILPGETEKQRHLDLTPLLGSDHIPADKPQFSLVDRNPPFDKGLLAEKMVELAKPAIEALSGGEFELDICNCDRSIGARISGEIARLHGNQGMNKAPITFRFKGTAGQSFGVWNAGGLNMYLEGDANDYVGKGMTAGKLVIVPPKGSPFKTNESAIIGNTCLYGATGGKLFAAGTAGERFAVRNSGAHTVVEGTGDHCCEYMTGGFVCVLGKTGYNFGSGMTGGFAYVLDQDNTFVDLVNHELVEIQRISGESMEAYRTHLQSVLNEYVAETDSEWGRNLAENLDDYLRRFWLVKPKAANLKSLLSSTRANPQ

SEQ ID NO: 1087 - protein, 1531 aa, Zymomonas mobilis subsp. mobilis ZM4
MSIKSSADSFDVFAERERLAKEGMYRPEFETDACGVGLVAATDGKASRRVVTAAIDALKAVWHRGAVDADGKTGDGAGIHVDLPASFFDDAIAHAGHAPLPNRLAVGMVFLPRTDLSAQETCRTIVESEIIDFGYRIYGWRQVPVDISVIGEKAMRTRPEIEQIMIAGPHPDEMSAAEFEKNLYLIRRRIEKKVIAAQINDFYICSLSCRSIVYKGLFLAEALSIFYPDLQDERFVSRVAVFHQRYSTNTFPQWWLAQPFRMLAHNGEINTIRGNRNWMKSHEIKMASLAFGEHSEDIKPLIPAGASDTAALDAVFETICRAGRHAPAAKLMLIPEAWQHNPDMPKAHRDMYSYLASVMEPWDGPAALAITDGSWAVAGVDRNALRPLRTVRTKDNLLIVGSESGMVVVPENNVIAKGQLGPGQMIAVNLDEGRFYEDRPLKDLIASERPYGEWIKDFKKLSDLDLKSYDPVIPYDRDELIKRQVSAGLTLEDMDLVLSPQAETGKEAMGSMGDDTPLAVLTEKPRLTSQFFRQNFSQVTNPPIDSLRETQVMALTTRFGNLGNILDSENKQKQILTLDTPYLKTSEWCQLKDHFGEQAVEIDCTFSPDDGADALRHAISNLRTQAENAVRSGHSELFLTDEHIGSDRVAVAMILATAAVHTHLIRKGLRSYASINVRASECIDPHYVAVLIGVGATTVNAYLAESAIAYRHSQGLFGTMTLEQCLDNHHHAICNGLLKIMAKMGIAVVSSYRGAYNFEAVGLSRALVNDLFPGMTAKISGEGYASLQRSALLRHQNAFAANKKALDVGGFYRQRASGDSHAYTAELMRKLQKAVSSDSYTTYLEFSKEVHQLPPVYLRDLLGFNWSKQPIPIEEVEPITEIRRRFITPGMSLGALSPEAHETLAIAMNRIGAKSVSGEGGEAPERFHPYENGDNANSPIKQVASGRFGVTAAYLGACEEIEIKVAQGAKPGEGGQLPGFKVTDMIAKLRHSTPGVTLISPPPHHDIYSIEDLAQLIYDLKQINPNARVGVKLVSSAGIGTIAAGVAKAHADSIMISGNVGGTGASPLTSIKYAGTPWEMGLSEANQVLTLNGLRHRVKLRTDGGLKTGRDIVIAAILGAEEFGIGTLSLIAMGCLMVRQCHSNKCPVGICTQDKAMRQKFIGTPERVINLMTFIAEEVREILAKLGVRSLKEIIGQTDLLSQVNRGADHLDDLDLNPVLAKVDANTEARYFQIDGFRNPVPDSLDAQMLQDAQAVFTRREKTQLTYSVRNTQRAIGTRFSAEITRNFGMDSLADGHVHVRLRGSAGQSLGAFSVKGLTLEVFGDANDYVGKGLSGATIIVRPTVSSPIDGHTNTIIGNTVLYGATAGKLFAAGRAGERFAVRNSGAETVIEGCGANGCEYMTGGLAVILGSVGPNFGAGMTGGMAFVLDEDNSFERHANPDNIIWQRLASSHWETVLRSMIADHAVKTDSPWAHRVLDEWDLWSQKFWQICPKEMLGRLEYPLDDKKNTEDQKEKGKAGKPELKEQEGAF

SEQ ID NO: 1088 - protein, 1486 aa, Salmonella enterica subsp. enterica serovar Typhi str. CT18
MLYDKSLEKDNCGFGLIAHIEGEPSHKVVRTAIHALARMQHRGAILADGKTGDGCGLLLQKPDRFFRIVAEERGWRLAKNYAVGMIFLNKDPELAAASRHIVEEELQQETLSIVGWRDVPTNEGVLGEIALSSLPRIEQIFVNAPAGWRPRDMERRLFIARRRIEKRLQDDKDFYVCSLSNLVNIYKGLCMPADLPRFYLDLADLRLESAICLFHQRFSTNTVPRWPLAQPFRYLAHNGEINTITGNRQWARARTYKFQTPLIPDLQSAAPFVNETGSDSSSLDNMLELLLAGGMDIIRAMRLLVPPAWQNNPDMDQDLRAFFDFNSMHMEPWDGPAGIVMSDGRFAACNLDRNGLRPARYVITKDKLITCASEVGIWDYQPDEVVEKGRVGPGELMVIDTRGGRILHSAETDDDLKSRHPYKAWMEKNVRRLVPFEELPDEEVGSRELDDDLLASYQKQFNYSAEELDSVIRVLGENGQEAVGSMGDDTPFAVLSSQPRIIYDYFRQQFAQVTNPPIDPLREAHVMSLATSIGREMNVFCEAEGQAHRLSFKSPILLYSDFKQLTTMSEHHYRADWLDITFDVTETTLDATVKALCDKAEQMVRNGTVLLVLSDRNIGKNRLPVPAPMAVGAVQTRLVDQSLRCDANIIVETGSARDPHHFAVLLGFGATAIYPYLAYETLGRLIDTQAIAKNYRTVMQNYRNGINKGLYKIMSKMGISTIASYRCSKLFEAVGLHDDVVNLCFQGVVSRIGGASFDDFQQDLLNLSKRAWLARKPISPGGLLKYVHGGEYHAYNPDVVRTLQQAVQSGEYSDYQEYAKLVNERPAATLRDLLAIHPDGEAVTIDEVEPASELFKRFDTAAMSIGALSPEAHEALAEAMNSLGGNSNSGEGGEDPARYGTNKVSRIKQVASGRFGVTPAYLVNADVIQIKVAQGAKPGEGGQLPGDKVTPYIAKLRYSVPGVTLISPPPHHDIYSIEDLAQLIFDLKQVNPKAMISVKLVSEPGVGTIATGVAKAYADLITIAGYDGGTGASPLSSVKYAGCPWELGLVETQQALVANGLRHKIRLQVDGGLKTGVDIIKAAILGAESFGFGTGPMVALGCKYLRICHLNNCATGVATQDEKLRKNHYHGLPFKVTNYFEFIAREVRELMASLGVTRLVDLIGRTDLLKELEGFTAKQQKLALSRLLETAEPHPGKALYCTENNPPFDNGVLNAQLLQQAKPFVDARQSKTFWFDIRNTDRSVGASLSGYIAQTHGDQGLASDPIKAHFSGTAGQSFGVWNAGGVELYLTGDANDYVGKGMAGGLIAIRPPVGSAFLSHKASIIGNTCLYGATGGRLYAAGRAGERFGVRNSGAITVVEGIGDNGCEYMTGGIVCVLGKTGVNFGAGMTGGFAYVLDEDGEFRKRVNPELVEVLDVDSLAIHEEHLRGLITEHVQHTGSQRGEEILSRWSSFSTQFALVKPKSSDVKALLGHRSRSAAELRVQAQ

SEQ ID NO: 1089 - protein, 1561 aa, Microcoleus chthonoplastes PCC 7420
MTNRSINPNQQYQTWNRDDVPYPGQRWLVEERDACGVGFIASVAGVASHELIEQALSALTCLEHRGGCSADRDSGDGAGLMTTIPWGLFTSWFEEQGITMPQTDQLAVGMVFLPQDGTKATKVRDIVGGVFEHDGFTVLGWRVVPLNESVVGPQALENQPQIEQIIVSCPHQTGNDRERLLYKTRRRIGSALEADGTLHWSDDLYICSLSSRTIVYKGMVRSAVLGEFYQDLKHPEFQSPFAVYHRRFSTNTLPKWPLAQPMRLLGHNGEINTLLGNINWMKAREADLSHPVWGNEMEDLKPTVDPDNSDSATLDNIFELLVRSRRSPLEALMIMVPEAYKNQPDLQDHPEIVDFYEYYSGVQEPWDGPALLVFSDGQVVGATLDRNGLRPARYSITRNGYVVVGSEAGVVDLPEADIVEKGRLGPGQMIAVDLANHEILKNWDIKQRVAQRLPYGDWLKQHRQVLSPQPFTDTPQLDAKALLQQQTAFGYTAEDLDMILEPMVSQGKEPTFCMGDDIPLAILSDKPRLLYDYFKQRFAQVTNPPIDPLRESLVMSLSMELGERGNLLEAKPEYAQLLKLKTPVLNEAELNSVKTSGFATTELSTLFEISAGPDGLKNAIDRLCDQADQAVKSGSKVLILSDKIGGSVGENTSYIPPLLAVGAVHHHLIRAGLRMKVSLVVETAQCWSTHHFACLIGYGASAIHPYLALESVRQWWSNPKTQKLMNRGKLEPLTIEEAQKNYRKAVEAGLLKILSKMGISLLSSYQGAQIFEALGIGAEVLDLAFRGTTSRLGGLNLAELAQEVMAFHQRAFPELTGKKLENFGFIQYRPGGEYHMNSPEMAKALHKAVASVKNGNGKTDNGKTAYDHYEVYKKYLEDRPVTALRDLLDFNSDRTPIPIEEVEPVAEIVQRFCTGAMSLGSLSREAHETLAIAMNRIGGKSNSGEGGEDPVRFKVLDDVDNQGNSPTLPHLKGLRNGDTASSATKQVASGRFGVTPEYLMSGKQLEIKIAQGAKPGEGGQLPGKKVSPYIAMLRRSKAGVPLISPPPHHDIYSIEDLAQLIFDLHQINPEAKVSVKLVAEIGIGTIAAGVAKANADVIQISGHDGGTGASPLSSIKHAGVSWELGVTEVHRALMNNQLRDRVILRADGGFKTGWDVLMAALMGAEEYGFGSVSMIAEGCIMARICHTNNCPVGVATQQEHLRKRFTGIPDHVVNFFYFVAEEVRSLLARLGYRKLDEVIGRADLLQQREDIGLTKTSTVSVKCLTDLPDTSRDRSFLNHEAVHSNGPVLDDQLLADPEMQVAIANHGTITKDLAVLNTDRSVGTRLAGAIAKQYGDTGFEGQITLNFKGAAGQSFGAFNLPGMTLRLVGEVNDYVGKGMHGGEIIITPPTEATYNPAENVIVGNTCLYGATGGTLFANGWAGERFGVRNSKGQAVIEGAGDHCCEYMTGGVIVVLGRVGRNVGAGMTGGLAYVLDEDSQFPAKVNPEIVKIQRVTTSAGEQQLKALIQAHVDRTGSDKAKTILANWSDFLGKFWQVVPPSEEDTPEANPEAVAQRELSPVQ

SEQ ID NO: 1090 - protein, 446 aa, Mycobacterium smegmatis str. MC2 155
MSYTTDDRARLGLRESATFDRTTIAAIQRAADTGIYDIRGWGAKRPLPHFDDLLFLGASMSRYPLEGYRERCGTDVVLGDRHAKHPLHLDIPVTIAGMSFGALSAGAKEALGRGASEVGTSTTTGDGGMTPEERGQSKHLVYQYLPSRYGMNPDDLRKADAIEVVLGQGAKPGGGGMLLGQKISERVAGMRTLPQGIDQRSACRHPDWTGPDDLTIKINELREITDWEKPIYVKVGATRTYYDVKLAVHSGADVVVVDGMQGGTAATQEVFIEHVGIPTLAAIPQAVQALQELGVHRKVQLIVSGGIRNGADVAKALALGADAVAIGTAALIALGDNHPRYAAEYEKIGSAAGFYDDFQDGRDPAGISTQDAELAARFDPIEGGRRLANYLRVLTMEAQTIARACGKAHVCHLEPEDLVAVTIEAAAMARVPLAGTDWIPGRGAAL

SEQ ID NO: 1091 - protein, 1535 aa, Acidobacteria bacterium Ellin345
MQSKESVNLNPQVKYSPGLPPAQGLYDPRHEHDACGMGFVASLRGEKSHAIIDKGLEILINLAHRGACGCDPETGDGAGITIQVPHTFFARECPLSGFSLPNPGEYAVGMVFLPVDTHPRLQCEGILERIIREEGLTVLGWRDTPVDETAIGRVARGSQPYIEQIFVDRPAGMDEAAFERKLYVVRKRTEREIAEHEEDWKEWFYIPSLSSRTIVYKGLLIAPQLSKFYPELADPDVTSSLCLVHQRFSTNTFPSWQLAHPFRYVAHNGEINTLKGNASWMHARQSILESPLFGDDIKKLFPIIPSGSSDSAAFDCALELLVQAGRSLPHAMAMLIPEAWTGNPHMKPEKRAFYEYHASLMEPWDGPAAIAFTDGRLIGATLDRNGLRPGRYMVTEDDLVVLASETGVLDVPADRVKRKGRLQPGKMFVVDTVAGRIVTDKEIKQSLSERQPYQEWLEKNQITLAQLPEPTRLHASDLSTLLRRQRAFGYTDEDLQMILEPMGNKGEEPIGSMGTDTPLACLSDRPQLLFSYFRQLFAQVTNPPIDPIREEMVMSLTSYIGTERNILDETPLNCHTLKLPQPVLTNRDLEKLRRLSYGDLLATTLSTGFRVKEGEEGLQRALDELCRRASLSVKSGYTLLILSDRGLDEQYAPIPSLLALAAIHNTLIREETRTQVALIVESGEPREVMHFALLIGYGASAVNPYLAIETLEERANSGYLNDGVTAESAVKNFIKAINKGLLKTFSKMGISTLQSYRGAQCFEAIGLNGELIDAHFAGTVSRIEGVGLEVIAREALLRHEFAFRAPRDFEAELSSGGQYHYRVDGEYHLLNPQTISKLQHAVRSADAKTFQEYTDLIDSQNRELCTLRGLLKIKDSARPVPLEEVEPAKEIVKRFATGAMSFGSISKEAHETLAIAMNRIGGKSNTGEGGEDESRFQRDENGELRRSAVKQVASARFGVTTNYLVNADELQIKMAQGAKPGEGGQLPGHKVDEVIAKLRHSMPGVGLISPPPHHDIYSIEDLAQLIYDLKNVNPQARISVKLVAEVGVGTVAAGVAKAHADVVLISGDSGGTGASPLSSIKHAGIPWELGLAETQQTLLLNDLRSRIRVQTDGKLQTGRDVVIGALLGAEEFGFATTPLIAMGCVMMRKCHLNTCSVGIATQDPVLRARFSGQPEHVINFFFFLAEQVRGFMAQMGFRTFDEMVGRVDMLDARDATDHWKARGLDLSTVLYTPTLPGRVARRCVKAQDHGLQDALDYLLIDRTRDAVERKVPIELAPLPIRNVHRTVGAMLSGDIARRYGSAGLDDETIRIHFQGSAGQSFGAFLAKGVTLTLEGDANDYTGKGLSGGRIIIHPPKISPLIPEENIIVGNVVLYGATSGEAFFSGVAGERFAVRNSGATAIVEGLGDHGCEYMTNGTVVVLGACGRNFAAGMSGGIAYVFDERDDFTQKRCNTASVDLDPLETEDEEFLRRLISRHMVLTGSSRARWILQHWADTLPRFVKVFPHEYKRVLRKVEAAPPLIVHQPTPVAAEVQHG

SEQ ID NO: 1092 - protein, 1443 aa, Oryza sativa
  misc_feature (15)..(15): Xaa can be any naturally occurring amino acid
  misc_feature (585)..(585): Xaa can be any naturally occurring amino acid
PGLQEFGTRLVRLFXVELVDIRRRAIVTLTKLIPTVQVGTHVSVLVHHLKLVLDGNNDDLRKDAAEALCCLAHALGEDFTIFVSSIHKLLVKHHMRYRKWDEIENRLLRREPLISENLSVQKYTQCPPEVISDPLDDFGGVPSEEADETQRQPRSHQVNDVRLRSAGEASQRSTREDWAEWMRHFSIALLKESPSPALRTCARLAQLQPSVGRELFAAGFASCWAQMNETSQEQLVRSLKTAFSSQNIPPEILATLLNLAEFMEHDEKPLPIDTRLLGALAEKCRAFAKALHYKEMEFEAVCSKKMGANPVTVVESLIHINNQLHQHEAAIGILTYSQQHLEVQLKESWYEKLHRWDEALKAYKAKSSQASGPLQNLDATLGRMRCLAALARWEDLSALCREQWTGSEPSARLEMAPMAANAAWHMGEWDHMAEYVSRLDDGDENKLRILGNTTASGDGSSNGAFFRAVLSVRCKKYEEARVYVERARRCLATELAALVLESYERAYNNMVRVQQLSELEEVIDYCTLPMESPIADSRRELIRNMWNERIKGTKRNVEVWQALLAVRELVLPPNTRRDTWIKFAXCWKSGRISQAKSTLVKLLQLDPESSPELTLYHGHPQVVLAYLKYQYAVGDELKRRDAFCRLQDLSVQLATTTNSYSGTLASQVATSNAGVPLIARVYLTLASWKRALSPGLDDDSIQEILVSYKNATLNAKDWGKAWHLWALFNTEVMSRYTLRGRPDIAGKYVVAAVTGYFYSIACASTTKGVDDSLQDILRLLTLWFNHGATSEVQMALQKGFSLVNIEMWLVVLPQIIARIHSNNKIVRELIQSLLVRIGKDHPQALMYPLLVACKSISILRQRAAQEVVDKIRQHSGGLVDQAQLVSKELIRVAILWHEMWHEALEEASRMYFGEHNIEGMLAVLEPLHAMLERGPETIKENTFIQAYGHELLEAHECCLKYRATGEDAELTKAWDLYYHVFRRIDKQLPSLTTLDLHSVSPELLECRKLELAVPGTYSADAPLVTIEYFVPQLIVITSKQRPRKLTIHGSDGNDYAFLLKGHEDLRQDERVMQLFGLVNTLLENSRKTSEKDLSIQRYAVIPLSPNSGLIGWVPNCDTLHALIREYRDARKIFLNQEHRCMLSFAPDYDHLPLIAKVEVFQHALENSEGNDLAKVLWLKSRTSEVWLERRTNYTRSLAVMSMVGYLLGLGDRHPSNLMLDRYSGKILHIDFGDCFEASMNREKFPEKVPFRLTRMLVKAMEVSGIEGTFRTTCENVMQVLRTNKDSVMAMMEAFVHDPLINWRLFNFNEVPQVTNYGNAHSHTVVNSEEAANRELMQPPRGARERELLQAVNQLGDANEVLNERAVAVMARMSHKLTGRDFSSGSSLSGAGSSTQHGNEHLASGDTREVEPGLSVKVQVQRLILQATSHENLCQNYVGWCPFW

SEQ ID NO: 1093 - protein, 1494 aa, marine gamma proteobacterium HTCC2080
MTPKDIAGVASVSTDLQGLYRPEEFRDNCGFGLIAHIQGQPSHRLLETAIESLTCMTHRGGIAADGKTGDGCGLLLQMPDSFMRAEAKAHFAKDLGQHYAVGMIFMGAEPTAQDASKAALESALAGNELAVIGWREVPLNPEVCGEIALDQLPHIEQVFIDAEKLDHAQVTARLFMARRQAEIAMVDDPDFYICSLSDQVVSYKGLVMPADLARFYPDLNDDRLETAICVFHQRFSTNTLPRWPLAQPFRMLAHNGEINTIEGNRSWSRARTSKLASPLLPELQSVIPLVNTAGSDSSSLDNMLELLTTGGVELPRALRMLIPPAWQNIEGMDPDLKAFYQYQAMHMEPWDGPAGIVLTDGRYACCLLDRNGLRPARWVTTTDGFITLASEVGTHGYSTADVIAKGRVGPGQMLVVDTHEGKVLHTDDIDNMLKSRHPYKRWLRDNARYIEGSFDGESAPGIPESELDTYQKMFQVSFEERDQVLRPLAESGNEAVGSMGDDTPLAVLSARDRSIYDYFRQKFAQVTNPPIDPLRESIVMSLEVDLGREGNIFDEIEGHAYRVSLTSPVLSQGKFNTLLNIEDEKLKIADIDATYDPENGDLRSAVEGLCLTAETAVRGGATLLILSDRQIGDSRIPIHSLLATGAVHHHLIRSGLRADANLIVESGSARDSHHFACLLGFGATAVYPYLAYSILEGQLRSGELLGDPTRCYKNYRKGINKGLLKIMSKMGISAVNSYRGAQLFEAVGLDKEVVDACFTGVASRIAGAGFGELERDLWQVAAKARSRRKTLDQGGLLKYVHGGEYHAFNPDVVMTLQQAVATGDYADYQRYAQYCTDRPVAALRDLLDLDLSGEPVAIDEVEPIEAILKRFDSAGMSLGALSPEAHESLAMGMNHVGARSNSGEGGEDPARFGTNRVSKIKQIASGRFGVTPHYLVNAEVLQIKVAQGAKPGEGGQLPGGKVNDLIARLRYSVPGVTLISPPPHHDIYSIEDLAQLIFDLKQVNPTALVSVKLVSEPGVGTIAAGVAKAYADLITISGYDGGTAASPLTSIRHAGSPWELGLAEVHQTLRGNRLRGKIRVQADGGMKTGLDVIKAAILGAESFGFGTAPMVAMGCKYLRICHLNNCATGVATQNAVLREEHFNGDAERVINFFNFVARETREWLAKLGVCRLEDLIGRTDLLKRLPGKTDKQARLDLGPIVWVDPDAADQPQFCEVTSNDPFDRAEMAERMVADMLSAIESKTGGEFHYSITNCDRSIGARISGEIARRYGNTDFDSTPLEIRLTGTAGQSFGVWNAGGVHMYLEGDCNDYVGKGMAAGKLVVYPPRDSIFASQDTSIIGNTCLYGATGGKLFAAGVAGERFGVRNSGAFAVIEGAGDHCCEYMTGGCITVLGPTGVNFGAGMTGGFAYVLDQDRSFIDRINSELVEVHRVSSEAMEAYRHYLRDNIREFVAETQSDWGQHILDNFEDYVGKFWLVTPKAADFEKLLSRLRDTD

SEQ ID NO: 1094 - protein, 249 aa, Glycine max
AQLFYDLNYANPAARISVKLVSEAGVGIIASGVVKGHADHVLISGHDGGTGASRWTGIKNAGLPWELGLAETHQTLVANDLRGRTVLQTDGQLKTGRDVAIATLLGAEEFGFSTAPLITLGCIMMRKCHKNTCPVGIATQDPVLREKFAGEPEHVINFFFMVAEEMREIMSQLGFRRVNEMVGRSDMLEVDKEVVKSNEKLENIDLSLLLRPAAELRPEASQYCVQKQDHGLDMALDNKLISLSSAAWK

SEQ ID NO: 1095 - protein, 840 aa, Volvox carteri f. nagariensis
AICPYLGYETSRQWRLSSRTQSLIKAGKVPDISVQASQKNFKKSLEKGVLKILSKMGISLLSCYHGAQIFEAYGLGKDVMDLCFRGTVSRIGGMSLADLQREAESLWAKGFPEKAMTKLEDYGFIQSRPKGEYHSNNQEMAKLLHKAIGLGNGSQANPEAYKAYQQHFVEAPVAVLRDCLEFKSDRGPISVDQVEPAAAIMERFCTGGMSLGAISRETHETIAIAMNRIGGKSNSGEGGEDPTRWLHLSDVDGDGKSASVPHLRGLRNGDTATSKIKQVASGRFGVTPEYIMNADQLEIKIAQGAKPGEGGQLPGQKVSPYIAQLRRSKPGVPLISPPPHHDIYSIEDLAQLIYDLHQVNPKAKVSVKLVAEAGIGVVASGVAKANADIIQVSGHDGGTGASPISSIKHAGGPMEMGLAETHQTLVRNELRERVVLRVDGGVRNGRDVLLGALLGADEFGFGTVAMIATGCIMARVCHTNNCPVGVASQREELRARFPGAPEDLVNYFHFVAEEVRAGLAEMGYKSLDEVIGRADLLKQRSVELAKTEGLDLSFLTTYAGPSGSSSVRRSQEVHDNGPQLDDRILADAEVMDAIVNEKVVHKSFDIINTDRSALGRVAGMIAKHHGDNGFAGTVRLTLTGSGGQSFGCFCIKGLEVKLLGEANDYVGKGMNGGEIAIVPPPNSPFKSEEASLVGNTCLYGATGGRLFVNGRAGERFAVRNSLAEAVVEGAGDHCCEYMTGGCVVVLGSVGRNVAAGMTGGLGYFLDEDGSFCDKVNTEIVAVQRVVTAAGEAQLKGLIQAHHERTGSAKAKAILGNWEVLVGKFWQLVPPAEKNTPEVNP

SEQ ID NO: 1096 - protein, 1166 aa, Oryza sativa Japonica Group
LRPARYWRTSDDFVYVASEVGVIPMDESKVVMKGRLGPGMMITVDLQTGQVLENTEVKKSVASANPYGSWLQQSTRSIKPVNFQSSVAMDNETVLRHQQAFGYSSEDVQMVIETMASQGKEPTFCMGDDIPLAVLSQKPHMLFDYFKQRFAQVTNPAIDPLREGLVMSLEVNIGKRRNILEVGPENADQVTLSSPVLNEGELESLLNDSKLKPKVLSTYFDIRKGLDGSLDKAIKVLCDEADAAVRNGSQLLVLSDRSEALEPTRPAIPILLAVGAIHQHLIQNGLRMSASIVADTAQCFSTHQFACLIGYGASAICPYLALETCRQWRLSNKTVNLMRNGKMPTVTIEQAQRNFIKAVKSGLLKILSKMGISLLSSYCGAQIFEIYGLGQEVVDLAFCGSVSKIGGLTLDELGRETLSFWVKAFSEDTAKRLENFGFIQSRPGGEYHANNPEMSKLLHKAVREKSDNAYTVYQQHLASRPVNVLRDLLELKSDRAPIPIGKVEPATSIVERFCTGGMSLGAISRETHEAIAIAMNRIGGKSNSGEGGEDPIRWSPLADVEDGYSPTLPHLKGLQNGDTATSAIKQVASGRFGVTPTFLVNAEQIEIKIAQGAKPGEGGQLPGKKVSAYIARLRNSKPGVPLISPPPHHDIYSIEDLAQLIYDLHQINPKAKVSVKLVAEAGIGTVASGVSKGNADIIQISGHDGGTGASPISSIKHAGGPWELGLSETHQTLIQNGLRERVVLRVDGGFRSGLDVLMAAAMGADEYGFGSVAMIATGCVMARICHTNNCPVGVASQREELRARFPGVPGDLVNYFLFVAEEVRATLAQLGFEKLDDIIGRTDILKAKHVSLAKTQHIDLKYLLSSAGLPKWSSSQIRSQDVHSNGPVLDETILADPDISDAIENEKEVSKTFQIYNVDRAVCGRVAGVIAKKYGDTGFAGQLNITFTGSAGQSFGCFLTPGMNIRLVGEANDYVGKGMAGGELVVVPVEKTGFVPEDAAIVGNTCLYGATGGQVFVRGKTGERFAVRNSLGQAVVEGTGDHCCEYMTGGCVVVLGKVGRNVAAGMTGGLAYILDEDDTLVPKVNKEIVKMQRVNAPAGQMQLKGLIEAYVEKTGSEKGATILREWEAYLPLFWQLVPPSEEDSPEACAEFERVLAKQATTVQSAK

SEQ ID NO: 1097 - protein, 159 aa, Petunia x hybrida
KQYHGILRRRKSRAKEMEKKALKPRKPYLHLSRHLHAMRRPRGCGGRFLNTKSMKGSMKGGKTNDTGECQYFYPTGSQNSEVLQSDSSNLSSPKETTGSRFCDSSEVTNMYSRGNLDPFPFQNLRPSVQAIPDMMNTGHGILMAGKWVSAADSCCNLKV

SEQ ID NO: 1098 - protein, 92 aa, Bixa orellana
EQDRYMPIANVIRIMRKVLPTHAKISDEAKETIQECVSEFISFITSEANERCQREQRKTITAEDVLFAMSRLGFDDYVDPLSIYLQRYREFE

SEQ ID NO: 1099 - protein, 135 aa, Petunia x hybrida
KQYRRILQRRQSRAKAELERKQIKARKPYLHESRHQHAMRRARASGGRFARKTDGDASKGTGSGSAFSSQSVSSSGSEPLQFNAADVHKRQENGRLAELQHSYSNGSSYGNQSSFQESKDESQSAESREGGSLRK

SEQ ID NO: 1100 - protein, 1496 aa, Campylobacter coli RM2228
MDLENILENNQSVGLYHPKNEHDACGIAAVANIRGIASYKVICDALEILMNLEHRGGAGAEENSGDGAGILIQIPHDFFMTQELGFELPQKGDYAVAQMFLSPNADAKEEAKAIFLQGLKDKNLEFLGFREVPFNPSDIGASALKAMPYFLQAFVKKPSTVNAGLEFERVLYSTRRLIEKRAINVPKFYFSSFSSRTIVYKGMLLSTQLSDFYLDFKDVNMKSAIALVHSRFSTNTFPSWERAHPNRYMVHNGEINTIRGNVDSIRAREGLMQSEYFENLDEIFPIIAKPSSDSAMFDNTLEFLALNGRTLEEAFMMMVPEPWHKNENMESKKRAFYEYHSLLMEPWDGPAAIVFTDGVIMGASLDRNGFRPSRYYLTKDDMLILSSETGALKLDENNIKAKKRLEPGKLLLVDTARGRVIADNEIKEHYANAKPYKQWLKNLVELEKQHSGVYKHKFLKEDEVLKLQKAFGWSYDELKMSVASMAQNGKEALAAMGVDTPLAILSKTYQPLYNYFKQLFAQVTNPPLDAIREEIVTSTRIYLGSEGNLLKPDENNAKRVKISLPIISNEELFEVKALNNFQVKEFSILYDYSKKTLEKALDELCVKIEDEVKKGVSIIILSDQGVDEKNAYIPALLAVSGVHNHLVRKNLRTHTSLIIESGEPREIHHFACLLGYGATVINPYLVYESIQKLIANKDLNLSYEKAVENFIKASSSGIVKIASKMGVSTLQSYNGSALFECLGLSSKVIDKYFTSTTSRIEGMDLEDFEKELIALHKHAFNDTHKALDSKGIHGFRSAKEEHLIDPLVIFNLQQACRNKDYKSFKKYSALVDEKQVNLRSLMEFDFSEAISIDKVESVESIVKRFRTGAMSYGSISKEAHECLAQAMNKIGAKSNSGEGGEDEERYEIKDGVNKNSAIKQVASGRFGVDLNYLSHAKEIQIKVAQGAKPGEGGQLMGFKVYPWIAKARHSTAGVTLISPPPHHDIYSIEDLAQLIYDLKNANKDAKISVKLVSENGIGTVAAGVAKAGANLILVSGYDGGTGASPRTSIPHAGIPWELGLAETHQTLILNKLRDRVRLETDGKLMNGRDLAIAALLGAEEFGFATAPLIVMGCTMMRVCHLNTCPFGIATQDKELRDRFKGKVDDVVNFMYFIAEELREYMARLGFERLDDMIGRVDKLRQKPMQGKAGKVNLDKILKSLPTYNRTAVHFKDYKDNKLEKTIDYRILLPLCKNAVEKKEPIKLSLEVGNQSRTFATMLSSEILKTYGKDALSEDSIQIKAIGNAGNSFGAFLLKGIKLEIIGDSNDYLGKGLSGGKIIAKISNEATFSPEENIIAGNACLYGATEGEVYLDGIAGERFCVRNSGAKAVVLGTGVHGCEYMTGGLVVVLGDVGANFAAGMSGGVVYIFGRHNEAHVNTELVDIKDLSTKDEKELKTMIENHIAYTNSKKAKDILEKFDKKDFFKVMPRDYEKMLEMIELCKDEEDPSLAAFLKITQK

SEQ ID NO: 1101 - protein, 528 aa, Marinobacter sp. ELB17
MVFRHIFILSGLALSAVLLLISIAWPEVNWAWLLIGPLIVLGIRDLTQNKHTLLKIYPIVGHFRYLFESVRRELQQYFVESDLDGAPVNREFRSLIYQRAKKANDTRAFGTIFDVYRDGYEWVNHSLAPKECLPVDLWVTFGGPECIRPYEASPFNISAMSYGALSRNAVMALNRGAKLGNFAHNTGEGGISEWHLEYGGDLIWQIGTGYFGCRTPDGVFDPDLFTEQATQDVVKMIEIKLSQGAKPGHGGVLPAAKLTEEIARIRMVPMGQDVLSPPGHSAFSSPVELLQFVAQLRKLSGGKPVGFKLCPGNRREFLGICKAMLKTGLRPDFITVDGGEGGTGAAPVELTNSVGMPLRDGLHFVHNALRGIGVRDKIRIIASGKAFSAFHILRMMILGADTVNSARGMMLALGCIQSRSCNTDKCPTGITTQNPARYKQLDVTDKGVRVANYHQSSMETLAELLSILGKDKLEDLEPEDINRRVNQGSVMNYAQLYPCIDEGCLLHTDCAPDSWASDWHQATADSWR

SEQ ID NO: 1102 - protein, 132 aa, Petunia x hybrida
KQYNGILRRRQIRAKLEAQNKLVKNRKPYLHESRHLHAVNRVRGTGGRFLSTKKGHHSDPITPTNSTSSRDSVEREGSTSAFSSVRQDVHNGISFQQPDHRAFNVSSHMDVTMQDRGGFTCNGTQQRAPVVR

SEQ ID NO: 1103 - protein, 1510 aa, Geobacter metallireducens GS-15
MTNKTIDPSGLVPPERDACAIICYINKEARPTHGNVQRTIEALIKMGHRAGEINGEGDGCGVLTDIPRMIWREVLAGAGHDPNLAEMPGFAVGHLLLPKEATAADPQLQDKILARFATAGVQLLVERPGIVRSEVLSSRAREGEPLFWQVALLCPEKVAAPALLFELQTAIERDFPVHVASLSADVAAWKVHGSPEILSRYYPELKRREFLSSVTIGHSRYSTNTLPTVLRAQPFSLLGHNGEINTIARLREEARMMGIPLFADGSDSQDLNRTLEGLMFRYGLTLFEAMEVVFPPIFSAMDGMAPELKSMYTWFRRFLKASAQGPAAIIARHRELCVFSVDAMGLRPLWVGETTKEIFASSELGVVPHEEILADPKPLAPGEKVGVRIAAGRTVELVDHPALRQEIYQSFRKRTNLPAQEKALAAGAELQGGAPALAARFGRNSKLHQDNLMSAFAWKSSDLSNLREMAKNGSDPIASLGYDGPLASLSNQRQNLSDYFKEQVAVVTNPAIDREREAEHFSTRVYLGPRPQFRGPARPGVALEVPLLTGGRRTGTDPDDVAVAREFGTATLEGLVAAFGEGKGRCRVIPCFMGKDERLGDALARLTCEAVGAVTRGATMLLLDDSDCFGPGKSFIDPFLVTAVLHKGLKETTDSAGESQRRRASLVVRSGALRSLHDLIFALGMGADALCPYLMWEGAGDTAGVRNLLSVLAKGLEKVISTMGTHEIGGYGKYFASIGLCGHLAGIFETPNFCGSGQGGLTLERLEAENRSRSAVARSRQKQPVPVQFRLYPKIWKMVGAVAKMEETYADLSRLIQQLEAENPLAIRHLLDLRYTSELTVDPDEVDTSVGDHTLPILFSAMSFGSQGETPFRIYAEAAKRLNIVCMNGEGGEIADMLGQYRKNRGQQIASGRFGVNMAFLNSADFLEIKVGQGAKPGEGGHLPGFKVTAKIAAARHATPGVSLISPSNNHDIYSIEDLAQIVEELRTANPTARISVKVPAVAGIGTIALGVAKAGADIITISGYDGGTGAARKHAIKFVGLPAEIGVSEAHKALVSAGMRQKVEIWADGGARTGRDVVKLMLLGANRVGFGTMAMVVIGCTACRGCHLGTCHVGIATQIETTEEAEARGLKRFVPRVLENGVIYMCTFFRGMSREIRILTAKLGFRRTRDMVGRSDLLGQARGLDRLDLAELLRPAQSAEASSFEPEVRIIRKPLNYLTSLISGLVTDAFAAGEERVRYDDDNATSSDRAIGTHLAGAYVRGMAEGRFRPEQNALLQFHRDAIPGNGLAAFSINRINILVEGGAQDGVGKCASGGKIVILKGENREGRRVGGTVGKGLAYGAQGGTFLIQGDADSRACIRLSGADVVFGSRIREPLDDSRGDTACRANLKGFAFEYMTAGRVVVLGDPGPWICSGMTGGVVYCRLDGAMGLDREALRRRLARGAGVEIRDIGEEDVAAIGELLLKYHRELLHSHQEEEADAVERIIAAARSGFVKIVPEKNIVTPRSTE

SEQ ID NO: 1104 - protein, 194 aa, Yarrowia lipolytica CLIB122
MADSDSKPSSGNELELREQDKWLPIANVARIMKSALPENAKVSKEAKECMQECVSEFISFITSEASEKCAAEKRKTVNGEDILFAMLSLGFENYAEALKIYLTKYRQNQNYKQENRSENRKKKTLPAQEGAVAAAATGSNPVTETNSPSQQQQEEYYAAYDVPINGQDPTEQRFSEEPTQDEKAMYDAYTGDYY

SEQ ID NO: 1105 - protein, 1573 aa, Rhizobium leguminosarum bv. viciae 3841
MTKTPSMEVDRFAAAELRATANISKSASGLPKKQGLYDPRNEHDACGVGFVAHMKGQKSHQIVKDGLFILENLTHRGAVGADPLMGDGAGILVQIPDRFFREEMAEQGITLPPVGEYGVGHIFMPRDEKQIEHFKKVIKDVITEEGQVFIGFRDVPVDNSSLSKAPAIAATEPHHVQVFIGAGEDAENNDEFERRLFTLRKVISNRIYDEFDGEESNFYPVSLSSATVVYKGMFLAYQVGVYYKDLSDPRFESAVALVHQRFSTNTFPSWKLAHPYRMVAHNGEINTLRGNVNWMAARQASVSSPLFGEDISKLWPISYEGQSDTACFDNALEFLVRGGYSLAHAVMMLIPEAWAGNQSMAAERKAFYEYHAALMEPWDGPAAVAFTDGKQIGATLDRNGLRPARYLVTDDDRVIMASEAGVLPVPEEKIIQKWRLQPGKMLLIDMEEGRIISDDEVKSQLATAHPYRSWLNRTQLILEDLKPVEPRALRRDVSLLDRQQAFGYTLEDTRILMSPMATTGQEAIGSMGTDTPISAMSEKPKLLYTYFKQNFAQVTNPPIDPIREELVMSLVSFIGPRPNILDHEGAANAKRLEVRQPILTNGDLEKIRSIGHTEDRFDTKTLDFTYDIERGAEGMPEMLDRLCERAEAAVKGGYNIIVLSDRQIGPDRIAIPALLATAAVHHHLIRKGLRTSVGLVVETGEPREVHHFCLLAGYGAEAINPYLAFDTLLDMHAKGEFPKEVDASEIVYRYIKAVGKGILKVMSKMGISTYQSYCGAQIFDAIGLQSELIDKYFFGTATMIEGVGLEAIAAETVARHNAAFGTDPLLATTLDIGGEYAYRMRGESHAWTPDAVAALQHAVRGNAEDRYREFADMVNNSALRMNTIRGLFKMKSAEALGRKPVSIDEVEPAADIVKRFSTGAMSFGSISREAHTTLAIAMNRIGGKSNTGEGGEESDRYIPLANGSMNPERSAIKQIASGRFGVTTEYLVNADVLQIKVAQGAKPGEGGQLPGHKVDATVAKTRHSTPGVGLISPPPHHDIYSIEDLAQLIYDLKNVNPTADVSVKLVSEVGVGTVAAGVAKARADHITVAGFDGGTGASPLTSLKHAGSPWEIGLAETQQTLVLNGLRSRVALQVDGGLKTGRDVIIGALLGADEFGFATAPLIAAGCIMMRKCHLNTCPVGVATQDPVLRKRFKGAPEHVINYFFFVANEVREILASLGFTRLDQIIGASELLEKDEMLSHWKAKGLDFSRIFHKVDAPKEETFWTSRQKHPIDDILDRVLIEQAQPALTAKTPVAFEVGIKNVDRSAGAMLSGEVAKRFRHRGLKEDTINVTLRGTAGQSFGAFLARGVTFNLIGDGNDYVGKGLSGGKIIIRPPENSRIVAEDSIIVGNTVLYGATEGECYFRGVAGERFAVRNSGAIAIVEGVGDHGCEYMTGGVVVVLGATGRNFAAGMSGGVAYVLDETGDFASRCNMAMVELEPVPEEDDMLEKLHHHGGDLMHKGRVDVSGDMTRHDEERLYQLISNHLHYTGSARATEILDNWADYRPKFRKVMPVEYRRALEEMERSRMGIAAE

SEQ ID NO: 1106 - protein, 538 aa, Sulfitobacter sp. EE-36
MKALKSLGRFGLFATVVVLFGAFAMLTALWSWWMAFPLVIFGILALMGVYDLIQTKHSILRNYPVLGHMRFFFEGIRPEIRQYLIESDQDEEPFSRDDRSLVYQRAKGVEDARPFGTRMRVYDAGYSWVTHSVQPVHITDTDFRVTIGNKDCKQPYDASIYNISAMSFGSLSANAISALNKGAKMGQFAHDTGEGGISRYHREGGGDLIYEIGSGYFGCRTEDGQFDPDKFKEQAASDQIKMIELKLSQGAKPGHGGMLPASKISAEIAAARGIPMGHDCISPAAHSAFTSPVQMMEFLGKLRDLSGGKPVGFKLCIGHQREFMCMVKAMLDTGIVPDFIVVDGTEGGTGAAPLEFANHVGMPMVEGLTFVHNTLRGAGIRDQVKLGAAGKVVSAFDIARALALGADWCNSARGFMFAVGCIQAQACHTNHCPVGVATQDPTRQRALDVDDKSQRVARFHRNTLMALGEMTGAAGLEHPSDFLPRHMMMRQSDNSMVQGDQVYGYLPEGYLLDDQSPDYNGNKTRWARAQADSFVPFD

SEQ ID NO: 1107 - protein, 285 aa, Triticum aestivum
  misc_feature (27)..(27): Xaa can be any naturally occurring amino acid
  misc_feature (79)..(79): Xaa can be any naturally occurring amino acid
  misc_feature (171)..(171): Xaa can be any naturally occurring amino acid
RLHNISCSMEETPTDFWPSFSASEDYXSTVAISSLMRILRDPSLASYHQMVVGSLIFVFKSMGLGCVPYLPKVLPELFXAVRMCEDGGLKEFITWKLGTLISIVRQHIRKYLQDILCLVSELWTSSFSLPAPKRTIQGPQGSPVLHLVEQLCLALNDEFRVYLLHILPSCXQVLGDAERCNDYCYVPDILHILEVFGGNLDEHMHLVAPVLVRLFKVELVDIRRRAIITLTKLIPKVQVGTHVSALVHHLKLVLDGNNDDLRKEAAEALCSLAHALGEEFTIFIP

SEQ ID NO: 1108 - protein, 1448 aa, Klebsiella pneumoniae subsp. pneumoniae MGH 78578
MQHRGAILADGKTGDGCGLLLQKPDRFFRIVAEERGWRLAKNYAVGMLFLNKDPELAKAARRIVEEELQLETLSIVGWRDVPTNEGVLGEIALSSLPRIEQIFVNAPAGWRPRDMERRLFIARRRIEKRLQEDKDFYVCSLSNLVNIYKGLCMPADLPRFYLDLADLRLESAICLFHQRFSTNTVPRWPLAQPFRYLAHNGEINTITGNRQWARARTYKFQTPLIPDLHDAAPFVNETGSDSSSMDNMLELLLAGGMDIVRAMRLLVPPAWQNNPDMDPELRSFFDFNSMHMEPWDGPAGIVMSDGRYAACNLDRNGLRPARYVITKDKLITCASEVGIWDYQPDEVVEKGRVGPGELMVIDTRAGRILHSAETDDDLKSRHPYKEWMEKNVRRLVPFEDLPDEEVGSRQLDDDTLASYQKQFNYSAEELDSVLRVLGENGQEAVGSMGDDTPFAVLSSQPRIIYDYFRQQFAQVTNPPIDPLREAHVMSLATSIGREMNVFCEAEGQAHRLSFKSPILLYSDFKQLTTMEEEHYRADVLDITFNPAEASLSETVKALCDKAEQMVRDGTVLLVLSDRNIAKDRLPVPAPMAVGAIQTRLVDKSLRCDANIIVETASARDPHHFAVLLGFGATAIYPYLAYETLAKLVDSKAIDKPYRAVMLNYRNGINKGLYKIMSKMGISTIASYRCSKLFEAVGLHRDVSDLCFQGVVSRIGGASFDDFQQDLLNLSKRAWLARKPLAQGGLLKYVHGGEYHAYNPDVVRTLQQAVQSGEYSDYQQYAKLVNERPAATLRDLLALNPGEDAISIDEVEPAKELFKRFDTAAMSIGALSPEAHESLAEAMNSIGGFSNSGEGGEDPARYGTNKVSRIKQVASGRFGVTPAYLVNADVIQIKVAQGAKPGEGGQLPGDKVTPYIAKLRYSVPGVTLISPPPHHDIYSIEDLAQLIFDLKQVNPKAMISVKLVSEPGVGTIATGVAKAYADLITIAGYDGGTGASPLSSVKYAGCPWELGLVETQQALVANGLRHKIRLQVDGGLKTGLDIIKAAILGAESFGFGTGPMVALGCKYLRICHLNNCATGVATQDDKLRKNHYHGLPFKVTNYFEFIARETRELMAQLGVKRLVDLIGRTDLLKELDGFTAKQQKLDLGKLLETAEPHPGKALYCTENNPPFDNGVLNAQLLQQAKPYVDEKQSKTFWFDIRNTDRSVGASLSGYIAQTHGDQGLAGDPIVAHFSGTAGQSFGVWNAGGVELHLTGDANDYVGKGMAGGLLAIRPPVGSAFRSHEASIIGNTCLYGATGGRLYAAGRAGERFAVRNSGAITVVEGIGDNGCEYMTGGIVCVLGKTGVNFGAGMTGGFAYVLDEDGDFRKRVNPELVEVLDVDSLAIHEEHLRGLITEHVQLTGSQRGEEILANWPAFSAKFALVKPKSSDVKALLGHRSRSAAELRVQAQ

SEQ ID NO: 1109 - protein, 1520 aa, Thermobifida fusca YX
MAAGHNRRPTGQSRPRATAEGLYDSSYEHDSCGVGFVADLTGRRSHAIVDQALTVLRNLDHRGASGADPDDGDGVGILTHIPHELYRDVCGFPLPDAGAYAAGIAFLPTDEAARAAAVATINRIAAEEHLTVLGWRDLPVDPRHCGPVARETMPFFAQVFLAGRPGTPTEGLTGIDLERYAYCVRKRAEHEAGVYFASLSPRTITYKGMLTTPQLKPFFPDLADPRYTSGLALVHSRFSTNTFPSWPLAHPFRYIAHNGEINTVKGNRNWMRAREATLASDLIPGDLSRLFPIVDPDESDTASFDAALELLHLGGRSLPHAVLMMIPEPWENHTEMDPAVRAFYEFHAMLMEPWDGPASVTFTDGTVIGAVLDRNGLRPGRYWVTDDGLVVMASEVGVLDIDPARIVRKGRLQPGRIFVVDTARGRILDDAEVKAELAAEHPYAEWLADNVVRLADLPAVPAEPVDDLVHHQRVFGYTEEELRLLLTPMARTGAEAVGSMGTDTPVAVLSHRPRQLFDYFTQNFAQVTNPPLDAIREELVTSLRTVLGSEENVLSPDPEDCRRIVLDTPVLQEAELAALLRAGSVDGDPAFRAHIVRGVYPASGGGKALTARLDEICAEVSQAIADGAHLIVLSDRGADADHAPIPSLLLTGTVHHHLVREKTRTEVGLIVESGDARECHHIALLLGYGASAVVPYLALATVRDLARSGVIPGIDPDTAARNTVKAFGKGLLKIMSKMGVSTVSSYTGAQIFEALGLGQEVIDRAFAGTTSRLGGIGFDVLAEEVRRRHAAAYAPNPAAHRRLPVGGEYQWRREGEPHLFNPETVAKLQHATRTGSYDLFKEYTAKVDQQAETLMTLRGLFTLREGVRSPVPLDEVEPVESIVARFSTGAMSYGSISAEAHETLAIAMNRLGGKSNTGEGGEDPRRFTPDPNGDLRRSAIKQVASGRFGVTALYLTNADDIQIKMAQGAKPGEGGQLPGHKVYPWVAETRHSTPGVGLISPPPHHDIYSIEDLAQLIHDLKNANPAARIHVKLVSEAGVGTIAAGVAKAHADVVLISGHDGGTGASPLTSIKHAGTPWELGLAETQQTLLRNGLRDRIVVQVDGQLKTGRDVIIAALLGAEEFGFATAPLVVSGCVMMRVCHLDTCPVGVATQNPELRKRFSGKPEYLVNFFTFIAQEVREYLAALGFRSLDEAIGAVELLDVRDAVDHWKASGLDLSPILHRVEPQPHDHRRQVRAQDHGLDRALDRTLIQLSAGALEYGAPLTLDLPIRNVNRTVGTMLGHEVTKRYGAKGLPDNTIDITFTGSAGQSFGAFLPRGITLRLVGDANDYVGKGLSGGRIIVRPADTAPFAAEENIIAGNVIAYGATSGELFLRGIVGERFCVRNSGALAVVEGVGDHGCEYMTGGRAVILGPTGRNFAAGMSGGIAYVLDLDERRVNTEMVDIDPLDDADRAFLKEVLTRHHAETGSPVAQRLLADFATAVTRFAKIMPRDYKRVLAAVAEAERDGRDAAEAIMAAAQS

SEQ ID NO: 1110 - protein, 493 aa, Alteromonadales bacterium TW-7
MNNFIMFSIDVFASLFIVFLGLLVLIVAVFYIRDVTQTKHAIRRNYPVIGRFRYFFERQGEFFRQYFFALDREEMPFNRAERSWVYRAAKNVDRTAAFGSTQSLEVTGTVMFMNCAFPTLDEEALAPSEVTLGPYCQTPYSTNSLFNVSGMSFGALSKPAVRALSKGAKLAGCWMNTGEGGLSPYHLEGGADLVFQIGTAKYGVRDENGQLSIEKLKQIAAHEQVKMFELKMSQGAKPGKGGMLPGRKVNAEIAKIRGIPEGEDSISPNGHPEIKNPSDILDMIATVRNTTGKPTGFKAVIGAYGWLETLFAEINHRGIESAPDFITIDSADGGTGAAPQPLMDSVGLPLRESLPLVVNMLEKHGLRDRVKIIVSGKLIVPSKVAWALALGADFVVSARGHMFALGCIQAMQCNKDSCPTGITTHNERLQRGLNVADKAQRVANYNKYIHYGAGLIAHSCGVTSARELKREHVRIVQESGLSEPLDKIYENYK

SEQ ID NO: 1111 - protein, 220 aa, Picea abies
CHTHKLANIRSNTKRLAMGGKHSKGLRWKRPSYSSSSYGPSPAWNSSSYYPSSAVISETYTQPVAKNKLQRRYSRIADNYNSLDEVTAALAQAGLESSNLIVGIDFTKSNEWTGAKSFNHRSLHRIGDTPNPYEQAISIIGRTLSAFDEDNLIPCFGFGDVSTHDQNAFSFYPDNRLCNGFEEALRHYREMVPHLRLAGPTSFAPIIEAGIRIVEQSGGQ

SEQ ID NO: 1112 - protein, 1522 aa, Escherichia coli CFT073
MRGARMTRKPRRHALTVPVRSGSEVGFPQSLGEVHDMLYDKSLERDNCGFGLIAHIEGEPSHKVVRTAIHALARMQHRGAILADGKTGDGCGLLLQKPDRFFRIVAQERGWRLAKNYAVGMLFLNKDPELAAAARRIVEEELQRETLSIVGWRDVPTNEGVLGEIALSSLPRIEQIFVNAPAGWRPRDMERRLFIARRRIEKRLEADKDFYVCSLSNLVNIYKGLCMPADLPRFYLDLADLRLESAICLFHQRFSTNTVPRWPLAQPFRYLAHNGEINTITGNRQWARARTYKFQTPLIPDLHDAAPFVNETGSDSSSMDNMLELLLAGGMDIIRAMRLLVPPAWQNNPDMDPELRAFFDFNSMHMEPWDGPAGIVMSDGRFAACNLDRNGLRPARYVITKDKLITCASEVGIWDYQPDEVVEKGRVGPGELMVIDTRSGRILHSAETDDDLKSRHPYKEWMEKNVRRLVPFEDLPDEEVGSRELDDDTLASYQKQFNYSAEELDSVIRVLGENGQEAVGSMGDDTPFAVLSSQPRIIYDYFRQQFAQVTNPPIDPLREAHVMSLATSIGREMNVFCEAEGQAHRLSFKSPILLYSDFKQLTTMKEDHYRADTLDITFDVTKTTLEATVKELCDKAEKMVRSGTVLLVLSDRNIAKDRLPVPAPMAVGAIQTRLVEQSLRCDANIIVETASARDPHHFAVLLGFGATAIYPYLAYETLGRLVDTHAIAKDYRTVMLNYRNGINKGLYKIMSKMGISTIASYRCSKLFEAVGLHDDVVGLCFQGAVSRIGGASFEDFQQDLLNLSKRAWLARKPISQGGLLKYVHGGEYHAYNPDVVRTLQQAVQSGEYSDYQEYAKLVNERPATTLRDLLAITPGENAVNIADVEPASELFKRFDTAAMSIGALSPEAHEALAEAMNSIGGNSNSGEGGEDPARYGTNKVSRIKQVASGRFGVTPAYLVNADVIQIKVAQGAKPGEGGQLPGDKVTPYIAKLRYSVPGVTLISPPPHHDIYSIEDLAQLIFDLKQVNPKAMISVKLVSEPGVGTIATGVAKAYADLITIAGYDGGTGASPLSSVKYAGCPWELGLVETQQALVANGLRHKIRLQVDGGLKTGVDIIKAAILGAESFGFGTGPMVALGCKYLRICHLNNCATGVATQDDKLRKNHYHGLPFKVTNYFEFIARETRELMAQLGVTRLVDLIGRTDLLKELDGFTAKQQKLALSKLLETAEPHAGKALYCTENNPPFDNGLLNAQLLQQAKPFVDERQSKTFWFDIRNTDRSVGASLSGYIAQTHGDQGLAADPIKAYFNGTAGQSFGVWNAGGVELYLTGDANDYVGKGMAGGLIAIRPPVGSAFRSHEASIIGNTCLYGATGGRLYAAGRAGERFGVRNSGAITVVEGIGDNGCEYMTGGIVCILGKTGVNFGAGMTGGFAYVLDESGDFRKRVNPELVEVLSVDDLAIHEEHLRGLITEHVQHTGSQRGEEILANWSTFATKFALVKPKSSDVKALLGHRSRSAAELRVQAQ

SEQ ID NO: 1113 - protein, 340 aa, Arabidopsis thaliana; identical to SEQ ID NO: 952

SEQ ID NO: 1114 - protein, 441 aa, Pseudomonas putida GB-1
MSEQFPPVLRESATFDRLTIQEIQRAAETGIYDIRGGGTKRRVPHFDDLLLLGASVSRYPLEGYREKCGTDVVLGNRFAKKPIHLKIPVTIAGMSFGALSANAKEALGRGATIAGTSTTTGDGGMTPEERGQSQHLVYQYLPSRYGMNPDDLRKADAIEIVLGQGAKPGGGGMLLGMKVTERVAGMRTLPVGVDQRSACRHPDWTGPDDLAIKIAEIREITDWEKPIYVKIGASRPYYDVKLAVKAGADVIVLDGMQGGTAATQEVFIEHVGIPILPAIPQAVQALQEMGMHRKVQLIVSGGIRNGADVAKAMALGADAVAIGTAALIALGDNHPRLDSELKKIGSAAGFYDDWQNGRDPAGITTQDPELAKRLNPEEAGRRLANYLRVLVLEAQTMARACGKSHLHNLDPEDLVALTVEAAAMARVPLAGTAWVPGQAQY

SEQ ID NO: 1115 - protein, 2738 aa, Debaryomyces hansenii
MASYLPQEEFETNVYKYDETPENKSWASTLPTAKGLYNPEYEKDACGVGFTCHIKGEASHKIVSDCRNLLCNMTHRGGELNPKDGDGAGLLSSLPHKFFLREFKYYCNIDLPKLGQYGTGNIFFKKDDIVFEKSRKTFESIANTLGLKVLGWRKVPHDSSILGPASLSREPLILQPAIVLSELFDGQHKEISEEEFEKNYQMDFEKKLFILRKQSTHTIGLHNWFYICSLSSKTIVYKGQLAPNQVYAYYHDLANAEYEAHFALVHSRFSTNTFPSWDRAQPLRWAAHNGEINTLRGNKNWMRAKEGVMESELFGDELDKLYPIIEEGGSDSAAFDNVLELLVINGVLSLPEAVMMLIPEAWQNDIHIDSKKKAFYEWAACLMEPWDGPALFTFADGRYCGANLDRNGLRPCRYYVTDDDRMICASEVGVIEIEPEKILQKGRLQPGRMLLVDTKEGRIVDDRELKNKVASRFDFKSWVLANMISMDDLFSKLESRNVNLIENPESQDITVQTDPRLVAFGYSHEQISMVLAPMAEAKEALGSMGNDNALACISEQPKLLYDYFRQLFAQVTNPPIDPIREEIVMSLECYVGPQGNLLEMKPDQCNRLLLKSPVLSSLELNAIKNIEKVYPKWSVTNIDITFDKAEGIQGYINKIDNICQASSKAIADDHQIIILSDKLTSFNRIPISALIATGAVHHHLVRQKQRSKVAIIIETAEAREVHHACCLVGYGADGINPYLALETLVRMNIENLLKASLTDDQIIKNYKIAVDSGILKVMSKMGISTLASYKGAQIFEALGVDNSVIDRCFAGTASRIKGITFEYIAQDAFSLHDVGYPSRETIKPVALPETGEYHWRDGGDSHINEPAAIASMQDAVKNKNEIAYEAYSKKEYEAIKKCTLRGLLDFDYENSQSIPIDQVEPWTEIVRRFFTGAMSYGSISMEAHSTLAVAMNRLGGKSNTGEGGEDSARSLVHSNGDTMRSSIKQIASGRFGVTSYYLSDADELQIKMAQGAKPGEGGELPGHKVSEQIGKTRHSTPGVGLISPPPHHDIYSIEDLKQLLYDLKCSNPRARTSVKLVSEVGVGIVAAGVAKAGSENILISGGDGGTGAAKLTSIKYAGLPWELGLAESHQTLVLNDIRGRVILQTDGQLRTGRDIAVAALLGAEEWGFATTPLIALGCIMMRRCLASDTLVRTSEGDKPVAEVAIGDYLLDAEDKPVLCMGANPSQTGRMKEIAYQDFDSKKRVSFKCTPDHHLELTLTDSTPSLSGKSVTWFSRCTGAHLSEEVSEVYLDNMVSIFYNDLVDSTDSAVDKDSIHEAVDLALEDHYHRGNSDQYSIHLNEYISRIADKELQNEPEFIRECIHDAANRFVITSSGNRNIKSESFDDKLSLSRSRSSTADSDSDYVITDASVHSHSNNSSVYLASPDSMIPDGAANRFENIASKLKEPVCNCGGIRKIFRSFGTTEDAELAYSLLLSEHYYRLDPRFVTDGYTFQASVEQYENMCSQEVQNMHLKLYRSPLKFVEREHNSAELPVDPYFLGLWLGDGDSSGTTIMTTDREIVVWLNSYVERLNQNKPEGCFPLKLTEQLIYGAGHTSKSGHTTKVDVRNYKISSGDAFVRSGTYWNPIFDGLKKLGLLNNKSAGIPQEYMNSDEQNRLSVIAGLMDSDGCYVKSHNTYRFTQLTEDHKKIVYDLKELALSCGINTTGVESSVKPLGFNKHKHSTEYVVYLGNGSQKFQELLLLPRKKMEISKKHVSLDARPFTVSDVEDGEFRAIEVSGGVFQLANRLVVANCHLNTCPVGIATQDPELRKKFTGTPEHVINFFYYLANELRGIMANLGFRTVNEMIGRTEKLKVREDLRNTKNANMDLSPILTPAHTIRPGVATHCVKKQDHRLHVRIDNKLIDESEITLAKGLPVTIDCDVVNTDRSLGTTLSYRVSKTFGEQGLPHDTIHVNVNGSAGQSFGAFLAPGITLELEGDANDYVGKGLSGGRIIVYPPKESKFNAEDQIIAGNTAFFGATSGAAFIRGIAAERFAVRNSGANIVVEGTGDHGCEYMSGGRVVVLGSTGRNFAAGMCGGIAYVLDMAQDFGDKVNSQNVELSQITEASEIAFVRGLIEDHRHYTSSAVAENILNNFNRILPRFVKVLPYDYKKVLENEKKKQEEAKKNELNTFIKSIKEDPESDATNGEAAKIRKGHIHRPSSATVSAKDCSHEPNVLDLEDTIFDTEVEKKSVAKLDKLKGFMKYKRRNEKYRDAKKRTNDWNEMTSRLTKDELKYETARCMDCGVPFCTSDTGCPISNVIPKWNELVFQDRWYDALQRLLMTNNFPEFTGRICPAPCNGACVLGINSDPVNIKSVECAIIDHGFEQGWIKPEPPQHRTGKSIAVIGSGPAGLATADQLNKAGHSVKVYERSDRPGGLLMYGIPNMKLDKRIVKRRTDLMTAEGVEFICSTTIGEDISIEEIRSSNDAVVFAVGSTIPRDLRIKGRELNNINFAMQLLHKNTKALLDNDLEEIKKTLEGKHVIVIGGGDTGNDCLGTSTRHGAKSVTNFELLPNPPTSRPKDNPWPQWPRVFRVDYGHTEVTEHYGKDPREYSILSKEFVDDGEGNVKGIKTIRVEWKRSDSGAWQMAEVPGSEEFFSADVVLLSMGFVGPDADNLEVTKTKRGTISTVEPNGYKVSNEDNLFTAGDCRRGQSLVVWGIQEGRQCAREVDNYLMGSSRLPGNGSIEQRNFKLLEELAEKV

SEQ ID NO: 1116 - protein, 2113 aa, Gibberella zeae PH-1
MGLNEDFDDRQIQTEAEQQPYVPYEYQTENNDSWAGALPVKQGLYDPSYEKDACGVGFACHIKGKPSHKIVSDARNLLCNMTHRGAVGSDARDGDGAGVMTSIPHRFFIKNFEKEEDIKLPPLGQYAVGNLFFKPDEETLQESKRQLEDVAESLGLRVLGWRRPPVDSTLLGPAAKSREPIIAQPFVVLASAYGTGNAPEMTDPEKFDERLFERQLYILRKRATQSIGLHNWFYLCSLSNKNIVYKGQLAPVQVYSYYHDLVNADYEAHFALVHSRFSTNTFPSWDRAQPLRWAAHNGEINTLRGNKNWMRAREGVMQSDVFKDELEQMYPVVEDGGSDSAAFDNVLELLTINGVLSLPEAVMLMVPEAWQGNQHMDPKKAAFYEWAACQMEPWDGPALFTFADGRYCGANLDRNGLRPCRFYVMDDDRIICASEVGTIPVEPESVIQKGRLQPGRMLLVDTQAGRIIDDKELKEAVSSRYDFRAWLDSELITLPKVVEIMERALDLAPKLDDKTIQSDPLLHSYGYTHEQVSLLLAPMAADEKEALGSMGNDAPLACLTQSPRLLYDYFRQLFAQVTNPPIDPIRESIVMSLECYVGPQGNLLEMDASQCGRLLLPSPVLSIEEFNAIKNMSNKYSEWTVKTIDLTFPKNQGVQGYIKHLDEICNEASAAIEARDRVIILSDRNTSADRVPVSAVLASAMVHHHLVSNKWRSMAALVVETAEAREVHHMCVLLGYGADAVNPYLAMECILKLNREGLIKKKTTNETLIRNYKHSCDGGILKVMSKMGISTLASYKGAQIFEILGLDETVVERCFRGTASRIQGMTFELIAEDAFRFHERGFPSRASIGPPGLPESGEYHWRDGGEPHVNDPTSIANIQDAVRTKNDKSYEAYSRSEYEQIKNCTLRGLLDFKFEDCTPVPIDQVEPWTDIVRRFCTGAMSYGSISMESHSTLAVAMNRLGGKSNTGEGGEDPERSQRMPNGDTMRSAIKQVASGRFGVTSAYLADSDELQIKMAQGAKPGEGGELPGHKVSKSIARTRHSTPGVGLISPPPHHDIYSIEDLKQLIYDLKCSSPRSRVSVKLVSEVGVGIVASGVAKAKADHILISGHDGGTGASRWTGIKYAGLPWELGLAETHQTLVLNDLRGRVVVQTDGQLKTGRDVALACLLGAEEWGFATAPLIAMGCVFMRKCHLNTCPVGIATQDPELRKKFTGTPEHVINFFYYVANELRAIMAQLGFRTINEMVGHVEVLKMRDDLRTNKTANIDLSLLLTPAHKLRPGVATFNVRKQDHKLHVRLDNKLISESELTLDKGLPSRIECDIVNTDRAMGTSLSYHISKRYGEAGLPMDTVHVNIKGSAGQSFGAFLAPGVTLELEGDSNDYVGKGLSGGRLIIYPPRSAVFKSEENILIGNTCLYGATTGTCFFRGVAAERFAVRNSGATAVVEGVGDHGCEYMTGGRVVVLGSTGRNFAAGMSGGIAYVLDVHGDFHSKLNGEMVETSGLEDPAEIAFVRGLIEDHHHYTGSERAARILVDFNRALPRFVKILPVDYKRVLLEEAAKAAEAKRAEYNLPAVSGVQHKKSEKAAKLQDLEEAVGDNAAEKKRALVLDKTRGFKMYKRRQEKYRPVNSRLKDWAELSSRLDEDELKYQSARCMDCGVPFCQSETGCPISNIIPKWNELVFQNQWKDALNRLLMTNNFPEFTGRVCPAPCEGACVLGINEDPVGIKSIECAIIDRGFEKGWMVPQPPKVRTGKTVAIIGSGPAGLAAADQLNRAGHLVTVYERADRLGGLLMYGIPNMKLDKRIVKRRTDFMADEGIIFKTGVAVGEEGHPSLSDLRASHNVVVIATGATVARDLPIKGRQLEGIHYAMEFLHKNTKSLLDSELGDNAYISAKDKHVVVIGGGDTGNDCIGTSLRHGAKSVTNFELLPQPPPERANDNPWPQWPRIYRVDYGHTEVRQHTGKDPREYCIMSEEFMDDGSGKVKGINTIRVEWTKSPSGGWDMKKVEGSQQFFPADLVLLAMGFLGPEARVLGDEIEKDARKNVKTAPGKYSTNLEGVFAAGDARRGQSLIVWGINEGRQAAREIDLYLEKYTNLPVTGGITKRTAQEIFSQIQVEA

SEQ ID NO: 1117 - protein, 450 aa, Silicibacter pomeroyi DSS-3
MTVKDNKENAPPRTVPIQSATFSNPINAEIRRAAATGIYDIRGGGAKRRVPHFDDLLFLGASISRYPLEGYRERCDTRVTLGTRFAKKPIELDIPITIAGMSFGALSGPAKEALGRGASEAGTSTTTGDGGMTPEERGHSTKLVYQYLPSRYGMNPDDLRKADAIEVVVGQGAKPGGGGMLLGQKISDRVAEMRNLPKGIDQRSACRHPDWTGPDDLEIKILELREITAWEKPIYVKVGGTRPYYDTALAVKAGADVVVLDGMQGGTAATQDVFIEHVGLPTLACIRPAVQALQDLGVHREVQLIVSGGIRTGADVAKAMALGADAVAIGTAALIALGDNDPKWEAEYQKLGTTTGAYDDWHEGLDPAGITTQDPVLQARLDPVDAGRRLRNYLNVMTLEAQTIARACGHNNLHNLEPEDLCALTMEAAAMARVPLAGTEWWPGKTGAGF

SEQ ID NO: 1118 - protein, 142 aa, Petunia x hybrida
KQYQAILRRRQYRAKLEAQNKLSKSRKPYLHESRHRHALNRARGPGGRFLNIKKLRESKSPDLIDDQRVPVSNELQLNTKMLEPDVYQSTPASSGITSCSNGDAIYHQQSLKYSAFSLHIRGSLEQDKGKNDLNTNPCLPSF

SEQ ID NO: 1119 - protein, 453 aa, Desulfitobacterium hafniense Y51
MINELMLRLMNPLTDGMLKNMLTESYPNNPMVMTTTFEKLTLRAVIEAGIRAETGKALTRPMGSPLRLSPWEQLLLNPRQLFELPTPDDTTIDTKVVIGPQAQKPLKLDTPILITGMSYGGSLNLPMKIALAKGASTAGTATNTGESAVSEEEREAADFLIGQYNRGGWLNSPEQLGLVDAIEVQLGQGAWGGAVSSSVKEEDMDEHLRVLWQIDEGGSTGKSSRLPEVNSPEDLVKLIKKLKKEYSVPVGIKIAATHFMERELEVIAKTEADFICIDGQEGGTAASSPTLEDDMGLPTLFGLGRTINWLKGQNLREQFTVIAAGGFRTPGEILKALALGADAVYIGSIAIIAALQNQITKALPQHPAHQLALYNGSLAEEFDIEEGSRCLANFLLSCQEELKMALQAMGKKAIQELGREDLVCLDPELARNLQIGYAGTPAANYWGSPLAAR

SEQ ID NO: 1120 - protein, 140 aa, Petunia x hybrida
KQYSAILKRRQVRAKLEAQNKLVKDRKPYLHESRHRHAMKRARGSGGRFLNTKNMQQSRPSSPKYDKNIFKQHTGGNFSSSMVQHSESGSWGTSTQSGSDVTSIFSGDDMFQQPEFRVSSFPFHMAATMQEAEDFMRGGT

SEQ ID NO: 1121 - protein, 1535 aa, Synechococcus sp. RS9917
MTHLTGSSWPHSDSRAPAAVAGEKDACGVGFLANLEGVASHWLLEQALRGLGCMEHRGGCGGDGDSGDGAGVLCGIPWPYLEAVWPEAAAVETPRGLGMLFMPIDPERRAEAQRFAEQEAAALGLRSSGWREVPVDSLVLGPLARETAPSIVQWLLCGGSDGDALEALLFRLRRRIGERARQAWGAEAARDLYIASLSSRTVVYKGMVRSEVLAAFYADLRDPRFAVSFAVYHRRFSTNTLPRWPLAQPMRLLGHNGEINTLLGNLNWARASEAHLEDVWGDAAADLNPVVNPAFSDSANLDATLELLVRSGRSITDSLITLVPEAFRHQPELEHRPAVRAMYEFNAGLQEPWDGPALLVFADGKRVGATLDRNGLRPARYCITDDGFVVMGSETGVVDLSGKTVISRGRLGPGQMLAVDLERGELLENWAVKEDAAARHPYAQWLEQHRRNLAPQPWSNDQQLADLDLLRLQTATGFTAEDLELVIEDMAGAAKEPTYCMGDDIPLAVLSDKPHLLYDYFKQRFAQVTNPPIDPLREQLVMSLEMYLGERRPALRPQPEAAALVHLDSPVLNEAELEAIAHQGLPCTSLSTQFDPAASLDGLEKALDRLCAAASAAVEAGSQILVLSDRHGLAGAPAHPAATAASLPPLLAVGAVHHHLLRAGQRLRCSLVVDTAQCWSTHHLACLIGYGASAVCPWLTWETTRHWLAHPKTQKRIEQGKLPSLTAAKAQANVRLALENGLRKILSKIGISLLASYHGAQIFEAIGLGADVIDRAFSGTTSRVAGLSLQELARETLLLHAKAFPELNRSKLEFMGFVQYRTGGEYHLNSPEMAKALHKAVHEGPGYDHFSTYRTLLENRPVTALRDLLEFKPATTPLPLDQVESVDSICARFCTGGMSLGALSREAHEVLAVAMNRIGGKSNSGEGGEDPARFKVLNDVDAAGHSTTLPAIQGLRNGDTACSAIKQIASGRFGVTAEYLRSGRQLEIKVAQGAKPGEGGQLPGPKVDAYIAWLRNSKPGVALISPPPHHDIYSIEDLAQLIHDLHQVHPSARVSVKLVAEIGIGTIAAGVAKANADVIQISGHDGGTGASPLSSIKHAGSPWELGLTEVHRSLMENGLRDRVLLRADGGLKTGWDVVMAALLGAEEYGFGSVAMIAEGCIMARVCHTNNCPVGVATQKEALRKRFTGLPEHVVNFFLYVAEEVRQLLSVLGVARLEDLIGRNELLQPRQVALEKTAALDLTTLLAPVPGHGERTWLQHAAEAHGNGPVLEDQLLADAELMAAIESHGSIRRSLEIVNTDRSVCARLAGEIAARHGNRGFRGQLQLHFQGAAGQSFGAFLVQGMDVRLQGEANDYIGKGMNSGRIVLVPTAEVLSPGEQVIIGNTCLYGATGGEVFVHGRAGERFAVRNSGARTVVEGAGDHCCEYMTGGVVVVLGSTGRNVAAGMTGGVAFLLDENGGVADRVNPEIVEICSLETAEQEAVLKPLLEAHQAATGSEKVAAILSDWPRWRPRFKLLVPPSERAAMGLVDRAAVTA

SEQ ID NO: 1122 - protein, 145 aa, Petunia x hybrida
KQYHGILRRRQIRAKAELEKKAIKARKPYLHESRHQHAMRRARGTGGRFLNTKKLNDMDCTSEDPKKSGATIPTHSGNSSGSGSYDQQEKDMHKGHSHSFLTGNNHGSSVYLSQNTGNEQGNGHYGRVSWSLLVNQASRGAVSNN

SEQ ID NO: 1123 - protein, 1612 aa, Oryza sativa Japonica Group
MATLPRAAAAAAPSPAAALLPLPRAAPLLAGRAAARSAARRLRARGTRAPPLAAARRGWGGVSPRAVLDLPRRREAAEKPAQKAADLNEILSERGACGVGFVANLKNEPSFNIVRDALVALGCMEHRGGCGADNDSGDGSGLMSGIPWDLFNDWANKQGLAPLDRTNTGVGMVFLPQDENSMEEAKAVAKVFTDEGLEVLGWRTVPFNVSVVGRYAKETMPNIQQIFVKVAKEDNADDIERELYICRKLIERATKSASWADELYFCSLSSRTIVYKGMLRSEILGQFYLDLQNELYKSPFAIYHRRYSTNTSPRWPLAQPMRLLGHNGEINTIQGNLNWMRSREATLQSPVWRGREHEIRPFGDPKASDSANLDSTAELLLRSGRSPAEAMMILVPEAYKNHPTLSIKYPEVIDFYDYYKGQMEAWDGPALLLFDGRTVGACLDRNGLRPARYWRTSDDFVYVASEVGVIPMDESKVVMKGRLGPGMMITVDLQTGQVLENTEVKKSVASANPYGSWLQQSTRSIKPVNFQSSVAMDNETVLRHQAFGYSSEDVQMVIETMASQGKEPTFCMGDDIPLAVLSQKPHMLFDYFKQRFAQVTNPAIDPLREGLVMSLEVNIGKRRNILEVGPENADQVTLSSPVLNEGELESLLNDSKLKPKVLSTYFDIRKGLDGSLDKAIKVLCDEADAAVRNGSQLLVLSDRSEALEPTRPAIPILLAVGAIHQHLIQNGLRMSASIVADTAQCFSTHQFACLIGYGASAICPYLALETCRQWRLSNKTVNLMRNGKMPTVTIEQAQRNFIKAVKSGLLKILSKMGISLLSSYCGAQIFEIYGLGQEVVDLAFCGSVSKIGGLTLDELGRETLSFWVKAFSEDTAKRLENFGFIQSRPGGEYHANNPEMSKLLHKAVREKSDNAYTVYQQHLASRPVNVLRDLLELKSDRAPIPIGKVEPATSIVERFCTGGMSLGAISRETHEAIAIAMNRIGGKSNSGEGGEDPIRWSPLADVEDGYSPTLPHLKGLQNGDTATSAIKQVASGRFGVTPTFLVNAEQIEIKIAQGAKPGEGGQLPGKKVSAYIARLRNSKPGVPLISPPPHHDIYSIEDLAQLIYDLHQINPKAKVSVKLVAEAGIGTVASGVSKGNADIIQISGHDGGTGASPISSIKHAGGPWELGLSETHQTLIQNGLRERVVLRVDGGFRSGLDVLMAAAMGADEYGFGSVAMIATGCVMARICHTNNCPVGVASQREELRARFPGVPGDLVNYFLFVAEEVRATLAQLGFEKLDDIIGRTDILKAKHVSLAKTQHIDLKYLLSSAGLPKWSSSQIRSQDVHSNGPVLDETILADPDISDAIENEKEVSKTFQIYNVDRAVCGRVAGVIAKKYGDTGFAGQLNITFTGSAGQSFGCFLTPGMNIRLVGEANDYVGKGMAGGELVVVPVEKTGFVPEDAAIVGNTCLYGATGGQVFVRGKTGERFAVRNSLGQAVVEGTGDHCCEYMTGGCVVVLGKVGRNVAAGMTGGLAYILDEDDTLVPKVNKEIVKMQRVNAPAGQMQLKGLIEAYVEKTGSEKGATILREWEAYLPLFWQLVPPSEEDSPEACAEFERVLAKQATTVQSAK

SEQ ID NO: 1124 - protein, 1494 aa, Campylobacter upsaliensis RM3195
MCLKTHQNLGLYDPKNEHDACGIAAVANIRGIASYKVICDALEILMNLEHRGGAGAEENSGDGAGILIQIPHDFFKTQDLGFELPKKGDYAVAQMFLSPNLDAKEEAKTLFLEGLKEKNLEFLGFRAVPFNPSDLGESALKAMPYFLQAFVKRPAKVAAGLEFERLLYTARRLIEKKAFNVPKFYFSSFSSRTIVYKGMLLSTQLSDFYLDFKDINMKSAIALVHSRFSTNTFPSWERAHPNRYMVHNGEINTINGNVHSIKAREGLMQSDYFENLEELFPIIAKPSSDSAMFDNTLEFLALNGRSLEEAFMMMVPEPWHRNENMPSAKRAFYEYHSVLMEPWDGPAAIVFTDGVIMGASLDRNGFRPSRYYLTKDDFLILSSETGALKIDEKNIKAKKRLEPGKLLLVDTARGRVIADNEIKEQYANAKPYKKWLENLIRLENQEDQNYKHHFLKQDEILSLQKAFGWSYDELKLSVLAMANSGKEALAAMGVDTPLAVLSKQYQPLFNYFKQLFAQVTNPPLDALREEIVTSTRIYLGREGNLLKPNESNANRVKIQLPIISNEELFKIKNLKNFKVKEFSILYDHKEKSLESALEELFERVEAEIKKDVCVVILSDRGVSEKMAYIPSLLAVSGLHNYLVRKSLRTHTSIVLESAEPREIHHFACLLGYGATVINPYLVYESIKDLIEKGELKLDYQKAVANFIKASSAGIVKIASKMGVSTLQSYNGSALFECLGINSKIVEKYFSSTTSRIEGIDLEDIEKETLKIHNQAFKDKSKALDSLGIHGFRSEKEEHLIDPLAIFHLQQACKNKDYESFKKYSHIINNKQIHLRSLMEFDFSEAIDIDEVESIESIVKRFRTGAMSYGSISKEAHECLAKAMNQIGAKSNSGEGGEDESRYKKENLMKNSAIKQVASGRFGVDLNYLNHAKELQIKVAQGAKPGEGGQLMGFKVYPWIAKARHSTPGVTLISPPPHHDIYSIEDLAQLIYDLKNANQNAKISVKLVSENGIGTVAAGVAKAGANLILVSGYDGGTGASPRTSIPHAGIPWELGLAETHQTLILNGLRERVRLETDGKLMSGRDLAIAALLGAEEFGFATAPLIVMGCTMMRVCHLNTCPFGIATQDIKLRERFKGKVDAVISFMHFIAQELREYMARLGFKNVNEMIGRVDKLRQKEISTKANKLNLDRILKALPTYNKTAVHFKEHKDNKLKKTIDYRILLPLCKKAVAHKKPIKLSLEVGNQSRTFATMLSSELLKSYGKDALQEDSIQITAIGNAGNSFGAFLLKGIKLEIIGDSNDYLGKGLSGGKIIAKTSSEASFSPEENIIAGNACLYGATEGEVYLDGIAGERFCVRNSGAKAVVLGTGVHGCEYMTGGQVVVLGDIGANFAAGMSGGVVYILGRHNEANVNKELVDIKELNAKDEKELKTTIQRHINYTNSKKARGILDQFDKKDFFKIMPRDYEKMLKHLESFKGDKEQELRAFEKFIQEMRG

SEQ ID NO: 1125 - protein, 525 aa, Staphylococcus aureus subsp. aureus MW2
MTFLTVMQFIVNIIVVGFLLTVIVIGLIWLIKDKRQSQHSVLRNYPLLARIRYISEKMGPELRQYLFSGDNEGKPFSRNDYKNIVLAGKYNSRMTSFGTTKDYQDGFYIQNTMFPMQRNEISVDNTTLLSTFIYKIANERLFSREEYRVPTKIDPYYLSDDHAIKLGERLKHPFILKRIVGQSGMSYGALGKNAITALSKGLAKAGTWMNTGEGGLSEYHLKGNGDIIFQIGPGLFGVRDKEGNFSEGLFKEVAQLSNVRAFELKLAQGAKTRGGHMEAEKVNEEIAKIRNVEPYKTINSPNRYEFIHNAEDLIRFVDQLQQLGQKPVGFKIVVSKVSEIETLVRTMVELDKYPSFITIDGGEGGTGATFQELQDGVGLPLFTALPIVSGMLEKYGIRDKVKLAASGKLVTPDKIAIALGLGADFVNIARGMMISVGCIMSQQCHMNTCPVGVATTDAKKEKALIVGEKQYRVTNYVTSLHEGLFNIAAAVGVSSPTEITADHIVYRKVDGELQTIHDYKLKLIS

SEQ ID NO: 1126 - protein, 191 aa, Medicago truncatula
MDVYNWFWNFKDNKSLNPYEQAISIIGKTLAPFAEDNLIPCFGFGDSSTHDQEVFGLYPDERLCNGFEEVLSRYREIVPNIRLAGPRSFAHIVKTATAIVERSGGQYHHVLMILANGQKDPSSDVGGRTNLKKLAQVTRTRHGRLSPQERKTMDAIVEASKFPLSIILVGVGDGPWDKMKEFCDNIPTKGL

SEQ ID NO: 1127 - protein, 341 aa, Arabidopsis thaliana; identical to SEQ ID NO: 1065

SEQ ID NO: 1128 - protein, 406 aa, Medicago truncatula
MAVGGGGSVKNPAICGCSAQPTGVGGGALVIRRNDAQHGSLSSQKLHTVDAIVEARKFPLSIILVGVGDGPWDMVKEFQDNIKMQTRTFHNFKFVNFTEIMSKSNNISPSLKEAEILLAIREILFQYKAAKELGLLGVALPTPSASRGTSKPYYRSASFPSASSRPYQSASFEGRAPFYPNDNNLASPSSTYYNKAKRESGLPLSLKKLGNTREKKSLTWKAFISHACDSVLDIPPKYHWALLLICVSFLSYQAKNTTAPFEYFQLEKTIKAPPQTLVLAFGEAFEVFFPEITHITKFMLCYFLTLMLVCSLQLGLQIFCILLIISAPLFYFPELVRRASKVGVDCGLFELPLIWFATLGAVGLSLICGILTLLLAYLSWRFLSKGKQNVEDVDVSLEELSEILQV

SEQ ID NO: 1129 - protein, 140 aa, Medicago truncatula
MVIESPKLIFGIDFSQSNQLTGKYSLIRQSLHDIRNVPNSCEKAISIIGKKFSPFLDDNLIPCFGFGDASTSDHDVFSFYRDERFCNGHEEILSRYREIRPNIQPAGTTSFAPIIEMATKIVDQSGGKHHVLVIISDGQV

SEQ ID NO: 1130 - protein, 434 aa, Zea mays
MGQKDSKPSNGYGYSSDYGGTSSGYNLRNTGSTSSSYGARYVPSSENNVQPETHARLQRKYSRIGDDYRSLSQVTEALAQAGLESSNLIVGIDFTKSNEWTGKISFNRRCLHDIGNTPNPYEQAISIIGRTLSVFDEDNLIPCFGFGDASTHDQEVFSFYPENRPCNGFEEALDRYREIVPTLRLAGPTSFAPMIETAIGIVDSTGGQYHVLLIIADGQVTRSVDTQSGQLSPQERDTIDAIVRASQFPLSIVLVGVGDGPWDMMHQFDDNIPARSFDNFQFVNFTEIMSKSIAADRKEAEFALSALMEIPTHRRQRITPRIALPPPTRTAYSRTTSFSQQSGVYSRSSSFDQQTSVYQQRSESLKQQQPAAPKGPDTYVSESALEDRILCPICMYKSKDLAFGCGHQTCYECGRDLERCPLCQQHITTRIRLY

SEQ ID NO: 1131 - protein, 1485 aa, Yersinia pseudotuberculosis IP 32953
MLYDQSQERDNCGFGLIAHIEGEPSHKVVRTAIHALARMQHRGAILADGKTGDGCGLLLQKPDRFFRMVAEERGWRLAKNYAVGMMFLSQDEELAKASRRIVEEELQNETLSIVGWREVPTNPDVLGEIALSSLPRIEQIFVNAPAGWRSRDMERRLFVARRRIEKRISDKDFYACSFSNLVTIYKGLCMPADLPRFYLDLADLRLESAICLFHQRFSTNTVPRWPLAQPFRYLAHNGEINTIAGNRQWAKARAYKFKTPLIPDLQDAAPFVNETGSDSSSLDNMLELFLSGGMDLIRAMRLLVPPAWQNNPDMDTDLRAFFDFNSMHMEPWDGPAGIVMSDGRYAACNLDRNGLRPARYVITKDKLITCASEVGIWDYQPDEVVEKGRVGPGELMVIDTRSGKILHSAETDNDLKSRHPYKEWMEKNVKRLVPFEDLPEEQVGSRQLDDSQLETYQKQFGYSNEELDQIIRVLGENGQEATGSMGDDTPFAVLSSGPRIIYDYFRQQFAQVTNPPIDPLREAHVMSLATSIGREMNVFCEAEGQAHRLSFKSPILLYSDFQQLTTLEGEHYRADRLDLTFNPAENDLEQAVLSLCDEAERKVRDGAVMLVLSDRAIAPNRLPVPAPMAVGAIQTRLVDKSLRCDANIIVETASARDPHHFAVLLGFGATAIYPYLAYESLAKLVDSQAIDKKYRDVMLNYRNGINKGLYKIMSKMGISTVASYRCAKLFEAVGLHRDLSDLCFQGVVSRIGGASFSDFQQDLQNLSKRAWLKRKPLDQGGLLKFVHNGEYHAYNPDVVSTLQKAVHSGEYSDYQAYAKLVNERPIATLRDLLAIKPQGTPIPVDQVEPAESLFKRFDTAAMSIGALSPEAHESLAIAMNSLGGFSNSGEGGEDPARYGTNKVSRIKQVASGRFGVTPAYLVNADVIQIKVAQGAKPGEGGQLPGDKVTPYIAKLRYSVPGVTLISPPPHHDIYSIEDLAQLIFDLKQVNPKAMISVKLVSEPGVGTIATGVAKAYADLITIAGYDGGTGASPLSSVKYAGCPWELGLVETQQALVANGLRHKIRLQVDGGLKTGVDIVKAAILGAESFGFGTGPMVALGCKYLRICHLNNCATGVATQDEKLRRDHYHGLPERVVNYFHFIARETREIMAELGVSQLVDLIGRTDMLLELDGISAKQNKLDLSPMLKTATPHPGKALYCTESNPPFDKGLLNKELLSQAEPYIEAKQSKTFYFDIRNTDRSVGAALSGAIATKHGDQGLATDPIKAYFSGTAGQSFGVWNAGGVELMLTGDANDYVGKGMAGGRIAIRPPVGSNFRSHEASIIGNTCLYGATGGKLFAAGRAGERFAVRNSGAITVVEGIGDNGCEYMTGGIVCVLGRTGINFGAGMTGGFAYVLDEDGEFRKRVNPELVEVLDVEQLAIHEEHLRGLITEHVQLTGSSRGEEILANWPEWVTKFALVKPKSSDVKALLGHRSRSAAELRVQAQ

SEQ ID NO: 1132 - protein, 280 aa, Oryza sativa
MAASAGLLAFLSDASGHKTLLLAHPITRILTALPITPTPRLSPTIGLVAGPTSIIAVVARDDLVCPFAVKNISDVDTCGCCATAAVAAATEVAQMPPEVHAQFAAAEGGHGFECAAHGDYVVLAPRGPVARAPTSALVFDSRRNEWWWALLCPYVVVAHHGSAGGTGGRRGGDDTTTVRRQSEQVEWEPSHMSRTRRGSRAAPGEEPSLIVLLELREAHRVLDTVVLLLLRSRRRHAATVHRDRQRPQHLWVNPSSPSTVPAAPRVPPLRPPPPTPAGEK

SEQ ID NO: 1133 - protein, 314 aa, Oryza sativa Indica Group
MGNRIGGRRKSGLEGEEEQKVIEAQMRMRQQALQDEEDKMKRKQNRCSSSRTITPTKEVEYRDICSTSFSVPSYRCAEQETECCSSEPSCSAQTSMRPFHSRHNRDDNIDMNIEDMMVMEAIWRSIQEQGSIGNPVCGNFMPVTEPSPRERQPFVPAASLEIPHGGGFSCAVAAMAEHQPPSMDFSYMAGSSAFPVFDMFRRPCNIAGGSMCNLESSPESWSGIAPSCSREVVREEGECSADHWSEGAEAGTSYAGSDIVADAGTMPQLPFAENFAMAPSHFRPESIEEQMMFSMALSLADGHGRTHSQGLAWL

SEQ ID NO: 1134 - protein, 431 aa, Misopates orontium
MEAFQTPIFNLPLPYGFTTAPNTINLQNTMIMSTTNPWMDCRIWSRLPQKLIDRIIACLPPPAFFRARSVCKRWYSLIFSTSFLELHLQASPIRHWFMFFKQQSIKQHIYINNNSTNERPQTNYQGYLFDPSTLKWYRISFPLIPPGFSPVSSSGGLICWVSEDSGSKNILLCNPLTTSVIQLPSTLRPRLCPSIGLSITNSSIDISFAGDDLISPYAVKNLTSESFHIDMGGFYSIWGTTSSLPRLCSLESGRMVHVQGRFYCMNYSPFSVLSYDISLNQWYKIQAPMRRFLRSPTLVESKGKLILVAAVEKSKLNVPKSLRLWALQECGTIWVEIERMPQQLYIQFAEIEGGRGFSCVAHGEFVVILIRGSYDKAVMFDFCRKQWVWVPQCPYIGGGDELHGFAYEPRLAVPITPLLEQLTLPFQSFTA

SEQ ID NO: 1135 - protein, 2157 aa, Oryza sativa Indica Group
MSAAQGMAYKLRTDAAPTGAGRRARRSHSSVAAPYRAARLVQGGVSIEGGLVGGCQLTEERVAARPPRAAARDAEPVRPLSTLPESSIGLYDPSRERDSCGVGFVAELSGDYKRATVNDALEMLERMAHRGACGCEKNTGDGAGILVTKDAGFELPQPSEYAVGMVFLPIDEKRRERSKAEFQKVAESLGHVILGWRRVPTDNSDLGESALQTEPVIEQVFLTKSSSSEADFEQQLYILRRLSILSIRAALNLRRGGKRDFYMCSLSSRTIVYKGQLKPCQLKGYYYADLGHENFTSYMALVHSRFSTNTFPSWDRAQPMRVLGHNGEINTLKGNKNWMKAREGLLECEKLGLTKDQFSKILPIVDATSSDSGAFDGVLELLIRGGRSLPEAVMMMIPEAWQNDVNMEPEKKALYEFLSALMEPWDGPALISFTDGRYLGATLDRNGLRPGRFYVTHSGRVVMGSEVGVVDVPSKDVLRKGRLNPGMMLLVDFENHTVVDDEALKAQYSKAHPYGEWLKRQKIYLKDIVESVPETERVAPGISGSLTQKNEKKEHAGVNGIVTPLKAFGYTVEALEMLLLPMAKDGVEALGSMGNDTPLAVMSNREKLTFEYFKQMFAQVTNPPIDPIREKIVTSMECMIGPEGDLLETTEKQCNRLALEGPLVSIDEMEAIKKMNYRGWRSKVLDITYPKKSGRKGLEETLDRICTEARGAIKKGYTVLVLSDRGFSSDRVAVSSLLAVGAVHQHLVANLERTRVGLLVESAEPREVHHFCTLVGFGADAVCPYLAIEAIWCLQNDGKIPPNGDGKPYSKEELVKKYFYASNYGMMKVLAKMGISTLASYKGAQIFEALGLSSEVIRKCFDGTPSRIEGATFEMLARDSLRLHELAFPSRAPPPGSADAKALPNPGDYHWRKNGEVHLNDPLAMAKLQEAARVNSRAAYKEYSRRIQELNKTCNLRGMLKFKDTADMISVDEVEPASEIVKRFVTGAMSYGSISLEAHTALAMAMNKLGGKSNTGEGGEQPSRMEPLADGSMNPKRSAIKQVASGRFGVSSYYLTNADELQIKMAQGAKPGEGGELPGHKVIGDIAVTRHSTAGVGLISPPPHHDIYSIEDLAQLIHDLKNSNPRARISVKLVSEAGVGVVASGVVKGHADHVLISGHDGGTGASRWTGIKNAGLPWELGLAETHQTLVANGLRGRAILQTDGQLKTGKDVAVACLLGAEEFGFSTAPLITLGCIMMRKCHTNTCPVGIATQDPVLREKFAGEPEHVINFFFMLAEELREIMSQLGFRTITEMVGRSDMLEVDPEVVKSNEKLENIDLSLILKPAAEIRPGAAQYCVEKQDHGLDMALDNKLIALSKAALEKEVRVFIETPIQNTNRAVGTMLSHEVTKRYHMKGLPAGTIHVKLTGSAGQSLGAFLCPGITLELEGDSNDYVGKGLSGGKIVVYPPRDSTFIPEDNIVIGNVALYGATIGEAYFNGMAAERFCVRNSGAQAVVEGIGDHGCEYMTGGTVVILGKTGRNFAAGMSGGIAYVYDIDGKFSVRCNHELVDLYHVEEEDDITTLKMMIEQHRLNTGSVVARDILSNFDTLLPKFVKVFPRDYKRVLDNMKAEKAAAKLAKEPKISNGVSVTTKKVQPEQSTNRPTRVSNAKKYRGFISYERESISYRDPNERVKDWKEVAIESVPGPLLNTQSARCMDCGTPFCHQESSGAGCPLGNKIPEFNELVHQNRWREALDRLLETNNFPEFTGRVCPAPCEGSCVLGIIENPVSIKSIECAIIDKGFEEGWMVPRPPLQRTGKKVAIIGSGPAGLAAADQLNKMGHFVTVFERADRIGGLMMYGVPNMKTDKIEIVQRRVNLMAEEGITFVVNANVGSDPLYSIERLRSENDAVILACGATKPRDLGIPGRELSGVHFAMEFLHANTKSLLDSNLEDGRYISAKGKKVVVIGGGDTGTDCIGTSIRHGCTSIVNLELLTKPPSKRAADNPWPQWPRIFRVDYGHQEASSKFGNDPRTYEVLTKRFIGDENGNVKALEVVRVKWEKVDGRFQFKEIEGSNETIEADLVLLAMGFLGPEATIAEKLGLEKDNRSNFKAQFGNFATSVDGIFAAGDCRRGQSLVVWAITEGRQAAAAVDKYLSRNEQDAAEDITPSGAGFVQPVAA

SEQ ID NO: 1136 - protein, 41 aa, Zea mays
  misc_feature (32)..(32): Xaa can be any naturally occurring amino acid
MKPTHTTRPTQCPFCKTPNYAVEYRGIKTKEXRSIEQFTDN

SEQ ID NO: 1137 - protein, 212 aa, Zea mays
MPDSDNESGGPSNAEFSSPREQDRFLPIANVSRIMKKALPANAKISKDAKETVQECVSEFISFITGEASDKCQREKRKTINGDDLLWAMTTLGFEDYVEPLKLYLHKFRELEGEKAATTSASSGPQPPLHRETTPSSSTHNGAGGPVGGYGMYGGAGGGSGMIMMMGQPMYGGSPPAASSGSYPHHQMAMGGKGGAYGYGGGSSSSPSGLGR

SEQ ID NO: 1138 - protein, 1482 aa, Shewanella sp. MR-7
MSLYHPSFERDNCGFGLIAQMDGEASHRIVRTAIHGLDRMKHRGGIASDGRTGDGCGLLMQLPLQFFEAIAAENDWHLSRKFAVGMLFLSQDEELADQAKFILERELERETLSIAGWRKVPVNPEVLGEIGKSSLPQIYQVLINAPIGWREKDLERRLYMARRRLEQQITDDKDFYVASLSGQVIVYKGLMMPADLPAFYPDLADIRLKSSICLFHQRFSTNTSPKWPLAQPFRYLAHNGEINTITGNRQWARARAYKFNSPLLPDLQQAAPFVNETGSDSSSLDNMLEMLLSGGMDLYRAMRLLIPPAWQSNPEMDDELKAFYDFNSMHMEPWDGPAGIVMTNGRHAACAVDRNGLRPSRYVITKDRILTLASEVGIWDYAADEVIEKGRVGPGELLVLDTLNGRLYQSFEIDNDLKRRHPYKEWMAKNSRTLVPAEQLATEQHGASELSPEQLLQYQKQFGYTREELEQVIWVLAKQGEEATGSMGDDTPMAVLSKKSRSLYDYFRQKFAQVTNPPIDPLREKHVMSLATCIGREQNLFNETTGHAYRVMFNSPILLFSDFNQLLGLDSTYYRANIVDLNYDPKEGLEHAIRRITSEAERLARSGTTLLILSDRAIDKSAQVIPAAMAVGAVQQMLVSKSLRCDTNIIVETASARDPHHFAVLLGFGATAIYPYLVYESISDLAKRHQLTDTTALMLNFRYGIEKGLRKIMSKMGISTVGSYRCSQQFEAIGIASDVIELCFKGVVSRIEGASFEDIAQDQALLHKAAYRAHVPLPQGGLLKYVDGGEYHCFNPDVVNTLQASLIDKNFATYKKFAELVDNRPVATLRDLIGIKADQAAIELDKVEAASHLFPRFDSAAMSIGALSPEAHEALAIAMNRLGGRSNSGEGGEDARRFNTERNSAIKQIASARFGVTAHYLVNADVLQIKVAQGAKPGEGGQLPGHKVSVEIAGLRHARPGVTLISPPPHHDIYSIEDLAQLIFDLKQINTKALISVKLVSEPGVGTIATGVAKAYADMITISGYDGGTGASPITSVKYAGSPWELGLAEVHQSLVENGLRHKIRLQVDGGLKTGTDVIKAALLGAESFGFGTVPMIALGCKYLRICHLNNCATGVATQDKKLRDNHYHGLPERVMTYFEFVAEEVREWMATLGVSKFEDLVGRSEWLHTLEGQTDKQRGLDLAPILYQPKVRASTSRTWQETNPPADLGLLNQHLLNECQNAVDKGECFDAAYSINNTDRSVGARLSGYIASTLGVKGTKAPIKLSFNGSAGQSFGVWNSPGLELKLCGDANDYVGKGMSGGKIVIYPPLGSPFQSERSAIVGNTCLYGATGGRFFAAGQAGERFAVRNSGAIAVVEGLGDNGCEYMTSGIVVVLGKTGVNFGAGMTGGFAYVFDQFGRFNRRVNNELVDTQKLESPIHQQHLKGLIEEHVAETGSEHAKMILSDFANWLDCFVLVKPKNIAVADLLKLEQSSPELAVKAG

SEQ ID NO: 1139 - protein, 1542 aa, Rhodococcus sp. RHA1
MKQLPGPQGLYHPSNEHDSCGVAFVVDMKGRRSRDIVEKAITALVNLEHRGAAGSEPNTGDGAGILLQVPDKFFRAVVDFPLPAEGTYATGIAFLPQSKADAQRAADAVEKIVESEGLKVLGWREVATDDSSLGALARDAMPTFRQIFIGSENDALTGLDLERRAYVVRKRTEHELGSEGAGKDGPGRETVYFPSLSSQTFVYKGMLTTPQLKGFYLDLQDERLESALGLVHSRFSTNTFPSWPLAHPFRRVAHNGEINTVTGNENWMRAREALIDSDIFGGSGEVGPGKDRRSQLEKIFPVCTNGASDTARFDEVLEMLHLGGRSLPHAVLMMIPEAWERHESMDPARRAFYQYHSSLMEPWDGPASVCFTDGTVIGAVLDRNGLRPSRLWVTDDGLVVMASEVGVLPIDPATVVKKIRLQPGRMFLVDTAEGRIISDDEIKSELAAEHPYQEWLDQGLTHMDDLPDRPYTYMSHERVVLRQLMFGYTNEEVNLLVKPMALSGAEALGSMGTDTPIAVLSSRSRMLFDYFSQLFAQVTNPPLDAIREEVVTSLGGTIGPEHDLLHPTAESCRQIFLPQPILHNDDLSKLIHVNDDGEFPNFRSVIVRGLYPVAEGGAGLRKALDDVRYQVSEAIAGGARLVVLSDRESNETYAPIPSLLLTSAVHHHLVREKTRTKVGLIVEAGDAREVHHMALLIGFGAAAVNPYMAFETVDEAVQNNELQGVSLDKAIQNYIKAAGKGVLKVMSKMGISTLASYTGAQLFQVIGLSQELVDEYFTGLQSSLGGIGLDQIAADVAVRHSNAYLDRPEERAHRELEVGGEYQWRREGEYHLFNPDTVFKLQHSTRTGQYEVFKEYTKLVDDQSERLAALRGLFEFKKGVREPVPLDEVEPATEIVKRFSTGAMSYGSISAEAHETLAIAMNRLGGRSNSGEGGESPARFTPDENGDWRRSAIKQVASGRFGVTSHYLTNCTDIQIKMAQGAKPGEGGQLPAHKVYPWVAEVRHSTPGVGLISPPPHHDIYSIEDLAQLIHDLKNANPQARIHVKLVSEVGVGTVAAGVSKAHADVVLISGHDGGTGATPLTSMKHAGAPWELGLAETQQTLLLNGLRDRIVVQVDGQLKTGRDVMVAALLGGEEFGFATAPLVVSGCIMMRVCHLDTCPVGVATQNPVLRKRFSGKPEFVENFFLFIAEEVRELLAELGFRTLDEAVGQVDVLDTTKALEHWKGSKAGNLDLSPILHETESAFMDQDLYCTGTQDHGLDKALDQQLIVQSRNALDKGQKVTFESPITNVNRTVGTMLGHEVTKAYGGEGLPDNTIDITFTGSAGNSFGAFVPKGMTLRLHGDANDFVGKGLSGGRLVVRPPLETAPGFIAEDNIIGGNVILFGATSGEALLRGVVGERFAVRNSGATAVVEGVGDHGCEYMTGGKVVILGATGRNFGAGMSGGVAYVYNPDKVFEDNLNTELVDLEDLTGDDFTWLKSAIERHRDETGSEVAARILSDWSQQVNHFAKVMPRDYKKVLLAIEAAKKDGKNVDEAVMEAARG

SEQ ID NO: 1140 - protein, 396 aa, Oryza sativa Japonica Group; identical to SEQ ID NO: 460

SEQ ID NO: 1141 - protein, 2188 aa, Oryza sativa Japonica Group
MSAAQGLALKLRAAPAAGGVRGEKRRRAASATAAAAARPRHGAMSLEGGFLGGALPAEDRVAPRASASRQAEAGAGAGAARPPPRSMSKIPESSIGLYDPSMERDSCGVGFIAELSGEYSRKTVDDAIEMLDRMAHRGACGCEKNTGDGAGILVALPHNFFREVTKDAGFELPPPGEYAVGMFFMPTDDKRREKSKLLFREKAELLGHTVLGWRRVPTDNSGLGQSAVDTEPVIEQVFVTKSASSKADFERQMYVLRRFSVMSIREVLGVKNGGTKDFYMCSLSSRTIVYKGQLKPSQLKGYFFADLGDESFTSYMALIHSRFSTNTFPSWDRAQPMRVLGHNGEINTLRGNKNWMKAREGLLKCEGLGLTRDEMLKLLPIVDATSSDSGAIDNVLELLIQSGRSAPEAVMMMIPEAWQNDVNMDPERKALYEFFSALMEPWDGPALISFTDGRYLGATLDRNGLRPGRFYVTYSGRVIMASEVGVVDVPPQDVSRKGRLNPGMMLLVDFENHCVVNDDELKKEYSKVRPYGEWLKRQRIQLTDIIESVNEAERIAPSISGALPITKENKADMGICGILTPLKAFGYTREALEMLMLPMAKDGQEALGSMGNDTPLAVMSNREKLTFEYFKQMFAQVTNPPIDPIREKIVTSMECMIGPEGDLSETTERQCHRLTLKSPLLNTNEMEAIKKMNYRGWRSKVLDITYPKKNGRMGLKQTLDKICAQAREAIHEGYTILVLSDRGFSSERVAVSSLLAVGAVHQHLVSHLERTRIGLLVESAEPREVHHFSTLIGFGADAICPYLAIEAIWRLQIDGRIPPNDGKPYTQEQLIEKYFYASNYGMMKVLAKMGISTLASYKGAQIFEALGLASEVVSKCFEGTPSRVEGATFEMLAQDALRLHEIAFPSRTLPPGSADANALPNPGDYHWRKNGEVHLNDPFSIAKLQEAARINSREAYKEYSRRIYELNKACTLRGMLKFREIPNQISLDEVEPAKEIVKRFCTGAMSYGSISLEAHTSLAEAMNTLGGKSNTGEGGEQPCRMVPLPDGSKNPRISAIKQVASGRFGVSIYYLTNAVEVQIKMAQGAKPGEGGELPGHKVIGDIAVTRNSTAGVGLISPPPHHDIYSIEDLAQLIHDLKNANPGARISVKLVSEAGVGIVASGVVKGHADHVLISGHDGGTGASRWTGIKNAGLPWELGLAETHQTLVANGLRGRAVLQTDGQMKTGRDVAVACLLGAEEFGFSTAPLITLGCIMMRKCHTNTCPAGIATQDPVLRAKFAGKPEHVINYFFMLAEEVREIMAQLGFRTVNEMVGRSDMLEIDPKVLEGNEKLENIDLSRLLKPAAEISPGAVQYCVEKQDHGLDMALDNKLIASSTAALRKGVRVFIETPVRNINRAVGTMLSHEVTKRYHIHGLPSDTIHIKLNGSAGQSFGAFLCPGITLELEGDSNDYVGKGLSGGKIVVYPPRNSRFNPQDNIVIGNVALYGATKGEAYFNGMAAERFCVRNSGAQAVVEGIGDHGCEYMTGGTAVILGKTGRNFAAGMSGGIAYVYDVDGKFSSRCNYELVDLYAVVEEDDITTLRMMIQQHRLHTQSDLARDILLNFDTLLPKFIKVYPRDYKRVLDKLKEEKAAKEAEQKAREVVDKKPVEVIQAPNGISVKTEKVMNEEPSSRPSRVSNAVKYRGFIKYEREGTSYRDPNERVKDWNEVAIELVPGPLLKTQSARCMDCGTPFCHQEGSGAGCPLGNKIPEFNELVHQNRWHEALDRLLETNNFPEFTGRVCPAPCEGSCVLGIIDNPVSIKSIECAIIDKGFEEGWMVPRPPLRRTGKRVAIVGSGPAGLAAADQLNKMGHFVTVFERADRIGGLMMYGVPNMKADKEGIVQRRVELMAKEGVQFIVNAHVGSDPLYSVEKLRSENDAIILACGATKPKDLPIPGRELAGIHFAMEFLHANTKSLLDSNLEDGNYISAQGRKVVVIGGGDTGTDCIGTSIRHGCTNLVNLELLPEPPRKRAPDNPWPQWPRIFRVDYGHQEATSKFGKDPRSYKVLTKRFIGDENGNVKALEVIRVEWGKVNGRFQFKEVEGSEEIIEADLVLLAMGFLGPEATVANKLGLEQDMRSNFKAQFGNFATNVEGVFAAGDCRRGQSLVVWAITEGRQAAAAVDNYLSKDDEGETNGTEDIAVSSEGLVQPVVA

SEQ ID NO: 1142 - protein, 496 aa, Methanococcoides burtonii DSM 6242
MTEYRCNVCNVFEYDDTRGDSNTEMKPGTKPEDFPDDWRCPICGADKNHQMPAEKKEVEHVTSKEIVTCVKCGTKSKITVSALEDADVKSYLGEWKRTKDEFETFMEDIHKISITGESIIEPMRTKQDVISWNDILIKSAQLAKMPLNEDVTVNTTTTIGPHAKYPLVIETPVFITHMSFGALSKEVKQALSKGSAAVRTAMCSGEGGILKENMETAYKYIFEYVPNKYSVTEENLKKVDAIEIKIGQSAKPGMGGHLPAEKVTSELAEIRGFPESTDIVSPANFDDIRNKDDLKKKVEWLRETSGGKPIGIKIAAGNIEADLEVAIYAKPDFITIDGRPGATAAALKFVKNSTSIPTIFALWRARRYLDEKGIKDISLIITGGFRISPDYAKALALGADAIAIGTAALMACACQQYRLCDTGKCPVGVTTQDPELRSRLKIDISAKKLENFLKVSTKELEAFARLTGNDDVHKLGVKDLCTTNSEISGHTEIEHV

SEQ ID NO: 1143 - protein, 464 aa, Erythrobacter sp. SD-21
MEDLRPFAQAYIVEDDLEGRPFSHQARSLVYARAKGDLDKHPMGTELDVYSDEYEWVGHSIAPTSDVAEEWRVTVGEGSCAKPYSSSLLNISAMSFGSLSARAIEALNMGAKLGNFAHNTGEGSISRYHRGPGGDLIWELGSGYFGARREDGRFDPDKFRDNAASDQVKMIELKLSQGAKPGHGGVLPGAKVTKEIAEARGVPQGQDVNSPAAHPEFDTPIELLEFVTRLRDLSGGKPTGIKLCVGQPHEIFALCKAMLETEMHPDFITVDGAEGGTGAAPLELSNSVGMPLREGQIFVRNMLVGTGLRHKVKIATSGKIHSGAQMAKSFALGADWCNAARPFMFALGCVQSMNCHKGTCPTGIATQEEWRQRGLVIEDKAPRVARFQRQTLHSLREITIAMGLQSPWEMKPLDMRERINGARSDAFDKIYYFVEEGVLLDKPQTTPLARHWEAARANSFRRDG

SEQ ID NO: 1144 - protein, 485 aa, Zea mays
MGQRQSHSKRDGSSHGRRSRSFQQQPSAQWGAGGGGYYQQDPSTGYYGAPVPQQGGGYYQQDPGTGYYGAPVPQQGGGYAAPYRDKPAAAAAVAAPAPQAAKPRQLDRRYSRIADEYHSVDQVTDALAQAGLESSNLIVGIDFTKSNEWTGKFSFHGRSLHHISNTPNPYEQAISIIGRTLSKFDEDNLIPCFGFGDASTHDQDVFCFSPDEKPCNGFEEALDRYRELVPHLRLAGPTSFAPIIEMAMTIVEQSGGQYHVLLIIADGQVTRSVDTASGQLSSQEQKTVDAIVKASELPLSIVLVGVGDGPWDMMKEFDDNIPARAFDNFQFVNFSEIMSKNMAQSRKEAAFALSALMEIPPQYKATVELGILGRRSFKSPDRVPLPPPSGSHGAYSYYSSKGFSKPSTYPQSSSSSSPYPHYETPHTATPAAPSATYDNQVCPICLVNPKDMAFGCGHQTCCDCGQILESCPICRTPITTRIKLY

SEQ ID NO: 1145 - protein, 496 aa, Shewanella oneidensis MR-1
MHELNWFMWGLDLFSGLFLIIVGLGALAIVYMYIADKLQTKQAVRHNYPVIGRFRYLFEKQGEFFRQYFFAQDREELPFNRAERSWVYRAAKNVDRTIAFGSTRPLEATGTIMFMNSAFPPQDEDITPIQPLTIGPHCRVPYTTSAICHISAMSFGALSRPAVTALSHGAAQAGCWLNTGEGGLSPYHLKGGCDLVFQIGTAKYGVRNEHGHLDDDKLTAIAAHPEVKMFEIKMSQGAKPGKGGILPGVKVTEEIAHIRGIPLGQDSISPNGHIEFNNVGDILDMIARVREVTGKPTGIKAVLGDVQWLEDFCNEIERRGEASAPDFFTLDSADGGTGAAPQPLMDYVGLPLKESLPILVNILIKHGLGKRIKVIASGKLIVPSRVAWALALGADFIASARGNMFALGCIQALQCNKDTCPTGITTHNKKLQHGLDPRDKSTRVANYNHNLHHDLALIAHSCGLTEPRQLKPSHVRIVLESGLSVSLDKYYSHINN

SEQ ID NO: 1146 - protein, 218 aa, Aspergillus niger
MSSTSPSKEPEVEPEVQSGEDQEQMDKEQQDTQAQGQGEFEVKEQDRWLPIANVARIMKLALPENAKIAKEAKECMQECVSEFISFITSEASEKCQQEKRKTVNGEDILFAMTSLGFENYAEALKIYLSKYRETQSARGEHQNRPTSSGYGAGAPVGAPGPAGPGGRPMAPGAGFPDTADSANNIMNQSLDPSEQDTSTYGYPPMVGQPHNGTAGESY

SEQ ID NO: 1147 - protein, 232 aa, Brassica napus
MQVPTNSNIQGSQSFSLTKNLMMPCKMKHSGLQLQDQDSSSTQSTEESGGGYIVSPQGKAIASYTKSTTTSSMVSHDSVFPPTYFNGFLAPEYASQSTVLPHVEMMGLVTSRVPLPHNYQENEPMFVNAKQYHAILRRRKHRAKLEAQNKLIKSRKPYLHESRHLHALKRARGSGGRFLNTKKLQESSSNSLCSSSATPSSSSDRDNMFQNPPFRFSGYPSTHHVSALMSGT

SEQ ID NO: 1148 - protein, 534 aa, Cyanobium sp. PCC 7001
MTAPTVAASTPIAVSLEEGKEYVYCACGRSSDQPFCDGSHEGSGITPLSFKAEKSGKALLCRCKQTAKPPYCDGTHARVPADRVGTSFDIHEAGDDAGDDAGDDAGEEGSEEGSDDEEISDGTQEEPTLGLIHELAQNGLERVGPLGPVVSMGVPRSQLPCWDDIQILTAQLARQPLADDDPVGTELVIGPRAQRPLRLEIPLLVSDMSFGALSEEAKRALARGAEQAGTGICSGEGGMLPAEQAANHRYLYELAPAMFGYREELLSQVQAFHFKAGQAAKTGTGGHLPGAKVSESIARVRGIPEGEPSCSPASFEQLHTPAEFRRFGDRVRELSGGIPVGFKLSAQHIEPDLDFALEAGADYVILDGRGGGTGGAPQLLRDHISVPTIPALARARAHLDRRGASGEVTLIITGGLRTPADCVKALALGADGIALANAAIQAIGCVGSRICHTNRCPTGVATQDPELRQRLQVEPAAQRLERFFRATVALMQVMARACGHDHLNRLCRTDLASWQRPLAELAGIAWSGAAATEP

SEQ ID NO: 1149 - protein, 746 aa, Opitutaceae bacterium TAV2
PPPPPPPPAGATEPTRCRHSRAHAAPEGYYRVNKKGDGEFHGWNPKIVAAMNKFTRAGVGTYDTWQDWRTQADEHQPVSIKDLLKIRFDKATSVDLDEVETIEEIRRRFTTAGMSLGALSPEMHETLAIAMNRIGGKSNSGEGGEDPARFSIRENGDNANSAIKQVASGRFGVTAEYLANAKEIEIKMAQGAKPGEGGQLPGPKVTPLIARLRHSVPGVMLISPPPHHDIYSIEDLAQLIFDLKEVNPRAKVCVKLVSSSGVGTVAAGVAKAYADVVLVSGHEGGTGASPIASIKNAGSAWEIGVAEAHQVLMMNGLRGRVTLRTDGGMKTGRDIVIAALLGAEEFNFGTAALIAGGCAMFRVCHLNTCPVGVATQREDLRAKFRGKPENIINFFNAVAEDVRHYLAKLGARTLNEIIGRVDLLEQIDDPANPKTRYVDLSGLLHNPDPSGEHERHHTRERNERFGTDGSLDEAITQEARDVILGKSARLVARYKVTNVNRDIGTFLSGQIAYVRGNTGLPPGTIDLTFTGSAGQSFGTFLVNGIRLTLNGEANDYVGKGMNGGEIIIRPKPSETFVWRHQSILGNTCLYGATGGFLFAAGRAGERFAVRNSGATTVVEGAGDHACEYMTGGLVVILGPTGINFGAGMSGGLAFVYDETSSFEKQINPAMIALERLTDESESDSLRSLIATHFRATGSLHAQQLTEDWDAEKRKFWKVIPYPPTPDTPKPIYQFDRTRLPESEIKL

SEQ ID NO: 1150 - protein, 1629 aa, Arabidopsis thaliana
MALQSPGATGASSSVSRLLSSAKLSSTKTIFSVDFVRSYCISKGTKRRNELSGFRGYSPLLKSSLRSPFSVKAILNSDRAAGDASPSFSDLKPQVAYLEDIISERGACGVGFIANLENKATHKIVNDALIALGCMEHRGGCGSDNTSGDGSGLMTSIPWDLFNEWAEKQGIASFDRTHTGVGMLFLPRDDNIRKEAKKVITSIFEKEGLEVLGWRDVPVEASIVGHNAKQTMPNTEQVFVRIVKDDKVDDVERELYICRKLIERAVASESWASELYFSSLSNQTIVYKGMLRSEVLGLFYPDLQNDLYKSPFAIYHRRFSTNTSPRWHLAQPMRFLGHNGEINTIQGNLNWMTSREASLRSPVWHGRENDIRPISNPKASDSANLDSAAELLIRSGRTPEESLMILVPEAYKNHPTLMIKYPEAVDFYDYYKGQMEPWDGPALVLFSDGKTVGACLDRNGLRPARYWRTSDNVVYVASEVGVLPMDESKVTMKGRLGPGMMISVDLENGQVYENTEVKKRVASYNPYGKWVSENLRNLKPSNYLSSAILETDETLRRQQAFGYSSEDVQMVIESMAAQGKEPTFCMGDDTPVAVLSQKPHMLYDYFKQRFAQVTNPAIDPLREGLVMSLEVNIGKRGNILEVGPQNVSQVVLSGPVLNERELEGLLGDPLLKSQILPTFFDIRRGIEGSLKKGLLKLCEAADEAVRNGSQVLVLSDRSDNPEPTRPAIPMLLAVGAVHQHLIQNGLRMSASIIADTAQCFSTHHFACLIGYGASAICPHLALETCRQWRLSNKTVNMMRNGKMPTVTMEQAQKNYRKAVNTGLLKVLSKMGISLFSSYCGAQIFEIYGLGNEVVEFSFRGSASQIGGLTLDELARETLTFWVRAFSEDTAKRLENFGFIQFRPGGEYHGNNPEMSKLLHKAVREKSETAYAVYQQHLANRPITVFRDLLEFKSDRNPIPVGKVEPASSIVERFCTGGMSLGAISRETHETIAIAMNRLGGKSNSGEGGEDPIRWKPLTDVVDGYSSTLPHLKGLRNGDTATSAIKQVASGRFGVTPTFLVNADQLEIKVAQGAKPGEGGQLPGKKVSAYIARLRNSKPGVPLISPPPHHDIYSIEDLAQLIFDLHQVNPKAKVSVKLVSETGIGTVASGVAKANADIIQISGYDGGTGASPISSIKHAGGPWELGLAETQKTLIGNGLRERVIIRVDGGFKSGVDVLIAAAMGADEYGFGTLAMIATGCIMARICHTNNCPVGVASQREELRARFPGLPGDLVNFFLYIAEEVRGILAQLGYEKLDDIIGRTDLLKARDISLVKTHLDLSYLLSSVGLPKRSSTSIRKQEVHSNGPVLDDTLLQDPEIMDAIENEKTVHKTMSIYNVDRSVCGRIAGVIAKKYGDTGFAGQLNLTFTGSAGQSFACFLTPGMNIRLVGEANDYVGKGMAGGEVVILPVESTGFRPEDATIVGNTCLYGATGGLLFVRGKAGERFAVRNSLAQAVVEGTGDHCCEYMTGGCVVILGKVGRNVAAGMTGGLAYILDEDNTLLPKMNKEIVKIQRVTSPVGQTQLKSLIQAHVEKTGSSKGAMIVEEWDKYLAMFWQLVPPSEEDTPEANSDHILKTTTGDEEQVSSTLAEK

SEQ ID NO: 1151 - protein, 183 aa, Brassica napus
MASSVHDLSDKIETHDKQEHKDSQFQIQPPIPPGRNSAVYSEQLPHSMAPGHYPYPDPYYRSMFAPNPQAYPPRPYETGVHAHLMGVQQQCVPLPSDAVEEPVFVNAKQYHGILRRRQSRAKLESQNKVVKSRKPYLHESRHLHAIRRPRGCGGRFLNAKKEEEHHEGNHLEEKSMAASGGTS

SEQ ID NO: 1152 - protein, 522 aa, Bacillus cereus ATCC 10987
MSETLLVIISILLLLMLLLIIFFIITFFIKKRTHHSILKLHPYLGRMRYLLEKIGPEFRQYWFDHDTDGKPFSRYDFQSVMFLAKYRSEILGFGSKRDFDTSGYYIANTLFPILTEELSVNVAQEREGKKYVIHKEGLFSRREKLTADTTNLWLYEEDDAVIVGENRKYPWKLYGMFGASATSYGAIGENYILASGFGAKMAGGSWINTGEGGVIPEHLHTGANIVAQIGPGLFGYRDEDGKFSMEKFMEKAKERNIKAFELKFGQGAKIRGGHLEGQKVNEKIASVRNVREGETINSPNRFSFLNNAADTLYFIQQLQENGGKPVGMKIVIGQQEPLEDLFKSMKELNIYPDFITIDGSEGGSGATYKSMADSMGMPLIPALLTCIDTANHYGVRDKFKVFASGKLITPDKVAIALAIGADAINSARGFMMASGCIMALQCNSGQCPSGVATTNPHYQKALDPYEKKWRVMNYVVSMRYSLFSLAAAAGVKSPRHLTREHIVFKDEVGRIVPLSELFPTSK

SEQ ID NO: 1153 - protein, 504 aa, Roseovarius nubinhibens ISM
MTVNFAMNAFQLLALIVILSVLALCLLALVFFVVDKVQTGDAIRRNYPVIGRFRHLFTTLGEFFRQYFFAMDREEMPFNRAQRDWVKEAAHGHGNMVAFGSTRSLTVPGTPIFVPASFPPLSDEYTQTEPMQIGPYAAIPYTAKSIFNISGMSYGALSRPAVEALSRGAAKAGIWLNTGEGGLSPHHLTGGCDIVFQIGTAKYGVRDHLGGMDDERLREIGDNPHVRMFELKLAQGAKPGKGGILPGTKVTPEIAAIRGIPVGEPSISPNRHVEVADYAELLDMIDRIRRVTGKPVGFKTVIGSSDDWGQFFELILARGIESAPDFITVDGGDGGTGAAPMPLMDLVGMPLREALPRMVDMRDRHGLKERIRIIASGKLINPGDVAWAICAGADFVTSARGFMFSLGCIQALKCNKNTCPTGITTHDRRLQAGLVVEDKYLKVARYAAQIVAEVETIAHSVGVTEPRLMRRRHVRMVQPDGSSIPMNKIRPSINLEANPTPPKG

SEQ ID NO: 1154 - protein, 2738 aa, Debaryomyces hansenii
MASYLPQEEFETNVYKYDETPENKSWASTLPTAKGLYNPEYEKDACGVGFTCHIKGEASHKIVSDCRNLLCNMTHRGGELNPKDGDGAGLLSSLPHKFFLREFKYYCNIDLPKLGQYGTGNIFFKKDDIVFEKSRKTFESIANTLGLKVLGWRKVPHDSSILGPASLSREPLILQPAIVLSELFDGQHKEISEEEFEKNYQMDFEKKLFILRKQSTHTIGLHNWFYICSLSSKTIVYKGQLAPNQVYAYYHDLANAEYEAHFALVHSRFSTNTFPSWDRAQPLRWAAHNGEINTLRGNKNWMRAKEGVMESELFGDELDKLYPIIEEGGSDSAAFDNVLELLVINGVLSLPEAVMMLIPEAWQNDIHIDSKKKAFYEWAACLMEPWDGPALFTFADGRYCGANLDRNGLRPCRYYVTDDDRMICASEVGVIEIEPEKILQKGRLQPGRMLLVDTKEGRIVDDRELKNKVASRFDFKSWVLANMISMDDLFSKLESRNVNLIENPESQDITVQTDPRLVAFGYSHEQISMVLAPMAEAKEALGSMGNDNALACISEQPKLLYDYFRQLFAQVTNPPIDPIREEIVMSLECYVGPQGNLLEMKPDQCNRLLLKSPVLSSLELNAIKNIEKVYPKWSVTNIDITFDKAEGIQGYINKIDNICQASSKAIADDHQIIILSDKLTSFNRIPISALIATGAVHHHLVRQKQRSKVAIIIETAEAREVHHACCLVGYGADGINPYLALETLVRMNIENLLKASLTDDQIIKNYKIAVDSGILKVMSKMGISTLASYKGAQIFEALGVDNSVIDRCFAGTASRIKGITFEYIAQDAFSLHDVGYPSRETIKPVALPETGEYHWRDGGDSHINEPAAIASMQDAVKNKNEIAYEAYSKKEYEAIKKCTLRGLLDFDYENSQSIPIDQVEPWTEIVRRFFTGAMSYGSISMEAHSTLAVAMNRLGGKSNTGEGGEDSARSLVHSNGDTMRSSIKQIASGRFGVTSHHLSDADELQIKMAQGAKPGEGGELPGHKVSEQIGKTRHSTPGVGLISPPPHHDIYSIEDSKQLLYDLKCSNPRARTSVKLVSEVGVGIVAAGVAKAGSENILISGGDGGTGAAKLTSIKYAGLPWELGLAESHQTLVLNDIRGRVILQTDGQLRTGRDIAVAALLGAEEWGFATTPLIALGCIMMRRCLASDTLVRTSEGDKPVAEVAIGDYLLDAEDKPVLCMGANPSQTGRMKEIAYQDFDSKKRVSFKCTPDHHLELTLTDSTPSLSGKSVTWFSRCTGAHLSEEVSEVYLDNMVSIFYNDLVDSTDSAVDKDSIHEAVDLALEDHYHRGNSDQYSIHLNEYISRIADKELQNEPEFIRECIHDAANRFVITSSGNRNIKSESFDDKLSLSRSRSSTADSDSDYVITDASVHSHSNNSSVYLASPDSMIPDGAANRFENIASKLKEPVCNCGGIRKIFRSFGTTEDAELAYSLLLSEHYYRLDPRFVTDGYTFQASVEQYENMCSQEVQNMHLKLYRSPLKFVEREHNSAELPVDPYFLGLWLGDGDSSGTTIMTTDREIVVWLNSYVERLNQNKPEGCFPLKLTEQLIYGAGHTSKSGHTTKVDVRNYKISSGDAFVRSGTYWNPIFDGLKKLGLLNNKSAGIPQEYMNSDEQNRLSVIAGLMDSDGCYVKSHNTYRFTQLTEDHKKIVYDLKELALSCGINTTGVESSVKPLGFNKHKHSTEYVVYLGNGSQKFQELLLLPRKKMEISKKHVSLDARPFTVSDVEDGEFRAIEVSGGVFQLANRLVVANCHLNTCPVGIATQDPELRKKFTGTPEHVINFFYYLANELRGIMANLGFRTVNEMIGRTEKLKVREDLRNTKNANMDLSPILTPAHTIRPGVATHCVKKQDHRLHVRIDNKLIDESEITLAKGLPVTIDCDVVNTDRSLGTTLSYRVSKTFGEQGLPHDTIHVNVNGSAGQSFGAFLAPGITLELEGDANDYVGKGLSGGRIIVYPPKESKFNAEDQIIAGNTAFFGATSGAAFIRGIAAERFAVRNSGANIVVEGTGDHGCEYMSGGRVVVLGSTGRNFAAGMCGGIAYVLDMAQDFGDKVNSQNVELSQITEASEIAFVRGLIEDHRHYTSSAVAENILNNFDRILPRFVKVLPYDYEKVLENEKKKQEEAKKNELNTFIKSIKEDPESDATNGEAAKIRKGHIHRPSSATVSAKDCSHEPNVLDLEDTIFDTEVEKKSVAKLDKLKGFMKYKRRNEKYRDAKKRTNDWNEMTSRLTKDELKYETARCMDCGVPFCTSDTGCPISNVIPKWNELVFQDRWYDALQRLLMTNNFPEFTGRICPAPCNGACVLGINSDPVNIKSVECAIIDHGFEQGWIKPEPPQHRTGKSIAVIGSGPAGLATADQLNKAGHSVKVYERSDRPGGLLMYGIPNMKLDKRIVKRRTDLMTAEGVEFICSTTIGEDISIEEIRSSNDAVVFAVGSTIPRDLRIKGRELNNINFAMQLLHKNTKALLDNDLEEIKKTLEGKHVIVIGGGDTGNDCLGTSTRHGAKSVTNFELLPNPPTSRPKDNPWPQWPRVFRVDYGHTEVTEHYGKDPREYSILSKEFVDDGEGNVKGIKTIRVEWKRSDSGAWQMAEVPGSEEFFSADVVLLSMGFVGPDADNLEVTKTKRGTISTVEPNGYKVSNEDNLFTAGDCRRGQSLVVWGIQEGRQCAREVDNYLMGSSRLPGNGSIEQRNFKLLEELAEKV

SEQ ID NO: 1155 - protein, 1515 aa, Vibrio salmonicida LFI1238
MVDREQSAQGMYTPELEHDACGIGFVAHLKNRKSHDVVTQALDMLARMEHRGGQGCDPCSGDGAGILLQKPHEFLLEEAVKLSIKIPSFDKYGIGVVLFPKDEYKRQQCRDILERNAQRLDLEILGYRILPVDNSMLGNDPLSTEPQFEHVFISGGPSMDPAELERKLYVLRNYTVRVCLESISNIGDDFYINSLSYKTLVYKGQLTTEQVPQYFLDLQNPSMVTALALVHSRFSTNTFPRWRLAQPFRYIAHNGEINTVRGNLNWMKAREAIIESDLFSQQEMDMLLPICQEGSSDSSNFDMALELLVLSGRSLPHALMMMIPEAWQENKNMDPTRRAFYQYHANVMEPWDGPASVCFTDGVQVGATLDRNGLRPSRYTVTKDDFLVMASESGVVKIAPENIEFRGRLQPGRIFVADLEQGRIISDEEVKDGIANSQPYEKWVEENLLSLKKLPEATNQYSQPSPERLLNRQQAFGVTSEEVNEIILPLAKTAYEPLTAMGADWPLAILSHQSQHLSNYFKQLFAQVTNPPIDPIRERMVMSLNTYLGKDQNLLAETPEHCQKVELESPVLSNSELEKLRAIDNEHLQAKTLDIVFQASEEPGKLERALKRICQYAEDAVNDGYSIILLTDRAVNSNHAAIPAMLAVGAVHHHLIRKGLRAKCDIVIETGDARETHHFATLVGYGANAVNPYLVIETIVELQRVKKLDPTLHPKELFDNYRKGVNGGLLKIFSKMGISTLQSYHGAQIFEALGISKSVVDKYFTGTVSRIQGLTIDDIAKEVLIRHRIGYSTREIPVQVLDVGGVYQWKQRGEKHLFNPETISLLQESTRNKDYEQFKKYTQAIDDQGDNAATLRSQLAFIKNPAGSIPLEEVEPIENILKRFATGAMSFGSISHEAHSTLAVAMNRIGAKSNSGEGGEDPIRFEKKENGDWERSAIKQVASGRFGVTSYYLTNADELQIKMAQGAKPGEGGQLPGDKVDDWIGATRHSTPGVGLISPPPHHDIYSIEDLAQLIYDLKNANRKGRVNVKLVSEAGVGTIASGVAKAKADVVLIAGFDGGTGASPMSSIRHTGLPWELGLAETHQTLLKNGLRNRIVVQSDGQMKTPRDLAVATLLGAEEWGVATAALVVEGCIMMRKCHKNTCPVGIATQNKTLRERFDGRVEDVVTFFQYMAEGLREVMAELGFRSIEDMVGQSHKLKVRDDIGHWKYKNLDLSPVLHVEQPRAEDGIFNQIKQQHNLEDVLDRKLIKLAKPALEEGKSVNAEFDILNTDRSVGTMLSNEISKVYKDQGLPQPMNVKFNGSAGQSLGAFLAKGVKFEVEGDANDYWGKGLSGGTLVLYPDTRSSIVAEDNIVVGNVCFYGATSGESYIRGMAGERFCVRNSGARVVVEGVGDHGCEYMTGGVAIILGSTGRNFAAGMSGGVAYVWDKSGDFESKLNQELVDLDPIEQEDKDLLHKMLTKHVEFTGSEVAKSFLSNFEVNLASLAKVMPRDYKAVLQKRKTEAQHAQMEEVEAV

SEQ ID NO: 1156 - protein, 1567 aa, Burkholderia xenovorans LB400
MNDHQQPIHPVPAAQGLYDPQNEHDACGVGFVAHIKGKKSHEIIEQGLKILENLDHRGAVGADPLMGDGAGILIQIPDGFYREEMAKQGVVLPPHGEYGVGMVFLPKEHASRLACEQELERTVKAEGQVVLGWRDVPVDHTMPISPTVKASEPLIRQIFIGRGKDIMVTDALERKLYVIRKTASHRIQALKLKHGKEYFVPSCSARTVVYKGLLLAGQVGVYYRDLQDERTVSALALVHQRFSTNTFPAWELAHPYRMIAHNGEINTVKGNVNWLNARTGAIASHVLGDDLPKLWPLIYPGQSDTASFDNCLELLVMAGYPLVHAMMMMIPEAWEQHTLMDDNRRAFYEYHAAMMEPWDGPAAIAFTDGRQIGATLDRNGLRPARYIVTDDDLVIMASEAGTLPIPESKIVKKWRLQPGKMFLIDMEHGRIIDDKELKDNLANAKPYKSWIDAVRIKLDEIEAKAEDVATERREAAALLDRQQAFGYTQEDLKFLMAPMAQAGEEAVGSMGNDSPLAVMSNKNKTLYHYFKQLFAQVTNPPIDPIRENMVMSLVSFVGPKPNLLDTNNINPPMRLEVSQPVLDFKDIAKIRAIDQYTGGKFSSYELNICYPVAWGKEGIEARLASLCAEAVDAVKSGYNMLIVSDRKTDRDNVAIPALLATAAIHTHLVQQGLRTSTGLVVETGSARETHHFALLAGYGAEAVHPYLAMETLGQLAAGLKGDLSPEKAVYNFTKAVGKGLQKVMSKMGISTYMSYTGAQIFEAVGLAEDLVQKYFKGTSSKVGGIGLFDVAEEAIRLHRDAFGDNPVLANMLDAGGEYAYRVRGEEHMWTPDAIAKLQHSARSNSYQTYKEYAHLINDQTRRHMTFRGLFEFKFDPTRAIPLDEVEPAKEIVKRFATGAMSLGSISTEAHATLAIAMNRIGGKSNTGEGGEDVNRYRNELRGIPIRNGDTMKSVIGDEVIVDIPLKDGDSLRSKIKQVASGRFGVTAEYLASADQIQIKMAQGAKPGEGGQLPGHKVSEYIGKLRYSVPGVGLISPPPHHDIYSIEDLAQLIHDLKNANSAASVSVKLVSESGVGTVAAGVAKAKADHVVIAGHDGGTGASPLSSVKHAGTPWELGLAETQQTLVLNQLRGRIRVQADGQMKTGRDVVIGALLGADEFGFATAPLVVEGCIMMRKCHLNTCPVGVATQDPVLRAKFQGQPEHVVNFFFFVAEEAREIMAQLGIRKFEDLIGHAELLDTKKGIEHWKAKGLDFSRVFYLPQVSAEVARKHVDVQDHGLDKALDHTLIEKAKAAIEKGEHVSFIQPVRNVNRTVGAMLSGTIAKKYGHDGLPDDTIHIQLKGTAGQSFGAFLAKGVTLDLVGDGNDYVGKGLSGGRIIIRPTNDFRGKSEENIICGNTVMYGAIEGEAFFRGVAGERFCVRNSGATAVVEGTGDHGCEYMTGGTVVVLGETGRNFAAGMSGGVAYVFDPDNTFAGKCNKSMVALDPVLQQAEQERTVDKGLWHTGTTDEALLKGLIERHFQFTGSPRAKALLENWDASRRQFVKVFPTEYKRALGEMAAKKANKEVLAA

SEQ ID NO: 1157 - protein, 252 aa, Cryptococcus neoformans var. neoformans JEC21
MAASLPIFHLLPNHHPAYPPSPTFSDPAFSAQYDSAFPANMDLSKSSQHPLNGYPFPAPPGTSAPQYSSRHIPSYPNLVPPNFSRGSYPAVQGGEDPTTFLDLDLSQPGPSTYHQQQPQPQSAAHHYHQPDHEYVQSDAEDDESLVQVKEEQDERQEGEEQDADVDNEEPLYVNAKQYHRILKRRMARARLEELNRLVRSRKPYLHESRHRHACSRPRGKGGRFLTAEEIETLKRQEAEKASKGEDEAQASA

SEQ ID NO: 1158 - protein, 539 aa, Nocardioides sp. JS614
MRKTTLAALPAAALGAVAAHDLLQRRHAILRNFPVVGHARYWLEALGPELRQYIVASNDEERPFSRDQRRWVYASAKLQNNYFGFGTDNDLEHSSGNVIVHHRTFGRSYPTHGAVGQEARLPSAKILGGPRGRRRAFRPASVVNVSGMSFGSLSGNAVEAINRGAAEAGCLHNTGEGAVSPYHRQGADLVFQIGTAYFGCRDDDGRFSLPRLKDLVESAPVRALEIKLSQGAKPGLGGVLPAAKVSAEIAATRGVPAGLDCLSPSRHAEFDDVDSLLDFVELLADETGLPVGIKSAVGDLGFWRDLTEEMAKGQRGVDFVTIDGGEGGTGASPLIFTDAVSLPFRLGFARVYAEFARRGLHEDVTFIGSGKLGLPDNAVVAFALGADLVNVAREAMLAVGCIQAQKCHTGECPTGVATQNPWLAHGLDPVEKSGRVANYVRTLRRDLLKVAETCGVEHPGLIGPHDVEILDNLSDGRLLDEVYGYDPGWGFPSARDRQEIAAIMSATEEPETRTEGPPETAEEGAPGTEHAGDEEPSGD

SEQ ID NO: 1159 - protein, 153 aa, Marinobacter sp. ELB17
MPKLTNPVPVRYTVYILCVVTFFMSLPLSLIYTPMAFVTALTGLLSMLGTYDLLQRRHTISRNYPIMANFRYLFEAIGPEIRQYFIQSDTDERPFSREQRTIVYQRAKDILDKRPFGSQLNMYEEGFEWMSHSLALAALLLKTRDAVKKSMYP

SEQ ID NO: 1160 - protein, 1574 aa, Mesorhizobium sp. BNC1
MTELTPSVSTGQVPAVQAGATAVKRTAYSGLPDVRGLYNPRNEHDACGVGFVAHLKGVKSHAIVQDGLAMLENLTHRGAVGADPLVGDGAGILVQIPDRFFREEMAREGLELPASGHYGVGYLFMPQDPALRAHIEEVIADACRSEGQTLLGFRDVPVDNSCLSKAPDITASEPVHRQVFVGRGDMIRDEEDFERRLYILRKVISGRIYEETGGRDNGFYIVSMSARTVVYKGMFLAYQLGAYYKDLKDPRFESALALVHQRFSTNTFPSWKLAHPYRMVAHNGEINTLRGNVNWMAARQASVDSELFGNDISKLWPISYEGQSDTACFDNALEFLYQGGYSLAHAMMMLIPEAWAGNKLMGPERKAFYEYHAALMEPWDGPAAVAFTDGHQIGATLDRNGLRPARYVVTDDDRVIMASEAGALAVPEEKIVKKWRLQPGRMLLIDLDQGRIISDDDLKAAIAAKHPYREWLGNTQLILEELKPVAPRALRQDVSMLDRQQAFGYSQEDVKMLLPPMATTGQEAIGSMGTDTPISAMSDKSKLLYTYFKQNFAQVTNPPIDPIREELVMSLVSFIGPRPNIFDLVGNSRRKRLEVRQPILTNGDLEKIRSIGHTEDRFDTKTLDVTYSALEGAAGMSGALDRLCERAEAAVAGGYNIIILSDRQIGPDRIAIPILLATAAVHHHLIRKGLRTSVGLVVESGEPREVHHFCCLAGYGAEAINPYLAFDTLLDMHAKGEFPPEVDANELVKRYIKSIGKGILKVMSKMGISTYQSYCGAQIFDAVGLKTDFVQRYFTGTATTVEGVGLEEISEETVARHRAAFSDDPVLRIGLDVGGEYNYRMRGEDHVWTPDAVATLQHAVRQGSWDTYQEYSNLINGEAARAKTIRGLFEIRTGAETGRKSVPLEEVEPAAEIVKRFSTGAMSFGSISREAHTTLARAMNAMGGKSNTGEGGEEPDRFLPLPDGRPNPERSAIKQVASGRFGVTTEYLVNSDMMQIKVAQGAKPGEGGQLPGHKVDATIAKTRHSTPGVGLISPPPHHDIYSIEDLAQLIFDLKNVNPAADVSVKLVSEVGVGTVAAGVAKARADHITIAGYDGGTGASPLTSIKHAGSPWEMGLAETHQTLVLNGLRSRIALQVDGGLRTGRDVIIGALLGADEFGFSTAPLIAAGCIMMRKCHLNTCPVGVATQDPVLRKRFKGTPEHVINYFFYVAEEVRQLLAEMGFRKLEEIIGQSELLEKRALIEHWKAKGLDFSRVFFKPEAPREAIRWTERQKHPIDDILDRKLIAAAQPALEKKEAVALEADICNTDRTTGAMLSGEVAKRYGHKGLKDDTITVKFTGTAGQSFGAFLARGISFELEGDANDYVGKGLSGGRIVIKPSGKAKIDPEKSIIVGNTVLYGAIEGECYFHGVAGERFAVRNSGAVAVVEGVGDHGCEYMTGGLVVVLGPTGRNFAAGMSGGVAYVLDEAGDFADRCNMAMVELEPVPEEDEILEKLHHHGGDLAHMGRVDVSGDMTRHDEERLAHLISNHYRYTGSERARAILDHWAEYRPKFRKVMPVEYRRALEEMERMRMGIAAE

SEQ ID NO: 1161 - protein, 271 aa, Zea mays
MLLPSSSSSSASASKGNSFGKTVNDHLRSTLSFDNKQPPFASQNFDYGQTIACISYPYNRSRSGDVWAAYESRTSTATVFRSQIAGGGSSTRIPLPLELAENEPIYVNPKQYHGILRRRQLRAKLEAQNKLVRARKPYLHESRHLHAMKRARGSGGRFLNTKQLQQSHTALTRSTTTSGTSSSGSTHLRLGGGAAAAGDRSVLAPKTMASQDSSKKAVSSALAFTATPMLRRDDGFLQHPSHLFSFSGHFGQASAQAGVHNGSQHRVPVMR

SEQ ID NO: 1162 - protein, 248 aa, Debaryomyces hansenii CBS767
MTSLHHPVNDSTGYYEDQVPAPTYYNPHTNNQPHQIIDNLDSAPNSNSSTSYYGGEQQINQEQPVPSNNYEGQASQTPTNSQFFQGSPDSQSHQSQHNSPNNNSTTIAQPPTEQPFYVNAKQYHRILKRRIARAKLEETLKIARTRKPYLHESRHKHAMRRPRGQGGRFLTAAEIAEKERLDKLKALEDKEKIDNFNGDQPQEEQSDSSKSSTTPTTEKTTSNAGNVASNEDDSIFQNLINENGSTED

SEQ ID NO: 1163 - protein, 2166 aa, Oryza sativa; identical to SEQ ID NO: 363

SEQ ID NO: 1164 - protein, 442 aa, Sinorhizobium meliloti 1021
MSYHNPYTPPRKSATFDDYTLAEIRRAAATGIYDIRGAGTKRKVPHFDDLLFLGASISRYPLEGYREKCDTSVVLGTRFAKKPIHLKIPITIAGMSFGALSGPAKEALGRGATASGTSTTTGDGGMTDEERGHSQTLVYQYLPSRYGMNPKDLRRADAIEVVVGQGAKPGGGGMLLGQKISDRVANMRNLPKGIDQRSACRHPDWTGPDDLEIKILELREITDWEKPIYVKVGGARPYYDTALAVKAGADVVVLDGMQGGTAATQDVFIENVGMPTLACIRPAVQALQDLGMHRKVQLVVSGGIRSGADVAKALALGADAVAIGTAALVAIGDNDPHWEEEYQKLGTTAGAYDDWHEGKDPAGITTQDPELMKRLDPVAAGRRLANYLKVMTLEAQTIARACGKNHLHNLEPEDLCALTMEAAAMAQVPLAGTSWYPGKGTF

SEQ ID NO: 1165 - protein, 2201 aa, Chlamydomonas reinhardtii
MPQPVGQLVLPSAPAQSTPLHAVTAFPRLAAGSMARVGVPRSSAAASRPRAAVRPRWLPLGPGLGNRLVLCDAHSAVPPAQGLFDPENDKDACGVGFVGELSKKPSRKCIKDALTMLNRMTHRGACGCEANTGDGAGILVGMPDGFFQAVLMEEQGLKLPPLGAYAAGQVFLPQDEEVRQKVKDICDRVATSLGHVSLTWRPVPTNNRSLGKSAVDTEPAIEQWFITSTGNRSSLEVEQQLYLLRKQIEYALRADGIKDDDAYFCSLSSKTIVYKGQLTPEQVRVYFKDLQREDFRSYMALVHSRFSTNTFPSWARAQPMRNLGHNGEINTLRGNANWMRAREGAMACLKLGLPKEVVEQMEPIVPASSSDSGAFDSVLELLTRAGGRDMPEAMMMLIPEAWQNDPLMSKEKKAFYRYHSAVMEPWDGPALVSFTDGRFLGATLDRNGLRPGRYYVTKSGRVIMASEVGVVDVDPEEVVRKGRLMPGNILLVDFDEHRLVEDKELKERYANRRSYSMWLDEHALTLQQLTASVPPEKRIPAPLPGSRPLDAGVQSLLKPLKVFGYTREALELLMGPMAKSGAEPLGSMGNDAALAALSRRNRLPFEYFKQLFAQVTNPAIDPFREAVVTSLRCFVGPEVDLTSEPGPQQCARLELPQPVLDIDEMEALKNIDHPGGWKTKVLDCTFPVSEGPAGLRKALDRLCQEAEAAVKAGQYAMICLSDRGYGPNRAPVPSLLATGAVHHHLVQLRLRSNVGLLVDSGEPREVHQFCLLVGYGADGVCPYLAFDALAAMQRDGKLPASTPLEELKSKFVKGLGVGILKTMAKMGISTLQSYKGAQIFEALGLAPEVVDVCFRGTPTRIGGSGWEQLGRDVLALHDAAFASERMPDGSADAKALPNAGDYHWRNAPDAERHMNDPEAIAKLQAATSGNDRELYKQYSALNTRLSRNVQLRGLLRFKTEAATPIPIDEVQPAKEIVKRFVTGAMSYGSISLETHTTLALAMNTLGGKSNSGEGGENPRRLEPLADGSKNPFRSAIKQVASGRFGVTAYYLTNADELQIKISQGAKPGEGGELPGDKVKGDIAVTRGSTAGVGLISPPPHHDIYSIEDLAQLIYDLKSSNPSARVSVKLVSENGVGVVASGVVKGHADHVLISGHDGGTGAAKWSSIKHAGLPWELGLAETHQTLVANDLRGRTTLQVDGQLRTGRDVAIACALGAEEFGFSTAPLITLGCIMMRKCHTNTCPVGVATQDPELRAKFAGEPEHVINYFFMVAEEVREHLASLGLRNLDELVGRADLMEMDREAIAEGGAKLAGIDLGRLLTPAASLRPGAAQRCVQKQDHGLDAGLDVHLVPLCKAALPDEPNAASEPVYIEMEVQNTHRAVGTTLSHEVTKRFGDVGLPDDSIHIKLTGHAGQSLGAWLCRGITLELEGDANDYVAKGLSGGVVAVYPPRISTFRAEDNVIVGNVALYGAVRGECFIRGIAAERFCVRNSGARAVVEGVGDHACEYMTGGVTVVLGPTGKNFGAGMSGGIAYVYDPNDKFKSLCNVDVANDLLPVESAEDVRALKSLIQRHLKFTGSDVARRILLSWDRSRVHFKKVFPHEYRRALGEAEALAKAEAAEAALLASSDAKVRTEGVGLSPKDAFEELKAMAAAAAGRPTIVAATAPAADKVRGFVNYDRKPLPYRAEAERIKDWDEVHDHSGTAAHAALLHTQAARCMECGTPFCHTQSTGCPLGNKIPEFNDLVHKGRWREALDRLLETNNFPEFTGRVCPAPCEGSCTLGIIEPPVSIKSIEATIIDKAFEEGWMVPRPPKLRTGKQVAVVGSGPAGLAAADQLNKMGHEVTVYERADRAGGLMMYGVPNMKAGKLDVVQRRVDLMAAEGVKFVMNAHVGGNVTAQDLVGKHDAVVLAAGATKPRDLPVPGREASGVHFAMEFLTANTKSLLDSDLADGKYISAKGKKVVVIGGGDTGTDCIATSLRHGATSIVNLELLDKPPATRAKNNPWPQWPRIFRVDYGHAEASHVYGADPRTYNVMTKRFIDDGKGNLKGVEIVTVKMEKDAKSGQFRPVEVPGSEKVLEADIVLLAMGFTGPEERLATSLGIKTDERSNFKATFGDFATSIPGVFAAGDCRRGQSLVVWAIREGRDAAASVDKYLQQKAGNGLLGQALDVQGGIFDVSGAPISVPQAGPPRDTSPKRPPVAV

SEQ ID NO: 1166 - protein, 1453 aa, Idiomarina baltica OS145
MQHRGGIGADGKTGDGCGLLLQIPEQFFREYAEQQGWNLGKKFAVGMVFFSRNADKREAARHLIEQELQKETLSIVGWRKVPVDDSVLGDAAKAAEPKIEQVLISAPTGWRKKDIERRLYMARRRVEQKVEQGVFSADELYICSMSSLLLVYKGLMMAGDLPRYYPDLANPALKTAICVFHQRFSTNTQPRWRLAQPFRFLAHNGEINTIRGNRQWAQARLYKFHSPLLPDLQQAAPLVGQSGSDSASLDNMLELLLAGGMDLFRAMRLLIPPAWQGDSTMSDDMRAFYEFNALHMEPWDGPAGVVMSNGRHVACSLDRNGLRPARYVLTKHGILTIASEVGIWDYDEQDVQEKGRLGPGQMMAVDTYTGRIWHNGEIEADLKSRHPYRQWLTEHRRRLVPFDRCSADKIGQRLYDDRTMQVFHKTFLYTREELQQVVAVLAKDGQEAVGSMGDDTPTAVLSQQPRLLYDYFRQQFAQVTNPAIDPIRERHVMSLETIIGREHNVFSEASGDADRVVFESPILMYTDLKQLRELDDKHYGHVTLSLAFKPTETSLQTALHKLVEAAIDVVKNQQRVMVILSDREFTKDQLVIPAPMAVGAVQQALVKAQLRCDSNIIVETGSARDPHHMAVLLGLGATAVYPFLAYESVEQLVQQGKLSMEVKQAVMNYRQGLNKGLLKILSKMGIASIAGYRGSSLFEAVGLNQDVLDACFANAPARINGSGFEDIQTDLQRTAQHAWLHRKPLSHGGLLKYVHGGEYHAYNPDVVTSLQAAVKSGKREDYAVYQRYVNERPVAHIRDLLKLNPNAAKPIALEQVEPKEALFPRFDTAAMSIGALSAEAHEALAEAMNQIGGHSNSGEGGEDPKRFNSPKNSRIKQVASGRFGVTPHYLVNADVIQIKVAQGAKPGEGGQLPGEKVTAEIAQLRFAVPGTTLISPPPHHDIYSIEDLAQLIFDLKQVNPTALVSVKLVSTPGIGTIATGVAKAYADLITVSGYDGGTGASPLTSVKYAGSPWELGLAEVHQALVENNLRHKIRLQVDGGLKTGLDVVKAAILGAESFGFGTAPMVALGCKYLRICHLNNCATGVATQDETLRKEFFRGLPERVVTLFEFIAEEVREWLAKLGLNRITDAIGRVDLLERLPGDTQRQQHIDLEPLLAAAGSRSEHPKYCVENNPPYDKGELNQRLMALTQTAIDERQGGSWSLAIRNDDRSVGATLSGYIAKRYGNQGMASHPIQLDFLGTAGQSFGAFNAGGLKLKLTGDANDYVGKGMAGGRIVVRPRPGVSFASQDATIMGNTCLYGATGGQLYAAGCAGERFAVRNSGATAVVEGIGDHGCEYMTGGIVVVLGECGINFGAGMTGGFAYLRDKHGDLHRRLNTELVEAVAVDKPIIKEHLRGLIHEHHEATQSEYSRMLLTEFDTRVNEFVIVKPKSADMASILGHRARSTAELRVQVM

SEQ ID NO: 1167 - protein, 522 aa, Bacillus anthracis str. Ames
MSETLLVIISILLLLLLLLIVFFIITFFIKKRTHHSILKLHPYLGRMRYLLEKIGPEFRQYWFDHDTDGKPFSRYDFQSVMFLAKYRSEILGFGSKRDFEASGYYIANTLFPVLTEELSVNVTPEREGKKYVIHKEGLFSRREKLTADTTNLWLYEEDDAIIIGENRKYPWKLYGMFGASATSYGSIGENYILASGFGAKMAGGSWINTGEGGVIPEHLHTGANIVAQIGPGLFGYRDEDGNFSMEKFMGKAKESNIKAFELKFGQGAKIRGGHLEGQKVNEKIAFVRNVREGETINSPNRFSFLNNAAETLYFIQQLQENGGKPVGMKIVIGQQEPLENLFKTMKELNIYPDFITIDGSEGGSGATYKSMADSMGMPLIPALLTFIDTANHYDIRDKFKVFAAGKLITPDKVAIALAIGADAVNSARGFMMASGCIMALQCNSGQCPSGVATTNPHYQKALDPYEKKWRVMNYIVSMRYSLFSLAAAAGVKSPRHLKRDHIVFKDEMGRVVPLSELFPTSK

SEQ ID NO: 1168 - protein, 283 aa, Oryza sativa
LSSSSPQEAAGDTSPQSLLPAATRPYGGCARDPCFSPSSPSYSYSSEGDTIATSADGPMRSAFTFDSTPSEPASRNIDYGGRSVFHPQIVGGGTSPRVPLPSLEIADDGPIYVNPKQYHGILRRRQLRARVEAQNKLVKTRKPYLHESRHRHAMKRARGTGGRFLNTKQLQLQQQSHTTSTKTTTDSQNSSGSVHLRLGGGAIGDQTPFPFKAMDSQANIKRAAASASTFTVTSAAQKDDAFFDRHGHHLSSFSRHFGQASAQGGVGSMHNGSQQRVPAMKMK

SEQ ID NO: 1169 - protein, 933 aa, Cryptococcus neoformans var. neoformans JEC21
MIGILSLNRCGLPHSVTGSRLSALKTKSTKINKLLCLDDNERRNTAHWATAAAWHMGDFDTMADHLAFHPRGTSKSLYKAIIDVHNEQYASAFHHINKAQSLSYDELQMQLGAGLQVALKSLAKTEFLVELQEAIQYKSQPELRPTILATWKTRFKRSHADANSWLKRLEIWTLACSPKTFELQDCFLKTAKLCESAGMHEAARSIIKRITPEVTLPESPEFIIKALLRLVTLWFRFGESQAVLVEVENQLNITDVEPWLSAIPQLIARLGTPQKDLQCTLIKLLRTISSHYPHAVIWPLLTATQTRKVEHQEAARVIMDYICTMADGTRLVDQAELVGRELIRTSISKWRGIIDGFLPRQDLMEIKWQDIPEIWEEDLRMLTNPETPDEHQFVLQYGEQLHLVDKTLIRYNSSRQLNLVNNAYSTLYRLYGEIEAQLNQWRLPGMKLHLASTAPRLLSLRDCILTVPGLYDPHIKLDDQAFIDGFQPVVHILSSKQLPRKLLIQSYLSDHTFLLKGNEDLRGDERIMQLFNLINTLLNHRSDAFSRNLHLLPYEVVPLSPSAGLVSWVSNTQQLQSMIQANRDKHKRNALTNRELGSLLGYDPDVFNPNNPKLDATAEMGKYDKLPLLIKVQRLKAALSHSNQSDIKDVLWQRSPSADIWIKRRTNFARTVGVASFVGYIIGLGDRHGSNILVDQLTWGALHIDFGDLFNVAQERSFLPEKVPFRLTRMMTNAFELASQGDLETPGSAGTFKQASFITMDVLRGSRSTLLAMLEAFLYDPLLSWTSSQNNPSGTTRLEEAVLREAPKVGASLEGLKSKAGQKDSSQGTQSQQGETKDLSIQEDSLPYEQLDNSLTSTCLRTDSYMARVSSTEMTNSKALQVLTQIERKLVGLHNTNSEQPFSVSKQVQELIKEATNLQNLSQGYVLGWIPHW

SEQ ID NO: 1170 - protein, 126 aa, Porphyra yezoensis
MADAGAGTGGGEEDASVRELDKYLPTANIARIMKKALPSSAKVAKDGKDTIQECVSEFVSFITSEASDKCQREKRKTINGDDILWAMSTLGFDKYIEPLKVYLSRYRETMSQEKEEEAAKNTEQPS

SEQ ID NO: 1171 - protein, 446 aa, Oryza sativa; identical to SEQ ID NO: 633

SEQ ID NO: 1172 - protein, 1510 aa, Geobacter sulfurreducens PCA
MADKTIDPSGLVPPERDACAIICHINKEARPTHGNVQRTIEALVKMGHRAGEINGEGDGCGVLTDIPRTIWREVLAGAGADPDLAEAPGFAVGHLLLPKEAIVADPQLQAAILGRFSAAGVQLLVERPGIVRSEVLSSRAREGEPLFWQVALLCPEKVAAPKLLFELQTSIERDFTVHVASLSTDVTAWKVHGAPELLPRYYPELRRRDFLSSVTIGHSRYSTNTLPTVLRAQPFSLLGHNGEINTIARLREEARMMGIPLFADGSDSQDLNRTLEGLMFRYGLTLFEAMEVVFPPIFSAMDGMGPELKAMYTWFRRFLKASAQGPAAIIARHRNLCIFSVDAMGLRPLWVGETDREIFASSELGVVPHEEILSDPKPLAPGEKVGVRIVAGQQVEIIGHPALRGEVYQSFRKRTNLASQEKWVTQGAALGDGLPSLAVRFGRSAKLHQDNLMSAFAWKSSDLSILREMAGSGSDPIASLGYDGPLASLSSRRQNLSDYFKEQVAVVTNPAIDREREAEHFSTRVYLGPRPLFRGPARLAVTLEVPLLTGGRRTGIEAADAAVAREFGTASLEALVAAFGEGKGRCRVIPCHMAKEECLGAALARLTREAVEAVSRGAAVLLLDDSDCFAPGKSFIDPFLVTAVLHKGLKEATDASGESLRRRTALVVRSGALRSLHDLIFALGMGADALCPYLMWEGAGDGPGMKNLFSVVAKGLEKVISTMGTHEIGGYGKYFASIGLCRHLAEIFETPNFCGSGQGGLTLERLEEENRSRSSVARSREKQPVPVQFRLYPKIWKMVGAVAKMEETYADLSRLIQQYEAENPLAIRHLLDLRYTQELTVDPDEVDTTVGDHNLPILISAMSFGSQGETPFRIYAEAAKRLNIICMNGEGGEIADMLGQYRKNRGQQIASGRFGVNMAFLNSADFLEIKVGQGAKPGEGGHLPGFKVTAKIAAARHATPGVSLISPSNNHDIYSIEDLAQIVEELRTANPWARMSVKVPAVAGIGTIALGVAKAGADIITISGYDGGTGAARKHAIKFVGLPAEIGVSEAHKALVAAGMRQKVEIWADGGARTGRDVVKLMLLGANRVGFGTMAMVVIGCTACRGCHLGTCHVGIATQIETAEEAEARGLKRFVPRVLENGVIYMSTFFRGMSREIRILTAKLGFRRTQDLVGRSDLLAQARGLDRLDLTELLRPARPEEHQPFEPEVRIIRKPLNYLTSLISGLVTDSFAKGEERVRYDDDSATSSDRAIGTHLAGALERGVAEGRVRTGQRALLQFRRDSIPGNGLAAFSIDRLTIRVEGGAQDGVGKSTSGGRIVILKGENREGRRVGGTVGKGLAYGAQGGTFLVQGDADSRACIRLSGADVVFGSRIREPVDDFRGDIASRANLKGFAFEYMTAGRVVVLGDPGPWICSGMTGGVVYCHLDGAMGFTREALRRRLAKGAGVEIRDVEEEDVASIGELLLKYHRELLHSHQEEEADAVEGIIADTRSCFVKIVPEKNIVTPRSTE

SEQ ID NO: 1173 - protein, 1579 aa, Bordetella bronchiseptica RB50
MPYTKSSDSCRPVAATPIDASRIGLPAPQGLYHPHNEHDACGVGFVAHIKGRKSHSIIQQGLKILENLDHRGAVGADKLMGDGAGILIQIPDALYRDELAQQGIVLPPPGEYGVAMVFLPKETASRLACEQELERSVRAEGQIVLGWRDVPVDVEMPMSPAVRGLEPVIRQLFIGRGADVMVPDALERKLYVIRKTASHAIQNMRLAHGKEYFVPSASVRTVVYKGLLLADQVGRYYRDLADPRTVSALALVHQRFSTNTFPAWPLAHPYRMIAHNGEINTVKGNFNWLRAREGMMQSAVLGDDLKKLYPIVYEGQSDTATFDNCLELLVNSGYSLAHAMMMMIPEAWEQHTQMDESRRAFYEYHAAMMEPWDGPAAVAFTDGRQIGATLDRNGLRPARYLITDDDMVIMASEAGTLSIPENRIVKKWRLQPGKMFLIDLEQGRIIDDGEIKLQLANSRPYRQWIERLQVKLESLPAPRTASPATQTAVPLLDRQQAFGWTQEDFKFILEPMAASGEEVIGSMGNDAPLAVLSNRSKPFYNYFRQLFAQVTNPPIDPIREQMVMSLVSFIGPKPNLLDINNVNPPLRLEVTQPVLDFAAMAQIRDIDQVTGKKFRSYELDITYPAAWGSEGIEARVAALCARAVDAVQSGYNILIVSDRLVDADRVAIPALLATSAVHQHLIRAGLRTNAGLVVETGSAREVHHFALLGGYGAEAIHPYLALESLGHLADPDKAIKNYIKAIGKGLNKVMSKMGISTYMSYCGAQIFEAVGLQRALVDKYFTGTASNIEGIGIFQVAEEALRMHHAAFGNDPVLANDLDAGGEYAFRIRGEEHMWTPDSIAKLQHASRSNNYRTYKEYAQIINDQSRRHMTLRGLFEFRFDPTRAIPLDDVEPAKEIVRRFATGAMSLGSISTEAHSVLAVAMNRIGGKSNTGEGGEDELRYRAEMRSGGSAIKDGDTLASVLGNDRVEADVALRAGDSLRSRIKQVASGRFGVSAEYLSSADQIQIKMAQGAKPGEGGQLPGHKVSEYIAKLRYSVPGVGLISPPPHHDIYSIEDLAQLIHDLKNVNARASVSVKLVSEVGVGTVAAGVAKAKADHVVIAGHDGGTGASPVSSIKHAGTPWELGLAETQQTLVLNRLRSRIRVQADGQMKTGRDVIIGALLGADEFGFATAPLVVEGCIMMRKCHLNTCPVGVATQDPELRKKFQGKPEHVVNYFFFVAEEVREIMAQLGIRRFDDLIGRTDLLDMRASVEHWKAQGLDFSRVFHRIVSDADVRQTEEQDHGLAGALDHQLIERSKPALERGEKVSFIVPVRNRNRTIGAMLSGAVAARYGHDGLPDDTIHIQCNGTAGQSFGAFLAHGITMDLVGEANDYVGKGLSGGRIVVRSPNDFRGFGPDHIIAGNTVLYGALSGEAFFNGVAGERFAVRNSGAATVVEGTGDHGCEYMTGGTVVVLGTTGRNFAAGMSGGVAYVWDPDRTFRERCNSAMVELEPVLPHAEQQSANEIESWHSAQRGGERSTDETILRRLVEDHFRYTGSFRAREILGDWEASRGKFVKVMPTEYRRALGELWRAANPQQMAA

SEQ ID NO: 1174 - protein, 1523 aa, Bacillus pumilus SAFR-032
MTYNQLPQPQGLYRPEFEHDACGIGLYAHLKGEATHSIVKKGLQMLCQLDHRGGQGSDPYTGDGAGLMVQLPDAFFRKSCKDFALPEKGRYGVGMVFFSKEDDEKTRQAIEQKINGFIKQEGQTLIGWRTVPVDAGKIGTVAAKSCPVVRQVFIGANDKITDRLSFERKLYVIRKQAENWGTEEEKQFYFVSLSSQTIVYKGLLTSDQVDAFYLDLQDETFVSAFSLVHSRFSTNTFPTWERAHPNRYLIHNGEINTLRGNINWMRAREQQFVSEAFGDDLDKILPVLNADGSDSSILDNAFEFFVLAGRTPAHTAMMLIPEPWTENTHMSKEKRAFYEYHSSLMEPWDGPTAISFTDGKQIGAILDRNGLRPARYYVTNDDHIIFSSEVGVIDTNEEDVKYKDRLEPGKMLLIDLEEGRIISDEEVKSTIANELPYQKWLDEEMVHVNRSEENSENSSIMDDLLTRQRAFHYTYEDIQKYLIPLLEEGKDPIGSMGSDTPLAVLSDRAQSLFSYFKQLFAQVTNPPIDAIREQLVTSTMTWLGAEGDILHPNEYSCRRIKLYTPVLTSGQFNGLKTIVHNAFKSKTIHTLFTDDLKRGLDAMFEEAEKAIREGVSLLILSDRDMTEQKVPIPPLLALSALHQHLVRQGLRTKVSLIVESGEVREVHHFAALIGYGADAIHPYLVYETYKQLIAEEAISFSFDEAVTKFGKSVTEGVVKVMSKVGISTVQSYRGAQIFEAVGISEDVIQAYFTGTASQLGGIDLETIAHEAKLRHEAGYQAATDQTLESGSDFQWRKNGEHHAFNPKTIHTLQWACRNEDYDLFKQYTKAADEERIGFLRNLFAFQPKQKPVRLEDVESAESIVRRFKTGAMSFGSLSKEAHEALAIAMNRIGGKSNSGEGGEDPARFTVDEHGDDRRSAIKQIASGRFGVKSHYLVNADELQIKMAQGAKPGEGGQLPGNKVYPWVADVRGSTPGVGLISPPPHHDIYSIEDLAQLIHDLKNANRDARISVKLVSKAGVGTIAAGVAKGTADVIVISGYDGGTGASPKTSIKHTGLPWELGLAEAHQTLVLNGLRERVVLETDGKLMTGRDVVMAAILGAEEYGFATAPLVVLGCVMMRACHLDTCPVGVATQNPELRKKFMGNPDHIVNFMMFIAEEVREILAELGFTSMDELIGRTDVLGVSERAKAHWKAGQLDLETLLYQPEGARTFRTPQNHKIDESLDMNEILPYVQEALNHQTPVDLSLNIRNINRVAGTITGSEVSKRYGEEGLPEDTITLRFTGSAGQSFGAFVPKGMSLYLTGDSNDYIGKGLSGGKIAVKTSDHFVQNGHENVIVGNVAFYGATSGKAFINGRAGERFAVRNSGVHVVVEGIGDHGCEYMTGGRVVILGDVGKNFGAGMSGGVAYIHTSDAKQFKRMCNMEMIMFEKLTDHDEEQEVKQLIQEHLHYTNSAKASALLENWAQEKDQFIKVIPRNYKMMLQSIEEQKQAGLSHEEAVMFAFEANTKPKNQETANGQKAALAH

SEQ ID NO: 1175 - protein, 2194 aa, Medicago sativa
MSNSLSLTFTALNNPQINAISNPNARLRPLARVTRCSATCVERKRWLGTKLRSGGGLERIQLWESGGLGRLPKLRVAVKSSFSAVPDKPMGLYDPAFDKDSCGVGFVAELNGQSSRKTVTDALEMLVRMTHRGACGCEANTGDGAGILVALPHGFYQEVVDFQLPPQGNYAVGMFFLPKSDSRRKESKNIFTKVAESLGHKVLGWRSVPTDNTGLGKSAQLTEPVIEQVFLTPSSDSKVDLEKQMYILRKLSMVSITSALNLQSDGITDFYICSLSSRTVIYKGQLTPAQLGEYYYADLGNERFTSYMALIHSRFSTNTFPSWDRAQPFRVLGHNGEINTLRGNVNWIKAREGLLKCKELGLSENDLKKFLPIVDANSSDSGCFDGVLEFLLHSGKSLPEAVMMMIPEAWQNDKNMDPQRKAFYEYYSALMEPWDGPALISFTDGHYLGATLDRNGLRPGRFYVTHSGRVIMASEVGVVDIPPEDVCRKGRLNPGMMLLVDFEKQIVVNDDALKEQYSLARPYGDWLEKQKIELKDIIDSVHESDIVPPTISGVPPLSNDDVDMENMGIQGLLAPLKAFGYSVESLEILLLPMAKDGVEALGSMGNDTPLAVMSNREKLTFEYFKQMFAQVTNPPIDPIREKIVTSMRCMVGPEGDLTETTEEQCHRLSLKGPLLSTKEMEAIKKMNYRGWRSKVIDITYSKERGTKGLEEALDRICTEAHNAISEGYTTLVLSDRAFSKKHVAVSSLLAVGAVHQHLVKTLERTRVALMVESAEPREVHHFCTLVGFGADAICPYLAIEAIWRLQVDGKIPPKASGDFNSKDELVKKYFKASTYGMMKVLAKMGISTLASYKGAQIFEALGLSSEVIEKCFAGTPSRVEGATFEMLAQDALHLHELAFPSRIFSPGSAEAVALPNPGDYHWRKGGEVHLNDPLAIAKLQEAARTNSVDAYKQYSKTIHELNKACNLRGLLKFKDAASKVPISEVEPASEIVKRFCTGAMSYGSISLEAHTALATAMNTIGGKSNTGEGGEQPSRMEPLADGSRNPKRSAIKQVASGRFGVSSYYLTNADELQIKMAQGAKPGEGGELPGHKVIGDIAITRNSTAGVGLISPPPHHDIYSIEDLAQLIHDLKNANPAARISVKLVSEAGVGVIASGVVKGHAEHVLISGHDGGTGASRWTGIKSAGLPWELGLAETHQTLVANDLRGRTTLQTDGQLKTGRDVAIAALLGAEEYGFSTAPLITLGCIMMRKCHKNTCPVGIATQDPVLREKFAGEPEHVINFFFMVAEEMREIMSQLGFRTVNEMVGRSDMLEVDKEVVKGNAKLENIDLSLLLRPAAELRPEAAQYCVQKQDHGLDMALDNKLISLSNAALEKGLPVYIETPICNTNRAVGTMLSHEVTKRYNLAGLPADTIHIQFTGSAGQSFGAFLCPGITLELEGDSNDYIGKGLSGGKVVVYPPKGSNFDPKDNILIGNVALYGATRGEAYFNGMAAERFCVRNSGALAVVEGVGDHGCEYMTGGTVVVLGKTGRNFAAGMSGGIAYVLDVDGTFQSRCNLELVDLDKVEEEEDIITLRMLIQQHQRHTNSLLAKEVLVDFENLLPKFVKVFPREYKRVLASMKSDAASKDAVERAAEDVDEQDDEAQAVEKDAFEELKKLATASLNEKPSEAPKRPSQVTDAVKHRGFVAYEREGVQYRDPNVRLNDWNEVMMETKPGPLLKTQSARCMDCGTPFCHQENSGCPLGNKIPEFNELVYQNRWQEALERLLETNNFPEFTGRVCPAPCEGSCVLGIIENPVSIKNIECAIIDKAFEEGWMIPRPPVKRTGKRVAIVGSGPSGLAAADQLNKMGHIVTVFERADRIGGLMMYGVPNMKTDKVDIVQRRVNLMAEEGINFVVNANIGLDPLYSLERLREENDAIVLAVGATKPRDLPVPGRELSGVHFAMEFLHANTKSLLDSNLQDGNYISAKGKKVVVIGGGDTGTDCIGTSIRHGCTAVVNLELLPQPPPTRAPGNPWPQWPRIFRVDYGHQEAETKFGKDPRTYEVLTKRFVGDENGVVKGLEVVRVCWEKDETGKFQFKEIEGSEEIIEADLVLLAMGFLGPEATIAEKLGVERDNRSNFKADYGRFSTSVDGVFAAGDCRRGQSLVVWAISEGRQAAAQVDSYLTNEDHGIDGNQDEFVKRQQDLNKKHSKHTVMT

SEQ ID NO: 1176 - protein, 1486 aa, Klebsiella aerogenes
MLYDKSLERDNCGFGLIAHIEGEPSHKVVRTAIHALARMQHRGAILADGKTGDGCGLLLQKPDRFFRIVAEERGWRLAKNYAVGMLFLNKDPELAKAARRIVEEELQLETLSIVGWRDVPTNEGVLGEIALSSLPRIEQIFVNAPAGWRPRDMERRLFIARRRIEKRLQEDKDFYVCSLSNLVNIYKGLCMPADLPRFYLDLADLRLESAICLFHQRFSTNTVPRWPLAQPFRYLAHNGEINTITGNRQWARARTYKFQTPLIPDLHDAAPFVNETGSDSSSMDNMLELLLAGGMDIVRAMRLLVPPAWQNNPDMDPELRSFFDFNSMHMEPWDGPAGIVMSDGRYAACNLDRNGLRPARYVITKDKLITCASEVGIWDYQPDEVVEKGRVGPGELMVIDTRAGRILHSAETDDDLKSRHPYKEWMEKNVRRLVPFEDLPDEEVGSRQLDDDTLASYQKQFNYSAEELDSVLRVLGENGQEAVGSMGDDTPFAVLSSQPRIIYDYFRQQFAQVTNPPIDPLREAHVMSLATSIGREMNVFCEAEGQAHRLSFKSPILLYSDFKQLTTMEEEHYRADVLDITFNPAEASLSETVKALCDKAEQMVRDGTVLLVLSDRNIAKDRLPVPAPMAVGAIQTRLVDKSLRCDANIIVETASARDPHHFAVLLGFGATAIYPYLAYETLAKLVDSKAIDKPYRAVMLNYRNGINKGLYKIMSKMGISTIASYRCSKLFEAVGLHRDVSDLCFQGVVSRIGGASFDDFQQDLLNLSKRAWLARKPLAQGGLLKYVHGGEYHAYNPDVVRTLQQAVQSGEYSDYQQYAKLVNERPAATLRDLLALNPGEDAISIDEVEPAKELFKRFDTAAMSIGALSPEAHESLAEAMNSIGGFSNSGEGGEDPARYGTNKVSRIKQVASGRFGVTPAYLVNADVIQIKVAQGAKPGEGGQLPGDKVTPYIAKLRYSVPGVTLISPPPHHDIYSIEDLAQLIFDLKQVNPKAMISVKLVSEPGVGTIATGVAKAYADLITIAGYDGGTGASPLSSVKYAGCPWELGLVETQQALVANGLRHKIRLQVDGGLKTGLDIIKAAILGAESFGFGTGPMVALGCKYLRICHLNNCATGVATQDDKLRKNHYHGLPFKVTNYFEFIARETRELMAQLGVKRLVDLIGRTDLLKELDGFTAKQQKLDLGKLLETAEPHPGKALYCTENNPPFDNGVLNAQLLQQAKPYVDEKQSKTFWFDIRNTDRSVGASLSGYIAQTHGDQGLAGDPIVAHFSGTAGQSFGVWNAGGVELHLTGDANDYVGKGMAGGLLAIRPPVGSAFRSHEASIIGNTCLYGATGGRLYAAGRAGERFAVRNSGAITVVEGIGDNGCEYMTGGIVCVLGKTGVNFGAGMTGGFAYVLDEDGDFRKRVNPELVEVLDVDSLAIHEEHLRGLITEHVQLTGSQRGEEILANWPAFSAKFALVKPKSSDVKALLGHRSRSAAELRVQAQ

SEQ ID NO: 1177 - protein, 208 aa, Oryza sativa Indica Group
MPDSDNESGGPSNAGEYASAREQDRFLPIANVSRIMKRALPANAKISKDAKETVQECVSEFISFITGEASDKCQREKRKTINGDDLLWAMTTLGFEDYIDPLKLYLHKFRELEGEKAIGAAGSGGGGAASSGGSGSGSGSHHHQDASRNNGGYGMYGGGGGMIMMMGQPMYGSPPASSAGYAQPPPPHHHHHQMVMGGKVYFGMVLMR

SEQ ID NO: 1178 - protein, 1531 aa, Zymomonas mobilis subsp. mobilis ZM4
MSIKSSADSFDVFAERERLAKEGMYRPEFETDACGVGLVAATDGKASRRVVTAAIDALKAVWHRGAVDADGKTGDGAGIHVDLPASFFDDAIAHAGHAPLPNRLAVGMVFLPRTDLSAQETCRTIVESEIIDFGYRIYGWRQVPVDISVIGEKAMRTRPEIEQIMIAGPHPDEMSAWNFEKNLYLIRRRIEKKVIAAQTNKIISARCLVRSIVYKGLYLAEALPTCYPDLQDERFVSRVAVFHQRYSTNTFPKWWLAQPFRMLANNGEINTIRGNRNWMKSHEIKMASLAFGENSEDIKPLIPAGASDTAALDAVFETICRAGRHAPAAKLMLIPEAWQHNPDMPKAHRDMYSYLASVMEPWDGPAALAITDGSWAVAGVDRNALRPLRTVRTKDNLLIVGSESGMVVVPENNVIAKGQLGPGQMIAVNLDEGRFYEDRPLKDLIASERPYGEWIKDFKKLSDLDLKSYDPVIPYDRDELIKRQVSAGLTLEDMDLVLSPQAETGKEAMGSMGDDTPLAVLTEKPRLTSQFFRQNFSQVTNPPIDSLRETQVMALTTRFGNLGNILDSENKQKQILTLDTPYLKTSEWCQLKDHFGEQAVEIDCTFSPDDGADALRHAISNLRTQAENAVRSGHSELFLTDEHIGSDRVAVAMILATAAVHTHLIRKGLRSYASINVRASECIDPHYVAVLIGVGATTVNAYLAESAIAYRHSQGLFGTMTLEQCLDNHHHAICNGLLKIMAKMGIAVVSSYRGAYNFEAVGLSRALVNDLFPGMTAKISGEGYASLQRSALLRHQNAFAANKKALDVGGFYRQRASGDSHAYTAELMRKLQKAVSSDSYTTYLEFSKEVHQLPPVYLRDLLGFNWSKQPIPIEEVEPITEIRRRFITPGMPLGALSPEAHETLAIAMNRIGAKSVSGEGGEAPERFHPYENGDNANSPIKQVASGRFGVTAAYLGACEEIEIKVAQGAKPGEGGQLPGFKVTDMIAKLRHSTPGVTLISPPPHHDIYSIEDLAQLIYDLKQINPNARVGVKLVSSAGIGTIAAGVAKAHADSIMISGNVGGTGASPLTSIKYAGTPWEMGLSEANQVLTLNGLRHRVKLRTDGGLKTGRDIVIAAILGAEEFGIGTLSLIAMGCLMVRQCHSNKCPVGICTQDKAMRQKFIGTPERVINLMTFIAEEVREILAKLGVRSLKEIIGQTDLLSQVNRGADHLDDLDLNPVLAKVDANTEARYFQIDGFRNPVPDSLDAQMLQDAQAVFTRREKTQLTYSVRNTQRAIGTRFSAEITRNFGMDSLADGHVHVRLRGSAGQSLGAFSVKGLTLEVFGDANDYVGKGLSGATIIVRPTVSSPIDGHTNTIIGNTVLYGATAGKLFAAGRAGERFAVRNSGAETVIEECGANGCEYMTGGLAVILGSVGPNFGAGMTGGMAFVLDEDNSFERHANPDNIIWQRLASSHWETVLRSMIADHAVKTDSPWAHRVLDEWDLWSQKFWQICPKEMLGRLEYPLDDKKNTEDQKEKGKAGKPELKEQEGAF

SEQ ID NO: 1179 - protein, 539 aa, Pseudomonas putida KT2440
MSLSLLSRYAFFAACVLFTLASLPFSHHEWLWPFTLTTGILSLIGLFDLLQQRHAVRRNYPILGNIRYLVEAIRPEIRQYLLESDSDALPFSRAQRSLVYARAKNEASDKPFGTLIDVYESGFEFIGHSMRPAPLADPTSFRVIVGGPQCGQPYSASIFNISAMSFGSLSANAIRALNQGAKLGNFHHDTGEGSISPYHREHGGDLVWELGSGYFGCRTPDGRFDPERFAAQARSPQVRMIEIKMSQGAKPGHGGILPKHKVTQEIAETRGVLMGEDCISPSRHSAFSTPIEMMQFIAQLRELSGGKPVGFKFCLGHPWEFMGIAKAMLETGILPDFIVVDGKEGGTGAAPVEFTDHIGVPLREGLLFVHNTLVGLNLRDKIKLGASGKIVSAFDIASVLAIGADWANSARGFMFAIGCIQSQSCHTNKCPTGVATQDPLRQRALVVPDKAQRVLNFHHNTLRALAEMLAAAGLEHPAQLEAKHLVRRISATEIKLFSQMHVFLKPGELLTGEVNGQFYSRMWQLARADSFEPHSEVAA

SEQ ID NO: 1180 - protein, 126 aa, Debaryomyces hansenii CBS767
MSKISDTALHNSDYEIKEQDRFLPIANVGRVMKKALPPHAKLSKESKECIQECVSEFISFITSHASDRGRLEKRKTLNGEDILWSMYILGFENYSETLKIYLAKYRQVCIFIHSVFIREAITKTLV

SEQ ID NO: 1181 - protein, 887 aa, Oryza sativa Indica Group
MPHHRHLTPSPSHEEHETPNPSLTPPPMQLAALASDEPPPPPPEQSPRRIVVAHRLPLNATPDPGSPFGFAFSLSADAHALQLSHGLGLAHVVFVGTLPAEAARALRRSDELDRHLLGCFSCLPVFLPPRAHDEFYAGFCKHYLWPRLQYLLPQRAGGQRIPPLRAPGCTDPTRRRTGASPRASSTCALPGRRRARVRARLPLWLLPSFLRRGCPRCRVGFFLHSPFPSAEVFRSIPVREDLLRALLNADLVGFHTYDYARHFLSACSRLLGLAYTSRHGRVGINYHGRTVLIKILSVGVDMGLLRTAMASPEAAAKFREITEVEYKGRVLMVGVDDVDIFKGVRLKLLAMESLLETYPALRGRVVLVQIHNPTRCGGRDVERVRGETAKIQARINARFGGPGYQPVVVVDRAVPMAEKVAYYAAAECCVVSAVRDGLNRIPYFYTVCREEGPVDAKGAAGGQPRNSAIVLSEFVGCSPSLSGAIRVNPWNIEAMAEAMHGALTMNVAEKQARHVKHYTYLKLHDVIVWARSFAADLQLACKDRSTMRTIGMGIGPSYRVVAVDAAFKKLPPELVNLSYRAAAAAAAAGGGGRLILLDYDGTLEPTGAFDNAPSDAVIVILDELCSDPNNVVFIVSGRSKDDLERWLAPCANLGIAAEHGYFIRWSRDAPWETMASKQLAAAMEWKAAAKNVMRHYAEATDGSYIEAKETGMVWRYEDADPRLAPLQAKELLDHLATVLASEPVAVRSGYKIVEVIPQGVSKGVAAECIVSAMAARRGGAPGFVMCVGDDRSDEDMFGALASLCGGGKNGGASSSTTTTTALLAAAQVFACTVGNKPSMASYYLNDKEEVVDMLHGLAFSSPSSRLRAAAAPRRPADFDIKSLLRCE

SEQ ID NO: 1182 - protein, 255 aa, Solanum chacoense
MASPREENVYMAKLAEQAERYEEMVEFMEKVVAALDGEELTVEERNLLSVAYKNVIGARRASWRIISSIEQKEESRGNEDHVASIKKYRSQIENELTSICNGILKLLDSKLIGSAATGDSKVFYLKMKGDYYRYLAEFKTGTERKEAAENTLSAYKSAQDIANGELAPTHPIRLGLALNFSVFYYEILNSPDRACNLAKQAFDEAIAELDTLGEESYKDSTLIMQLLRDNLTLWTSDMQDDGTDEIKEPSKADNE

SEQ ID NO: 1183 - protein, 528 aa, Francisella tularensis subsp. holarctica; identical to SEQ ID NO: 246

SEQ ID NO: 1184 - protein, 1578 aa, Bradyrhizobium sp. ORS278; identical to SEQ ID NO: 252

SEQ ID NO: 1185 - protein, 112 aa, Arabidopsis thaliana
  misc_feature (3)..(3): Xaa can be any naturally occurring amino acid
  misc_feature (11)..(11): Xaa can be any naturally occurring amino acid
  misc_feature (13)..(13): Xaa can be any naturally occurring amino acid
  misc_feature (25)..(28): Xaa can be any naturally occurring amino acid
THXTFAIPMNXLXGKFKSKEGGQKXXXXKPLTNPDNNYTSTLPHNKILLNGDTKTNATNQTASGHLYNTPTILPNTNQLQIKVPQKTKPHQSLPTNKKKNSPHIFLYLQNLN

SEQ ID NO: 1186 - protein, 1560 aa, Synechococcus sp. CC9311; identical to SEQ ID NO: 255

SEQ ID NO: 1187 - protein, 1523 aa, Prochlorococcus marinus str. MIT 9301; identical to SEQ ID NO: 257

SEQ ID NO: 1188 - protein, 165 aa, Cucumis melo
MELPVEEDNDDEFSPLNLIRYHLLQDSHSFSTLRDFGFKLEFEDFEYVKPSEEEEEEPPIQSPKRHPERQSPRSSSPDGGRRYRGVRRRPWGKFAAEIRDPSRKGSRVWLGTFDSDVDAARAYDSAAFKIRGRKAKLNFPLDAGKSDPPPGNGRKKKRRETNLNA

SEQ ID NO: 1189 - protein, 526 aa, Burkholderia mallei ATCC 23344; identical to SEQ ID NO: 259

SEQ ID NO: 1190 - protein, 860 aa, Arabidopsis thaliana
MVSRSYSNLLELASGDSPTFGRMNRQIPRIMAVAGIMSNIDNDSKDTDLSPKDRIIIVANELPIRAQRRVDGNGSGSSSSSTCCSKGWNFSWDENSLLLQLKDGLGDEAIEVIYVGCLKEEIPLNEQEEVYQILLESFKCVPTFLPLDLYTRYYHGFCKQQLWPLFHYMLPLSPDLGGRFDRTLWQAYVSVNKIFADRIMEVINPEDDFVWIHDYHLMVLPTFLRKRFNRVKLGFFLHSPFPSSEIYKTLPIREELLRALLNSDLIGFHTFDYARHFLSCCSRMLGLTYESKRGYIGLEYYGRTVSIKILPVGIHMGQLQSVLSLPETERKVGELIERYGRKGRTMLLGVDDMDIFKGITLKLLAMEQLLMQHPEWQGKVVLVQIANPARGKGKDVKEMQAETYSTVKRINETFGRPGYDPIVLIDAPLKFYERVAYYVVAECCLVTAVRDGMNLIPYEYIVSRQGNEKLDKILKLEANNRNKKSMLVVSEFIGCSPSLSGAIRVNPWNVDAVADAMDSALEVAEPEKQLRHEKHYKYVSTHDVGYWARSFLQDLERSCGEHGRRRCWGIGFGLSFRVVALDQSFRKLSMEHIVSAYKRTKTRAILLDYDDTLMPQGSIDKRPSSKSIDILNTLCRDKGNLVFIVSAKSRETLSDWFSPCEKLGIAAEHGYFLRLRKAVEWENCVAAVDCSWKQIAEPVMELYTETTDGSTIEDKETALVWSYEDADPDFGSCQAKELLDHLESVLANEPVTVKRGQNYVEVKPQGVSKGLIARRMLSMMQERGTLPEFVLCIGDDRSDEDMFEVICSSTEGPSIAPRAEIFACTVGQKPSKAKYYLDDTTEIVRLMHGLASVTDQITPV

SEQ ID NO: 1191 - protein, 1523 aa, Bifidobacterium longum NCC2705; identical to SEQ ID NO: 262

SEQ ID NO: 1192 - protein, 78 aa, Triticum aestivum
GPDAGTGACPMRSIKHGERACELALTAPLQTLMQNGLIHRVDLRVNSGLKSRLDVLMAADMGAYEYGSGTATMIATGR

SEQ ID NO: 1193 - protein, 1536 aa, Kineococcus radiotolerans SRS30216; identical to SEQ ID NO: 265

SEQ ID NO: 1194 - protein, 1524 aa, Bacillus clausii KSM-K16; identical to SEQ ID NO: 267

SEQ ID NO: 1195 - protein, 1444 aa, Arabidopsis thaliana
MDYDDARGERPRLLVVANRLPVSAKRTGENSWSLEMSPGGLVSGLLGITSQFDTKWVGWPGVDVHDEIEKNALTESLAEMKCIPVFLNGVFDQYYNGYCNGILWPILHHMGLPQEDQHDTNQTFETQYDAYKKANRMFLDVIIDNYEEGDIVWCHDYHLMFLPQYLKEYNNKIKVGWFLHSPFPSSEVYKTLPSRSELLRAILAADLLGFHTYDFARHFLSTCTRILGVEGTHEGVVYQGRVTRVAVFPIGIDPDRFIRTCKLPEVTQQMNELQEKFAGKKVILGVDRLDMIKGIPQKYLAFEKFLEENPYWRDKVVLVQIAVPTRNDVPEYRKLKSQVHGLVGRINGRFGSVSSLPIHHLDCSVDFNYLCAIYAIADVMLVTSLRDGMNLVSYEFVACQEAKKGVLVLSEFAGAGQSLGVGALIVNPWDVTEVSSAIKEALNMPAEERETRHRSNFQYVCTHSAEKWGLDFMSELNGIIPESEMQMRKIPLQLPEQDVIQQYSQSNNRLIILGFFGTLAEPMNSGTKEMDLKLNPELKGTLKALCNDPKTTVVVLSRSGKNILNKNFGESNIWLAAENGMFEKQTTGEWVTNMPQNVNLDWVDGVKNVFKYFTDRTPRSYFEASETSLVWNYEYADVEFGRAQARDLLQYLWAGPISNASVDVVRGNHSVEVHAIGETKGAAIGRILGEIVHRKSMTTPIDFVFCSGYFLEKLMGYDNVCGERQTLLVVANRLPASAKRTGEHSWSLEMSPGGKFNLLVEKDAVSKSLAEMKCIPVFLNEVFDQYYNGYSNGILWPILHHMGLPQEYDHDTIKTFETQYDAYKKANRMFLDVIKENYKDGDIVWCQDYHLMFLPQYLKEYNNKIKVGWFLHSPFPSSEIYKTLPSRSELLRSVLAADLISFHTYDFARHFVNTCTRILGVEGTHEGVVYQGRVTRVVVLPMGIYPNRFIKTCKLPEVIQQMNELKDRFSGKKVILGVDRLDMIKGIPQKYLGFEKFLDENPNWRDKIVLVQIAVPTRNEVPEYQKLKNQVHRLVGRINGRFGSVSSLPIHHMDCSVDSNYLCALYAISDVMLVTSLRDGLNLVSHEFVACQEAKRGVLILSEFAGAGQSLGAGALLVNPWNVTEVSSAIKKALNMPYEERETRHRVNFKYVKTHSAEKWGFDFLSELNDAFDESELQIRKIPHELPQQDVIQRYSLSNNRLIILNFGEYKIWLAAENGMFLKHTTEEWVTNMPQNMNLDWVDGLKNVFKYFTDRTPRSFFEASKTSLVWNYEYADVEFGRAQARDLLQYLWAGPISNASAEVVRGKYSVEVHAIGVTKEPEIGHILGEIVHKKAMTTPIDYVFCSGYFLEKDEDIYTFFESEILSPKLSHETRSKSSSSNHSLEKKVSLNVLDLKQENYFSTAIGQARTKARYVVDSSHNVVNLLHKLAVANTTTTSVKKPNV

SEQ ID NO: 1196 - protein, 1524 aa, Microcystis aeruginosa PCC 7806; identical to SEQ ID NO: 273

SEQ ID NO: 1197 - protein, 2126 aa, Magnaporthe grisea 70-15; identical to SEQ ID NO: 276

SEQ ID NO: 1198 - protein, 1475 aa, Prochlorococcus marinus str. NATL1A; identical to SEQ ID NO: 282

SEQ ID NO: 1199 - protein, 1486 aa, Salmonella enterica subsp. enterica serovar Paratyphi A str.; identical to SEQ ID NO: 285

SEQ ID NO: 1200 - protein, 62 aa, Physcomitrella patens subsp. patens
QHFRGVRRRPWGKFPAEIRDPAKRGARVWLGTFDTAEEAAAAYDHAALRMRKSRALLNFPLK

SEQ ID NO: 1201 - protein, 184 aa, Glycine max
YLFQSVDSTELTVLYSIADAALITSIRDGMNLVCQEYAACKNPLNSEQSGVLILSEFCGAAQSLSGAVMVNPWNTADLADAINMALTLTPQERQDRLRGVIKHIHTHTAAHWGKAFLKEFQRAVSNSEKITRVLPIPCPEVAQAFMRSKRRLLMFAYDGTLVPYSSIPSLCRPPSNLLKWLAKL

SEQ ID NO: 1202 - protein, 478 aa, Mycobacterium tuberculosis CDC1551
MVVANRLPVDLERLPDGSTTWKRSPGGLVTALEPVLRRRRGAWVGWPGVNDDGAEPDLHVLDGPIIQDELELHPVRLSTTDIAQYYEGFSNATLWPLYHDVIVKPLYHREWWDRYVDVNQRFAEAASRAAAHGATVWVQDYQLQLVPKMLRMLRPDLTIGFFLHIPFPPVELFMQMPWRTEIIQGLLGADLVGFHLPGGAQNFLILSRRLVGTDTSRGTVGVRSRFGAAVLGSRTIRVGAFPISVDSGALDHAARDRNIRRRAREIRTELGNPRKILLGVDRLDYTKGIDVRLKAFSELLAEGRVKRDDTVVVQLATPSRERVESYQTLRNDIERQVGHINGEYGEVGHPVVHYLHRPAPRDELIAFFVASDVMLVTPLRDGMNLVAKEYVACRSDLGGALVLSEFTGAAAELRHAYLVNPHDLEGVKDGIEEALNQTEEAGRRRMRSLRRQVLAHDVDRWAQSFLDALAGAHPRGQG

SEQ ID NO: 1203 - protein, 727 aa, uncultured archaeon GZfos34H9
MRRLLIISNRLPVSVERRKNEFRFSSSVGGLATGLNALHQKYKSVWVGWPGIAINREETDYVESKLSEFNCYPVFLSQGEVEKYYYGFSNKTLWPLFHYFPQYAKYEHSEWSAYEHVNRKFCERVAEIAKPEDIIWIHDYHLMLLPGLIRERFPDATIGFFLHIPFPSADLFRLIPWRRRILEGVLGADLIGFHIYDYAHNFLCSVLRLLGYEHEFGKFAIGDRIVQVDVHPMGIEVQKFVRATSGRGIKREVARLRSRFKNCKIIFSMDRLDYTKGIPERLYAFEHFLETHPEWHEKVVFILKIAPSRTKVGQYRVLKQEIDELVGRINGKYGTPEWVPISYFYRSLPFQTIIAFYLAADVALLTSMRDGMNLIAKEFVASRVDGKGVLILSEMAGAARELGEALVVNSNNKEEVAEALNEALRMPDEEQKSRNEEMQKRLSHYDVFHWGSGFIRSVLETKRLQEELNMKKLSEKIREELKNSYKAADKRLLLLDYDGTLVPFADKPERAKPDRELLDLFRALSEPPENTVVIISGRDKETLERWFGDTGVCLVAEHGVWLREEEGEWKEIELLKEDWKEKIIPILDLFVDRAPGSFIEEKRFSLVWHYRKVDPELGELRAKELTDQLIDLTACTELQVMKGNKVVEVKDGRVNKGIAASHWLTKGFGFILAVGDDLTDEDMFKVLPEDAYSVKIGFTPSEARFYLGSPKEVRALLDEMEMVEVYK

SEQ ID NO: 1204 - protein, 317 aa, Oryza sativa Indica Group
MARSMLRNHPEASVLDTIRQHLLEEPRGGGGGEAAEASFGSLVADMWSDSLPFRDDDADDMVVFGAMRDAFSCGWLPDGVFAEVKPEPLLSPDSSSYDGSSCCFGFADVSEPVTPSDAASGAAEAAAAAAAATAEHGKEEEAAAAVARGKHYRGVRQRPWGKFAAEIRDPAKNGARVWLGTFDTAEDAALAYDRAAYRMRGSRALLNFPLRIGSEIAAAAAAAAAAAAGDKRPSPEPATSESSFSSSSSCTTTTTSSSTSSSGSPKRRKRGEAAAASMSMPLVPPPSQLNWPVQAWYPAAAPVEQVAITPRVEQLVI

SEQ ID NO: 1205 - protein, 470 aa, Rhodobacter sphaeroides 2.4.1
MSRLVVVSNRVPLPDENGNPPPGGLAVAVHAALRKNGGIWMGWSGRSTGEEEPQGLTTLEQDKISYVLTDLSQADLDEYYNGFANRVLWPIFHCRLDLAEYARQEMAGYFRVNRLFADRLVPMLEPDDVIWVHDYHLIPLAQELRKRGVRNRIGFFLHIPWPPADILTALPVYEIIMRGLAAYDLVGFQTDYDLDNFVGCLRREGWGDWSTPGWLRAFDKEVAAAAFPIGIETGDFARLAAKTDGLDLVTDMQQSLHGSSLIIGVDRLDYSKGIAARIDAFERYLMRNPDQAGKVTLLQVAPHSRSDVPEYLEMQGQVESHCGRVNGAHGTIEWVPIRYVNQSLTRPVLAGLYRLAKVGLVTPLRDGMNLVAKEYVASQDPADPGVLILSRFAGAARELDGAIFINPYDTEQTAGAIGRALSMPLDERIARWRRMMDHLESHDVLWWCRTFLAALNEAPEDNGALTRESD

SEQ ID NO: 1206 - protein, 176 aa, Fagus sylvatica
KLELHRGGGRSRTSGSPGLQEFGTRSELSKICDGILGLLETHLIPSASSAESKVFYLKMKGDYHRYLAEFKTGAERKEAAESTLLAYKSAQDIALADLPPTHPIRLGLALNFSVFYYEILNSPDRACNLAKQAFDEAISELDTLGEESYKDSTLIMQLLRDNLTLWTSDITDDAGD

SEQ ID NO: 1207 - protein, 1551 aa, Crocosphaera watsonii WH 8501; identical to SEQ ID NO: 298

SEQ ID NO: 1208 - protein, 260 aa, Pisum sativum
MAAAHTPREENVYMAKLAEQAERYEEMVEFMEKVSANADSEELTVEERNLLSVAYKNVIGARRASWRIISSIEQKEESRGNEDHVDVIRDYRSKIESELSNICDGILKLLDTRLIPSASSGDSKVFYLKMKGDYHRYLAEFKTGAERKEAAESTLAAYKSAQDIANAELPPTHPIRLGLALNFSVFYYEILNSPDRACNLAKQAFDEAIAELDTLGEESYKDSTLIMQLLRDNLTLWTSDMQDDGADEIKEAAPKADEQQ

SEQ ID NO: 1209 - protein, 908 aa, Porphyra yezoensis
  misc_feature (612)..(612): Xaa can be any naturally occurring amino acid
MTPGPITTDAAAGVGVDTMDGTMKWELFEENRTLTTRSGQMIVNDGEFGKWNDTDEGRVKCFLTPDEGFGDAIESLVIVLYRLPIIAKRDATTGAWSFKWDDDALYLTSTGLRKGLEQLKVAPLWVGILNSDDEVPRQEREGVADRLLEEFNCVPVFIPHDTLKQLYQGFCKGTLWPLFHMVSSATDHTEHTTRFDDRLWRVYMNVNRMFRDKVVEVYDGDRTLIWVHDYHLMLLPQALRSRLSGVKIGFFLHIPWPSSEVYRVLPWRNELLKGMLSATLLGFHLFDYARHFLSACVRLLNLEHEANRGSLGLEYDGRHVMLRVSHIGVDPERFSEGLSAPSLTDRVAEFKERFADCTVLGAVDDLDLIKGIALKLMGFQRYLDSAPKMRGKVVLVQVAIPKAARVKESVRNEIRELVAAINNKHGDGSGRRPVWYLEESISFESRLALYSIMDALVVTPIRDGLNLIPYEYIVSTSEGKGQLILSEFTGCSRALSSAERVNPWDLEKLSNVLDMVVQKAIAAAPEVELKRRADKAYVSAHSSQQWAQSFLHDLKEASEPAQVVVKVGPLAGLPGVLAYDEFTLLNRSAVLRAYKAAKRRLFLFDYDGTLTXITDQSSQMAHAWARPSEAVAANLDTLSKDPLNDVYIMSGRKTEVLEAGLNNSPTIGIAAEHGFFYRKKNSKEWNRLLEDADLSWMELALRIMLMYTDRTDGSYVEQKKAGLVWHYLDADREFGSWQAKEMRDHLESLLSPFSVQVVTGYGWLQVRMAAMNKGVMVETILRDMPEPPDFVLCCGDDRTDEDMFAYLDTHLDPSVKQFTCTVGVKPSHARYYLHSSNEVGALLETLVTGSYPRGVRPRPRGGSVSLADLVPDDEGSSSTPAVPQRTNGPRTGASGQKRRGLASSLPSQ

SEQ ID NO: 1210 - protein, 2240 aa, Oryza sativa Indica Group; identical to SEQ ID NO: 300

SEQ ID NO: 1211 - protein, 1648 aa, Arabidopsis thaliana; identical to SEQ ID NO: 302

SEQ ID NO: 1212 - protein, 725 aa, Pseudomonas fluorescens; identical to SEQ ID NO: 303

SEQ ID NO: 1213 - protein, 256 aa, Zea mays
MSREENVYMAKLAEQAERYEEMVEYMEKVAKTVDVEELTVEERNLLSVAYKNVIGARRASWRIVSSIEQKEESRKNEEHVNLIKEYRGKIEAELSNICDGILKLLDSHLVPSSTAAESKVFYLKMKGDYHRYLAEFKTGAERKESAESTMVAYKAAQDIALAELAPTHPIRLGLALNFSVFYYEILNSPDKACNLAKQAFDEAISELDSLGEESYKDSTLIMQLLRDNLTLWTSDLTEDGADEGKDAQKGDAGEGQ

SEQ ID NO: 1214 - protein, 350 aa, Picea sitchensis
MAMSSGKQEVEYTEMSVLDQIRSHLLGDFEPSFFVTGNWGSDPTRNSSPEEENFIQTALTADSVDDSRRETETETLIAAVKSSRPLLSVSVTRHESFDWEKISVDWALKNSVTPSVSPCFSAAWTKLPLDENDSEDMVLYGILKEAATKGWLPRTPKEEPVTEIKKEAALPVKPDADIRQETGATPPPPPPPTVKNNAGRHYRGVRQRPWGKFAAEIRDSSRQGARVWLGTFTTAEEAALAYDRAAYKMRGSRALLNFPLEVGAEDSNTCNNNTSTIEKVESNLSKKRQREEVEVQWNRQCRVRFEDSNTMDHEMVEELLGGKLATPPLTPSGIDMSFTGFLSRGQLTVN

SEQ ID NO: 1215 - protein, 670 aa, Debaryomyces hansenii
MSKGKESKVGSSTPSFDDEEDNNPFPHMQGLASLMSEHRISNGSNIQDKGDKDNNNNNNYNNNNNNNNNNNNGDDDDDSILLYNSNNQNDSKSGLNKDTFKSIQINYESRVTRLLRPNSNVRMQITKAGNSNEGMINTSKTYIVYSIQLINNDDPSDEIQTRRRYSDFESLRDVLKKIFPLIIIPPIPPKNYFKFSMLNDLVSGNISQSSNTSSNNSTGANTSTNTTNGLGSNSTNYSYINSTHLNKNKLIEHRKRLLSNFLNNCLAIPQIRNLEFFAKFLDPNANWTDEITLISSQLPKSIYFSNPENGLKTDSIYANLPNPVGNHSINMSFWKPLQENKKKLTKKTNKILNNGNTEASSQPSTGTTSPVNHSPDFIKNKYIIDNSCLDDINKKIMANFIGLANDYTELGTIFNSFSLILSDSPMIRSAKAKNNHEEDSKLNLIFDKIGQIFDRSYITISTLIADLETKFSEPLGEAVQYSTILQFIEKFERRKVRQKRLLEDDVKDKKQELEELLKAEEGSSKIENVMHAQPISKHSGLNSRGTNSTQNVNSSIKSTNSKYKYLPNMNSFKKITQYVTDIIDQNPEQTRKQKITSLQEKIGTLEKCQGIMLQDISYITDEINKNFKSFHTKQLKIIYEILLCYNGFLVEWAKKNVDIWEEIKDEVEKL

SEQ ID NO: 1216 - protein, 474 aa, Pseudomonas savastanoi
MSRLVVVSNRIAPPDEHAASAGGLAVGILGALKAAGGLWFGWSGETGNEDQPLKKVKKGNITWASFNLSEQDLDEYYNQFSNAVLWPAFHYRLDLVQFQRPAWDGYLRVNALLADKLLPLLQDDDIIWIHDYHLLPFAHELRKRGVNNRIGFLLHIPFPTPEIFNALPTYDTLLEQLCDYDLLGFQTENDRLAFLDCLSNLTRVTTRSAKSHTAWGKAFRTEVYPIGIEPKEIAKQAAGPLPPKLAQLKAELKNVQNIFSVERLDYSKGLPERFLAYEALLEKYPQHHGKIRYTQIAPTSRGDVQAYQDIRHQLENEAGRINGKYGQLGWTPLYYLNQHFDRKLLMKIFRYSDVGLVTPLRDGMNLVAKEYVAAQDPANPGVLVLSQFAGAANELTSALIVNPYDRDEVAAALDRALTMSLAERISRHAEMLDVIVKNDINHWQECFISDLKQIVPRSAESQQRDKVATFPKLA

SEQ ID NO: 1217 - protein, 463 aa, Ralstonia eutropha JMP134
MPRLVAVSNRVADPRNVAAGGLAVALSEALRQTGGMWFGWSGKALETNHGGTPGEGELHLQQAGNVTLATVDMCREDHDAYYLGYSNGVLWPAFHYRLDLADFDSNYLNGYRRVNQLFARKLAPLLKPDDIIWIHDYHLIPLAAELRAIGCGQRIGFFLHIPLPPPLILAAIPQHDWLMRALFAYDLIGFQSHTDLEHFSRYVQNEAFAEPMGEHRYRAFHRTVRAEAFPIGIDVEEFRELGRGAEAQETFEMMRAQYASRRLLLGIDRLDYSKGLPQRLKAFYRLLAEYPENRMSATLVQIAAPSRESVDAYADLRSEMERLSGAINGEFGELDWMPVRYIHRTTARKRLPGLCRASRVALVTPLRDGMNLVAKEFIAAQDREDPGVLVLSRFAGAAEQLKEALLVNPYDTHATAQAIQQALHMPLAERQARHEKLLERIRTQDVHWWSQEFLRALTETDGG

SEQ ID NO: 1218 - protein, 888 aa, Candida albicans SC5314
MAPQQVNAFSANGSIPSPKEFEGKGKLKLSGRILNVMTSLPLQIISDYDNKTGQYYWDVETVRGNSALYSSQHFLAENKEWETHLIAWTGELINKKKDTSSLTADTLQDDPLYLDEEDKSKIEKKLCDASGTPNIHPVWLLRRDQGRWRKYAENVLWPVFHYIQGQPSDGKAETDAWHDYVKFNEAYLNKIKSVYKPGDIIWIHDYYLLLLPQLLRMEFPNAYIGFFLHVPFPSSEYFRCLSKRSQLLDGMLGADKIGFQSDSFQRHFISCCARVLGCEVNRDSVSAYGTTISVETLPIGIDTEKIEHDAFSSELGVEEKVQALKQVYKGKKLIVGRDRLDKVRGVIQKLEGFEIFLDMYPEWRETVVLIQVSSPGYSHSANVETRVTEIISRINSKYGNLNHTPVLHYQMRVAKEEYLALLRVADLALITSVRDGMNTTSLEFVICQKYNNSPLILSEFTGTATVLKDAIMVNPWDSVGVAKTINDALMLSTKEKVSLESKLYEKVLSNTVQNWTSTFICDILSHSIVTHSNSYTPALNRPLLLNNYKESQRRLFLFDYDGTLTPIVQDPAAAIPSDKLNRILDVLSSDPKNQIWIISGRDQAFLEKWMGNKNVGLSAEHGCFMKDIGSKEWVNLAASFDMSWQEKVDDIFKYYTEKTPGSNIERKKVALTWHYRRADPDLGNFQAEKCMKELNDTVAKEYDVEVMAGKANIEVRPKFVNKGEIVKRLVLHPHGAKQEKHPTGHCTKDIPIEELPDFMLCLGDDLTDEDMFNSLNEINKKWKGDNRPTNKFGSYGVYPVAVGPASKKTVAIAHLNEPRQVLETLGLLAGLVSIFESAGTVDLDDRGHLANSVSSERSKHAVSKAVSLRKKASQEKEIVKEDPTNGAK

SEQ ID NO: 1219 - protein, 841 aa, Oryza sativa Indica Group
MYSAVEAITSAAVTTCSMRNIRQIHDTSGPAMVYDSAAVAQRERGERGWYSWSRPARDCTEILRMANELSGKFCTPVSQPDNDSTVIQIISTIMPRYYPQLKFERLVTSLEAKVGYDVLMADFFIHKNVPREEKINLIVVQKEDLDASSCIANPPHVSFLVNGKGVDKRTNVSMETGPQFPTDITRMLKYGANIIQAIGYFNANYIIAVAFLNKLESFDAPNLNDYAQPVAANPPDSDLLEGPSRVSLKCPISFRRIKTPIKGRLCKHYQMNLRKPTWRCPFCNTPSNFTDLRIDQKMVKSLFFHKILQETGEDTIDVLVFADGSWKAISTNDERSDRHSSDVIQHSRDTMDTDATADDVIDLINEDNDGDVPMSFTSASEDVKPFLNCQDLSVADYLSDLPMNTVSQAEDLYAGGASRGNNERGNATSTSGQNSSLPSTGGLGSSSFGTLESILPHNILHPVITDAVSPSLDTSNSVVPRQHVAQGTRSDIVPSQPRIDPQLRLEIARPPIPRNVAREPTGIQALPVQPQRVRPNIYNCPPPFPQSSPASAYQVHQVTNADSVITAMSTGIGSLSRAPDAAPLLQHQSTQQGQIFNRHLNYFTIFITHFVLLACVLQIQVEIRATQNYHQGQFIGLTAAQNFMGTRPPPGVPGQAIGANAHGAPPAQQSHHVHRLVSNLMNQLGQATVAQPSTAPQVLPSQPGGTSAVNPQIRGHLFPAQQRSQAMRPQAVPRPTISQAPPRAQSPFLPATARPPSTPPPIGTSDDLQELPVDESWRPTGQMRGSLTGEAYSVAIGRYNPSVNIAGQQTSHVTSQARPAGPDARSFRRLREPSEGANALN

SEQ ID NO: 1220 - protein, 534 aa, Clavibacter michiganensis subsp. sepedonicus
MTPPPSSTPSATEPTTEPRTADAHDGDVEPGAYDLVVVSNRLPVDRVVAADGTTSWRHSPGGLVTALEPVMRANEGAWVGWPGIADHDVEPFVDAGISIIPVTLTEQDLAEYYEGFSNDTLWPLYHDVIAQPSYHREWWDTYVTVNQRFADAAAKAAAPGATVWVQDYQLQLVPKMLREQRPDLTIGFFNHIPFPPYGIYSQLPWRTQIIEGLLGADVIGFQRVADAGNFTRAVRRLFGYTTRGSTVDVPVRGGIPLTVPGTKPSKPVRELRTRQVVAKHYPISIDARSYEEMAKDPAIQERARQIRADLGDPKTILLGVDRLDYTKGIGHRLKAFGELLAEGRVTVEDATLVQVASPSRERVETYKQLRDEIELTVGRINGDYGSISHTAISYLHHGYPREEMVALCLAADVMLVTALRDGMNLVAKEYVATKHSNEGVLVLSEFAGAADELKAALLVNPHDIEGLKEAILRAIEMPKAEQRKRMRSLRKRVFENDVTAWSSSFLADLGRTHAASIHEGPDEEVVEPLMDEGW

SEQ ID NO: 1221 - protein, 202 aa, Picea sitchensis
MNIRLLGEANDYVAKGMAGGEIVITPSEKTGFVPEDATIVGNTCLYGATGGRLFVRGKAGERFAVRNSLAEAVVEGTGDHCCEYMTGGCVVVLGKVGRNVAAGMTGGLAYLLDEDDTLVPKVNKEIVKIQRVVAPVGQLQLKQLIEAHVNKTGSTKGTAVLKEWEKYLPLFWQLVPPSEEDTPEANAEFGDRTVERITVKSA

SEQ ID NO: 1222 - protein, 1545 aa, Candida albicans SC5314
MSTVPQVTQDDYTETLKVWRSFKVAQLKDVCRSLELNVGGRKQDLVDRGEAFLSSKFNNNDQIGFHAAKSLIFMRLQGDPLPSYRDMHYAIRTGRFKLTAPTLIGTSSSTNQLSNIHSGDSKPYKGHTLYFKATPLYRFLRLIHSTPMLLIPNGRNSVQTCHFIFTEEEYKFLQDKPPHIKLYILCGIPDMQRSNATNNVSIEYPVETVIYFNKHEFKDTFRGISGETNTAVPVDITKYINSPPQRNEIVFCHSANNAGYMMYLYLVEVIPAERLIEQVQNRPAIPKSETIRNIKDMSRYDGIQTTKLPLRDPLSYTKLANPTKSVHCDHYMCFNGMLFIEQQRLVDEWKCPVCSREIKFEDLRISEYFEEIIKNVGPDVDEIIIMQDGSWKPVVGDDTNTTKKRTESASPEAIILLSDDEDDVSADEVDANVHLENKEDESVNINRVDNTPEAEVDITESNNNQETQIDNESIQSDDLTEYLIDHEHQQHEEASDKVEDNNPTLPSQQSPQAETNNDETSNMKTTLQEDTSAPLPKNGVQENDAPLGDAIDTEQNLREDQTAEAVDPADSPISVINVTLDPPNEANKENSTESSISLSNLSPKNRESSLSSSSPQSVPPSMITPISPMSAQASSDKAQVLHGDSNTSNQPRYTSSPDSAASPLSLTGPNDINEENRTPQSHNLNNTDALHGQDSSNSQAVSNSRSIQSVPTAAVSSKNQGNQHSDDQIRSLNEEIKKLRQALYYRDLYIKRLPLNQQHALLQQQQQQQLQLQQLSQQRPNDHQIHHFQQQQLLQQQQQRQLRQLEQQQRLQRQQWQQQQQLLQQQQQQLPRQLPLQSPQQLPQQQHLSPEDQSQFLQLTQLPQFRRLQQLQSQQRQSQQRQANPHQQHQQNYLQQPQHNNAQLHLNRNSHQLPQQQQQQQHHHYQQQQQQQQQQQRLQLPQQLRSSPQNRSFQTQPNEQQRVNSLSRSTDATPLSRQIVLDFGTSVPLPTQSSRPTLEEQGSFNLNLLRHTPNLQTVASHSPWSPVATEPKNRSFSDSNIAVVNGLNESDPIEDRPLASLSGRSKSTNNMSNHNTSNVSSSNYQVSEKQQQVHRLQSINANSNKKEDTEVETTTDTNLQQGSSAENTTDEQNSFRCNVQKPMLAIKNSDPSQNHGQVEDTQTKNSINGTSTGVGGTAVFEGNSKLQTNSVQSHSNSPRKEQNSTSVVPNGNPQQIVIGNPSSMVEKKDNGIDYNRNTFQIEDSVVNFVGRDTVNRIIGLTNLKDIQKVVENINNRKIVIDSNVEADRNRKRMILQKFDFDTKSLISDLMKNGGSNYEKSKLINTRRGEKSRLATHWDDKLEKNLSKYNAELQKLDKTLMLLRKQAESIEARDAQIGGQSLNSTPVDNANSRGTPSSETDTAAGQSPKKNHLVNIPPQTNQSASQNETLQLSSIVTPSNRDSSNKIRSGPPLQTSQVPTSKRQRVIGMLGIELNEDALKISDRKHGLQNSVTPINNKIKNISLGASNTNNCKDRLGDLQTQFSLNQNITSGTMHDPIVLDMSDEE

SEQ ID NO: 1223 - protein, 513 aa, Vibrio parahaemolyticus RIMD 2210633; identical to SEQ ID NO: 325

SEQ ID NO: 1224 - protein, 860 aa, Oryza sativa Japonica Group
MVSRSYSNLLDLATGAADQAPAPAALGALRRRLPRVVTTAGLIDDSPLSPSTPSPSPRPRTIVVANHLPIRAHRPASPSEPWTFSWDEDSLLRHLQHSSSSPAMEFIYIGCLRDDIPLADQDAVAQALLESYNCVPAFLPPDIAERYYHGFCKQHLWPLFHYMLPLSPDLGGRFDRALWQSYVSANKIFADKVLEVINPDDDFVWVHDYHLMVLPTFLRKRFNRIKLGFFLHSPFPSSEIYKTLPVREELLRALLNSDLIGFHTFDYARHFLSCCGRMLGLSYESKRGHICLEYYGRTVSIKILPVGVNMGQLKTVLALPETEAKVAELMATYSGKGRVVMLGVDDMDIFKGISLKLLAMEELLRQHPEWRGKLVLVQVANPARGRGKDVDEVKGETYAMVRRINEAYGAPGYEPVVLIDEPLQFYERVAYYVVAEVCLVTAVRDGMNLIPYEYIVSRQGNEALDRMLQPSKPEEKKSMLVVSEFIGCSPSLSGAVRVNPWNIEAVADAMESALVLPEKEKRMRHDKHYRYVDTHDVGYWATSFLQDLERTCKDHAQRRCWGIGFGLRFRVVSLDLSFRKLAMEHIVMAYRRAKTRAILLDYDGTLMPQAINKSPSANSVETLTSLCRDKSNKVFLCSGFEKGTLHDWFPCENLGLAAEHGYFLRSSRDAEWEISIPPADCSWKQIAEPVMCLYRETTDGSIIENRETVLVWNYEDADPDFGSCQAKELVDHLESVLANEPVSVKSTGHSVEVKPQGVSKGLVARRLLASMQERGMCTDFVLCIGDDRSDEEMFQMITSSTCGESLAATAEVFACTVGRKPSKAKYYLDDTAEVVRLMQGLASVSNELARAASPPEDDDE

SEQ ID NO: 1225 - protein, 1600 aa, Ralstonia eutropha JMP134; identical to SEQ ID NO: 333

SEQ ID NO: 1226 - protein, 574 aa, Lotus japonicus
MEGKGYTLDGTVDLAGRPVLSSLTGKQKACTYILVYRVLERFAYYGVGANLVNFMTTQLNKDVVSSITSFNNWSGLATLTPILGAYIADTYTGRFWTITFSLLIYAIGLVLLVLTTTLKSLRPACENGICREASNLQVALFYTSLYTIAVGSGAVKPNMSTFGADQFDDFRHEEKEQKVSFFNWWAFNGACGSLMATLFVVYIQEKNGWGLAYSLSAIGFLLSSIIFFWGSPVYRHKSRQARSPSMNFIRVPLVAFRNRKLQLPCNPSELHEFQLNYYISSGARKIHHTSHFSFLDRAAIRESNTDLSNPPCTVTQVEGTKLVLGMFQIWLLMLIPTNCWALESTIFVRQGTTMDRTLGPKFRLPAASLWCFIVLTTLICLPIYDHYFIPFMRRRTGNHRGIKLLQRVGIGMAIQVIAMAVTYAVETQRMSVIKKHHIAGPEETVPMSIFWLLPQNIILGVSFAFLATGMLEFFYDQSPEEMKGLGTTLCTSCVAAGSYINTFLVTMIDKLNWIGNNLNDSQSRITIMPFFSVISALNFGVFLWVSSGYIYKKENTSTTEVHDIEMSAEKTVKY

SEQ ID NO: 1227 - protein, 492 aa, Xanthobacter autotrophicus Py2
MSRIVVVSNRVAVPQRSGVTAGGLAVAVNAALKDKGGIWFGWSGRICPEPSEIPEVTRKAGITYAVVDLKAEDHQEYYNGFANRVLWPVLHYRVDLSEFFRSDLSGYIRVNRMFADHLEKIIRPDDILWIHDYHMMPLAKYLRERGHKNRIGFFLHIPMPPSDIVQALPQHGETVGALAYYDLVGFQTEGDRDNFAHYLEIRGGQLTPDGTGVDIGGRRVRLGTFPVGIETAAFARRARHASRAAFVKSFRDSLVGKKLIIGVDRLDYSKGIPNRLEAYEQFLKTQPDWHERVTFVQITPKSRTDVPEYQEMDRYVSHKAGQINGAYSDVSWTPLRYVNRTYSRSALAGFYRAAHVAMVTPLRDGMNLVAKEFVAAQDPADPGVLILSQFAGAAAEMGTGALIVNPHDTEGMANALRRALEMPLAERRERYARMMQVLEARDIDRWAADYLAALAPEAATVERRGLSLPRAAIRSVVRLPGAWRSDFVPRGA

SEQ ID NO: 1228 - protein, 736 aa, Robiginitalea biformata HTCC2501
MSKTIIISNRLPVQLQIKEGSIEATPSVGGLATGMKSVHSDGESLWIGWSGLTLEEIPDSLDADIDQALARHGCSRVDLSKNEVDGFYYGFSNRTIWPLFHYFMEYSEFELSNWTVYEAVNRKFADAIAAAAADDDVIWVHDYQLMLVPQMVREQRPGLSIGFFLHIPFPSYEIFRTMPWRREVLRGLLGSDLIGFHTYDYERHFLSSVRRLLGLEVSFNEIHLEDRVVKVDSFPMGIDYKKFNEAAARHRDMKPGEISDLQNRLDTHKASTPDAKFFLSIDRLDYTKGIARRIKAFEYFLEKYPEYKEKVRLIILAVPSRSKVPQYQRLKREIDELVGRINGELSTVSWTPIWYFYRSLPFDNLIDLYTSCDIAWLTPIRDGMNLVAKEYIATRTDQTGVLILSEMAGSANEMNEALLINPNNFEQIAESLHQALNMPEEEQKRRNAAMQKRLERYNVEKWANDFMNSLLTQRQQDYSMVARRLSVDLTNTLLEKYREARSRILFLDYDGTLAGFTNDPQDARPDEALMELLDRLNAQGRTDVFLISGRDKDTFTRWFQDKEYAMIVEHGVWISEGGKPFSMLENVKNDWMGKIRPVLESFVDRTPGSFIEDKNYSLAWHYRNTDPDFGQKRTMELNTVLTSLIANDDLTVMNGNKVVEIKSSNVNKGRAAMRMVARKEYDFIFAIGDDWTDEFMFQELPKEAVTVKVGRMKTQARYFLDGPGAVRQLLGRFADI

SEQ ID NO: 1229 - protein, 261 aa, Brassica napus
MSSPREENVYLAKLAEQAERYEEMVEFMEKVAKTVDSEELTVEERNLLSVAYKNVIGARRASWRIISSIEQKEESRGNEDHVAIIKDYRGKIETELSKICDGILNLLDSHLVPAASLAESKVFYLKMKGDYHRYLAEFKTGAERKDAAENTLVAYKSAQDIALADLPPTHPIRLGLALNFSVFYYEILNSPDRACNLAKQAFDEAISELDTLGEESYKDSTLIMQLLRDNLTLWTSDINDEAGGDEIKEASKDEPEEGKQA

SEQ ID NO: 1230 - protein, 828 aa, Zea mays
  misc_feature (202)..(202): Xaa can be any naturally occurring amino acid
MTRGRRSGVGDGRGTSSAAPAPPRRVIVSHRLPLRASPDPAAPFGFAFSVDAGTVAYQLRSGLPANAPVLHIGTLPAAAAEAASEELSDYLLANFSCLPVYLPTDLHHRFYHGFCKHYLWPLLHYLLPLTPSSLGGLPFQRTLYHSFLSENRAFADRLTEVLCPDEDLVWIHDYHLLALPIFLSYRTSLYKKASWYRSGIPXDIFRTIPVRDDLVRALLNADLVGFHTFDYARHFLTACSRLLGLDYQSKRGYIGIEYYGRTVTVKILPVGIDMGQLRSVVSAPETEDAVRRVTEAYKGRRLMVGVDDVDLFKGIGLKFLAMEQLLVEHRELRGRAVLVQIANPARSEGRDVQGVQDEARAISARVNARFGTPGYTPIVLIDGPVTPQEKAAYYAAAECCVLSAVRDGLNRIPYIYTVCRQESTALGDDAPKRSAIVLSEFVGCSPSLSGAIRVNPWSVESVAEAMNAALRMPEAEQRLRHEKHYKYVSTHDVAYWARSFDSDLQRACKDHFSRRHWGIGFGMSFKVVALGPNFRRLSVEHIVPSYRRTENRLILLDYDGTVMPENSIDRTPSSEVISVLNRLCEDPKNRVFIVSGRGKDELSRWFAPCEKLGIAAEHGYFTRWSRDAPWEASALAADLDWKNTAEPVMRLYTEATDGSYIEHKESGMVWHHDEADPDFGSCQAKELLDHLENVLANEPVVVKRGQHIVEVNPQGISKGVVVDSLLSSMVRTGKPPDFVLCIGDDRSDEDMFESIVCPASSSGGVRLPASSEVFACTVGKKPSMAKYYLDDTVDVVKMLDGLASAPSPPRRPGPAAAVQLRVSFEGSL

SEQ ID NO: 1231 - protein, 2126 aa, Candida albicans SC5314; identical to SEQ ID NO: 340

SEQ ID NO: 1232 - protein, 385 aa, Trifolium pratense
MCGGAIISDFIPAAAAVGGSRRVTADILWPNLRKTGSKKSSFLLDDDFEAGFRQFKDDSDFDEDEDEDDDEGLLVGVKGFTFAASNNKSSRNFSRGSAGAKSVASKSNEQAEKESKRKRKNQYRGIRQRPWGKWAAEIRDPRKGVRVWLGTFNTAEEAARAYDAEARRIRGKKAKVNFPDEAPNASSKRLKTNPDNQLLNKNLNSFKPNGNNKMFNFSENMENFYSPMDQVEQKPLVNNQYGAADIGAFTGNGVHLAPADVNAYFSSEHSSNSFDYSDLCWGEQGPKTPEISSVFSAPLEAEPQMNMQSNNSQDMLPMQAESAKTLSEELADIESQLKFFENSFDDNWSDASLASLLGADVTQDAGNTMNLWSFDDLPSIAGGVF

SEQ ID NO: 1233 - protein, 550 aa, Leptospira interrogans serovar Copenhageni str. Fiocruz L1-130; identical to SEQ ID NO: 342

SEQ ID NO: 1234 - protein, 857 aa, Vitis vinifera
MASRSCANFLDLASGNLLDIPHTPRPLPRVMTVPGIISDLDGYGSNDGDSDVCHERKIIVANMLPLHAQRDKVTAKWCFSLDEDALLLHLKDGFSPETEVIYVGSLKVEIDASEQEEVAQKLLEDFNCVPTFLPHDLHKKFYHGFCKQQLWPLFHYMLPMCPDHGDRFDRVLWQAYVSANKIFADKVREVINPDDDYVWVQDYHLMVLPTFLRKRFHRVKLGFFLHSPFPSSEIYRTLPVRDEILRGLLNCDLIGFQTFDYARHFLSCCSRMLGLDYESKRGHIGLDYSGRTVYIKILPVGVHMGRLESVLNLHSTSTKIKEIQKQFEGKKLILGVDDMDIFKGISLKFLAVEQLLQQHPELQGKLVLVQIVNPARSTGKDVQEAKRETYLTAERINETYGSPNYEPVILIDRPVARYEKSAYYAVAECCIVNAVRDGMNLVPYKYIVCRQGTPHMDKETGMNLVSPPTSMLVVSEFIGCSPSLSGAIRVNPWDTDAVAEALNLAITMPNSEKQLRHEKHYRYVSSHDVAYWARSFMHDLDRACKDHYSKRCWGIGLGLGFRVVSLSPSFRKLSIDHIVSTYKRTTRRAIFLDYDGTVVPQSSIIKSPSPEVISVLSTLCSDPKNTVFIVSGRGRSSLSEWLAPCERLGIAAEHGYFMRWNESTKWESCNLAADLDWKKVVEPVMRLYTETTDGSNIEIKESALVWHHQDADPDFGSCQAKELMDHLENVLANEPAVVKRGQHIVEVKPQGVSKGLVAEKVLSTMVNDGKPPDFVMCIGDDRSDEDMFEGIFRTISSPSLSMSPEIFACTVGQKPSKAKYYLDDTTDVVRLLQGLATASNPKPRYIAQIQVSFESSI

SEQ ID NO: 1235 - protein, 1515 aa, Haloarcula marismortui ATCC 43049; identical to SEQ ID NO: 346

SEQ ID NO: 1236 - protein, 240 aa, Escherichia coli str. K12 substr. W3110
MTRKPRRHALSVPVRSGSEVGFPQSLGEVHDMLYDKSLERDNCGFGLIAHIEGEPSHKVVRTAIHALARMQHRGAILADGKTGDGCGLLLQKPDRFFRIVAQERLAFRKNYAVGMLFLNKDPELAAAARRIVEEELQRNTLSIVGWRDVPTNEGVLGEIALSSLPRIEQIFVNAPAGWRPRDMERRLFIARRRIEKRLEADKDFYVCSLSNLVNIYKGCVCRRICRVLSGSCGPASGMAI

SEQ ID NO: 1237 - protein, 61 aa, Physcomitrella patens subsp. patens
HYRGVRQRPWGKFAAEIRDSSKNGARVWLGTFDSAEQAALAYDRAALNMRGSRALLNFPLK

SEQ ID NO: 1238 - protein, 533 aa, Gemmata obscuriglobus UQM 2246
MGWSKERLEEVARTRLGGAKLIVVANREPYIHRYATDGAVEWIRPAGGLTTALDPVMQACGGVWVAHGSGDADRAVTDPSGRVGVPPDDPNYVLRRVWLTPEQEDGYYYGAANGMLWPLCHQVFARPAFDPGHWDAYRRVNQTFADAVLEEAQGGPALVFIQDYHFALLPRLLKAARPDLVTAQFWHIPWPGPEKFLVCPWARDILDGLLGNDLMGFHTQHDCNHFLECVDRALECRIDRERFAVQRGGQATTVKPFPISVDPALADEYLGDDWAARAGAIRRRHGLGDRPLIVGVDRVDYTKGIPERLRAVDRVLHRHPELRGGFHFVQVGAPSRSSIPAYRDLTAEVNGLAARINREHGTAGWQPVVFLNAHHGPEDIFALYRDAAGCVVSSLHDGMNLVAKEFVTARADDRGVLVLSTFTGAARELTDAVLANPFDVDELADGLHAALTMPAAEQERRMRRMRAQVDDHNIYRWAGMLLSEVGKRVPDSPPPPAEKSEGEREPNKNLRAYGDEEAIARETYVTAMQLAGA

SEQ ID NO: 1239 - protein, 1479 aa, Azospirillum brasilense; identical to SEQ ID NO: 357

SEQ ID NO: 1240 - protein, 98 aa, Triticum aestivum
  misc_feature (40)..(40): Xaa can be any naturally occurring amino acid
MADWGPVVIATVLFVLLTPGLLFQLPAHGRIVGFGTMHTXSGVAILVHAVLYFALITIFLIAIGVHIYAGLRPGVFNHTPSSLPLIIGPASFLVMYYY

SEQ ID NO: 1241 - protein, 260 aa, Oryza sativa
MSPAEASREENVYMAKLAEQAERYEEMVEFMEKVAKTTDVGELTVEERNLLSVAYKNVIGARRASWRIISSIEQKEESRGNEAYVASIKEYRSRIETELSKICDGILKLLDSHLVPSATAAESNVFYLKMKGDYHRYLAEFKSGAERKEAAENTLVAYKSAQDIALADLPTTHPIRLGLALNLSVFYYEILNSPDRACNLAKQAFDDAIAELDTLGEESYKDSTLIMQLLRDNLTLWTSDNAEDGGDEIKEAAKPEGEGH

SEQ ID NO: 1242 - protein, 2195 aa, Zea mays; identical to SEQ ID NO: 362

SEQ ID NO: 1243 - protein, 250 aa, Triticum aestivum
  misc_feature (181)..(181): Xaa can be any naturally occurring amino acid
  misc_feature (238)..(238): Xaa can be any naturally occurring amino acid
MEERGKVVCMAKLAEQAGRYDDMVDFMKKLARMDVDMSVEERHLFSVGFKNTIGARRASWRILSSLEQKVAAGEQAGRMISVYRTKVEDELRMVCNEILSIIAIHCLPLANAGENVVFFHKMKGDYYRYLAEFSTGVEKKSAADQSLMAYQHAMVVAFHRAFACSSNQAWPCAQFLSVLLXIMNCHQRACQVAKQAFDEATTEINSAGMDGNNDSTLMMQLLNDNLALWKSELTEGEXTSKDSDIDMEEG

SEQ ID NO: 1244 - protein, 297 aa, Nepenthes alata
DQFDDTDPREKIKKGSFFNWFYFSVNIGALISSSLIVWVQENLGWALGFGIPAISMGIAIASFFSGTALYRLQKPGGSPLTRMCQVLVASFRKSKLALPEDSNLLYETSDENSVIEGGRKLEHTNDLKCLDKAAVVSDKEIKCEDFSNPWRLCTVTQIEELKILIRMFPIWATGIVFSAIYAQMSTMFVEQGEVMDRTIGSFTIPAASLSMFDTISVIFWVPVYDKILVPLARKSTGKQRGFSELQRMGIGLFISILSMAAAALVEMKRLQLAKELGLVDEDVAVPLSIFWQIPPYF

SEQ ID NO: 1245 - protein, 262 aa, Vitis vinifera
MLLTESSREENVYMAKLAEQAERYEEMVEFMEKVAKTVEVEELTVEERNLLSVAYKNVIGARRASWRIISSIEQKEESRGNEDHVAIIKDYRATIEAELSKICDGILSLLESHLIPSAVIAESKVFYLKMKGDYHRYLAEFKTGPGRKEAAESTLLAYKSAQDIALAELAPTHPIRLGLALNFSVFYYEILNSPDRACNLAKQAFDEAISELDTLGEESYKDSTLIMQLLRDNLTLWTSDITDDAGDDIKEASKRESGEGQP

SEQ ID NO: 1246 - protein, 1485 aa, Pseudoalteromonas tunicata D2; identical to SEQ ID NO: 369

SEQ ID NO: 1247 - protein, 1485 aa, Alteromonadales bacterium TW-7; identical to SEQ ID NO: 371

SEQ ID NO: 1248 - protein, 500 aa, Mycobacterium bovis AF2122/97
MAPSGGQEAQICDSETFGDSDFVVVANRLPVDLERLPDGSTTWKRSPGGLVTALEPVLRRRRGAWVGWPGVNDDGAEPDLHVLDGPIIQDELELHPVRLSTTDIAQYYEGFSNATLWPLYHDVIVKPLYHREWWDRYVDVNQRFAEAASRAAAHGATVWVQDYQLQLVPKMLRMLRPDLTIGFFLHIPFPPVELFMQMPWRTEIIQGLLGADLVGFHLPGGAQNFLILSRRLVGTDTSRGTVGVRSRFGAAVLGSRTIRVGAFPISVDSGALDHAARDRNIRRRAREIRTELGNPRKILLGVDRLDYTKGIDVRLKAFSELLAEGRVKRDDTVLVQLATPSRERVESYQTLRNDIERQVGHINGEYGEVGHPVVHYLHRPAPRDELIAFFVASDVMLVTPLRDGMNLVAKEYVACRSDLGGALVLSEFTGAAAELRHAYLVNPHDLEGVKDGIEEALNQTEEAGRRRMRSLRRQVLAHDVDRWAQSFLDALAGAHPRGQG

SEQ ID NO: 1249 - protein, 635 aa, Sulfolobus tokodaii str. 7; identical to SEQ ID NO: 373

SEQ ID NO: 1250 - protein, 380 aa, Oryza sativa Japonica Group
MAQNEGIPNGTLSAMVIDEDKCHADSTCSMICTQLNFCVTVFTSPIKALDFLQNQAEGVHLVLADVQMEEMNGFEFLKVARELHKSIQVIMMSTETTIYTMKRCVQLGAQILVKKPLDVVTIQNLWQHLDIKVLKMEKIKDMLQGVGDKSTCANEMNSFPENQKDGTKRKYYLMWTPHLQKKFLHALEILGEGQISLMIMDVDNIDRKQISTHLQKHRLQLKKKLSKASFTKGSNEDTSNPSAKNHLTCRTMTLQPHPYTNQPAETTMQIHSEDVEHDDVYDAMRRALQDGTAFDESKYSSDPFSNEDEDVVGDGYADKANAIDSSGDHYQVAVVLTTPHNVDYTQEIMNKVTTSDDVQVTRGGKATVSRLVDYSDSDSD

SEQ ID NO: 1251 - protein, 811 aa, Oryza sativa
  misc_feature (275)..(275): Xaa can be any naturally occurring amino acid
IFFEKDNPLGMDALASEEYASQSKLLQEFTNAPSIDGAWVFQTNNEDRSTAMYSISQTNLLANNKRKYILFSHIMRNGTNLLDFKWSPFPIQMDGVSAVVPSPSGSKLLVVRNGEKGSPTKLEIVDQSHVEKEIHVAQSVHGALYTDEWFHGISWNQEETLIAYIAEDSPEPKPVFDDTGYRKEGSSEKDCNNWKGQGDWERDWGETYSKKGRPSLFVLDINSEEVRAAKGILRSLSVGQVVWAPPSSCGRQKYLIFVGWLEHNGFQNTPKKLRXKYCSNRPCSLYSTLCPFEESDVDNAPASDSKLEPASVAINLTPSISSAFFPRFRTLNHARKILHGKSLIIFNSKDGKLLVFLSANRAVDSGAHNATDSLHKINWPSDWKMDQYLEITDVSIYLTSELCQIPIVMCPQDGCFPGLYCSSMLSNPWLSDRCTMILTSAWRSTEVILSIDVLSGKATRISPENSEYSWSALAVDGHNVLAVSSSPIDPPQIKYGHQVSLKDQTCTWVWDEVNNNPLMAANNKVKALLSHHQFSILKIPVTNPSDDLSDGSKLPFEAIFVSCKDSSHKPTILVLHGGPHSVSVSSYSKTSAFLASLGFNLLIVNYRGTPGFGEEALQSLPGKVGSQDVQDCLTALDYVIEGGLIDASKVAVIGISHGGFLTTHLIGQAPDRFMVAAARNPVCNLSLMIGTTDIPDWCYAVACGSEGRQHASESPSPDHLRLFYQKSPIAHISKVKAPLLMLLGGADLRVPISNGLQYARALRERGGEIRIMMFPDDIHEINIPQSDFESFLNIGVWFKKHLSISASDASA

SEQ ID NO: 1252 - protein, 529 aa, Chlamydomonas reinhardtii
MRLQRHAAAGLGATKHRDTLTARLPCQSTRGRAALQVACVATPHSADSQKGAPKATATPSGQYVSSPYGAGRVLTPSPPGSIDDDDVLELKNLRNYLVPRDSPFIVDNNQGGGFVGDRDRIRLHTVEFESTESAGSFCADGVLTNGDEDSCILLPEWAIRCGPRKTIYFDPQQVSAAVVTCGGLCPGLNDVVQNIVYTLTDYGVPEDNILGIRYGLRGFYERDAKPITLTRKYVDGIHLKGGTMLGTSRGGANVKEIVRRIDLWGLNMVFVVGGNGGNAAANAISEECEAQGVCCSVVGVPKSIDNDILIIDKCFGFETAVQEAQRALLAAKVEAGSARNGLGVVKLMGRQSGFIAMQAAMASGVADVCLIPEIPFRMDKLCEHVESIFEKQGHCVVCVAEGAGQDLLTAGGTGGTDASGNPILADIGIFMRNEFKKHFKGEADIKYIDPSYMIRSVPTTSNDRIYCKVLGQGAVHGAFAGFTDVTVGLVNTHYVYLPIPTIIQAARKVNPKGRRWNRLITAIRQPDMA

SEQ ID NO: 1253 - protein, 276 aa, Yarrowia lipolytica CLIB122
MSSERETKTFLARLCEQADRYDEMVNYMKDVAKSGEELTVDERNLLSVAYKNVIGARRASWRVIFPIEQKEEAKGATHHLELLKTYRAKIEAELEDICSDVLDILTNHLLPKAENAESKVFYYKMKGDYHRYLAEFTSGEKRKEAATAAHESYKSATDVAQTELSSTHPIRLGLALNFSVFYYEILNSPDRACHLAKQAFDDAIAELDTLSEESFRDSTVIMQLLRDNLTLWKNDLEESLQAQQSEETPATDAAAASTEAAAPKEEAKPAAEEPKE

SEQ ID NO: 1254 - protein, 404 aa, Chlamydomonas reinhardtii
MPRTGSFCADGVLTNGDEDSCILLPEWAIRCGPRKTIYFDPQQVSAAVVTCGGLCPGLNDVVQNIVYTLTDYGVPEDNILGIRYGLRGFYERDAKPITLTRKYVDGIHLKGGTMLGTSRGGANVKEIVRRIDLWGLNMVFVVGGNGGNAAANAISEECEAQGVCCSVVGVPKSIDNDILIIDKCFGFETAVQEAQRALLAAKVEAGSARNGLGVVKLMGRQSGFIAMQAAMASGVADVCLIPEIPFRMDKLCEHVESIFEKQGHCVVCVAEGAGQDLLTAGGTGGTDASGNPILADIGIFMRNEFKKHFKVGDAHGEADIKYIDPSYMIRSVPTTSNDRIYCKVLGQGAVHGAFAGFTDVTVGLVNTHYVYLPIPTIIQAARKVNPKGRRWNRLITAIRQPDMA

SEQ ID NO: 1255 - protein, 800 aa, Yarrowia lipolytica CLIB122
MLPEIITPTAARALNVPISGRVINCVTTLPYEIYREGATYKIRPRRGNSALYSALDYMQSGDGDTTWTSSLVAWTGEIALPAATSLPDLELYQKLTEQDKHMLERELTEAQGGTPTHPIWTDSGDTVSTGYNEQLSPTRRYAENILWPILHYIQGEPTDGRDEKKWWSDYEDLNRKYCDKVLDIYNEGDVIWIHDYYLFLLPKMIREKLPDARIGFFMHAPFPSSEYFRCLAKRQELLQGVLASNLISTQSEAHKRHFMSACSRIVGAETATPTSVYAYGQSVSVVALPIGIDTAKVEADAFTDEITEKVRAIRQLYPDKKIIVGRDRLDSVRGVVQKLYAFDVFLKRYPEWRDRVVLVQVTSHTATGTRKVEKKVAELVSSINGRYGAIHFSPVHHYTKHIAREEYLALLRVADLCLITSVRDGMNTTALEFIVCQNGNNSPLILSEFTGSAGNLPGAILVNPWDAVGVAEQINRTFRMGQDEKLAIEQPLYQRVTANTVQHWVNRFVSQVISNTFRTDQSHLTPILDNHKLVERFKMAKKRVFLFDYDGTLTPIVTDPAAATPSDGLKRDLRALAKDPRNAIWIISGRDSTFLDKWLGDIAELGMSAEHGCFMKNPGTTDWENLAANFDMSWQKDVNDIFQYYTERTQGSHIERKRVALTWHYRRADPEFGLFQARECRAHLEQAVVPKWDVEVMSGKANLEVRPKSVNKGEIVKRLISEYSSEGRPPQFVLCMGDDQTDEDMFKALKDVPDLDSESIFPVMIGPPEKKTTASWHLLEPKGVLETLNELAKLEGESKM

SEQ ID NO: 1256 - protein, 1494 aa, Thiobacillus denitrificans ATCC 25259; identical to SEQ ID NO: 379

SEQ ID NO: 1257 - protein, 499 aa, Methanothermobacter thermautotrophicus str. Delta H; identical to SEQ ID NO: 392

SEQ ID NO: 1258 - protein, 463 aa, Cupriavidus taiwanensis
MPRLVAVSNRVADPRNVAAGGLAVALSEALRQTGGLWFGWSGKALQTAQGGTPGEGDLHLQQAGNVTLATVDLSREDHDAYYLGYSNGVLWPVFHYRLDLADFDSNFLNGYRRVNQLFARKLAPLLQPDDIIWIHDYHLIPLASELRAIGCGQKIGFFLHVPLPPPLILAAIPQHEWLMRALFAYDLLGFQSHADVEHFSRYVQAEAQAEPMGEHRYRAFHRTVRAQAFPIGIDVDEFMELGRGEEAQETYEMMCAQYARRRLLLGIDRLDYSKGLPQRLKAFYRLLAEYPENRSSATLVQIAAPSRESVDAYADLRREMEQLSGSINGEFGELDWMPVRYIHRTTARKRLPGLCRASRVALVTPLRDGMNLVAKEFIAAQDPEDPGVLVLSRFAGAAEQLREALLVNPYDTRATAQAIQQALHMPLAERHQRHQKLLERIRAQDVHWWSREYLRALSETEGA

SEQ ID NO: 1259 - protein, 501 aa, Robiginitalea biformata HTCC2501; identical to SEQ ID NO: 399

SEQ ID NO: 1260 - protein, 250 aa, Triticum aestivum
  misc_feature (73)..(73): Xaa can be any naturally occurring amino acid
NKFVQKSRLVPVRNSRDIVDPRVRDELSKWFAPCEKLGIAAEHGYFTRWSKESPWETCGLVADFDWKKTAEPXVMRLYTEATDGSYIEHKESALVWHHDEADPDFGSCQAKELLDHLESVLANEPVVVKRGQHIVEVNPQGISKGVVVESLLSSMVRGGKAPDFVLCIGDDRSDEDMFESIVCPANGSVKLPATSEVFACTVGKKPSMAKYYLDDTVDVIKMLQGLASAPSQQRPWPVQLRVTFEEGNGV

SEQ ID NO: 1261 - protein, 503 aa, Cyanothece sp. ATCC 51142
MKSSLVILYHREPYDEVVENGQVRYLPKKSPNGIVPTLKSFFADDNNQGTWIAWKQVSPEQKNQFNKNVVVEDDGNYRVSRIPLTAEQVRDFYHVTSKEAFWPILHSFPYHFTSESSNWDNFVKINRLFAEAACEEAADDALIWVHDYNLWLAPQFIREKKPDARIAFFHHTPFPSVDIFNILPWREAIVDSLLCCDVVGFHIPRYSENFVNVARSLRPIDIVEKTKVTGHITPVGIALAEPEATTKLKYKNQIVKVDAFPVGTSPQNILDVLRTPEAEAKVAEIKETLQGRKLIIAAGRVDYVKGNKEKLEAFERLLERRPELHGKVNFIMTCVQAATGMQVYQEAQREIEYLVGKINGRFAKFDWIPIRLSTQPIPLLDLFCYYRAADICWTTPLRDGLNLVAKEYIVAHEGKDGVLVLSEFVGAATELPQAILTNPYSIKLMDEAIDQALDMSPEEQQEKMAKMYETVTKYDVKYWSDRLLNYFAKMTREFVDDKEPALN

SEQ ID NO: 1262 - protein, 396 aa, Ochromonas danica; identical to SEQ ID NO: 404

SEQ ID NO: 1263 - protein, 586 aa, Arabidopsis thaliana
MGSIEEEARPLIEEGLILQEVKLYAEDGSVDFNGNPPLKEKTGNWKACPFILGNECCERLAYYGIAGNLITYLTTKLHQGNVSAATNVTTWQGTCYLTPLIGAVLADAYWGRYWTIACFSGIYFIGMSALTLSASVPALKPAECIGDFCPSATPAQYAMFFGGLYLIALGTGGIKPCVSSFGADQFDDTDSRERVRKASFFNWFYFSINIGALVSSSLLVWIQENRGWGLGFGIPTVFMGLAIASFFFGTPLYRFQKPGGSPITRISQVVVASFRKSSVKVPEDATLLYETQDKNSAIAGSRKIEHTDDCQYLDKAAVISEEESKSGDYSNSWEDLCTVTQVEELKILIRMFPIWASGIIFSAVYAQMSTMFVQQGRAMNCKIGSFQLPPAALGTFDTASVIIWVPLYDRFIVPLARKFTGVDKGFTEIQRMGIGLFVSVLCMAAAAIVEIIRLHMANDLGLVESGAPVPISVLWQIPQYFILGAAEVFYFIGQLEFFYDQSPDAMRSLCSALALLTNALGNYLSSLILTLVTYFTTRNGQEGWISDNLNSGHLDYFFWLLAGLSLVNMAVYFFSAARYKQKKASS

SEQ ID NO: 1264 - protein, 1583 aa, Brucella suis 1330; identical to SEQ ID NO: 410

SEQ ID NO: 1265 - protein, 680 aa, Picrophilus torridus DSM 9790; identical to SEQ ID NO: 413

SEQ ID NO: 1266 - protein, 531 aa, Oryza sativa Japonica Group
MEAVGVAPAPAGVPEKKLLEVKESRKAAPAAPSTSMAAKWAMKKKLVGGDAGYVLEDVPHLTDYLPELPTYPNPLQDNPAYSVVKQYFVNTDDTVTQKIVVHKTSARGTHFRRAGPRQRVYFQSDEVNAAIVTCGGLCPGLNTVIRELVCGLYDMYGVTSVVGIEGGYKGFYSRNTVALTPKSVNDIHKRGGTVLGTSRGGHDTGKIVDSIKDRGINQVYIIGGDGTQKGASVIYEEVRRRGLKCSVVGVPKTIDNDIAVIDKSFGFDTAVEEAQRAINAAHVEAESAENGIGVVKLMGRNSGFIAMYATLASRDVDCCLIPESPFYLEGKGGLLEFIEKRLKDNGHMVIVVAEGAGQDLIAKSMNFVDTQDASGNKLLLDVGLWLSQKIKDHFKKKRNFPITLKYIDPTYMIRAVRSNASDNVYCTLLAHSALHGAMAGYTGFTVAPVNGRHAYIPFYRITEKQNKVVITDRMWARVLCSTNQPCFLSHEDVEHLKHDDDEHHLHNTQLLEGESSPVKDSSKCNGTAAPV

SEQ ID NO: 1267 - protein, 1493 aa, Aquifex aeolicus VF5; identical to SEQ ID NO: 417

SEQ ID NO: 1268 - protein, 755 aa, Pseudomonas anguilliseptica
MLLATDLDGTFLGGDPKDRLSLYQTIAAHPEIRLAYVTGRSLESVLPLLADPTLPQPDFIISDVGASLVHGDSLQPIQPLQSAVDALWPGDSQVASAIERFALERQDVPQVRRCSYFCNPEQAANPELLTIAESLGCDLLYSAERYLDFLPKGVNKGSSLQALIDWLELDNDQVLTAGDTLNDLSMLSGQFKGVCVGASEPGLLQATRQYSLVFHAERAGCGGILEAFVHFGFLGKQGIAAEGKQVAEPGKADLMMVYHRLPYEEFRGADGKLQRRRPTSPNGIIPTLLSFFGDGRAGSWVAWAEHDENSGETFDSHTTVDAERYPKLTAARVALSKEEVDIFYKRFSKEAFWPTLHTFWERGQFREDDWQVFLKVNRAFAERTALEAAEGATVWLHDYNLWMVPGYLRELRPDLRIAFFHHTYFPSADVFNVLPWRRQIIGSLLQCDYIGFHIPRQVENFVDAARGVMPLQTVSRQNCAPRFITYGCAVGLERMTTAVDTGNRVVKLGAHPVGLDIERVRSALAAPKIREMMERLRSELAGVKLILSVERLDYTKGILEKLNAYERLLEENPELLGKVTLVTVCVPAAKEMTIYDELQGQIEQAVGRINGRFARIGWTPLQFFFRSLPFEEVSAWYAMADVMWITPLRDGLNLVAKEFVAAQGLLDGRGVLVLSEFAGAAAELKGALLTNPHDPVDMTQTCYVALNMPKAEAQARLRELFDIVNYNDIRRWGDEFLAAVSDPQEQLDRALGLVG

SEQ ID NO: 1269 - protein, 1074 aa, Glycine max; identical to SEQ ID NO: 422

SEQ ID NO: 1270 - protein, 278 aa, Bacillus cereus ATCC 10987
MKYLKKKSGKILLATGLAFSMAACGVTDNKEKTNAESSKQQNNNNDSSNNNNSNANNSNGNNNNNSNANNSNGNNNNNSNANNSNGSNNNNSNANNSNGNNNNSNANNSNGNNNNNSNANNSNGNNNSNTNNEWGTNNSNNSNNNSNNNEQKPNQNQEQSATSVTLEQHGIIVTVHKVEQADNIVRVKYTINNTTNQTIFSGAPGAKIEQKGKSTIPSDFKGNWDQRGYIAPHTSVDGTNLYSLSDITNEFDFKIRPDFEDMKNNPPIEYFILRVKMH

SEQ ID NO: 1271 - protein, 563 aa, Oryza sativa Indica Group
MAAVWSGCSTSFSQELPPHPRGRRGGDGARIHPWSGGAGRDATTRHAEAARTVVVFARGRVRVCRAAAPCVLEPDVAGKEEVGVAVWGMDDEPPVADGHRRHGLRRRPVRPAAVEEGPVAAARSAASASASAAGSKSEVGGSRLHFLEERDEEMLSRRLIKLSQSNKVRSATELFDSMRASGLQPSAHACNSLLACFVRRGSFADAMKVFEFMKGKGMATGHSYTLILKAVATTEGYFAALKMFDEIEESDKKNVDVIVYNTVISVCGRAKDWRQVERLWRRLGDNSLSGTLMTYDLLVSTFVQCGQSELAVDAYQEMFKSGIDPSEDILKAIIASCTKEGKWEFALTTFRRMLSAGMKPSIIVFNSIINSLGKAGEDELAFRMYHLLTSSGLKPDQYTWSALLSALYRSGRCWDVLDLFQGIKTKHSALLNNHLYNIALMSCERLGQWEHGLQLLWMMERGGLQISAVSYNHVIGACEVARMPKVALKVYRQLAYGDLFGMNEDILEEVAPDSSVYNTVIHGLCLRGKIRLARKVYTKMRSIGLKPDGKTRSFMLQNLATDY

SEQ ID NO: 1272 - protein, 898 aa, Oryza sativa Japonica Group
MSRSYTNLLDLAAGNFEALGPAGGGRRRSFGAKRMTRVMTVPGTLSELDDEDDEPAATSSVASDVPSSAACERLIVVANQLPVVARRRPGAAAGGWAFSWDDDSLLLRLRDGVPDEMEVLFIGTLRADVPPASRTKVSQSLIDGFGWAPVFLPAGLYDRFYQHFCKGYLWPLFHYMLPFASALPAAASGDGRFDRGAWEAYVLANKYFFEKVVEVINPEDDYVWVHDYHLMALPTFLRRRFNRLRIGFFLHSPFPSSEIYRSLPVREEILRTLLNCDLIGFHTFDYARHFLSCCSRMLGIEYQSKRGYIGLDYFGRTVGIKIMPVGIHMGQLQSVLRLSEKEKKVAELRQQFEGKSVLLGVDDMDIFKGINLKLLAFENMLRTHPKWKGRAVLVQIANPARGKGKDLEAVQAEIRESCDRINKEFGQSGYSPVIFIDQSVPSAVRLAYYTVAECVVVTAVRDGMNLTPYEYIVCREGIPGSECAPEVSGPKKSMLVVSEFIGCSPSLSGAIRVNPWNIEATAEALNEAISMSEREKQLRHEKHYRYVSTHDVAYWSKSFVQDLERACKDHFRKPCWGIGLGFGFRVVALDPHFTKLNFDSIIMSYERSKSRAIFLDYDGTLVPQASLNKNPSEELLRIINTLCADRNNTVFIVSGRSKDDLSKKLISCPKLGIAAEHGYFLRWTRDEEWQTTAQTSDFGWMQMAKPVMDLYTESTDGSTIETKETALVWHHQDADQGFGSSQAKEMLDHLESVLANEPVSVKSGQFIVEVKPQGVTKGLIAEKVLTSMKEKGQLADFVLCIGDDRSDEDMFENIADVMKRSIVAPKTPLFACTVGQKPSKARFYLDDTFEVVTMLSSLADASEPDLMADLEDDLATSVSSIEISDRVVSFSNLRTEGS

SEQ ID NO: 1273 - protein, 339 aa, Triticum aestivum
RKIRLGAPGSHTLIGSATAYGVQTQPNPGRQQGTARMLLNPASEALVLDSIRQHLMEDTAAAAAPVAEARRQRPAYCRSASFGSLVADQWSESLPFRADDSDDMVVYGALRDAFSCGWLPDGSFAAVKPEPLLPSPDSAYACDGPSCFGFLEPETPPATSPGEGEEEGAAFMGEAAAAVARGKHYRGVRQRPWGKFAAEIRDPAKNGARVWLGTYDTAEGAAVAYDRAAYRMRGSRALLDFPLRIGSEIAAAHAAAAHAAAAAAGDKRPSPEPATSDSSSSSSSSGSPKRRKRGEAAAASMAMALVPPPSQLSRPAHAWYPAAPVEQVAMAPRAQQLVS

SEQ ID NO: 1274 - protein, 511 aa, Parvularcula bermudensis HTCC2503
MSTKSKSDLVILYHRQPYEEVVENGQTTFKENKSPNGIVPTLKGFCASADKGTWVAWKQVAPKQQSKFQRRVTIEDDYGDYDVVRLPLSADQVKSFYHVTSKEAFWPVLHSFPWLFSSENSNWDTFREVNRLFAEAACEEVSDDGLIWIHDYNLWLAPYYIRKIKPDTKIAFFHHTPFPSADIFNVLPWREEIVDSLLCTDLLGFHIPRYAENFCGVARALRGVDLADRLDVFPPLVSSGMALSEPTVTPYIEHKGRRIVIDSRPIGTNPPLIQDYLSRFDAGERVAEIRSEIGDLHLIISVGRVDYTKGAKETLEAFDRLLSRRPELTGKVKLMMVCAAAAQGMTIYRTAQREIERLVGSINGKYGTLGWTPIMLTMRPIPFEELVSYFRVADTCWITPVRDGLNLVAKEYIAAKEGSSGALVLSEFAGVAVELPQAILTNPYSANDMDAAIDCAIDMSVEERKERMKALYETVTTWDIRFWAQHVTGLFDELRGKKSTKATTGAAEDAA

SEQ ID NO: 1275 - protein, 1490 aa, Vitis vinifera; identical to SEQ ID NO: 436

SEQ ID NO: 1276 - protein, 878 aa, Debaryomyces hansenii CBS767
MTNALNEIENMSAFPSDGKTVSPKDYANNDKLKLSGRIINVMTLLPTQIVKKTNKSGNDNWDVEPVRGNSALYSSQFFLAQQTDWESHLVGWTGELINKSSNSKSIINENITDDPLYLNKEDKTSLEGKIRDANKSAHIHPVWLLRRDQERWRNYAENVLWPVFHYIQGEPSDGKDEASSWHDYVKFNEAYCQKIISIYKPGDVIWIHDYYLLLLPQLLRMEIPNAIIGLFMHAPFPSSEYFRCLSKRSHLLDGMLGADKIAFQSEAFQRHFSSCCTRLLGCEISKDKLMAYGSAISLETLPIGIDTKKIEYDAFSSDSGIEQKVRALGEIYADKKIIVGRDRLDTVRGVVQKLQAFEMFLQMYPEWRDKVVLIQVSSPGYSHSAKVEQKVTELVHHINSEYGDLNSTPILHYQKRINKDEYLALLRVADLALITSVRDGMNTTSLEFVLCQKENYSPLILSEFTGTASVLSEAILVNPWDSVGIAKTMNDCFYMSKDKKRALEERLYKQVTSNTIQNWTSNFITHLIDHVNNTHQTHYTPALNRPLLLNNYENSHRRLFLFDYDGTLTPIVKDPAAAIPSSRLNAVLDILSSDPKNQVWVISGRDQAFLDKWLGSKNIGLSAEHGCFLKDIGSTEWSNLSASFDMSWQTKVKEVFKEYTEKTPGSNTEQKKVALTWHYRRSDPELGKYQAEKCLKFLKETVATEYDVEVMPGKANIEVRPNFVNKGEIVKRLVLNPHGAKQIPHVVTNYNKDVPVDELPDFILCLGDDFTDEDMFKSLKDIEAEWSLKDHPTNQYGSHGVYPVAVGPASKQTIATSHLTEPSEVLETLGLLSGVVSLFESAGSVSLDDRGHLENSTSSNKSKSAIKEATKKEGSKSC

SEQ ID NO: 1277 - protein, 1518 aa, Mycobacterium sp. MCS; identical to SEQ ID NO: 443

SEQ ID NO: 1278 - protein, 310 aa, Guillardia theta
MLLRSGTTIILLMVALEILTVASSSSLSSPFPTKLLQSRPSRSTSLAAKVFALRLRGGVDGEDPAADQQYENLSRDSKVYMAKIAEQAERYDEMVKATRSIAKMGVDLTVEERSLLSVAYKNVVGTRRASWKIISSIEQKETDEEKLALIREYLAKVEGELSDVCRDIISLLDKFLIPSAKEDEPKVFYLKMHGDYWRYLAEVASTDMRKAASDAALKAYSAAQDIAVEHLATTHPIRLGLALNFSVFYYEILGLPEQACALAKQAFDDAITDLDSLSEESYKDATLIMQLLRDNLTLWTSDVAQPPAQQ

SEQ ID NO: 1279 - protein, 477 aa, Carboxydothermus hydrogenoformans Z-2901
MRGNLLVVSNRGPFTIEENNGSLKYRPAVSGLVSAVLPAVKKIGGTWLAWAGRIAEKPAEVQAVIKDEFQFVEILLSREEVEGYYEGYANGVLWPLCHLMPEKVRMYEENYRIYREVNQKFAQKAATLLRTGTLLWIHDYHLALMPHFIRQKNPWQRIAFFWHIPFPPVELFTIQPWAEEILRGLLGADIIGFHIDDYRENFLRAVERVLKLPVNYEWGTVYYNGREVLVKAVPIGIETKNFQKEVPEITEIEQEIAGLKIFLGVERLDYTKGLKEKIQGFARFLEKNPEYRGKVKLLQVAVPTRENIDQYQTYAREVLAEAAKVNERFGDNHWQPIKILKRNYSQEELIYLYRIADALVITSLEDGLNLVAKEYIASRKEPGVLILSKRTGVARQLNAALLVNPYSPEEIALKMKEAIEMPDTLKKKSFSLLKEQVILKNNEWWLENFLGKELRLMDTGFGKYYRKRGEKKVGAID

SEQ ID NO: 1280 - protein, 463 aa, Streptomyces avermitilis MA-4680
MASTRGAQILVASNRGPVSYTLDETGTLTSKRGGGGLVSGLSAIGPDAGALWVCSALGEGDREAVRRGVGEPGVRMLDVDAEVHADAYNGIANSVLWFVHHMLYQTPLEPVFDAEFRRQWAAYETYNHAFAAALAEEAAEGAAVLVQDYHLTLVPRMLRELRPDLRIGHFSHTPWAPSEYFRMLPDDIAAQVLGGILGADRAAFLTQRWADAFTDCCHAVLGPGIPSGTRIGVHGLGADADFLRERAHRPDVEERMAALREEVGEGRKTIVRVDRTELSKNIVRGLLAYRELLASRPDWRERVVHVAFAYPSRQDLAVYRDYTAAVQRLADEINAEYGTPGWTPVVLHVKDDFARSLAAYRLADVALVNPIRDGMNLVAKEVPVVSDEGCALVLSREAGAYEELGEDAITVNPYDVVGTAVALHEALSMPAGERAERTKRLAGAATALPPARWFLDQLHALDT

SEQ ID NO: 1281 - protein, 593 aa, Physcomitrella patens subsp. patens
MADEEGRDGTDVTSSSWRKDEEYTKDGTVDFRGRQAVKARTGGWRTSWFIYSNQVFVNLAWYGCSTNLVTYLTSVMHQSNSAAATNVSNWNGAGYVTPLIGAFLADGYWGRYWAAVVCCLIYIIGMIFLTFSASLRSLRPQQCSTEDVLCTHSSLGQAAFLFFALYVIDVGAGGVQATVTSFGADQFDEEDSKEKTQKTSFFNWFYQSTILGGLLAATFFVYIQDNVSWGLGFGASLIAVIIGTISFIAGTPFYRHHPPGGNPLTRIGQVIVASARKWHHKIPVGSELYEVREVTNSVIQGGRKIRHTKEFRFLDKAAVEMQGDRINESHVDPWRLCTITQVEEVKVVLRMIPIMITSAMFSTVYNQLYTLFIIQGSSMDLRMGNFKIPPASLSVFELLSVTVWVQVYDFVLIRFVSKFTKNPRGFTELQRIGIGLFISIFGMIAAALLEIERLKVARHHGLLDNPEVPVPLSVFWQVPQFSLVGASEVFGYIGIFEFFYGESPDAMRGLGSAFALLTIALGSFLSSVLLTIVTRITTRNGAPGWVADNINRGHIDYFFWLLAGMSAMNLVLFVLCSRWYKTIRTWRPTVQGN

SEQ ID NO: 1282 - protein, 821 aa, Arabidopsis thaliana
MDYDDARGERPRLLVVANRLPVSAKRTGENSWSLEMSPGGLVSGLLGITSQFDTKWVGWPGVDVHDEIEKNALTESLAEMKCIPVFLNGVFDQYYNGYCNGILWPILHHMGLPQEDQHDTNQTFETQYDAYKKANRMFLDVIIDNYEEGDIVWCHDYHLMFLPQYLKEYNNKIKVGWFLHSPFPSSEVYKTLPSRSELLRAILAADLLGFHTYDFARHFLSTCTRILGVEGTHEGVVYQGRVTRVAVFPIGIDPDRFIRTCKLPEVTQQMNELQEKFAGKKVILGVDRLDMIKGIPQKYLAFEKFLEENPYWRDKVVLVQIAVPTRNDVPEYRKLKSQVHGLVGRINGRFGSVSSLPIHHLDCSVDFNYLCAIYAIADVMLVTSLRDGMNLVSYEFVACQEAKKGVLVLSEFAGAGQSLGVGALIVNPWDVTEVSSAIKEALNMPAEERETRHRSNFQYVCTHSAEKWGLDFMSELNGIIPESEMQMRKIPLQLPEQDVIQQYSQSNNRLIILGFFGTLAEPMNSGTKEMDLKLNPELKGTLKALCNDPKTTVVVLSRSGKNILNKNFGESNIWLAAENGMFEKQTTGEWVTNMPQNVNLDWVDGVKNVFKYFTDRTPRSYFEASETSLVWNYEYADVEFGRAQARDLLQYLWAGPISNASVDVVRGNHSVEVHAIGETKGAAIGRILGEIVHRKSMTTPIDFVFCSGYFLEKDEDIYTFFESKILSSKSPNGLDLKKENYFSAAIGQARTKARYVIDSAHGVVDLLHKLAVVADTTMTDSFSDSEIYEPRDANANENSKRWINSVRRRKVEIGDTGQIGM

SEQ ID NO: 1283 - protein, 937 aa, Oryza sativa
MGDHSEMPHHRHLTPSPSHEEHETPNPSLTPPPMQLAALASDEPPPPPPEQSPRRIVVAHRLPLNATPDPGSPFGFAFSLSADAHALQLSHGLGLAHVVFVGTLPAEAARALRRSDELDRHLLGCFSCLPVFLPPRAHDEFYAGFCKHYLWPRLHYLLPHAPAANGYLHFDAGLYRSYASANRSFAARVVEVLSPDDGDLVFVHDYHLWLLPSFLRRGCPRCRVGFFLHSPFPSAEVFRSIPVREDLLRALLNADLVGFHTYDYARHFLSACSRLLGLAYTSRHGRVGINYHGRTVLIKFLSVGVDMGLLRTAMASPEAAAKFREITEVEYKGRVLMVGVDDVDIFKGVRLKLLAMESLLETYPALRGRVVLVQIHNPTRCGGRDVERVRGETAKIQARINARFGGPGYQPVVVVDRAVPMAEKVAYYAAAECCVVSAVRDGLNRIPYFYTVCREEGPVDAKGAAGGQPRHSAIVLSEFVGCSPSLSGAIRVNPWNIEAMAEAMHGALTMNVAEKQARHVKHYTYLKLHDVIVWARSFAADLQLACKDRSTMRTIGMGIGPSYRVVAVDAAFKKLPPELVNLSYRAAAAAAAGGGGGRLILLDYDGTLEPTGAFDNAPSDAVIVILDELCSDPNNVVFIVSGRSKDDLERWLAPCANLGIAAEHGYFIRWSRDAPWETMASKQLAAAMEWKAAAKNVMRHYAEATDGSYIEAKETGMVWRYEDADPRLAPLQAKELLDHLATVLASEPVAVRSGYKIVEVIPQGVSKGVAAECIVSAMAARRGGALGFVLCVGDDRSDEDMFGALASLCGGGKNGGASSSTTTTTALLAAAQVFACTVGNKPSMASYYLNDKEEVVDMLHGLAFSSPSSRLRAAAAPRRPADFDIKSLLRNSEKDQNKRAICTGEIFRNQRFVGLGTVMSCASEEKQMQMLLSKKKK

SEQ ID NO: 1284 - protein, 1513 aa, Lentisphaera araneosa HTCC2155; identical to SEQ ID NO: 451

SEQ ID NO: 1285 - protein, 237 aa, Heterocapsa rotundata
MAREKDVYFAKLAEQAERYDEMASHMESVGKSKEELSVEERNLLSVAYKNAVGSRRAAWRIITSVEQKEKSKGNEEQAAYAKEYSGKVEAELQKICGTILGLLDSNLISSASAGESKVFYQKMKADYYRYIAEFSEGDAKAKAAESARAAYEEARNVAEKDLAVTHPIRLGLALNYSVFQYEVLSNPDEACKMARTAFEDAIAELDNVAEDSYKDSTLIMQLLRDNLTLWTSDQEES

SEQ ID NO: 1286 - protein, 237 aa, Heterocapsa rotundata
MAREKDVYFAKLAEQAERYDEMASHMESVGKSKEELSVEERNLLSVAYKNAVGSRRAAWRIITSVEQKEKSKGNDQQAAYAKEYSGKVEAELQKICDTILGLLDSNLISSASTGESKVFYQKMKADYYRYIAEFSEGDAKAKAAENARAAYQEAQDVAEKDLAVTHPIRLGLALNYSVFQYEVLSNPDEACKMARTAFEDAIAELDNVAEDSYKDSTLIMQLLRDNLTLWTSDQEDQ

SEQ ID NO: 1287 - protein, 235 aa, Matricaria chamomilla
MIRNNAFDSDFALLESVRRHLLDDNAPPMSCRSNNFLFPHLSDSWGELPLQQNDSEDMLIAKFLNEALPLQQNDSEGIITPEMTSSSENIFFVKSEPETSSFQPKSLGSQKGKHYRGVRRRPWGKYAAEIRDPAKNGARVWLGTYETAEDAAVAYDMAAYRMRGSRALLNFPLRINSGEPEPVRITSKRKTTSPSEGLVVKKVKVELEMSTQAEFPLVYGCYYCVILGPFLVKCF

SEQ ID NO: 1288 - protein, 835 aa, Oryza sativa Japonica Group
MKQRLLVVANRLPVSANRRGEDQWSLEISAGGLVSALLGVKDVDAKWIGWAGVNVPDEVGQRALTRALAEKRCIPVFLDEEIVHQYYNGYCNNILWPLFHYLGLPQEDRLATTRNFESQFNAYKRANQMFADVVYQHYKEGDVIWCHDYHLMFLPKCLKDHDINMKVGWFLHTPFPSSEIYRTLPSRSELLRSVLCADLVGFHTYDYARHFVSACTRILGLEGTPEGVEDQGRLTRVAAFPIGIDSERFKRALELPAVKRHITELTQRFDGRKVMLGVDRLDMIKGIPQKILAFEKFLEENHEWNDKVVLLQIAVPTRTDVPEYQKLTSQVHEIVGRINGRFGTLTAVPIHHLDRSLDFHALCALYAVTDVALVTSLRDGMNLFAGAAQSLGAGAILVNPWNITEVADSIKHALTMSSDEREKRHRHNYAHVTTHTAQDWAETFVCELNETVAEAQLRTRQVPPDLPSQAAIQQYLHSKNRLLILGFNSTLTEPVESSGRRGGDQIKEMELKLHPELKGPLRALCEDEHTTVIVLSGSDRSVLDENFGEFNMWLAAEHGMFLRPTNGEWMTTMPEHLNMDWVDSVKNVFEYFTERTPRSHFEHRETSFVWNYKYADVEFGRLQARDMLQHLWTGPISNAAVDVVQGSRSVEVRSVGVTKGAAIDRILGEIVHSKSMITPIDYVLCIGHFLGKDEDIYVFFDPEYPSESKVKPDSSGSVSLDRRPNGRPSNGRSNSRNSQSRTPKAQAAPERSSSSSSSSQGTPNSHHDWREGSSVLDLKGENYFSCAVGRKRSNARYLLNSSEEVVSFLKEMADATAAHNGFQSTTADYMFLDRQ

SEQ ID NO: 1289 - protein, 1478 aa, Bacillus thuringiensis serovar konkukian str. 97-27; identical to SEQ ID NO: 461

SEQ ID NO: 1290 - protein, 256 aa, Zea mays
  misc_feature (172)..(173): Xaa can be any naturally occurring amino acid
  misc_feature (177)..(178): Xaa can be any naturally occurring amino acid
  misc_feature (195)..(195): Xaa can be any naturally occurring amino acid
MSREENVYMAKLAEQAERYEEMVEYMEKVAKTVDVEELTVEERNLLSVAYKNVIGARRASWRIVSSIEQKEESRKNEEHVNLIKEYRGKIEAELSNICDGILKLLDSHLVPSSTAAESKVFYLKMKGDYHRYLAEFKTGAERKESAESTMVAYKAAQDIALAELAPTHPIRXXLALXXSVFYYEILNSPDKACNXAKQAFDEAISQLDTLGEESYKDSTLIMQLLRDNLTLWTSDLTEDGADEGKEAPKGEAGDGQ

SEQ ID NO: 1291 - protein, 202 aa, Vitis vinifera
MHGYTTFDSDFALLESVRRYLLEDSDLPHPFSANAPAYSATTLTFTENWGNPPVLDAAAAGGVVGEAKAEPQEAAAPEEWRRYRGVRRRPWGKYAAEIRDPAKNGSRVWLGTYETAEDAALAYDRAAFRIRGSRALLNFPLRVGSGEPEPVRITPRRRSPQQSLSAAAAAALKRRKCDVDWTAEVEAATENVVDMFQLHQYG

SEQ ID NO: 1292 - protein, 255 aa, Debaryomyces hansenii CBS767
MPTLREDSVYLAKLAEQAERYEEMVENMKTVASSGQELSVEERNLLSVAYKNVIGARRASWRIVSSIEQKEEAKGNESQVSLIRDYRSKIEAELSKICEDILSVLTDHLISSAQTGESKVFYYKMKGDYHRYLAEFAISEKRKDAADLSLEAYKSASDVAVTELPPTHPIRLGLALNFSVFYYEILNSPDRACHLAKQAFDDAVADLETLSEDSYKDSTLIMQLLRDNLTLWTDLSEAPAPTEEQQPSEPKADEE

SEQ ID NO: 1293 - protein, 132 aa, Glycine max
  misc_feature (89)..(89): Xaa can be any naturally occurring amino acid
MEHVGFSKAAIADHGRGKKTGPVSMDHVLLALRETKDERDLRIRSLFNFFDAANNGYLDYAHIEAGLSALQIPPEYKYAKELFELWRTXDANRDGRIDYRDFRRYMDDKELELYRIFQAIDVEHNGCILPEE

SEQ ID NO: 1294 - protein, 261 aa, Brassica napus
MASAREEFVYLAKLAEQAERYEEMVEFMEKVTEAVDKDELTVEERNLLSVAYKNVIGARRASWRIISSIEQKEESRGNDDHVNTIRDYRSKIETELSKICDGILKLLDTRLIPASANGDSKVFYLKMKGDYHRYLAEFKTAQERKDAAEHTLTAYKAAQDIANSELAPTHPIRLGLALNFSVFYPDVRNSPDRACSLAKQAFDEAIAELDTLGEESYKDSTLIMQLLRDNLTLWTSDMQDESTEEIKEDAAPKPAEEQKET

SEQ ID NO: 1295 - protein, 442 aa, Sinorhizobium meliloti; identical to SEQ ID NO: 475

SEQ ID NO: 1296 - protein, 324 aa, Zea mays
DAGGRVGSIRSLLPFQFPHTHVSAHSLLQFRQLVIINRTQSSRFHSRMLLNPASETSVLDTIRQHLLEEPAAAEARPADESFGSLVADQWSGSLPFRTDDADDMVVFGVLQDAFAYGWLPDGSFVHVKPEPVRSPDSSSYHPCSYDGSPCFGLLDPEPPLTPGTTTPGRGQEEAAAAMARGKHYRGVRQRPWGKFAAEIRDPARNGARVWLGTYDTAEDAALAYDRAAYRMRGSRALLNFPLRIGSGDKRPSPAPPEPTTSSDSSSSSASGSHKRRKRGEAAAANMAMALVPSPSQLNRPAQPWFPAAPVEQAAMAPRVEQIVV

SEQ ID NO: 1297 - protein, 1487 aa, Photobacterium sp. SKA34; identical to SEQ ID NO: 481

SEQ ID NO: 1298 - protein, 1523 aa, Photobacterium sp. SKA34; identical to SEQ ID NO: 483

SEQ ID NO: 1299 - protein, 237 aa, Heterocapsa rotundata
MSREKDVYFAKLAEQAERYDEMASHMESVGKSKEELSVEERNLLSVAYKNAVGSRRAAWRIITSVEQKEKSKGNEEQAAYAKEYSCKVEAELQKICDTILGLLDSNLISSASTGESKVFYQKMKADYYRYIAEFSEGDAKAKAAESARAAYQEAQDVAEKDLAVTHPIRLGLALNYSVFQYEVLSNPDEACKMARTAFEDAIAELDNVAEDSYKDSTLIMQLLRDNLTLWTSDQEES

SEQ ID NO: 1300 - protein, 1483 aa, Neptuniibacter caesariensis; identical to SEQ ID NO: 485

SEQ ID NO: 1301 - protein, 237 aa, Heterocapsa rotundata
MSREKDVYFAKLAEQAERYDEMASHMESVGKSKEELSVEERNLLSVAYKNAVGSRRAAWRIITSVEQKEKSNGNDQQAAYAKEYSGKVEAELQKICDTILGLLDSNLISSASTGESKVFYQKMKADYYRYIAEFSEGDAKAKAAENARAAYQEAQDVAEKDLAVTHPIRLGLALNYSVFQYEVLSNPDEACKMARTAFEDVIAELDNVAEDSYKDSTLIMQLLRDNLTLWTSDQEDQ

SEQ ID NO: 1302 - protein, 250 aa, Burkholderia sp. 383
MQSVPASLSLTDTAFFFDFDGTLVELAPTPDSIHVPPSLLTLLDELQRRSHGAVAIVSGRGIDNIDTFLKMPDMPIAGLHGAERRDANGDTQRIGFNDERLLRIERELAAVVDRHPGMLLEIKGAAVALHYRNAPEREAAARAATERLVADYADAYVLQPGKMVFEIKPKGVDKGRALAAFLDEPPFAGRVPVFAGDDLTDEKGFAVVNARGGLSIKVGAGETSARMRLDSVDALHEQIACWLGAGQSDA

SEQ ID NO: 1303 - protein, 459 aa, Burkholderia sp. 383
MSRLIIVSNRVAPISEGEPAAGGLAIGVYDALKETGGMWFGWSGEVVASGAPQIRVEEHGPVTFATIGLSRRDYDQYYRGFSNATLWPAFHYRTDLIQYDRHEFEGYSRVNVWLAQQLVPLLQDDDVIWVHDYHLIPFARALRAAGVKNRIGFFLHIPFPAAQVLVNVPPHRDLVESLCAFDLIGFQTEPDLRAFCDYVESEADGVIERDGHLATVRAFGRTLRAAAYPIGVHPDEIASLAQAGEHGKAVRTLAISLRGRKLIMSVDRLDYSKGLVERFRAFEKLLEHEPSHRNRVSFLQIAPSTRAELRAYQDIRLQLEGESGRINGRFAELDWAPILYIHRQYDRQLLAALYRLARVGYVTPLRDGMNLVAKEYVSAQNPEDPGVLVLSRFAGAARELTGALIVNPIDIDGMADALSQALTMPLAERRARYTDMIAQLRENNVSVWRDNFLRDLQHA

SEQ ID NO: 1304 - protein, 1762 aa, Mycobacterium abscessus; identical to SEQ ID NO: 492

SEQ ID NO: 1305 - protein, 1489 aa, Xylella fastidiosa 9a5c; identical to SEQ ID NO: 496

SEQ ID NO: 1306 - protein, 1482 aa, Spinacia oleracea; identical to SEQ ID NO: 506

SEQ ID NO: 1307 - protein, 727 aa, uncultured archaeon GZfos33E1
MRRLLIISNRLPVSVERRKNEFRFSSSVGGLATGLNALHQRYESVWVGWPGIAINREENDYVESKLSEFNCYPVFLSQGEVEKYYYGFSNKTLWPLFHYFPQYAKYEYAEWSAYEHVNRKFCERVAEIAKPEDVIWIHDYHLMLLPGLIRGRFPDATIGFFLHIPFPSADLFRLIPWRRRILEGVLGADFIGFHTYDYAHNFLSSVLCLLGYEHELGKFAIGDRIVQVDVHPMGIEVQKFVSATSGRGIKREVARLRSRFKNCKIIFSMDRLDYTKGIPERLYAFEHFLETHPEWHEKVVFILKIAPSRTKVGQYRVLKQEIDELVGRINGKYGTPEWVPISYFYRSLPFQTIVAFYLAADVALLTSMRDGMNLIAKEFVASRVDGKGVLILSEMAGAARELGEALVVNPNNKEEVAEALNEALRMPEEEQKSRNEEMQKRLSHYDVFHWGSGFIRSVLETKRLQEELNMKKLNEKIREELKNSYKAADKRLLLLDYDGTLVPFADKPERAKPDKELLYIFRALSEPPENTVVIISGRDKETLERWFGDTGVCLVAEHGVRLREEEGEWEEIELLKEDWKEKIISILDLFVDRAPGSFIEEKSFSLVWHYRNVDPELGELRAKELTDQLIGLTACTELQVMKGNKVVEVKDGRVNKGIAASHWLTKGFGFILAVGDDLTDEDMFKVLPEGAYSVKIGFTPSKARFYLGSPKEVRALLDEMEMVEVYK

SEQ ID NO: 1308 - protein, 1579 aa, Bordetella parapertussis 12822; identical to SEQ ID NO: 511

SEQ ID NO: 1309 - protein, 246 aa, Glycine max
MSDSSREENVYMAKLAEQAERYEEMVEFMEKVAKTVEVEELTVEERNLLSVAYKNVIGARRASWRIISSIEQKEESRGNEDHVAIIKEYRGKIEAELSKICDGILNLLESNLIPSAASPESKVFYLKMKGDYHRYLAEFKTGAERKEAAESTLLAYKSAQDIALADLAPTHPIRLGLALNFSVFYYEILNSPDRACNLAKQAFDEAISELDTLGEESYKDSTLIMQLLRDNLTLWTSDITDDAGDG

SEQ ID NO: 1310 - protein, 1615 aa, Deinococcus radiodurans R1; identical to SEQ ID NO: 515

SEQ ID NO: 1311 - protein, 1508 aa, Caulobacter crescentus CB15; identical to SEQ ID NO: 518

SEQ ID NO: 1312 - protein, 501 aa, Thermoanaerobacter tengcongensis MB4; identical to SEQ ID NO: 522

SEQ ID NO: 1313 - protein, 282 aa, Mesembryanthemum crystallinum
MSLIANFESDFAVLESIRRHLLEDWDPRAGAPAITTGSGPVYHRNSSFSSLYPCLTDNWGELPLKEDDSEDMVLFGVLRDAVHTGWSPQSGSESGSGSPAPVTVKPEPVDSPVSSPAPVRVAGGEAPVAAAPARGKHYRGVRRRPWGKFAAEIRDPAKNGARVWLGTFETAEDAALAYDRAAFRMRGSKALLNFPLRVNSGEPDPVRITSKRSSPERSVSSSSSESASPKRRKKEEVVVGPVAGQARPGLQQVGNVVEGMQVGVGCQVGVGTMPLGDQLLVT

SEQ ID NO: 1314 - protein, 1526 aa, Bifidobacterium longum DJO10A; identical to SEQ ID NO: 524

SEQ ID NO: 1315 - protein, 1478 aa, Bacillus cereus E33L; identical to SEQ ID NO: 525

SEQ ID NO: 1316 - protein, 824 aa, Oryza sativa Japonica Group
MPSLPNSGDEGGAPPPTPPPPGARRVVVAHRLPLRADPNPGAPHGFDFSLDPHALPLQLSHGVPRPVVFVGVLPSAVAEAVQASDELAADLLARFSCYLVFLPAKLHADFYDGFCKHYMWPHLHYLLPLAPSYGRGGGLPFNGDLYRAFLTVNTHFAERVFELLNPDEDLVFVHDYHLWAFPTFLRHKSPRARIGFFLHSPFPSSELFRAIPVREDLLRALLNADLVGFHTFDYARHFLSACSRVLGLSNRSRRGYIGIEYFGRTVVVKILSVGIDMGQLRAVLPLPETVAKANEIADKYRGRQLMLGVDDMDLFKGIGLKLLAMERLLESRADLRGQVVLVQINNPARSLGRDVDEVRAEVLAIRDRINARFGWAGYEPVVVIDGAMPMHDKVAFYTSADICIVNAVRDGLNRIPYFYTVCRQEGPVPTAPAGKPRQSAIIVSEFVGCSPSLSGAIRVNPWNVDDVADAMNTALRMSDGEKQLRQEKHYRYVSTHDVVYWAQSFDQDLQKACKDNSSMVILNFGLGMGFRVVALGPSFKKLSPELIDQAYRQTGNRLILLDYDGTVMPQGLINKAPSEEVIRTLNELCSDPMNTVFVVSGRGKDELAEWFAPCDEKLGISAEHGYFTRWSRDSPWESCKLVTHFNWKNIAGPVMKHYSDATDGSYIEVKETSLVWHYEEADPDFGSCQAKELQDHLQNVLANEPVFVKSGHQIVEVNPQGVGKGVAVRNLISTMGNRGSLPDFILCVGDDRSDEDMFEAMISPSPAFPETAQIFPCTVGNKPSLAKYYLDDPADVVKMLQGLTDSPTQQQPRPPVSFENSLDD

SEQ ID NO: 1317 - protein, 119 aa, Triticum aestivum
  misc_feature (34)..(34): Xaa can be any naturally occurring amino acid
  misc_feature (40)..(40): Xaa can be any naturally occurring amino acid
  misc_feature (49)..(49): Xaa can be any naturally occurring amino acid
  misc_feature (52)..(52): Xaa can be any naturally occurring amino acid
  misc_feature (56)..(56): Xaa can be any naturally occurring amino acid
  misc_feature (60)..(61): Xaa can be any naturally occurring amino acid
  misc_feature (92)..(92): Xaa can be any naturally occurring amino acid
  misc_feature (96)..(96): Xaa can be any naturally occurring amino acid
  misc_feature (100)..(102): Xaa can be any naturally occurring amino acid
  misc_feature (105)..(105): Xaa can be any naturally occurring amino acid
  misc_feature (113)..(113): Xaa can be any naturally occurring amino acid
  misc_feature (115)..(115): Xaa can be any naturally occurring amino acid
ESHLDHDRHLAGTASQREPSPGLRRRRSPSPSSXSAGSWXSPDDADLRXLVXRVLXHYEXXYRAKSAGASADVLPMFAPSWISATESLYLWXGGWXPTSXXXLLXSKSGLQVXGXLPGF

SEQ ID NO: 1318 - protein, 455 aa, Xanthomonas axonopodis pv. citri str. 306
MSRLVVVSNRVAVPGENRAGGLAVGLLAALKERGGVWFGWSGKTVRGDSGGMHEQTEGDITFVTMDLNKRDIDSYYNGFANRTLWPLLHFRLDLVDYDRATREGYMRVNRLFAEKLAPLLKDSDTLWIHDYHMIPLGAMLRELGVGCKMGFFLHVPMPSADLVQAMPDHARLFSTFYAYDLVGFQTQRDAERFKAYVRLFGGGRILEGDLVEGPGGRRFTASSFPIGIDTDLIAHQAKASAGKQAVRDLRESLRGRQLAIGVDRLDYSKGLPERFQGFERYLERYPDQSGSLTYLQIAPVSRGDVTEYRQLRSQLEQIAGHINGGHAEPDWTPLRYVNQNFSHATLTGFYRAASVCLVTPLRDGMNLVAKEFVAAQDPADPGVLVLSLFAGAADEMKEALLVNPHDLDGVADAIATAASMPLASRIERWHAMMDHLRKNNINHWRQRYLQALSEV

SEQ ID NO: 1319 - protein, 1624 aa, Oryza sativa; identical to SEQ ID NO: 529

SEQ ID NO: 1320 - protein, 479 aa, Corynebacterium diphtheriae NCTC 13129
MSAIESNEGEQLFDFVVVANRLPVDLSTSADGSPRWVASPGGLVTALTPVLAGNRGCWVGWHGGTGPAPDPFRTDTNIWVHPVALSDHDFEGFYEGFSNATLWPLYHDLIVSPVYNRDWWTAYREVNLKFASAVAEVAAEGAVVWIQDYQLQLVPGILRQIRPDLTIGFFLHIPFPHSDLFRQLPWREEIVRGLLGADLVGFHLTSSANNFLDLAAALGLEAQGRAKVREVSATVTAGDGHVVSVAAYPISIDVEPLIASHSNRDEIRAEFGYPETLILGVDRLDYTKGILQRLLAFEELLESGAIDPNTTVFAQVATPSRERIEHYKQARSEVEEAVGRINGRFGSIGRSVVHYHHRHMDRSELNKLYRAADVMLVTPFKDGMNLVAKEYVSCHSDGSGAMVLSEFAGAAVELEQAFLCNPFDLESIKRQIAGAVTTLKNHPEAARDRMLAMHQQVVDHDVNVWASAFLRDLSSAHTS

SEQ ID NO: 1321 - protein, 1679 aa, Vitis vinifera; identical to SEQ ID NO: 532

SEQ ID NO: 1322 - protein, 533 aa, Oceanobacillus iheyensis HTE831; identical to SEQ ID NO: 537

SEQ ID NO: 1323 - protein, 2216 aa, Arabidopsis thaliana; identical to SEQ ID NO: 540

SEQ ID NO: 1324 - protein, 1512 aa, Rhodobacter sphaeroides; identical to SEQ ID NO: 542

SEQ ID NO: 1325 - protein, 485 aa, Corynebacterium glutamicum
MDDSNSFVVVANRLPVDMTVHPDGSYSISPSPGGLVTGLSPVLEQHRGCWVGWPGTVDVAPEPFRTDTGVLLHPVVLTASDYEGFYEGFSNATLWPLFHDLIVTPVYNTDWWHAFREVNLKFAEAVSQVAAHGATVWVQDYQLLLVPGILRQMRPDLKIGFFLHIPFPSPDLSRQLPWREEIVRGMLGADLVGFHLLQNAENFLALTQQVAGTAGSHVGQPDTLQVSGEALVREIGAHVETADGRRVSVGAFPISIDVEMFGEASKSAVLDLLKTLDEPETVFLGVDRLDYTKGILQRLLAFEELLESGALEADKAVLLQVATPSRERIDHYRVSRSQVEEAVGRINGRFGRMGRPVVHYLHRSLSKNDLQVLYTAADVMLVTPFKDGMNLVAKEFVANHRDGTGALVLSEFAGAATELTGAILCNPFDVESIKRQMVAAVHDLKHNPESAATRMKTNSEQVYTHDVNVWANSFLDCLAQSGENS

SEQ ID NO: 1326 - protein, 765 aa, Zea mays
FGRGLPRPVVFVGALPSAAASISESDDLAADLFTRFACSPVFLDPSLHNDFYNSFCKRYLWPILQLQYLLPFTRSSDSGCLSFNEDLYRAYLTANTQYADRVFEHLNSDEDLVLIHDYHLFALPTILRRKSPRARIGFFLHSPFPTSELFRAIPVREELLRALLNADLVGFQNYDYGCHFISACSTLLGITSRAHGDYICIDYFGRAVVVNILSVGVDMVRLREVLSSPETAAKAKEVATKFAGRQVLIGVDDVDLFNRIDVKLLAMERLLESRPELIGQVVLVQINNPARSPGRDTDTVLAEVQLLMDRINARFAKPGYDPIVMIDDPLTMHEKLAFYTSADICIVTAVRDGLNRTPYIYTVCREHGPISSGVAGAPRESAIVLSELVGCSTFLRGAVRVNPWNVDDVVEGMSSALRLNERDKKILHAKHYMYVVKHDIAYWGRSLDQNLQKASMDHASMNFLSVGLAMNFRIVVLDPNFQKLSPEHINPSYHRTGNRLILLDYDGTVMVPQGLITRHPSQELVSVLNELCSDPMNTVFVVSGRSKDELAGWLAPCEKLGISAEHGYFTRWSRDSPWESPKLLLDNDWKNIVEPVMKYYCDVTDGSYIEAKETALVWHYEEADPVFGPRQAKELQYHLRDVLSEEPVYVKSGHQIVEVNGNPQEVVGKGTAVQGLIAALGARGRMPDFILCVGDDVSDEDMFEAISAPSSKFAFPEAAEIFACTVGNKPSLAKYYLEDPDEVLKMLKGLIDSFEENHSTVEANK

SEQ ID NO: 1327 - protein, 251 aa, Glycine max
MYGRSDSYESDLALLDSIRRHLLGESELIFGAPNFGSGRSSSFSSLDSCLSDDWGELPFKEDDSEDMVLYGVLRDAVNVGWVPSLDAGSPESVSSGFPAVKLEPDVMPALINPCPPPAPAVEEKKVVPPKGKHYRGVRQRPWGKFAAEIRDPAKNGARVWLGTFETAEDAALAYDRAAYRMRGSRALLNFPLRVNSGEPDPVRVTSKRSSSPESMAAAAPKRKKVMVVGTVQEQVGSQVVECTRGEQLLVS

SEQ ID NO: 1328 - protein, 442 aa, Fulvimarina pelagi HTCC2506; identical to SEQ ID NO: 545

SEQ ID NO: 1329 - protein, 1538 aa, Porphyra purpurea; identical to SEQ ID NO: 546

SEQ ID NO: 1330 - protein, 219 aa, Arachis hypogaea
MTPLAFSQFYEKWFDLLHHLVNQLSDFASSIANSKEEYISPLVAAKQEEKLAQLIGKVMLHHEEYFRAKSLITENDPLSVVASPWATTLERSLHWVTGWRPTTAFHLVYTESSVLFESHIGDILRGVNTGDLGDLSPTQFRRVSELQCDTVKEENQITDELSDWQDTASHLMGPRAESKERIERLICITRKRMIYGSERCAAWLVAVAATRRLNPHNVC

SEQ ID NO: 1331 - protein, 1478 aa, Bacillus cereus ATCC 14579; identical to SEQ ID NO: 547

SEQ ID NO: 1332 - protein, 1518 aa, Mycobacterium smegmatis str. MC2 155; identical to SEQ ID NO: 549

SEQ ID NO: 1333 - protein, 261 aa, Zea mays
MASAELSREENVYMAKLAEQAERYEEMVEFMEKVAKTVDSEELTVEERNLLSVAYKNVIGARRASWRIISSIEQKEEGRGNEDRVTLIKDYRGKIETELTKICDGILKLLETHLVPSSTAPESKVFYLKMKGDYYRYLAEFKTGAERKDAAENTMVAYKAAQDIALAELAPTHPIRLGLALNFSVFYYEILNSPDRACSLAKQAFDEAISELDTLSEESYKDSTLIMQLLRDNLTLWTSDISEDPAEEIREAPKHDSSEGQ

SEQ ID NO: 1334 - protein, 237 aa, Oryza sativa
MSLSLGFSAGAGVGADRLAAAPALQAAGALPPRVDVSLSLARAANGQPSSYLPLNENDSLDMVLFDVLREASAVAALSSSSSSSPELGARTTAPVVAGHPAGRKGGGGGGGGRGAAARGGAAGGRHYRGVRRRPWGKYAAEIRDPTRHGARLWLGTFGTAEEAAAAYDRAAFRMRGAKALLNFPPAVAGDGARRGAAAAAKQVGMSDVVPRACHVVCYSVLSAHIFYDIFRGVIPIP

SEQ ID NO: 1335 - protein, 500 aa, Dehalococcoides sp. VS; identical to SEQ ID NO: 555

SEQ ID NO: 1336 - protein, 1492 aa, Thermus thermophilus HB8; identical to SEQ ID NO: 558

SEQ ID NO: 1337 - protein, 157 aa, Zea mays
SRGQEEAAAAMARGKHYRGGRQRPWGKFAAEIRDPARNGARVWLGTYDTAEDAALAYDRAAYRMRGSRALLNFPLRIGSGDKRPSPAPPEPPPSSDSSLFSASGSPKRRKRGEAAAANMAMALVPPPSQLNRPAQPWFPAAPVEQAAMAPRVEQIVV

SEQ ID NO: 1338 - protein, 344 aa, Cicer arietinum
GFREFKDDSDFDEDEEDDDDDEGLLVGGKGFTFSSNNTKSFKTFSRGSTAAKSVSPKSNEQAEKACKRKRKNQYRGIRQRPWGKWAAEIRDPRKGVRVWLGTFNTAEEAARAYDAEARRIRGKKAKVNFPEEAPVTSSKRFKPNLENKLVNKNLNSFNPNGNKMFNFGENVENYYSPMDQVEQKPLVNNNNQYANMGPFSGNGVQHSQISPSADVTAYFSSEHSSNSFDYSDLGWGEQGPKTPEISSMLSAAAPLESESQYVQNNMQSNNNQNMLPVEDNSAKTLSEELADIESQLKFFETPYDDNWGDASLASFLGGDATQDGGNPMNLWSFDDLPSISGGVF

SEQ ID NO: 1339 - protein, 528 aa, Salinibacter ruber DSM 13855
MRRGSNEETTERRIRQGTSTAAEQHPPRALPSFVRTGMLVALIVRGAHARLDRRPGRAGPGPNHCFFDHAAPIALSLTVVANRVPIRQTDDGWETSVGGLTTALLPVLEEEGGMWVGMGEDPDLPERQEYPADDPDFLVRRVPLSSKELEGYYYGMANQILWPLSHYLIQHLNLDDQFIETYRQVNERFAEAVLAETETGDEDVIWIQDYHQMLSPNLIRQERPDATIGHFWHIPWPAMEIFRILPWSRELLRGMLGCDLIGFHVQEYVDNFIESAEVLLGAEVDGDRVRHNGHETRVEAHPIGIDVDRFKEMSRDDSIEQDAQKFRERLGSDHIVIGIDRLDYTKGIRSRMLAFEKFLEENPEYHGNVSFFQIATPSRTELESYQQIRREVDEVVGRINGRFAEENWVPVNYRYRTYTQYELCAFYRAADAALITPLRDGMNVVTQEFVTASQDGVLILSELTGAAYLLPEAVQVNPYDHGGVADAIRTALEMPTGEREERLAGLKDTIETLDVHNWAGNFLDSIQE

SEQ ID NO: 1340 - protein, 358 aa, Vitis vinifera
MTNQNVAVSDPKSAIGMAIDVIVSNSSFFSPAVRKPPTVPGGYITISLKKLETGGAGGAGRVGAWVDSMRASSPTHIKSTPLSDSEALSSWMLHHPSALRTFEQITNASEGKQIVMFLDYDGTLSPIVEDPDQAFMSKEMRAAVKDVARYFPTAIVSGRCRDKVYRFVKLSELYYAGSHGMDIKGPAKGRKYKKGDQSLLCQPASEFLPMIDEVYKALLEKTKSTPGAKVENNKFCLSVHFRCVDEQRWTALAEQVRLVLNQYPKLRLTQGRKVLEIRPTIKWDKGNALEFLLESLGYANSNDVFPIYIGDDRTDEDAFKVLRNRGQGFGILVSKFPKETSASYSLQEPTEARTLIWT

SEQ ID NO: 1341 - protein, 201 aa, Oryza sativa
MGCMGNYKVPTGIRTLHRGYQKGPDLGARSLLDEWFALCQKLAIAAEHGYFVRWNKAAEWESSYPNHDFEWKHNVEPVMQVYIETTDGSSIEPKESALLWHYLDADHDFGSCQAKELLGHLERVLSNEPVVVKCGHYIVEVKPQGVSKGLAVDKKPSKAKYYVDDAGEVVRLLKNVAGISSHREAVSHGRVIFRDVMDYVD

SEQ ID NO: 1342 - protein, 462 aa, Streptomyces coelicolor A3(2)
MASSFGAAQVLVASNRGPVSYEVREDGSLHAKRGGGGLVSGLSAIGPDAGALWVCSALSDGDREAVRRGVGEDGVRMLDVPADVHADAYNGIANSVLWFVHHMLYQTPLEPVFDAEFRRQWASYEAYNRAFAEALAEEAAEGAVAIVQDYHLTLVPGMLRELRPDLRIGHFSHTPWAPLDYFRLLPDDIAEQVLRGMLGADRLGFLTRRWADAFTACCDAVVGGLGGTEIGVHGLGADGDFLRKRSHEADVEERMAELREQIGEGRRTIVRVDRTELSKNIVRGLLAYRELLAGRPEWRERVVHVAFAYPSRQDLAVYREYTAEVERVANAVNEEFGTPGWTPVVLNLKDDFARSLAAYRLADVALVNPVRDGMNLVAKEVPVVSDTGCALVLSREAGAYEELGEDAVVVNPYDVVGTADALHAALGLPAGDRAERSKRLAAAGTALPPARWFLEQLEALRG

SEQ ID NO: 1343 - protein, 261 aa, Triticum aestivum
MTATSRPQHPNGSLAPASDGGESFAKFFECWILEQSRDLAALRAAATARPDDADLRRLVDRVLGHYEHYYRAKSAAASADVLPMFAPSWISATESLYLWCGGWRPTSAIQLLYSKSGLQLEAQLPAFLDGGSLRGTATLGGLSAEQLQAADQLQRRTVRREREIEEAAAGAQESLATTKMVELAGKGGMDAAEGMELEMDAKAEAMKRVLEMADGLRLETLRGVVGLLRPAQAVHFLVAAAELHLAVHKFGRRKDGAAAAE

SEQ ID NO: 1344 - protein, 264 aa, Vitis vinifera
MCDYSSNPSSDFALLESVRRHLFDDSDSRRFDAPLYCRSNSFSSLFETGGELPLKEDDSDDMVIYGFLRDAASGGWTPTLAPLFSETASHGFSTAPAVATVDPPAKLPAPAVVPAKGKHYRGVRQRPWGKFAAEIRDPAKNGARVWLGTFETAEDAALAYDRAAYRMRGSRALLNFPLRVNSGEPDPVRVTSKRSSPEPSSSSTSSSSSDNSSPKRRKKVSSLAAPAVAPATAQTGIEIGKSMEGSQAGYEVAQLTHGPQLLVR

SEQ ID NO: 1345 - protein, 298 aa, Ostreococcus tauri
MTSSRDANRPDQSTFSDTSSTDGSRDALVFQARLAQQCGRDDDMLSAMKVLLVASQDELTTTERNLLSVSLKNVLQRLRSSVSIARTLEIRERQLANDDGASLCRKYVKKLCVELFGFCEQTIEMVSGRARTVSAAASLDARVFWLKLMGDYWRYICEIENGIDLKDLGIERAHDARARAEDCYRAGIELASSLPITDATRLGLYLNETVFLYEIIGNRRAAIEITKACLDQTVEASPRLDDDGVDETEAIIELLANNLALWGQDAEDPPASLSTSVDAKDVRVLHAETLDLAKLHLR

SEQ ID NO: 1346 - protein, 1490 aa, Xanthomonas campestris pv. campestris str. ATCC 33913; identical to SEQ ID NO: 579

SEQ ID NO: 1347 - protein, 900 aa, Zygosaccharomyces rouxii
MVNSGHRRQRIINCVAQLPYKIQLGETNDEWNIVPATGSSSLYSSIEYLNSEEKAKDYEQHVLGWTGEIGRESLPSRLFNSKNRDKSENGEKGENDLHAKEEREKEEDPLYLTNDQIDGITKDLRRHGKSDDHYNVDNVHPVWLLRRDQKRWRGFAENVLWPTFHYILKFSSDSGEKENLSWYDYVRFNEAYAMKIGEIYEKGDIIWIHDYYLLLLPQLLRMKFNDQDLTIAYFHHSPWPSNEYFRVLPRRKQILDGLMGADRGWFQNEGFARHFVSSCKRLLDSTSRKSKNRLGMEQYQISAYGGDIVVDSLPIGINRVKLLEDTFTKDIAQKVLAIKDAFQGKKIIVGRDRLDSVRGVVQKLRAFETFLSMYPEWRDQVVLIQVSVPSMKGGTNQLIRLEQQVNELVTSINMQYGSLNFSPVHHYYMRIPKDVYLSLLRVADLCVIASVRDGTNTTALEYVTVKSHMSNYNCYGNPLILSEFSGTSTILKDAMIINPWDSVAVAKSINRALSLSRDEKRALEDKIWPQVPTIQKWTDQFLSTLSDIVDEAHNTTDRKMTPALNRPALLEHYRQSKRRLFLFDYDGTLTPIVQDPAAAIPSARLISILQKLASDPCNQIWIISGRDQAFLNKWLGSRLPQLGLSAEHGCFYKDVDEENWINLTEKFDMSWQEKVGSIMEEFTRRTPGSFIERKKVALTWHYRRADPELGEFYASELKKELDKICADYDLDVMEGKANIEVRPKFVNKGEIVKRLVWHHHGRRQDMLNTKKEELPISEMPDFTLCLGDDFTDEDMFNQLNDIEAVWKKQYEDEVNQWGGFGLYPCTVGSASKKTVAKAHLTDPQQVLDTLGLLVGDVSLFQSAGTVELDSRGHVKHSDSSIRSEQASARYAMKRQQSYKN

SEQ ID NO: 1348 - protein, 523 aa, Legionella pneumophila str. Paris; identical to SEQ ID NO: 581

SEQ ID NO: 1349 - protein, 859 aa, Physcomitrella patens subsp. patens
MADIATRCRIQLSSFQIKHLKDTLTRLGLSKRGTKPLIMPHFCNVKWLKIHVVALRPLYSSLHLDVSKFDGVMLMDKIMGLINPAEKQPTKGLKYSKQIVSREEAIAIIEEEYRKLRHSRSESKRKAAKSGFGSKHPSAGLEELTCVEEAKTRCPCGNNTETGTMIQCVNLKCRVWQHMSCVVIPEKSGDGTQTGIPSNFYCELCRISRSDPFCEAQLQTLMPSKLIPSGANTEGSNIVQTLEKSFYLSRSDRELLQKPNHDLQVWCVLLSDNVSFRMHWPSFADLRVNGIGVRVTNRTGQQLLGANGRDEGTSVTVCAREGLNRLNISTYDARSFCLGVRIIRRLSLEQIMESIPNEKDGEKLEEAMARVRRCINGGGSQGLGADDDSDSDLEVVADFITVNLRCPMSGSRIKVAGRFKPCLHMGCFDLDTFVELNQQARKWQCPICLKNYCIDNLIIDPFFNRITNAVNCLHEDIAAVELKSDGFWRPKLEGRVRSREPWRPSPVVTNVVNETTSVPVLFSENVRTEEKLSSHDNGSSCFNRNPCGVLVLHCTENLNGGHSQEVINVSRLSRSNSITDGNLRGDEDEHSANQDRGAVSTVDGDNVGLSSRSPQPTSKTLQTCADLANGAQVIVLSDSEDEGEDEETIVVSSCASIYVESNVVGNWRMRSRKSYQTNGDSSGLAVGLEYADVTPASHSVCHPSDPATSRRIDIVINEQMTDDSGLGLHLDSGSLSAVPAEIARNGECGVHESQTEVVNVLQGQPVRQTPVRFVAGCGSSFRPLDKDDTTSPSGWESLCLPNGATDTDGGSMDNEGTGLPLQKFLPSQPVRVEVLVAEKNHALEEATHRTLLLQLTCTS

SEQ ID NO: 1350 - protein, 357 aa, Oryza sativa Japonica Group
MGIAAGAALPGGPAGPAGGLFACRSAAASMRQTYLDLAAAAVAARSASCTSWADAMRASSPTRSSRSASDVDEFTAWVRKHPSALSKFEEIAAKSRGKKIVMFMDYDGTLSPIVADPDTAYMSDAMRAAVREVAKTFPTAIVSGRCRDKVRNFVGLSDLYYAGSHGMDIKGPSSNPESALCQPASEFLPMIDEVYKTLVEKTKSTPGAKVENNKFCLSVHFRCVDEKRWNALGEQVKAVIKEYPKLKLTQGRKVLEIRPSIEWDKGKALEFLLESLGFANCGDVMPVYIGDDRTDEDAFKVLRKRGQGLGILVSKCPKDTNASYSLQDPTEVMEFLLRLVEWKRKSSSSSLMIRPRV

SEQ ID NO: 1351 - protein, 173 aa, Brassica napus
EVVILPVESTGFLPEDATIVGNTCLYGATGGLLFVRGKAGERFAVRNSLAQAVVEGTGDHCCEYMTGGCVVVLGKVGRNVAAGMTGGLAYILDEDNTLLPKVNNEIVKIQRVTSQVGQIQLKSLIQAHVEKTGSSKGATIVEEWEKYLSMFWQLVPPSEEDTPEANSDHLVKT

SEQ ID NO: 1352 - protein, 529 aa, Cytophaga hutchinsonii ATCC 33406; identical to SEQ ID NO: 585

SEQ ID NO: 1353 - protein, 256 aa, Zea mays
MVLSETLLYGISGHDGGTGASPISSIKHAGVNFLQTLIQNGLRERVVLRVDGGFRSGQDVLIAAAMGADEYGFGSVAMIATGCVMARICHTNNCPVGVASQREELRARFPGVPGDLVNYFLFVAEEVRAALAQLGYEKLDDIIGRTDLLKPKHISLVKTQHIDLGYLLSIADAIENEKEVSKAFQIYNVDRAVCGRVAGVIAKKYGDTGFAGQLNITFNGSAGQSFGCFLTPGMNIRLVGEANDYVGKGMAGGELV

SEQ ID NO: 1354 - protein, 236 aa, Zea mays
  misc_feature (14)..(14): Xaa can be any naturally occurring amino acid
  misc_feature (80)..(80): Xaa can be any naturally occurring amino acid
SDPKNTVFVVSGRXKDELARWLEPCERLGISAEHGYFTRWSRYSPWESPDLKVDYGWKKMVEPVMDLYVAVTDGSSVETXETALVWHYEGTDPVFGPSQAKELRDHLSDVLAKEPVSVRSGYNIVEVNPQEVDKGTAVQRIIAAMRDRGRMPDFILCVGDDASDEDMFKAVTAPSNKSAFPEDAEVFACPIGTKPSLAKYYLDDPVEVLSMLKGLIKLSVEERPGDGEGPSRVSFD

SEQ ID NO: 1355 - protein, 821 aa, Arabidopsis thaliana; identical to SEQ ID NO: 1282

SEQ ID NO: 1356 - protein, 180 aa, Glycine max
  misc_feature (11)..(11): Xaa can be any naturally occurring amino acid
  misc_feature (54)..(54): Xaa can be any naturally occurring amino acid
  misc_feature (56)..(56): Xaa can be any naturally occurring amino acid
  misc_feature (66)..(66): Xaa can be any naturally occurring amino acid
IVCTIDQSDLXLYAYREMVQNGYEPDNNTLNVIISVCAKEGKWDAALSVFNKMXKXELKPNLVACXALINSLGRAGELKQVFQVYNTMKSLDLKPDAYTFNALLSSLNKADRHHKALELFEMIERDQTSQFNVHLYNTVLMSCSKLRLWDRAIEILWQMEASGLSDLTMSYNLVIRTCEL

SEQ ID NO: 1357 - protein, 253 aa, Medicago sativa
TIKIYNVDRSACGRIAGVIAKKYGDTGFAGQLNITFTGSAGQSFGCFLTPGMNIRLVGEANDYVGKGIAGGELVVTPVDKIGFQPEDAAIVGNTCLYGATGGQVFVRGKAGERFAVRNSLAEAVVEGAGDHCCEYMTGGCVVILGNVGRNVAAGMTGGLAYILDEDNTLIPKINREIVKIQRVTAPVGQIQLKKLIEAHVEKTGSNKGEAILKDWDKYLSLFWQLVPPSEEDTPEANAKYDITATEQVTLQSA

SEQ ID NO: 1358 - protein, 889 aa, Nakaseomyces delphensis
MNNNILERLVNRQKPLLLTGLFVFSLLLISYRLVCWGLGWAKSISMFGGLPRGDARCLVCNACNRLALLDSAGVDVLTQYILEYRPGSLERSSGTASKDVVGLAKRRNRLYLHMLGYLSESNSRLYEVKVLIRAIDAILNKQELPPMRDLSKLVRSYSPKYDPYGYWDTVGGYDPVESVTRMLKQVMSIADTTKADAKKYAKSPFYDTVTVVPETLRRLPAIEVKNVAVTKFKFDKNVWDRLSNPHFPVRLYLISRKNPDSDNVVMETQLDFDDGTPTAFPTPIEVWFNNIQIKARFKGLKNKEGTVNPVDLTEHIKSWRAQNVLKIIHVFNKEPYLTYCALVRPYAPEEVLNNILVKPAIPYTLTMETVKKIFHENDGDSDDDAELVTTSTVISLKCPISYSRMKYPIKSKRCDHLQCYDALWFLHSQVQVPNWICPVCQIPLKLDDLYICEFSMRLLNSCANNVENIELLPDCSWNPIYEMEDVSDSGDDNKTDAKLKNESLPVTAKIPKKADPVPLLHNLRDTPVVSLLSDDDEATHDNVNNSNINSSFESHSGPGVQAAKTTKIGNLDRTTSPDTIQKTYNESVQINTANEGSKHMVGKAARTTNNRIKNGDDDDDDDDLPLAQVARKRGLPIDHLLNSTESSLKLKTIGNDQILSRPHLNEGRNLSPSFAPNILGTQPLKNPIETRNLRQLPRDERQLFIGENSNQTRTLDPKAQLHPEPNNLRQHMSPSESRETVLIHKEHLVPIKGVNNKMKIEYLDSNPFVANHNTSSNPNHDSTQINRRQMQNAPVPSIISGTNNPTLPPLPTNIVRQTENGNEKNNILIINPQSTLPKKNVSGIVNNPLGSRPVINPFLPRKTSTTMHKGKNHVTDSGKSEKKDSPWLL

SEQ ID NO: 1359 - protein, 142 aa, Brassica napus
KMESFSSGTKRICFSKVSSALERSSNGETMALDFESGLKENLSGLFVEDEVEEKPEVDKSRIHFLEERDEEMLSKRLLKLSRLDKVRSASELFDSMRLSGLQPNPHACNSLLSCLLRSGNLPKLFTVFDFMRPKDNLTGHTY

SEQ ID NO: 1360 - protein, 1410 aa, Candida boidinii
MVSSKSQSTKPPPHPPTSNDSSTNTNSENTNIKLKKKKSSPNSIHIEPSLNQESIDKSNTTPNNITNSSTKLAIISPNTSSTTTITDKDSQQSLDNNTDLSNTETSNNNNNNNNNNNNNNNNNNSDNITSNNVGGVLNFPSTSGIVLQKRRRVTRACDECRKKKVKCDGNLPCIHCTVYSYECTYDHPPSRTVSRKKQKQGTNTNPPQITSTNPELLQRMTNRLKLYDDLLKRLLPDVKATDLNDKPIPINPVKLLSALNKLNNGKKDDDSNNSTNTNTPKSPIAEPSYKNIAETYNSLPDVPQPPPAIPLSMQRSSSIPLPSLNQSTQSTNSPTTTSQMNNNNITSIDNIMSNSSNVNSNSKSNNNNNNNNNNNNNNNNNNNNNNNNSTNSPSAFQQSAIDGSIESNLGKEIRIILPPREIALQLITKTWENACVLFRFYHRPAFVEDLNELYDTDPSQYTNKQQRFLPLVYSVMACGALFYKSDEKTQQNDKKDPNNLDPESEVFEDEGYKYFIAARKLIDITDTRDTYGIQTIVMLIIFLQCSARLSTCYAYIGIALRGALREGLHRQLDYPFNPIELEIRKRLFWTIYKMDIYVNTMLGLPRTISEDDFDQDMPIELDDENITVDGYRFDRQGDRLSSSGIANAHTRLIFLMKKIVTKLYPIKPRKIENGKRPELLAHDIVYQLELDLQDWMNGLPLELKPGVEPSSQYLKANRLLHISYLHVKIILYRPFIHYISADFSNGPSSSNDLRCIEKAKNCINVARIVVKLAEDMINKKMLSGSYWFSIYTIFFSVACLVYYVHFAPPLNRNGDLDPEYIAIKKDAENGKKVLDVLKDSSMAARRTYNILNALFEQLNRRTARASINQDLTEQQQQFVTPQVGKNKFEREQKEKIGDDDSNNNEKEIKDLKGESDKKDVKDEKKISSTSTTTTTSTTTNKDNKSTSSRQSSNSNINNNNNNNNKINNVDVDLSAFQTTGYAESSTEPSKLDNSTLNSLVNGVNFIDGVSTGINLNFAPDNRNNELGNLTQQQQRQIQIQRQQQLHRQQQLQQQRQLQQQQQQFRQQHELQQQQQQQQQQQQQQQFRQQQQQQQQQQQYRQQQYQQQQQQQQQQQQQQYQQYQDFQQDNLSDSVYNNGLPTNSDSNDDKTSKYVPGMMDQLDMKIFGRFLPPYMLTSNAPSAVVSNEGTPIPDDLSNISLDPPQKQQETQTQGQNQLFQQPLQGQSVQSVSQQDQQKQKSLSSSYNMNQPVFENNNNNNQNNGNSQYDNNNNNILVNQLGPSNKNDVNSNSNNSNNSNPVNDLNNQTDGLFPVSLFGDINAIPSGLSTVVQSKMNSGTTVESPEGSTSSGRNNESPLPAKNQNISNQFPGGLPARQEQLNKDIYSFDDLFFNDWSTADLQPGDYNSHNSK

SEQ ID NO: 1361 - protein, 542 aa, Herminiimonas arsenicoxydans; identical to SEQ ID NO: 616

SEQ ID NO: 1362 - protein, 287 aa, Chlamydomonas reinhardtii
YTYTTMISQCGSHQQLRRALELVAEMRSRGIDCNVHTYSALMNVCIKANELDLAQDVYKQMLEEGCSPNLVTYNILIDVEASKRKTTERRRLAVALVRSGIQAEVRTYNTVISACNKSGQPEQALKVYEKMLAAGVKPSATTYTALISAYGKKGQVEKALDIFRDMIRRGCERNVITYSSLISACEKAGRWEMALELFSKMHKENCKPNVVTYNSLIAACSHGGHWEKASELFEQMQTQGCKPDSITYCGLITAYERGGQWRRALKAFEQMQSQGCHPDAAVFNSLM

SEQ ID NO: 1363 - protein, 1557 aa, Synechocystis sp. PCC 6803; identical to SEQ ID NO: 623

SEQ ID NO: 1364 - protein, 269 aa, Metarhizium anisopliae
MGHEDAVYLAKLAEQAERYEEMVENMKIVASEDRDLTVEERNLLSVAYKNVIGARRASWRIVTSIEQKEESKGNSSQVTLIKEYRQKIEAELAKICDDILDVLDKHLIPSAKSGESKVFYHKMKGDYHRYLAEFAIGDRRKDSADKSLEAYKAATEVAQTELPPTHPIRLGLALNFSVFYYEILNAPDQACHLAKQAFDDAIAELDTLSEESYKDSTLIMQLLRDNLTLWTSSEAETSGAAGQADAPAKEESGAAAEAPAAAEQTKASE

SEQ ID NO: 1365 - protein, 474 aa, Rhodococcus sp. RHA1
MKDSVPHGTSDFVVVANRLPVDMETLDDGTTRWKRSPGGLVTALEPILHDRERGSWVGWPGVPDTKVEPIVSGGVDLYPVELSSDEVKLYYEGFSNATLWPLYHDVLVAPVFDRDWWHSYLDVNRHFAEETARTAAEGATVWVQDYQLQLVPRLLREMRPDLTIGFFLHIPFPPVELFMQLPWRKEIVEGLLGADLIGFHLPGGANNFLFLARRLLGLDTTTAGVGVRSALGKVTLDGRVVQVGAFPISVDSRQLVEQATDPAIVERAAEIRRELGNPRKILLGVDRLDYTKGIDLRLSALGELLDEGRLDPSDTAMVQLATPSRERVEHYMKMRSSIEEQVSHINGDHGQIGRPFVHYLYQPVDRSELIALFLAADVMLVTPMRDGMNLVAKEYVACRADLGGALVLSEFAGAAAELRGAYLVNPHDLDGVKNTIMAALDPEREQGRRRMSRLHRQVLDHDVHRWAQSFLGAL

SEQ ID NO: 1366 - protein, 197 aa, Triticum aestivum
  misc_feature (162)..(162): Xaa can be any naturally occurring amino acid
  misc_feature (168)..(168): Xaa can be any naturally occurring amino acid
  misc_feature (173)..(173): Xaa can be any naturally occurring amino acid
  misc_feature (183)..(183): Xaa can be any naturally occurring amino acid
  misc_feature (188)..(188): Xaa can be any naturally occurring amino acid
MAERAEGRPSDALSVMVIDEDEFHANSAKSILSELNYYVAVYTSPIEALGILEKKAHDVDFVIAAVDMEELNGFQFLEAAKDMHRNLQVIMMSVDTTMYTMKRSIELGARFLAKKPLDATTIHNMWQHLDVKVLRLNRMKYLFQGVGDKAQDGEEVGESVEXAKDGTXTTTHXKWIPFLESKXLYALXILGANASPS

SEQ ID NO: 1367 - protein, 2141 aa, Kluyveromyces lactis NRRL Y-1140; identical to SEQ ID NO: 632

SEQ ID NO: 1368 - protein, 263 aa, Lilium longiflorum
MSPVESSRDESVYMAKLAEQAERYEEMVEFMEKVAKTVDAGEELTVEERNLLSVAYKNVIGARRASWRIISSIEQKEESRGNEDHVVLIKDYRGKIEAELSKICDGILKLLDSHLVPSAATAESKVFYLKMKGDYHRYLAEFKTGVERKEAAENTLLAYKSAQDIALADLAPTHPIRLGLALNFSVFYYEILSSPDRACNLAKQAFDEAISELDTLGEESYKDSTLIMQLLRDNLTLWTSDITEDAGDEIKEAPPKRDSVEGQ

SEQ ID NO: 1369 - protein, 303 aa, Oryza sativa Indica Group
MLLNPASREVAALDSIRHHLLEEEEETPATAPAPTRRPVYCRSSSFGSLVADQWSESLPFRPNDAEDMVVYGALRDAFSSGWLPDGSFAAVKPESQDSYDGSSIGSFLASSSSEAGTPGEVTSTEATVTPGIREGEGEAVAVASRGKHYRGVRQRPWGKFAAEIRDPAKNGARVWLGTFDSAEEAAVAYDRAAYRMRGSRALLNFPLRIGSEIAAAAAAAAAGNKRPYPDPAISGSSSPSSSSSSSSSSSSGSPKRRKRGEAAAASMAMALVPPPPPPAQAPVQLALPAQPWFAAGPIQQLVS

SEQ ID NO: 1370 - protein, 1472 aa, Wolinella succinogenes DSM 1740; identical to SEQ ID NO: 639

SEQ ID NO: 1371 - protein, 478 aa, Candida albicans SC5314
MVQGKVLVVSNRIPVTIKRLDNGSYDYSMSSGGLVTALQGLKKTTEFQWYGWPGLEIPEDEQTKVNDELKSKFNCTAIFLSDTIADLHYNGFSNSILWPLFHYHPGEMNFDENAWAAYIEANKKFALEIVKQVNDDDMIWVHDYHLMLLPEMLRQEIGNKKKNIKIGFFLHTPFPSSEIYRILPVRKEILEGVLSCDLIGFHTYDYARHFISSVSRIVPNVSTLPNGIKYQGRSISIGAFPIGIDVDNFIDGLKKDSVVERIKQLKSKFKDVKVIVGVDRLDYIKGVPQKLHAFEVFLNENPEWIGKVVLVQVAVPSRGDVEEYQSLRSTVSELVGRINGEFGTVEFVPIHYLHKSIPFDELISLYNISDVCLVSSTRDGMNLVSYEYIACQQDRKGVLILSEFAGAAQSLNGALIVNPWNTEDLSEAIKESLTLPEEKREFNFKKLFTYISKYTSGFWGESFVKELYKCNPQKSLRD

SEQ ID NO: 1372 - protein, 460 aa, Rubrobacter xylanophilus DSM 9941; identical to SEQ ID NO: 647

SEQ ID NO: 1373 - protein, 498 aa, Arabidopsis thaliana
MKPKRRRLGVKMESFSLATPNMCFRKVSSELDSSFNGENVVCGLELEEKTAGDRNRIHFLEERNEETLSKRLRKLSRLDKVRSALELFDSMRFLGLQPNAHACNSFLSCLLRNGDIQKAFTVFEFMRKKENVTGHTYSLMLKAVAEVKGCESALRMFRELEREPKRRSCFDVVLYNTAISLCGRINNVYETERIWRVMKGDGHIGTEITYSLLVSIFVRCGRSELALDVYDEMVNNKISLREDAMYAMISACTKEEKWDLALKIFQSMLKKGMKPNLVACNTLINSLGKAGKVGLVFKVYSVLKSLGHKPDEYTWNALLTALYKANRYEDVLQLFDMIRSENLCCLNEYLYNTAMVSCQKLGYWEKAVKLLYEMEGSGLTVSTSSYNLVISACEKSRKSKVALLVYEHMAQRDCKPNTFTYLSLVRSCIWGSLWDEVEDILKKVEPDVSLYNAAIHGMCLRREFKFAKELYVKMREMGLEPDGKTRAMMLQNLKKHQK

SEQ ID NO: 1374 - protein, 275 aa, Xerophyta humilis
SLQQVEEVKCLLRIIPIWSTGIIYYIAIVQQQTYVVYEALQSDRHLGNTSFLIPAASYSVFAMLAMTIWIPIYDRIIVPRFRKLTGQEGGITLLQRMGVGLVLAIIGMVVSAIIEIQRRSYAIHRPTIGTAPSGGAISSMSSLWLIPQLVILGLSEAFNAIGQIEFYYKQFPENMRSVAGSLFFLGAATANYLSGALIGVVHRVTGRGAGKNWLAGDLNKGRLDYYYFFIAGLGVLNLVYFMMCAKWYKYKEADSSSNAGEISLVDEIISKEPLV

SEQ ID NO: 1375 - protein, 1131 aa, Oryza sativa
  misc_feature (91)..(91): Xaa can be any naturally occurring amino acid
MVSKSYSNLLEMSCGDGVDFRQPFKSLPRVVTSPGIISDPDWDTRSDGDSVGSASSVERKIIVANFLPLNCTKDEAGQWSFSRDDDALLMXQLKDGFSNETDVIYVGSLKVQVDPSEQDQVAQKLLRDYRCIPTFLPPDLQQQFYHGFCKQQLWPLFHYMLPICLDKGELFDRSLFQAYVRANKLFADKVMEAINTDDDHVWVHDYHLMLLPTFLRKRLHRIKLGFFLHSPFPSSEIYRSLPVRDEILKSLLNADLIGFQTFDYARHFLSCCSRLLGLHYESKRGYIGIDYFGRTVSLKILSVGVHVGRLESILKLPATVKKVQEIEQRYKGKMLMLGVDDMDIFKGISLKLLGLELLLDRNPKLRGKVVLVQIVNPARSTGKDVEEAITESVSVAERINLKYGSVDYKPVVLIDHRIPFYEKIAFYAASDCCIVNALRDGMNLVPYEYTVCRQGNEEIDNARGSDTNCHHTSTLIVSEFVGCSPSLSGAFRVNPWSVDDVADALHHATDLTESEKRLRHEKHYRYVRSHSVAYWAHSFAQDLERACKDHYSRRCWAIGFGLNFRVIALSPGFRKLSLEHFASSYNKATRRAIFLDYDGTLVPQSSINKAPSDELITILNSLCDDPKNDVFIVSGRARSLLDEWFAPCQKLGIAAEHGYFVRWNKAAEWESSYPNHDFEWKHIAEPVMQVYTETTDGSSIEPKESALVWHYLDADHDFGSCQAKELLGHLERVLSNEPVVVKCGHYIVEVKPQGVSKGLVVDKVIHRLMNNGKTPDFVVCIGNDRSDEDMFKSIDSMTSSSAFPAVPEVFACSVGQKPSKAKYYVDDAGEVVRLLKNVAGISSHREAAVQAALQQEIALAAGLLRIFFHDCFPQGCDASLLLTGANSEQQLPPNLTLQPRALQLIEDIRAQVHAACGPTVSCADITALATRDAIVASGGLPYDVPLGRLDSFAPAPSDAVFQLPQPTSDVSTLLSAFQTRNLDNVDLVALSGGHSIGRARCSSFSNRFREDDDFARRLAANCSNDGSRLQELDVTTPDVFDNKYYSNLVAGQGVFTSDQGLTGDWRTSWVVNGFAGNHWWFYGQFGSSMVKLGQLQGPSGNVGEIRRNSCFVPNSQTILAAAGDDGFTASA

SEQ ID NO: 1376 - protein, 255 aa, Arabidopsis thaliana
MSTREENVYMAKLAEQAERYEEMVEFMEKVAKTVDVEELSVEERNLLSVAYKNVIGARRASWRIISSIEQKEESKGNEDHVAIIKDYRGEIESELSKICDGILNVLEAHLIPSASPAESKVFYLKMKGDYHRYLAEFKAGAERKEAAESTLVAYKSASDIATAELAPTHPIRLGLALNFSVFYYEILNSPDRACSLAKQAFDDAIAELDTLGEESYKDSTLIMQLLRDNLTLWTSDMTDEAGDEIKEASKPDGAE

SEQ ID NO: 1377 - protein, 508 aa, Oryza sativa Japonica Group
RALLNADLVGFHTFDYARHFLSACSRLLGLDYQSKRGYIGIEYYGRTVTVKILPVGIDMGQLRSVVSAPETGDLVRRLTESYKGRRLMVGVDDVDLFKGIGLKFLAMEQLLVEHPELRGRAVLVQIANPARSEGRDIQEVQGEARAISARVNARFGTPGYTPIVLIDRGVSVHEKAAYYAAAECCVVSAVRDGLNRIPYIYTVCRQESTGLDDAAKRSVIVLSEFVGCSPSLSGAIRVNPWSVESMAEAMNAALRMPEPEQRLRHEKHYKYVSTHDVAYWAKSFDQDLQRACKDHFSRRHWGIGFGMSFKVVALGPNFRRLSVDHIVPSYRKSDNRLILLDYDGTVMPEGSIDKAPSNEVISVLNRLCEDPKNRVFIVSGRGKDELGRWFAPCEKLGIAAEHGYFTRWSRDSAWETCGLAVDFDWKKTAEPVMRLYKEATDGSTIEDKESALVWHHDEADPDFGSCQAKELLDHLENVLANEPVVVKRGQHIVEVNPQVSACHLPSFL

SEQ ID NO: 1378 - protein, 730 aa, Arabidopsis thaliana
MGYDNVCGERQTLLVVANRLPASAKRTGEHSWSLEMSPGGKFNLLVEKDAVSKSLAEMKCIPVFLNEVFDQYYNGYSNGILWPILHHMGLPQEYDHDTIKTFETQYDAYKKANRMFLDVIKENYKDGDIVWCQDYHLMFLPQYLKEYNNKIKVGWFLHSPFPSSEIYKTLPSRSELLRSVLAADLISFHTYDFARHFVNTCTRILGVEGTHEGVVYQGRVTRVVVLPMGIYPNRFIKTCKLPEVIQQMNELKDRFSGKKVILGVDRLDMIKGIPQKYLGFEKFLDENPNWRDKIVLVQIAVPTRNEVPEYQKLKNQVHRLVGRINGRFGSVSSLPIHHMDCSVDSNYLCALYAISDVMLVTSLRDGLNLVSHEFVACQEAKRGVLILSEFAGAGQSLGAGALLVNPWNVTEVSSAIKKALNMPYEERETRHRVNFKYVKTHSAEKWGFDFLSELNDAFDESELQIRKIPHELPQQDVIQRYSLSNNRLIILNFGEYKIWLAAENGMFLKHTTEEWVTNMPQNMNLDWVDGLKNVFKYFTDRTPRSFFEASKTSLVWNYEYADVEFGRAQARDLLQYLWAGPISNASAEVVRGKYSVEVHAIGVTKEPEIGHILGEIVHKKAMTTPIDYVFCSGYFLEKDEDIYTFFESEILSPKLSHETRSKSSSSNHSLEKKVSLNVLDLKQENYFSTAIGQARTKARYVVDSSHNVVNLLHKLAVANTTTTSVKKPNV

SEQ ID NO: 1379 - protein, 500 aa, Carboxydothermus hydrogenoformans Z-2901; identical to SEQ ID NO: 655

SEQ ID NO: 1380 - protein, 1560 aa, Thauera sp. MZ1T; identical to SEQ ID NO: 656

SEQ ID NO: 1381 - protein, 1482 aa, Marinobacter sp. ELB17; identical to SEQ ID NO: 659

SEQ ID NO: 1382 - protein, 1541 aa, Thermosynechococcus elongatus BP-1; identical to SEQ ID NO: 661

SEQ ID NO: 1383 - protein, 323 aa, Zea mays
  misc_feature (165)..(165): Xaa can be any naturally occurring amino acid
RAGGRVGSIRSLLPFQFPHTHVSAHSLLQFRQLVIINRTQSSRFHSRMLLNPASETSVLDTIRQHLLEEPAAAEARPADESFGSLVADQWSGSLPFRTDDADDMVVFGVLQDAFAYGWLPDGSFVHVKPEPVRSPDSSSYHPCSYDGSPCFGLLDPEPPLTPGSXTPGRGQEEAAAAMARGKHYRGVRQRPWGKFAAEIRDPARNGARVWLGTYDTAEDAALAYDRAAYRMRGSRALLNFPLRIGSGDKRPSPAPPEPATSSDSSSSASGSHKRRKRGEAAAANMAMALVPPPSQLNRPPQPWFPAAPVEQAAMAPRVEQIVV

SEQ ID NO: 1384 - protein, 272 aa, Cleome spinosa
MSPSDSTREENVYMAKLAEQAERYEEMVEFMEKVANTGDTEELTVEERNLLSVAYKNVIGARRASWRIISSIEQKEESRGNEDHVSMIKEYRGKIEAELSKICDGILNLLESHLIPSASSAESKVFYLKMKGDYHRYLAEFKTGAERKEAAESTLLAYKSAQDIALTELAPTHPIRLGLALNFSVFYYEILNSPDRACNLAKQAFDEAISELDTLGEESYKDSTLIMQLLRDNLTLWTSDINDEAGDEIKDASKGESEEGQQAAQAAAPPAQ

SEQ ID NO: 1385 - protein, 771 aa, Vitis vinifera
MASCGSSSMKEVPLGIDPAMEETYASQSKLLKEFTSIASIDKAWTFKRDSGKGSQAMFSISQTNLLANKRRKQILSAHISKESDHSVNFQWAPFPIEMMGVSTMVPSPSGSKLLVVRNPENESPTQFEIWGPSQLEKEFNVPQSVHGSVYTDGWFEGISWNSDETLIAYVAEEPSPSKPTFGGSGYKKGDSADKESGSWKGLGEWEEHWGETYAGKRQPALFVINIESGEVHAVEGISKSLSIGQVIWAPLAEGFSQYLVFVGWSSETRKLGIKYCYNRPCALYAVRAPFCESKANELQSNNVNEDSTVVNLTQSISSAFFPRFSPDGKFLVFLSAKSSVDSGAHSATDSLHRIAWPTDGKPCPSANIVDVIPVMMCAEDGYFPGLYCSSILSNPWLSDGCTMILSSAWHSTQVILSVDVLSGNVSHVSPNDSGFSWNVLTLDGDNIVAVCSSPIDIPEMKYGWLAEKTTASDSWSWLDVSNPIPRCSEKIRSLLSSLQFSIMKIPVKDVSDCLTKGSCKPFEAIFVSSNKKNDTCDPLIVVLHGGPHSVSSSSFSKNLAFLSSLGYSLLIVNYRGSLGFGEEALQSLPGKIGSQDVNDVLTAIDHVIDMGLCDPSKIAVVGGSHGGFLTSHLIGQAPDKFAVAAVRNPVCNLALMVGTTDIPDWCFVEAYGSQGKNSFTEAPSAEQLTLLHSKSPVSHIHKVKTPTLFLLGAQDLRVPVSNGLHYARELKEKGVEVKVIIFPNDVHAIERPQSDFESFLNIGVWFKKYCE

SEQ ID NO: 1386 - protein, 438 aa, Rhodococcus sp. RHA1; identical to SEQ ID NO: 673

SEQ ID NO: 1387 - protein, 681 aa, Glycine max
  misc_feature (2)..(2): Xaa can be any naturally occurring amino acid
  misc_feature (4)..(6): Xaa can be any naturally occurring amino acid
  misc_feature (8)..(8): Xaa can be any naturally occurring amino acid
EXYXXXNXLFFQKVVEIINPEDDYIWIHDYHLMVLPTFIRRRFNRVKMGFFLHSPFPSSEIYRTLPVREEILKALLNSDIIGFHTFDYARHFLSCCSRMLGLEYQSKRGYLGLEYYGRTISIKIMPVGIHMGRIESVMRMADEECKVRELKQKFEGKTILLGIDDMDIFKGINLKILAMEQMLRQHPKWQGRAVLVQIVNPARGKGIHLEEIHAEIQESCNRINRVFGRPGYEPIVFIDRAVPIAEKVAYYCIAECVIVTAVRDGMNLTPYEYIACRQGISGSESCSNVNDPKKSMLVISEFIGCSPSLSGAIRVNPWNVEATSEAMNEAISTGDGEKQLRHEKHYRYVSTHDVAYWSRSFLQDMERACTDLLRKRCWGIGLSFGFRVVALDPNFKKLSIDAMVSAYKRAKNRAILLDYDGTVMPQNSINKSPSKEVLSILESLSADPKNVVFIVSGRGRNSLSDWFDSCEKLGIAAEHGYFLRWSHGGEWENCGKSSDFGWMQIAEPVMKLYTEATDGSSIERKESALVWQYRDADLGFGSAQAKEMLDHLESVLANEPVAVKSGQFIVEVKPQDVSKGLVAEKIFSSMDGKGKQADFVLCVGDDRSDEDMFEIVSSAISRNILATNASVFACTVGQKPSKAKYYLDDTTEVTSMLESLAEESDASPYIEETGDSSRRQV

SEQ ID NO: 1388 - protein, 278 aa, Magnaporthe grisea 70-15
MATERESKTFLARLCEQAERYDEMVTYMKEVAKLGGELTVDERNLLSVAYKNVVGTRRASWRIISSIEQKEESKGSDKHVSTIRDYRNKIEAELEKVCQDVLDVLDESLIPNAASGESKVFYHKMKGDYHRYLAEFASGEKRKTAATAAHEAYKSATDVAQTELTPTHPIRLGLALNFSVFYYEILNSPDRACHLAKQAFDDAIAELDSLSEESYRDSTLIMQLLRDNLTLWTSSETGEGETAAAGATDAPKEEAKTDAPAAEKTEAKADEPAAAPAS

SEQ ID NO: 1389 - protein, 119 aa, Populus trichocarpa
MTGGCVVVLGKVGRNVAAGMTGGLAYILDEDDTLMPKVNKEIVKVQRVTASVGQMQLKSLIEAHVEKTGSSKGAAILKEWDTNLPLFWQLVPPSEEDTPEACAAYEANSAGQVTSLQSA

SEQ ID NO: 1390 - protein, 269 aa, Oryza sativa Indica Group
MPPPSPHPPHRNGNHVPAPSGESFAKFFECWISEQSRDLAALRSAASAATNPAAPPDDAELRRLVDRVLGHYEHYYRTKSAAASTDVLRMFSPSWTSTTENLYLWCGGWRPTAALHLLYSKSGAQLETQLPVFLAGGGLGTGDLGDLSAEQLQAADQLQRITISKEREIENAAASAQESLATVKMVELAGGGGVDAEGMEMEMRSKADGMRRVLEMADGLRLETMREVVALLRPSQAVHFLIAAAELHLAVHEFGRRKDGDGAASPPPA

SEQ ID NO: 1391 - protein, 863 aa, Oryza sativa Japonica Group
MVSKSYTNLLDMSGEDVFDFQQPFRSLPRFVTSPSITSNPDWDTSNADDSVGPASCCVRKIIVSNFLPLNCTKDEATGQWSFSMDDNQLLVQLKDGFPMESEVVYVGSLNAEVDPGEQDQLSQKLFREYKCIPTFLPADLQQQFYHGFCKQQLWPLFHYMLPICLDKGELFDRSLFQAYVRANKIFGDKVMEAINSDDDCVWVHDYHLMLLPTFLRKKLHRIKIGFFLHSPFPSSEIYRTLPVRDEILKSLLNADLIGFQTFDYARHFLSCCSRLLGLNYESKRGHIGIEYFGRTVSLKILAVGVHVGRLESVLRLPATISKVQEIEQRYKGKMVMLGVDDMDIFKGISLKLLGLEFLLERTPKLRGKVVLVQIINPARSTGKDVEEAINEAVSVAERINIKYGSAEYKPVILIDYPIPSYEKIAYYAASDCCIVNAVRDGMNLIPYEYTVCRQGNEEIDKLRGVDKSSHHTSTLIVSEFVGCSPSLSGAFRVNPWSIEDVADALYKAMDLTQSERKLRHDKHYRYVKTHDVAYWARSFSQDLDRACKDHYSRRCWTTGFGLNFRVIALSPGFRRLSLEHFASSYKKTNRRLIFMDYDGTLVPQSSVNKVPSAEVISILTSLCNDPKNCVFIVSGRDRTTLSEWFASCDKLGIAAEHGYFIRWNKEGEWETSSSAQDCEWKNIAEPIMEVYKETTDGSAIETKESGLVWHYQDADHDFGSCQAKELVSHLERVLANEPVVVKRGHQIVEVKPQGVSKGIAVDTVIRTVINNENAPDFLMCIGNDRSDEDMFESINEAVSRSVFPTAPDVFACSVGQKASKAKYYVDGCSEVIRLLKGVTAITPRREVISQSQVTFRDILEVVS

SEQ ID NO: 1392 - protein, 480 aa, Clostridium difficile 630; identical to SEQ ID NO: 679

SEQ ID NO: 1393 - protein, 534 aa, Rhodococcus sp. RHA1; identical to SEQ ID NO: 680

SEQ ID NO: 1394 - protein, 517 aa, Metarhizium anisopliae var. acridum
MTADTSVADGLAPEVHGRLLLLSNRLPITIKSSDDGSYTFSMSSGGLVTGLSGLSKTTSFQWYGWPGLEVPDNEVADMKRRLKDEYGAHPVFIDDELADRHYNGFSDSILWPLFHYHPGEITFDESAWAAYQEVNHLFAQTVIKDVQDGDLIWVHDYPLMLLPQMLREEIAKTNKKVKIGFFLHTPFPSSEVYRILPVREPLLRGLLDCDLIGFHTYDYARHFLSSCSRILGAHTTPNGVDWNGRFVTIGAFPIGIDPDKFVEGLKKPSVQERIATLNRKFEGVKLIVGVDRLDCIKGVPQKLHALEVFLTEHPEWIGKIVLVQVAVPSRQDVEEYQNLRAVVNELVGRINGKFGTIEFMPIHFLHQSASFDELTALYAVSDVCLVSSTRDGMNLVSYEYIATQQERHGVMILSEFTGAAQSLNGSLVVNPWNTEELANAIHDAVTMSPGQRAANYKKLERYVFKYTSAWWGTSFVSEMTRLDSNNAQPKTLRNVSGAVVGPGQDEDEATSPMQNNP

SEQ ID NO: 1395 - protein, 464 aa, Rhizobium sp. NGR234
MSRLVIVSNRVPVPDKGGIAPAGGLAVALKVALEEQGGGIWMGWSGKSSGEDEPAPLAQLQQGNITYALTDLTDTDVEEYYHGFANRVLWPICHYRLDLAEYGRKEMAGYFRVNRFFAHRLAPLVKPDDVIWVHDYPLIPLAAELRQMGLENRIGFFLHIPWPPADVLFTMPVHEEIMRGLSHYDVVGFQTDHDLENFASCLRREGIGDALGGGRLSAYGRIFKGGVYAIGIETAAFAEFAKKASTNSTVKKARESIERRSLIIGVDRLDYSKGLTQRIEAFERFILANPAQRGRVTYLQITPKSRSEVPEYEAMQRTVAEQAGRVNGALGAVDWVPMRYINRSVGRRVLAGLYRLGKVGLVTPLRDGKNLVAKEYVAAQDPDDPGVLVLSRFAGAARELQGALLVNPYDIEGTANAMARSLSMPLEERQERWTTMMDQLLEHDVSRWCRDFLNDLTASSDRCG

SEQ ID NO: 1396 - protein, 1615 aa, Oryza sativa; identical to SEQ ID NO: 682

SEQ ID NO: 1397 - protein, 1622 aa, Arabidopsis thaliana; identical to SEQ ID NO: 683

SEQ ID NO: 1398 - protein, 1615 aa, Oryza sativa; identical to SEQ ID NO: 684

SEQ ID NO: 1399 - protein, 1527 aa, Mycobacterium marinum M; identical to SEQ ID NO: 685

SEQ ID NO: 1400 - protein, 1582 aa, Ralstonia solanacearum GMI1000; identical to SEQ ID NO: 688

SEQ ID NO: 1401 - protein, 300 aa, Arabidopsis thaliana
MKITDISGKIETLVDSLRDMSPTRVRSSFSDEHVSENDDERSSWIALHPSALDMFEQIMRDAEGKQIIMFLDYDGTLSLITEDHDRAYITDEMREVVKEVATYFKTAIISGRSTDKVQSFVKLTGIHYAGSHGMDIKGPTNTDQVVNVLKEKTKSIPGATVEHNKFCLTVHFRRVDETGWAALAEQVRLVLIDYPKLRLTQGRKVLELRPSIKWDKGKALEFLLNSLGIAESKDVLPVYIGDDRTDEDAFKVLCERGQGFGIIVSKTIKETYASYSLQDPSQVKEFLERLVKWKKQTLGE

SEQ ID NO: 1402 - protein, 69 aa, Oryza sativa
MADWGPVVIATVLFVLLTPGLLFQLPAHGRIVGFGTMHTSGVAVLVHAVIYFALITIFLIAIGVHIYAG

SEQ ID NO: 1403 - protein, 271 aa, Schizosaccharomyces pombe
MSTTSREDAVYLAKLAEQAERYEGMVENMKSVASTDQELTVEERNLLSVAYKNVIGARRASWRIVSSIEQKEESKGNTAQVELIKEYRQKIEQELDTICQDILTVLEKHLIPNAASAESKVFYYKMKGDYYRYLAEFAVGEKRQHSADQSLEGYKAASEIATAELAPTHPIRLGLALNFSVFYYEILNSPDRACYLAKQAFDEAISELDSLSEESYKDSTLIMQLLRDNLTLWTSDAEYSAAAAGGNTEGAQENAPSNAPEGEREPKATHR

SEQ ID NO: 1404 - protein, 275 aa, Mesorhizobium loti MAFF303099
MLGFQTATDVTNFRRSVRATGSTTFDINGAAKSNGRTVLSRSFPIGIDVDAFARMANDAASDVQIDSMRRQILGLKQIIGVDRLDYSKGLPGRIQAFARLLERHPEHERTVTYLQIAPPTREEVGAYAEIRAQLEATAGSVNGKYADLTWTPIRYIHRTVPRSRLAGLLRASQVGLVAPLRDGMNLVAKEYIAAQDPADPGVLVLSRFAGAAEELAHSLIVNPYVVDEVADAIAKALGMPLEERIARHGALIERIRRNDAAQWRKSFLEALADSS

SEQ ID NO: 1405 - protein, 262 aa, Oryza sativa Japonica Group
MSQPAELSREENVYMAKLAEQAERYEEMVEFMEKVAKTVDSEELTVEERNLLSVAYKNVIGARRASWRIISSIEQKEESRGNEDRCTLIKEYRGKIETELSKICDGILKLLDSHLVPSSTAPESKVFYLKMKGDYYRYLAEFKTGAERKDAAENTMVAYKAAQDIALAELPPTHPIRLGLALNFSVFYYEILNSPDRACNLAKQAFDEAISELDTLSEESYKDSTLIMQLLRDNLTLWTSDISEDAAEEIKEAPKGESGDGQ

SEQ ID NO: 1406 - protein, 651 aa, Clostridium difficile 630
MKKYEIFIFMSIIVLCFISFPHKVFGQEENCLEDFERWVQENKNNKEEIVYTLSCDMVIDEEFRFYIPYDSNFTIDTNKYKILIKNHGRFIIDDNELNIIGEGGKEGVIHIENGGSISIGINNIIATDGTALYVEEGGDLHIKSSYESVEKIKANGKDAIGIYTENDIRILNKDIEVNGEHAIGVYSKGDVEIEETSIKAYSSNNESGLLKDNNKLAQSIISESKKVYIIDDYNELIPSIAEDSGYNIVKCCHRGIGVFSDEIKVSKDDKIENIKFPKYMVLETSSGNRLDIDVEWDFTDYYEKLEKGENFNITGKFKTEMLNKEKIIINDDVVPILNVSVIDKKPIDNLELEFQNTKNGYVAVLFYDMPYSASKVFVEYSSDGINWISEEQEDIRDQAILFFEDFKLRCFRVKVVGGLKEGYSNIVFKPGFIMGGGDNQETPDDERENDDIDGDRGGGGRDDPDRDEDDNNQDGNNGNENNDSNNNQNNNNENNNNENDDSDEKQPNTPKDDVESSTDSNENKNPHDIPKDGNKENNSDKEKGFYNKNSITENDDNYDLSSKSVFGTNEHSFPYRESISNKNQDTNKNKSNISDYDGIINNNYKLESKEYNLKKDIIFLFCILTPIMIGSILIVNPDTRKSIIKFIKLKK

SEQ ID NO: 1407 - protein, 824 aa, Zea mays
MVSKSYSNLLDMTPGDGFDFRRPFKSLPRVVTSPSIISDHDWDSISDGDSVGSAFSIERKIIVANFLPLNCTRDETGELSFSLDHDSLLMQLKDGFSNETDAVYVGSLKVHVDPREQDQVAQKLLREYRCIPTFLPSDLQQQFYHGFCKQQLWPLFHYMLPICLDKGELFDRTLFQAYVRANKLFADKVMEAINTDDDYVWVHDYHLMLLPTFLRKRLHRIKIGFFLHSPFPSSEIYRTLPVRDEILKSLLNADLIGFQTFDYARHFLSCCSRLLGLHYESKRGYIGIEYFGRTVSLKILSVGVHVGRLESVLKLPATVSKVEEIEQRSSIPQEARGKDVQEAITEAVSVAERVNTKYGSSSYKPVVLIDNRIPFYEKVAFYAASDCCIVNAVRDGMNLVPYEYTVCRQGNEEIDRVRGLDKDTHHTSTLIVSEFVGCSPSLSGAFRVNPWSVDDVADALCRATDLSESEKRLRHEKHYRYVSTHDVAYWAHSFAQDLERACRDHYSRRCWAIGFGLNFRVIALSPGFRKLSSEHFVSSYNRASRRAIFLDYDGTLVPQSSINKAPSEEVISILNTLCNDPKNVVFIVSGRGRDSLDEWFSPCEKLRLAAEHGYFIRWSKEAAWESSYSSPRQEWKHIAEPVMQVYTETTDGSSVESKESALVWHYLDADHDFGSFQAKELKDHLERVLSNEPVVVKCGHYIVEVKPQGVSKGRAVDKLIQALANNNGKAQDFLMCVGNDRSDEDMFECINGMASNDASSPAVPEVFACSVGQKPSKAKYYVDDTSEVIRLLRDATRFSSSQRREDVNTSRGRVTFRDALDYVD

SEQ ID NO: 1408 - protein, 261 aa, Maackia amurensis
MASSKERETFVYVAKLAEQAERYEEMVDSMKNVATLDVELTVEERNLLSVGYKNVIGARRASWRILSSIEQKEEAKGNEVNAKRIKEYRQKVESELTNICNDVMRVIDEHLIPSASAGESTVFYYKMKGDYYRYLAEFKTGNEKKEAGDQSMKAYESATAAAEAELPPTHPIRLGLALNFSVFYYEILNSPERACHLAKQAFDEAISELDTLNEESYKDSTLIMQLLRDNLTLWTSDIPEDGEDAQKANGTAKLGGGEDAE

SEQ ID NO: 1409 - protein, 555 aa, Pseudomonas putida GB-1; identical to SEQ ID NO: 709

SEQ ID NO: 1410 - protein, 531 aa, Gemmata obscuriglobus UQM 2246
MGWTKERLQEVARTRLGGAKLIVVANREPYIHRYATDGAVEWIRPAGGLTTALDPVMQACGGVWVAHGSGDADRAVTDPSGRVGVPPDDPNYVLRRVWLTPEQEDGYYYGAANGMLWPLCHQVFARPAFDPGHWDAYRRVNQTFADAVLEEAQGGPALVFIQDYHFALLPRLLKAARPDLVTAQFWHIPWPGPEKFLVCPWARDILDGLLGNDLMGFHTQHDCNHFLECVDRALECRIDRERFAVQRGGQATTVKPFPISVDPALADEYLGDDWAARAGAIRRRHGLGDRPLIVGVDRVDYTKGIPERLRAVDRVLHRHPELKGGFHFVQVGAPSRSSIPAYRDLTAEVNGLAARINREHGTAGWQPVVFLNAHHGPEDIFALYRDAAGCVVSSLHDGMNLVAKEFVTARADDRGVLVLSTFTGAARELTDAVLANPFDVDELADGLYAALTMPAAEQERRMRRMRAQVDDHNIYRWAGSLLTAISKMVPDVADAASEPTVVPDPADESLDATERDIARENYFATLRLAAG

SEQ ID NO: 1411 - protein, 467 aa, Propionibacterium acnes KPA171202
MSETVQDKVDFLVIANRLPVDRKVDDDGSVSWKSSPGGLVTALEPVMQRKGGAWIGWHGAPDVVVKPFHHDGYDIHPVPLSAQEVEEYYEGFSNATLWPLYHDCIVEPVFHREWWDAFQKVNKRFAEQAAEQAAEGATVWVQDYQLNLVPKYLREMRPDLRIGFFLHIPFPPIELYSRLPWREELVEGLLGADLIGFQTPGAAANFQRLARHRPGVTAARGRAHTPDGRTVVIRDFPISIDSRGFHELATSEKVKAEAAKLREDLGHPGTIIFGVDRLDYTKGLRQRIRAVGELFKEGKLDPHEVVFLQLATPSRERVEEYKILRDDINLLVGQINSKVGSIANRALVYRNESVPREVLAAMYQMADLMLVTPVRDGMNLVAKEYIACRSNDDSALVLSEFAGAARELKQAYMVNPYDIDGMKATIMKALTDSPKIKARKMRSMRRQVFDKTIDVWADNFLTELEGQ

SEQ ID NO: 1412 - protein, 261 aa, Pisum sativum
MATAPTPREEFVYMAKLAEQAERYEEMVEFMEKVTAAVESEELTVEERNLLSVAYKNVIGARRASWRIISSIEQKEESRGNDEHVTVIRDYRSKIETELSNICNGILKLLDSRLIPSAALGDSKVFYLKMKGDYHRYLAEFKSGAERKDAAESTLTAYKSAQDIANTELPPTHPIRLGLALNFSVFYYEILNSPDRACGLAKQAFDEAIAELDTLGEESYKDSTLIMQLLRDNLTLWTSDMQDDGADEIKEAAPKGNDEPQ

SEQ ID NO: 1413 - protein, 447 aa, uncultured bacterium; identical to SEQ ID NO: 717

SEQ ID NO: 1414 - protein, 811 aa, Magnetospirillum magnetotacticum MS-1; identical to SEQ ID NO: 719

SEQ ID NO: 1415 - protein, 105 aa, Oryza sativa Indica Group
SSSVGRRRRRRRRRRATGRSKQEEEEEASKEKKMQDWGPVLISWVLFILLSPGLLFQIPGKCRLIEFGKFQTSVVSILVHTILFFALDAIFLVAIGVQINLGSSP

SEQ ID NO: 1416 - protein, 835 aa, Physcomitrella patens subsp. patens
MVSRSYSNLLDLNEDSTISMVAARRVRPSLNRMLVVAHMLPLNAHPHPSGNSYIFEWDKDSLLWQLKDGLPAGMEVVYVGCLKVEIDGPDQDEVAATLLENFNCVPAFLPEELKSKFYHGFCKQTLWPLFHYLLPLSPEHGGRFNRMWWQAYVSVNKIFADKVMEVISPDDDYVWVHDYHLMALPTFLRKRFNKVKLGFFLHSPFPSSEIYRTLPVRDEILRALLNADLIGFHTFDYARHFLSCCSRMLGLEFVSKRGSIGVEYYGRSVGIKIMPVGIHMGQFDASLKLADTKWRIGEIQEKYKGRIVLLGVDDMDIFKGIGLKFLAMEELLRVHPQWRGQVVMVQIANPARGKGKDIEEAKNEAHAIADRVNEEYGFENYQPIVLVETHVPLFERIAYYTIAECCIVTAVRDGLNLIPYEYIVCREGSPRLAGSENHLNDSSAKKSMLIVSEFIGCSPSLSGAIRVNPWNIEMVAEAMNVAITTKDQEKHLRHEKHYRYVSTHDVAYWAKTYISDLQRTCNDNFKRRCYGIGFGLSFRVVALDPSFKKLRTELIVSAYKRSVRRALLLDYDGTVMPTSHKESPSPEVLDLLNTLCSDPNNVVFIVSGRQRSKLAEWFSSCEKLGLAAEHGYFYSVSEWDRLNLVEREVPIMSFDWKLVVKPVMQLYTESTDGSYIEDKESALVWNHRFADSDFGAWQAKELQDHLESVLANEPVTVKSGAHIVEVTPQGVSKGVVVEKLLYMMEKEHGSLPDMVLCVGDDRSDEDMFESIESLMDHAPSAEVFACTVGQKPSKAKYYLDDVVEVIKMLQGLANASSRPSASSLPQLSDFSSLHI

SEQ ID NO: 1417 - protein, 1605 aa, Marinobacter sp. ELB17; identical to SEQ ID NO: 723

SEQ ID NO: 1418 - protein, 329 aa, Coffea canephora
MCGGAILEGLIPPRNNNDGTRRLSSADLWPSAADFWPNSHLAKPSRSNPTDAPHKATHETCHDPHDEAGGKQQVLPKGAKRQRKNLYRGIRQRPWGKWAAEIRDPRKGVRVWLGTFNTAEEAARAYDKEARKIRGKKAKVNFPNEDSTSYPTCIPSQTQYQQVHIPSPPTFCGPSSSNCKFNQLRVGSSDCSASDCYHANSIDDCARFTNMMGFRNPSEEVSGSGSSDNECFLGHLKQVAKAAAEEEAASVITENDTKDNNKAAESEEYQVEKLSEELLAYESFMKFYQIPYIDGQSAAASANPAQELATSIQLWSFDDVSPANRPMPL

SEQ ID NO: 1419 - protein, 1519 aa, Geobacillus kaustophilus HTA426; identical to SEQ ID NO: 729

SEQ ID NO: 1420 - protein, 250 aa, Burkholderia vietnamiensis G4
MQSVPASLSLTDTAFFFDFDGTLVELAPTPDSIHVPPSLLTLLDTLRQRSHGAVAVVSGRGIDNLDTFLSMPDLPIAGLHGAERRDSNGDTQRIGFNDERLLRIERELAAVVDRHPGMLLEIKGAAVALHYRNAADREPVAREAAERLVAEYADAYVLQPGKMVFEIKPKGVDKGRALAAFLDEPPFAGRVPLFAGDDLTDEKGFAVVNARGGLSIKVGAGETSARMRLDSVAALHAQIARWLDLELPGA

SEQ ID NO: 1421 - protein, 458 aa, Burkholderia vietnamiensis G4
MSRLIIVSNRVAPISEGEPAAGGLAIGVYDALKETGGMWFGWSGEVVASGAPQIRIEERGPVTFATVGLSRRDYDQYYRGFSNATLWPAFHYRADLIQYDRHEFEGYGRVNVWLAQQLVPLLQDDDVIWVHDYHLIPFARALRASGVKNRIGFFLHIPFPAAQVLVNVPPHRELVESLCAFDLLGFQTEPDLRAFCDYVEFEAGGEVTRDGRTVRVSAFGSTLRAAAYPIGVYPDEIASLAQAGEHGKAARMATSLRGRQLIMSVDRLDYSKGLVERFRAFEKLLEHQASIRNRVSFLQIAPSTRADLRAYQDIRLQLEAESGRINGRYAELDWAPILYIHRQYDRQVLAALYRLARVGFVTPLRDGMNLVAKEYVSAQNPDDPGVLVLSRFAGAARELTGALIVNPIDIDGMADALSQALTMPLAERRARYADMIAQLRENNVSVWRDNFLRDLQRA

SEQ ID NO: 1422 - protein, 446 aa, Pseudomonas syringae pv. tomato str. DC3000; identical to SEQ ID NO: 732

SEQ ID NO: 1423 - protein, 445 aa, Xanthobacter autotrophicus Py2; identical to SEQ ID NO: 733

SEQ ID NO: 1424 - protein, 143 aa, Saccharomyces cerevisiae
MSQTREDSVYLAKLAEQAERYEEMVENMKAVASSGQELSVEERNLLSVAYKNVIGARRASWRIVSSIEQKEESKEKSEHQVELIRSYRSKIETELTKISDDILSVLDSHLIPSATTGESKVFYYKMKGDYHRYLAEFSSGDAR

SEQ ID NO: 1425 - protein, 475 aa, Burkholderia xenovorans LB400
MSRLIVVSNRVAPTQEGRPAAGGLAIGVLDALKETGGVWFGWSGETVSEPSAPVIEKQGNVTYATVGLTKRDYDQYYRGFSNATLWPTFHYRNDLSRYDRQEYAGYQRVNATLAKQLKELLKPDDIIWVHDYHLLPFARCLRELGVKNPIGFFLHIPFPVPEVLRTIPPHEELVKAMCSYDVIGFQTDADRQSFVDFIERGQHGTSSEDGMVHAYNRFLKVGAYPIGIYPDAIAKAAEQFTDRKPVRSLRDGMRGRKLIMSVDRLDYSKGLVERFQAFERLLLNAPGWHGRVSLVQIAPPTRADVQTYQRIRQTLEGEAGRINGRFAQLDWTPIQYLNRKYERNLLMALFRQSQVGYVTPLRDGMNLVAKEYVASQDPADPGVLVLSQFAGAAEQLPGALVVNPFDLSQMAEALERALSMPLAERQARHADMMAPMRENNLSVWRDTFLADLRNVATASSVTAKAVKLADVTASS

SEQ ID NO: 1426 - protein, 500 aa, Dehalococcoides sp. BAV1; identical to SEQ ID NO: 734

SEQ ID NO: 1427 - protein, 860 aa, Glycine max
MASRSYVNLLDLAGGLLDIPHMPRTIPRIMTVPGVISDLDVYGRYDGDSDVSSSGYRERKILVANMLPLQAKRDIETGKWCFSLDEDSILLQLKDGFSSDTEVIYVGSLKVEIDAHEQEEVAQKLLEDFNCIPTFLPHDVQKKFYYGFCKQQLWPLFHYMLPMFPDHGDRFDRSLWQAYVSANKIFADKVMEIINPDDDFVWVQDYHLMVLPTFLRKRYNRVKLGFFLHSPFPSSEIYRTLPVRDEILRGLLNSDLIGFHTFDYARHFLSCCKRMLGLDYESKRGHIGLDYFGRTIFIKILPVGIHMGRLESVLNLQSTSAKLKEIREEFKGRKVILGVDDMDIFKGISLKLLAVEQLLQQNQDLKGKVVLVQIVNPARSSGKDVQEAKKETNLIAQRINDTFGSNNYQPVILIDRPVPRFEKSAYYAVAECCIVNAVRDGMNLVPYKYIVCRQGTALMDKALTRKSDSPRTSMLVVSEFIGCSPSLSGAIRVNPWNIDAVADALYSAVTMNDSEKQLRHEKHYRYISSHDVAYWARSFVQDLERACKDHYTKRCWGMGLGLGFRVVSLSPGFRKLSVDHIVSAYKRTGRRAIFLDYDGTIVPKSSINKTPSPEVISVLNDMCNDPKNTVFIVSGRGRDSLSKWFTSCKMIGLAAEHGYFLRWSKDSEWETSPLSPDLDWKKIVEPVMQLYTEATDGSNIETKESALVWHHQYADPDFGSCQAKELLNHLESVLANEPAVVTRGRHIVEVKPQGLNKGWVAEKVLSNMVNDGNPPDFVMCVGDDISDEDMFESILRTVSCPSLPVVPEIFACTVGQKPSKAKYYLDDPADVMKLLQGLGASSKPKPRHLAQFQVSFESTV

SEQ ID NO: 1428 - protein, 287 aa, uncultured bacterium
LGFKTVNEMIGRVDMLEMNQAIEHWKQSAINLDALLTTAEKPHANAGTYQTQTQDHQLELQLDNILIAKSKPAIEGNEKVKFESKITNIDRAVGAMLSSSVVKTRGSNNLGAGSIHIKFSGSAGLSLGAFLAQGITLEVEGDANDYVGKGLSGGRIIVYPPKNSTFNAEDEVIAGNVCGYGATGGELYLSGCVSERFCVRNSGVNAVVEGIGDHGCEYMTGGKVIVLGEVGRNFAAGMSGGIAFVYNPNKTFESMLSTGAMVDLDPFNSDYESELKHYIQNHYSLTA

SEQ ID NO: 1429 - protein, 213 aa, Brassica napus
  misc_feature (192)..(192): Xaa can be any naturally occurring amino acid
MDFRIDNGDADGMMMTISVENHNEMGESSGQAMIEQDDDENRNEIGENSNQEMPLEQDEKVDPDSIPLAVSDMAEEEVQGGDEPYVGQEFESEAAAHGFYNAYATKVGFVIRVSKLSRSRHDGSPIGRQLVCNKEGYRLPSKRDKVIRQRAETRVGCRAMILIRKENSGKWVITKFAKEHNHPLMPGRVRRXCIYDQYPNEHDKIQELMQQLA

SEQ ID NO: 1430 - protein, 742 aa, Vitis vinifera
MLPILLKLVIMQVQMVTYLLKQFVHSLRGNAFDWYIDLAPEDARFFTNTFPSWDRAQPMRVLGHNGEINTLRGKVNWMKAREGLLKCKELGLSKNEMKKLLPIVDASSSDSGAFDGVLELLVRAGRSLPEAVMMMIPEVWQNDKNMDSDRKALYEYFSALLEPWDGPALISFTDGAIFSNKDSGENSPKNNGECSEKINEVSPLKCAFAIFDADFFNDAKIAEIEKGATELNIPISRANRKLVASVNGGLHDPSYLVFNPEWGNEQVQSKTKRFSYPSLSGIQRPESEEDIAFMTVLELGVLIKTKQITSEELTRIFLHRLKRYNYVLEAVVTYTEELAYKQAKEADEMLARGIYLGPLHGIPYGLKDIISVPQYKTTWGSKTFKDQVLDIEASVFKKLKSAGAVLVAKLATGSLAYGGIWFGGRTRNPWNIEEYPIGSSAAAAASTSAGILNLHQLRNYFPAASCGVTALRPTFGAVGRTGVMSISESLDKIGPFCRSAVDCTIILDAILGKDPDDPSSKDISLDDPFSVDITNLTVGYLDDAEMEVIHILESKGVKMVPFKLNYTVNHVQGILNFAMDVDMLAHFDEWQRSGEDDFYEAQDLWPVELRRARMIPAVDYVQAQRARGKLIREIRESFTVDAFIGNATDWEKVCIGNLVAMPVVIVPTGFTKISNPPPDGSRRRSTITTGIYAPPNHDHIALALAMAYQSVTEHHRQRPPIDDLGPNDFIADSISTPDYLSS

SEQ ID NO: 1431 - protein, 1573 aa, Brucella melitensis 16M; identical to SEQ ID NO: 747

SEQ ID NO: 1432 - protein, 511 aa, Saccharophagus degradans 2-40; identical to SEQ ID NO: 749

SEQ ID NO: 1433 - protein, 90 aa, Brassica rapa subsp. pekinensis
  misc_feature (60)..(60): Xaa can be any naturally occurring amino acid
  misc_feature (73)..(73): Xaa can be any naturally occurring amino acid
MKGDYHRYLAEFKAGDERKETAESTLVAYKSAQDIATAELAPTHPIRLGLALNFSVFYYXILNSPDRACTLAXQAFDEAIAELDTLGEES

SEQ ID NO: 1434 - protein, 187 aa, Zea mays
MTGAAAPAAPPRGGASASQPHAAAPAGKRAGCEPVRKAGPVTMEHVLLALHETEAEREARIRDMFAFFDTAGSGQLDYAQIEAGLAALQVPAECKYARELLRACDRDRDGRVGYDDFRRYMDDKELELYRIFQAIDVEHNGCILPEELWDALIKAGMCFLGRTTLLASLIPSICAAAPVILATLVLC

SEQ ID NO: 1435 - protein, 331 aa, Oryza sativa
  misc_feature (121)..(121): Xaa can be any naturally occurring amino acid
MLVYVTFKLFTPSVVSQSVDLIEIKTNQRAYPVHLEQYPGRTSRTPVAFAESGGDIPASALPTHQVVRPGRSAQHRPACCLSILFVPSSRRFPAPAPCSPAHPLHPSHMRSLLDEWFAPCXKLGIAAEHGYFVRWNKAAEWESSYPNHDFEWKHIAEPVMQVYTETTDGSSIEPKESALLWHYLDADHDFGSCQAKELLGHLERVLSNEPVVVKCGHYIVEVKPQGVSKGLVVDKVIHRLMNNGKTLDFIVCIGNDRSDEDMFKSIDSMTSSSAFPAVPEVFACSVGQKPSKAKYYVDNAGEVVRLLKNVAGISSHREAISHGRVIFRDVI

SEQ ID NO: 1436 - protein, 507 aa, Vitis vinifera
MNSIGVVGEVKAETQEAAGPEEWRRYRGVRRRPWGRYAAEIRDPAKNGARVWLGTYETAEDAALAYDRAAFRIRGSRALVNFPQRIGSGDPEPVRITPKRRSPQPSLSAAAAPALKRRKGDVDSTVEVEAATENVVDVFQLHQLWLFGMSIAFLFVQETVEGVVAAVKRLKDVSISEKEFREKVETAGPIDHENLVPLRANYYSKDEKLIIYGYMPIGSLSALPHGNRGVSMTLPIWEARSGIALGATRGIAYIHSWGSASPHGDIKSSNILLTKSCEGQVSDFGLAHLVGPIAIPNRVVGYCALEATDARKVSKKKVDAYNFAEFCDDSMVPTWFMILSDSETAKRILGSLVSTDRRMKESACEFLFHRAMGFAPFRAYWRSLRRISATHLFSPRGISVFGEFRRIIGLKMLDEIRASIEEEGEVNVKKVLHFESSNNVMMSVFGGRYRTVRKYMALMSLTQSEEENSGARESRASCKRLGRKPERRPPPSHTSPATLLSRSSPDP

SEQ ID NO: 1437 - protein, 513 aa, Vibrio sp. Ex25; identical to SEQ ID NO: 758

SEQ ID NO: 1438 - protein, 561 aa, Frankia sp. CcI3
MDRRTGLSGWPTLRSVRRMPGAEEDTLPRLWPTGTARVLVASNRGPVAFAVGDDGRLRIRRGAGGLVSGLSRVAADNGDGPMAWVCAALSDADRRAARSAPAGRLDLAGHDTDGTAVRMLDVDQVVFDRAYNAVANRTLWFIHHLLYAPASQPVFGPAFRRDWQAYETYNEMFAQALAHEAAPGASVLIQDYHLTLVAARLRALRADLRIAHFSHTPWAPPEYFRILPDDVSEQILRGMLGADRLGFLTDAWADAFQECCRDLLGLRIDRRAVTIGTAGSGRGAGSGRGAGSGRGAGSGREAGSGREAGSGREAGSGREAGRHRTVRIGVHPLGVSADELLGRAAATDVAARAAELVDLAGGRRLIVRVDRTELSKNIVRGLDAYRELLRTRPEWRGKVMHLVCAYPSRHDLPEYREYTAAVQRLAAEIEDEFATDTWLPLRLEITDDYPRSIAALSLAEVLVVNPIRDGMNLVAKEGPIVSTRDAVLVLSREAGACAEMGTAALVVNPFDIQATARALHAALTMPAPERRRRAEELAAVAGRLPPQRWFADQLHALAADR

SEQ ID NO: 1439 - protein, 460 aa, Burkholderia xenovorans LB400
MSRLVVVSNRTVDPRKTAAGGLAVAVRESLQRTGGLWFGWSGKIYDESDEMTSRRGVHVQTLGNVTLATVDLSQQDHDNYYLGYANGVLWPVFHYRLDLADFDTRFAAGYRRVNQLFAEKLLPLLRPDDIIWVHDYHLIPLAAELRAIGCGNRIGFFLHIPMPPPMIMAAIPEHEWLMRSLFAYDLVGFQGQIDVEHFTHYAESEANARQVGPQQLRAFNRTLRLGAYPIGIDVEEFVSLANGKEAREMFTRMRDEYSRRRLLLGVDRLDYSKGLPQRIHAFRELLAHYPENRDSATLIQIASPSRESVAAYDDLRRQMDSLCGAINGDYGELDWMPVRYIHRHVARKRLPGLYRASKVALVTPLRDGMNLVAKEFIAAQDPSDPGMLVLSRFAGAAEQLKEALLVNPYDTQGTAHAIQRALTMPLDERRNRHAALMKRIREHDVHWWSSSFLDTLQDIP

SEQ ID NO: 1440 - protein, 100 aa, Zea mays
  misc_feature (82)..(82): Xaa can be any naturally occurring amino acid
MTGGLAYILDEDDTLVPKVNKEIVKMQRVNAPAGQMQLKGLIEAYEKTGSEKGIAILREWEAYLPLFWQLVPPSEEDSPEAXAEFERVLAKQATTQLSAK

SEQ ID NO: 1441 - protein, 287 aa, Nicotiana glauca x Nicotiana langsdorffii
MASSLMKRNGVEKNDKTFHEFFETWLAEQKQELKELVSASRDVSKGNNNVVEERVLVPLIKRVIQHYEGYYEEKSKYTEEDVFGMLNPTWRSNLEGAFLWIGGWRPSMAFHLLYSKSGLQFEARLPQLIRGITTGDLGYLSPDQIDKVDELQKKTIREEKKSSEKLARVQETVADASMVELSHIVTQLMMISGSRGGGGGGGKILDEEVEANLATKEEGLIIILQKADNLRLNTLKEILAILTPTQAIHFLIAAAELHLRLHEWGKIEDATASRTPARRYYHHHHQL

SEQ ID NO: 1442 - protein, 1607 aa, Burkholderia cenocepacia J2315; identical to SEQ ID NO: 785

SEQ ID NO: 1443 - protein, 266 aa, Zea mays
MSPSEPTREESVYMAKLAEQAERYEEMVEFMERVARSAGGAGGGEELSVEERNLLSVAYKNVIGARRASWRIISSIEQKEEGRGNEAHAASIRAYRSKIETELARICDGILALLDSHLVPSAGGAESKVFYLKMKGDYHRYLAEFKSGAERKDAAESTMNAYKAAQDIALADLAPTHPIRLGLALNFSVFYYEILNSPDRACNLAKQAFDEAISELDSLGEESYKDSTLIMQLLRDNLTLWTSDTNEDGGDEIKDAAAPKESAEGQ

SEQ ID NO: 1444 - protein, 234 aa, Solanum tuberosum
MDQQLPPINFPVDFPVYRRNSSFSRLIPCLTETWGDLPLKVDDSEDMVIYGLLKDALSVGWSPFSFTAGEVKSEPREEIESAPEFVPSPVETTAAPAAETPKGRHYRGVRQRPWGKFAAEIRDPAKNGARVWLGTYETAEEAAIAYDKAAYRMRGSKAHLNFPHRIGLNEPEPVRVTAKRRASPEPVSSSENGSMKRRRKAVRKCDGGVESRSSAIQIGCQIEQLTGVHQLLVI

SEQ ID NO: 1445 - protein, 1482 aa, Chromobacterium violaceum ATCC 12472; identical to SEQ ID NO: 790

SEQ ID NO: 1446 - protein, 240 aa, Brassica oleracea
MYGQGEIMAATETEYAVLESIRRHLLGGETELQFSESIPSSCFTESWGDLPLKENDSEDMLVYGVLNDAFNRAACETSSPSSDLSCLSDFLDKPPANPSHNDFPAVKMEPAENLAAVAEKPKEVAPPAKGKHYRGVRQRPWGKFAAEIRDPAKFGARVWLGTFEKAEDAALAYDRAAFRMRGSRALLNFPWRVNSGEPDPVRIPSKRSYTSSSSSDNGTPKRRRNTEEVPSELQVKCEVA

SEQ ID NO: 1447 - protein, 766 aa, Physcomitrella patens subsp. patens
AESELLHSLYAIPSIDKAWAIPSCQGGAGFDVVVAMSQVNLPANAKRTFLSTVYIPETSSATITDYHWSPFPFEISGASLIVPSPSGAKVLIIRNPKDSTSPTNLEIWGPGQLLREIFVASSVHGSVYGDGWFEGVSWSQNEESIAYVAEEPVVSRPVFGQSASTPGQNSNATLEAGNWKGQGDWVEDWGESYSGKRRPVLFVANVSTGAVQAVEGISRDISAGQVVWAPQPASPDGPQSLVFVGWSSYAENFSTPRKLGMKYCFNRPCHLYHVEAPVPDREPSDAPREATNLTEGVSSAFSPRFSPDGKKLVFLSAEAAVKSGAHNATNSLHLIDWPTDLIRIGEKPQVKDIVNVVQHAEEGAFPGLYCYNLVANPWLDDGSTLLLSSAWRSQQVILSIDVESGNVSRVSSSDSLASWNLLGLQNSCIVATVSSPIQPSSLHLGHSASVGSPLKGGKEWKWSAINVPSLKFASKIESVMQSMKYELLQVSPPKADPLKSLSVGSGQPFEAIFVSPTGSIRPLTEEPRIESIPPLVVVLHGGPHSVSQTSFSRNAAFLSMLGFNLLHVNYRGSLGFGEEALQSLLGNVGRQDVDDVLAALDLVIGNGMADPARVAVLGGSHGGFLATHLIGQAPDRFATGIARNPVCNVSSMVGITDIPDWCYVEAFGKDGLSNYSEAPSVKDLSVLYQISPIAHISNVKVPTLFLLGAQDRRVPVSNGFQYVQALRARGQEVKVIVFPEDVHAIDRPQSDFESFLNIGVWLKRFI

SEQ ID NO: 1448 - protein, 156 aa, Zea mays
DAWADAWADAWGGHIGIEYFGRTVSLKILAAGVHVGRLEATLRLPATIKKVQEIESRYRGGLVILGVDDMDIFKGISLKLLGLELLLERTPKLRGKVVLVQIVNPARSIGKDIEEAKYEAESVAQRINDKYGSANYKPVVLIDYSIPFYEKIAFYA

SEQ ID NO: 1449 - protein, 481 aa, Fulvimarina pelagi HTCC2506
MADSNPRLVAVSNRVGPLSDEGQAGGLVVGLSDALKRRGGVWFGWSGETSKEGTQGEAKTEVQENVEMTTIDMSQEELQGFYYDYANRSLWPLLHYRLDLAEFDRVSDKVYRQVNHRFAVRLMPHLKENDLVWVHDYHFFYMGSELRQAGYKGRLGYFLHIPFCAPEVFSALPASHDIVRALLAYDVIGFQTDTDRCNFVSFCISELGGEKLDEDRVRVGDRTVIAKPFPIGIDAEGYARFAVSPEAGEHEEMLLSMTRDRRNSDGEGAERKLIVGVDRMDYSKGLLERFYGFERLLEDYPENCGSAIFLQVAPLSRSELDAYAELRDELERTAGHLNGRFATLDWTPLQMMTRGFTRKALAGIYRAARVCLVTPLRDGMNLVAKEFVAAQDPEDPGVLILSRFAGALDELKCGCIVVNPYNTDDVAAAMQRALTMPLEERKRRWEAMREAVFTGTAQRWCQSFIDMLETSHHEPAAQTSS

SEQ ID NO: 1450 - protein, 271 aa, Cleome spinosa
MSPADLTREENVYMAKLAEQAERYEEMVEFMENVAKTVDTEELTVEERNLLSVAYKNVIGARRASWRIISSIEQKEESRGNEDHVSTIKEYRGKIEAELSKICDGILNLLETHLIPCASSAESKVFYLKMKGDYHRYLAEFKTGTERKEAAENTLLAYKSAQDIALAELAPTHPIRLGLALNFSVFYYEILNSPDRACNLAKQAFDEAISELDTLGEESYKDSTLIMQLLRDNLTLWTSDINDEAGDEIKDASKQESEEGQEAQTAAPPAH

SEQ ID NO: 1451 - protein, 641 aa, Chlamydomonas reinhardtii
MMHLDAKAKHSLLALDAASLGLALPGTSPPAAPLPVPGVKPPGAAGVAALPPGSLPFGAATQFGQVPFFAGLPFPLPGGVPPPLPGLPPLSSAAAHAAAAMTIAQAAAAAEAAPGKGRIGAIAASAAAATDPNIAVPTPPIAASPPTEPSDGSSPATSHGSKDGAAGDAVKTEPGANTAAPGGALSSLGAIAAAAQAATAGMAVPPSLWLGQPGSAGSAFQALAMPMPPFPPNLARTSVGGDGSVQPGTSAPAHSDAPSAPAPSGRPPLAPGMPGNLPSSLADHPAAGICSTSYRSSGSHLGMPGGALGASPPSLGTSPAAIKLPGRRRTSSTNLLSSSLGAKASSSVPSLSVKPDKSGACKYRGVRQRPWGKYAAEIRDPHKGCRLWLGTYDTAEEAALAYDKAAREIRGPRAVVNFPNVNHANLPAPQPHGDDESGAWDPLGTTSLGTSPVSSGFIPGSSPLMGGSAPVRHGMHPHHHLHGGAFSHHPGVAPSSGLGLRSTFGGYPVRREPTEPIAEGESDVDMDDGEEGEDGDGDDMDEGVGPRSGRARMKVNVVTGVGGRTRPSRPAAAAAVAAAAAAAAGGGVDLEDSDGAPPPPQPSMAGGASRGGGGKRNQVSMDVEDELAELADALLLLHESA

SEQ ID NO: 1452 - protein, 753 aa, Azoarcus sp. EbN1
MLIATDLDGTFLAGHPEARLRLYQLINAHPEIKLVFVTGRGLEVVLPLLSDPSIPTPDYIVCDVGATVVDGRTLQPVQPLQAGIDALWPGERVVAAAMASFVGIERQEVPQQRRCSYFCAPGTVGSDLRGIAAELGCDMLYSAERYLDILPRGVNKGSTLDALVRLLEIDRDAVLVAGDTLNDLSMYERGFVGVCVGESEAALLDATRERAHVLHARHPGCGGILEAIAHFGFLGPAGVEAELRETDTPGRSELVMVYHRLPYEEVFENGRITRAAPSSPNGIIPTLLSYFSDGRPGAWIAWSMHDPKKAIPFEVHTTVDRERYPHLVAARVPLTKDDIDIFYKRFSKEAFWPTLHTFWERAQFREDDWHVYLKVNRLFAERAAAEAAEGAVVWLHDYNLWMVPAVLRELRPDVKIAFFHHTYFPSADVFNVLPWRREIIGSLLQCDYIGFHIPRQAENFVDVARGVAPLTVLERRNCAPRYLTYGCAVGLDEVTTAIEVHGRRIGLGAHPVGLDVERVRKILDQPSTRKRMAELRADLVDTRVILSVERLDYTKGTLEKLLAFERLLDAHPELQGKVSLMAVCVPAAKEMTIYDALQTQIEQAVGRINGRFSRVSWTPVQFFFRALPFEEVVAWYAMADVMWITPLRDGLNLVAKEYVATQGMIEGRGVLVLSEFAGAAAELHGAVLTNPHDLADLAARLYQAIAMNDAEAEARLRELFAIVEHNDIHRWGRNFLEAVTTPVGEDSLAGTGC

SEQ ID NO: 1453 - protein, 722 aa, Myxococcus xanthus DK 1622
MSRLLLVSNRLPVTVKVEKDTVSVVRSAGGLATGLRRPHERSGGLWIGWPGDVSRLSESQRARVDAQLAELRCVPLTLSASEVSRYYEGYSNRVLWPLCHYMLERIPRQDRDWEVYRKVNERFADLVAKHYEPGDTIWVHDYQLMLVPGMLRQRLPGARIGYFHHIPFPSSEIFSTLPRRRELLKGLLGADLIGFHTVSYVRHFSGALLRHLGLDTDIDRIIWEGRDVRVGAFPMGIDAQAFESIASEPGMQEEVANLRRSSEGQRILLGIDRLDYTKGIPRRLLAVQRVLERTPAWRGRLRFIQVTVPSRTQVEAYANYRELVNELVGRINGLYGTVHNVPVHYLYRSFNERQLVGLYRGADVMLVTPVRDGMNLVAKEFCAARPDDDGVLVLSEFAGAAAELGGALIVNPYDVDAMADAIEKALGMAEEERRTRMHTLRKQVKSRDVHWWTSSFLDRLQSLPAVDVRAEASAPEALAQMKQVERLQLLLDYDGTLVGYAPRPELAAPDAALKELLAKLVARPGISVSIVSGRPKETLEEWLGDLAMGLYAEHGLWSRPAPGEAWRMLEGVTFDWKERVRPELETFSARVPGSFVEEKTASLAWHYRLVDAEFGAIQSRELRLYLAEKFAGQSMDILPGDKVVEIRPRGVHKGRVVGEATKDAAPGALVVAIGDDRTDEDLFASIPPGGLTIHAGNKPTRAAFRVNGPDEVRALLAGLLEP

SEQ ID NO: 1454 - protein, 189 aa, Zea mays
LASLGFNLLVVNYRGTPGYGEEALQSLPGKVGSQDVQDCLAAAGFAVEEELAPDRFAVAAARNPVCNLSLMAGTTDIPDWCYVVACGTQAKRYASEAPSPGHLRLFYQRSPIAHVSKVKAPLLMLLGGADLRVPASNGLQYARSLIERGGDVKIMMFPEDIHEINLPRSDFESFLNIGVWFKKHLNAVA

SEQ ID NO: 1455 - protein, 90 aa, Glycine max
VEGVKEFDTRWIGWAGVNVPDDVGQRALTKALAEMRCIPVFLDEEIVNQYYNGYCNNILWPLFHYLGLPQEDRPSTTRTFQSQFDAYKKA

SEQ ID NO: 1456 - protein, 511 aa, Archaeoglobus fulgidus DSM 4304; identical to SEQ ID NO: 808

SEQ ID NO: 1457 - protein, 1520 aa, Bacillus subtilis subsp. subtilis str. 168; identical to SEQ ID NO: 810

SEQ ID NO: 1458 - protein, 878 aa, Oryza sativa Japonica Group
MFSRSYTNLVDLANGNLSALDYGGGGGGGGGGNGAGGRPPRARRMQRTMTTPGTLAELDEERAGSVTSDVPSSLASDRLIVVANTLPVRCERRPDGRGWSFCWDEDSLLLHLRDGLPDDMEVLYVGSLRADVPSAEQDDVAQALLDRFRCVPAFLPKDVLDRFYHGFCKQTLWPLFHYMLPFTSDHGGRFDRSQWEAYVLANKLFSQRVIEVLNPEDDYIWIHDYHLLALPSFLRRRFNRLRIGFFLHSPFPSSELYRSLPVRDEILKSLLNCDLIGFHTFDYARHFLSCCSRMLGIEYQSKRGYIGLDYFGRTVGIKIMPVGINMTQLQTQIRLPDLEWRVAELRKQFDGKTVMLGVDDMDIFKGINLKVLAFEQMLRTHPKWQRKAVLVQIANPRGGGGKDLEEIQAEIDESCRRINAQFSRPGYVPVVIINRALSSVERMAYYTVAECVVVTAVRDGMNLTPYEYIVCRQGFPDLDGSGDDGPRRKSMLVVSEFIGCSPSLSGAIRVNPWNIDTTAEAMNESIALSENEKQLRHEKHYRYVSSHDVAYWSKSYIHDLERSCRDHFRRRCWGIGLGFGFRVVALDRNFKKLTVDSIVTDYKNSKSRVILLDYDGTLVPQTTINRTPNESVVKIMNALCDDKKNVVFIVSGRGRDSLEKWFSPCQDLGIAAEHGYFMRWTRDEQWQLNNQCSEFGWMQMAKPVMNLYTEATDGSYIETKESALVWHHQDADPGFGSSQAKEMLDHLESVLANEPVCVKSGQQIVEVKPQGVSKGFVAEKILSTLTENKRQADFVLCIGDDRSDEDMFEGIADIMRRSIVDPQTSLYACTVGQKPSKAKYYLDDTNDVLNMLEALADASEETDSQEDAEEITSIPDPE

SEQ ID NO: 1459 - protein, 444 aa, Acinetobacter sp. ADP1; identical to SEQ ID NO: 815

SEQ ID NO: 1460 - protein, 2114 aa, Gibberella fujikuroi; identical to SEQ ID NO: 822

SEQ ID NO: 1461 - protein, 494 aa, Bradyrhizobium japonicum USDA 110
MNRRGRPVNLVVVSNRVARGKPNEPMTGGLAAALLPVVEHSGAIWVGSSGRVRDGHQKEPFAEIEALGSGAIATLDLPAAHYGGYYEGFANSALWPALHSRSDLIRVSREDYVSYREVNAFMARALMRFRKPRTAFWVQDYHFLALGAELRDLGVDDPIGFFLHTPWPVAAVTQGVPNHRELITAMLAYDLIGFQTEEDRQNFLGYVAGELGLVIDDGVVLSQHGRTRCEVFPIGIDAEKFAQYAAKSASHPDVSRLRRSLNGERLAIGVDRLDYSKGLVNRISAFDRLWTEQPQFLRSISLLQIANPSRGAIEAYGNLQNEVARLVTDVNGRHGEVDWTPIRYLNKGFSQAVLAGLYRTAQIGVVTPLHDGMNLVAKEYVAAQNPADPGVLVLSKFAGAANELDTALLVNPHDIDAMARAIAIAAAMPLTERKMRWDAMMKKLRGHTIQQWSADFVAELEKCRIEKAAVAPLAAQPPQALRWLKSAISGVRLI

SEQ ID NO: 1462 - protein, 303 aa, Oryza sativa
MLLNPASREVAALDSIRHHLLEEEEETPATAPAPTRRPVYCRSSSFGSLVADQWSESLPFRPNDAEDMVVYGALRDAFSSGWLPDGSFAAVKPESQDSYDGSSIGSFLASSSSEAGTPGEVTSTEATVTPGIREGEGEAVAVASRGKHYRGVRQRPWGKFAAEIRDPAKNGARVWLGTFDSAEEAAVAYDRAAYRMRGSRALLNFPLRIGSEIAAAAAAAAAGNKRPYPDPASSGSSSPSSSSSSSSSSSSGSPKRRKRGEAAPASMAMALVPPPPPPAQAPVQLALPAQPWFAAGPIQQLVS

SEQ ID NO: 1463 - protein, 502 aa, Moorella thermoacetica ATCC 39073; identical to SEQ ID NO: 834

SEQ ID NO: 1464 - protein, 503 aa, Oryza sativa Japonica Group
MAAKWAMKKKLVGGDAGYVLEDVPHLTDYLPELPTYPNPLQDNPAYSVVKQYFVNTDDTVTQKIVVHKTSARGTHFRRAGPRQRVYFQSDEVNAAIVTCGGLCPGLNTVIRELVCGLYDMYGVTSVVGIEGGYKGFYSRNTVALTPKSVNDIHKRGGTVLGTSRGGHDTGKIVDSIKDRGINQVYIIGGDGTQKGASVIYEEVRRRGLKCSVVGVPKTIDNDIAVIDKSFGFDTAVEEAQRAINAAHVEAESAENGIGVVKLMGRNSGFIAMYATLASRDVDCCLIPESPFYLEGKGGLLEFIEKRLKDNGHMVIVVAEGAGQDLIAKSMNFVDTQDASGNKLLLDVGLWLSQKIKDHFKKKRNFPITLKYIDPTYMIRAVRSNASDNVYCTLLAHSALHGAMAGYTGFTVAPVNGRHAYIPFYRITEKQNKVVITDRMWARVLCSTNQPCFLSHEDVEHLKHDDDEHHLHNTQLLEGESSPGKHTGFLYIDKIRFTIPIENR

SEQ ID NO: 1465 - protein, 2152 aa, Candida glabrata CBS 138; identical to SEQ ID NO: 840

SEQ ID NO: 1466 - protein, 1542 aa, Methylococcus capsulatus str. Bath; identical to SEQ ID NO: 842

SEQ ID NO: 1467 - protein, 547 aa, Vitis vinifera
MMEMNLLFGSERRDTPRIVSNMVACVQSGLVCEEDEENMLNQRRKEEFDPSYFEQKFPPLGNSEIHKNPDFEHIGVAEPLTISTGISSEFEDKLHFLEERNEQILSKRILMLSRSNKVRSVLELYRTMEFSGLQPSSHACNSLLSCLLRNEMLDDALRVFESMKANESTTGHSYSLVLKAIANIQGYDSALKMFSKLEVECKVKKDFDVIAYTTMISICGKVNNWAQTERIWRSMKENGLVGTIVTYRLLVSVFVRCGQNELAIDAYSEMIQNGLKPGEDAMKAIIGACAKEGKWDLALSVFQSMLNVGLKPNLIACNALINSIGKSGNVKLAFRVYDVMKSLGHTPDVYTWNALLGALYRANQHADALHLFESIREQSSQVNLHLYNTALMSCQKLGLWNRALQLLWQMEASGLSVSSASYNLVIGACEVARKPEIALQVYEHMVQQQCTPDTFTHLSLIRSCIWGSLWAEVKEILNRAGTDVSLYNAAIQGMCLRGKIESAKKLYMRMRKSGLKPDGKTRALMLQNLQKDAIRPSNRRISHPRRY

SEQ ID NO: 1468 - protein, 432 aa, Desulfotalea psychrophila LSv54; identical to SEQ ID NO: 845

SEQ ID NO: 1469 - protein, 553 aa, Bordetella bronchiseptica RB50; identical to SEQ ID NO: 849

SEQ ID NO: 1470 - protein, 988 aa, Zea mays
MVSRSYSNLLELAAGGSGGEPLPSLGRRRIPRVVTASGIVPDLDVSDAASAADQSSHAPRERVIIVANQLPVRASRRAAAGAGGGGWDFAWDQDSLLLQVKDSLRAHHGRADVEFVYVGGLRDDVPPAEHDQVAHDLLEGFRCVPTFLPADLRSRFYHGFCKQQLWPLFHYMLPLSPELGGRFDRLLWQAYVSVNKIFADKILEVISPDEDFVWVHDYHRVVLPTFLRKRFNRVKLGFFIHSPFPSSEIYKTLPVREELLRSLLNADLIGFHTFDYARHFLSCCSRMLGLKYESQRGYIALEYYGRTVTIKILPVGVHLEQLRSVLNLPELGVKVAELLKQFCHRNRLLLLGVDDMDIFKGISLKLLAFEQLLMQHPEWRGRVVLVQIANPARGRGKDVREVQEESDAMVRRINDAFGQPGYQPVILIDQPLQFYERMAYYVVAECCLVTAVRDGMNLIPYEYVIARQGNERIDSILGLGPASRKKSMLVVSEFIGCSPSLSGAIRVNPWNIDSVADAMDYALEMPEGEKVLRHEKHHRYVSTHDVGYWANSFLQDLERICLDHNRRRCWGIGFGLKFRVVALDPNFKKLAVEHLVLAYRRTKKRVILLDYDGTLMPQTSLGKSPTSRTIDMLNSLCRDRNNMVFLVSAKSRMTLNEWFLPCESLGLAAEHGCFLRLRRDAEWETCVPVIDCSWKQIAEPVMKTYTETTDGSTIEDKETAIVWCYEDADPDFGSCQAKELHDHLESVLANEPVSVKAGPNLVEVKPQGVSKGLVAKRILSTTQERGDADDDLPDFVLCVGDDRSDEDMFEVIAAAAAARGVSSLQAEAEVFACTVGRKPSKAKYYLDDPADIVRLVQGLASVSDDDQTHAPPPPPPSAATTAADTVPRVRVCWIQSSSETLLAAVVNNAQSQSWGGDATSSEVRRRGESLIRPRDGAMRLDPEHRAAFPFRSVDQALSISYPRASAAHLRNDWVSMADFCAGGADSAV

SEQ ID NO: 1471 - protein, 942 aa, Arabidopsis thaliana
MPGNKYNCSSSHIPLSRTERLLRDRELREKRKSNRARNPNDVAGSSENSENDLRLEGDSSRQYVEQYLEGAAAAMAHDDACERQEVRPYNRQRLLVVANRLPVSAVRRGEDSWSLEISAGGLVSALLGVKEFEARWIGWAGVNVPDEVGQKALSKALAEKRCIPVFLDEEIVHQYYNGYCNNILWPLFHYLGLPQEDRLATTRSFQSQFAAYKKANQMFADVVNEHYEEGDVVWCHDYHLMFLPKCLKEYNSKMKVGWFLHTPFPSSEIHRTLPSRSELLRSVLAADLVGFHTYDYARHFVSACTRILGLEGTPEGVEDQGRLTRVAAFPIGIDSDRFIRALEVPEVIQHMKELKERFAGRKVMLGVDRLDMIKGIPQKILAFEKFLEENANWRDKVVLLQIAVPTRTDVPEYQKLTSQVHEIVGRINGRFGTLTAVPIHHLDRSLDFHALCALYAVTDVALVTSLRDGMNLVSYEFVACQEAKKGVLILSEFAGAAQSLGAGAILVNPWNITEVAASIGQALNMTAEEREKRHRHNFHHVKTHTAQEWAETFVSELNDTVIEAQLRISKVPPELPQHDAIQRYSKSNNRLLILGFNATLTEPVDNQGRRGDQIKEMDLNLHPELKGPLKALCSDPSTTIVVLSGSSRSVLDKNFGEYDMWLAAENGMFLRLTNGEWMTTMPEHLNMEWVDSVKHVFKYFTERTPRSHFETRDTSLIWNYKYADIEFGRLQARDLLQHLWTGPISNASVDVVQGSRSVEVRAVGVTKGAAIDRILGEIVHSKSMTTPIDYVLCIGHFLGKDEDVYTFFEPELPSDMPAIARSRPSSDSGAKSSSGDRRPPSKSTHNNNKSGSKSSSSSNSNNNNKSSQRSLQSERKSGSNHSLGNSRRPSPEKISWNVLDLKGENYFSCAVGRTRTNARYLLGSPDDVVCFLEKLADTTSSP

SEQ ID NO: 1472 - protein, 1526 aa, Halobacillus halophilus; identical to SEQ ID NO: 853

SEQ ID NO: 1473 - protein, 202 aa, Vitis vinifera
  misc_feature (19)..(19): Xaa can be any naturally occurring amino acid
  misc_feature (26)..(26): Xaa can be any naturally occurring amino acid
  misc_feature (43)..(43): Xaa can be any naturally occurring amino acid
  misc_feature (45)..(45): Xaa can be any naturally occurring amino acid
  misc_feature (50)..(50): Xaa can be any naturally occurring amino acid
MYGHTTFDSDVAFLESVRXYLLEDSXLPHPFSANAPAYSATTXTXTENWXNPPVLDAAAAGGVVGEAKAEPQEAAAPEEWRRYRGVRRRPWGKYAAEIRDPAKNGSRVWLGTYETAEDAALAYDRAAFRIRGSRALLNFPLRVGSGEPEPVRITPRRRSPQQSLSAAAAAALKRRKCDVDWTAEVEAATENVVDMFQLHQYG

SEQ ID NO: 1474 - protein, 904 aa, Saccharomyces cerevisiae YJM789
MINLEDYWEDETPGPDREPTNELRNEVEETITLMELLKVSELKDICRSVSFPVSGRKAVLQDLIRNFLQNALVVGKSDPYRVQAVKFLIERIRKNEPLPVYKDLWNALRKGTPLSAITVRSMEGPPTVQQQSPSVIRQSPTQRRKTSTTSSTSRAPPPTKPDASSSSSSFAVPTIHFKESPFYKIQRLIPELVMNVEVTGGRGMCSAKFKLSKADYNLLSNPNSKHRLYLFSGMINPLGSRGNEPIQFPFPNELRCNNVQIKDNIRGFKSKPGTAKPADLTPHLKPYTQQNNVELIYAFTTKEYKLFGYIVEMITPEQLLEKVLQHPKIIKQATLLYLKKTLREDEEMGLTTTSTIMSLQCPISYTRMKYPSKSINCKHLQCFDALWFLHSQLQIPTWQCPVCQIDIALENLAISEFVDDILQNCQKNVEQVELTSDGKWTAILEDDDDSDSDSNDGSRSPEKGTSVSDHHCSSSHPSEPIIINLDSDDDEPNGNNPHVTNNHDDSNRHSNDNNNNSIKNNDSHNKNNNNNNNNSNNNNDNNNSIENNDSNSNNKHDHGSRSNTPSHNHTKNLMNDNDDDDDDRLMAEITSNHLKSTNTDILTEKGSSAPSRTLDPKSYNIVASETTTPVTNRVIPEYLGNSSSYIGKQLPNILGKTPLNVTAVDNSSHLISPDVSVSSPTPRNTASNASSSALSTPPLIRMSSLDPRGSTVPDKTIRPPINSNSYTASISDSFVQPQESSVFPPREQNTDMSFPSTVNSRFNDPRLNTTRFPDSTLRGATILSNNGLDQRNNSLPTTEAITRNDVGRQNSTPVLPTLPQNLPIRTNSNKSGLPLINNENSVPNPPNTATIPLQKSRLIVNPFIPRRPYSNVLPQKRQLSNTSSTSPIMGTWKTQDYGKKYNSG

SEQ ID NO: 1475 - protein, 1527 aa, Mycobacterium sp. MCS; identical to SEQ ID NO: 856

SEQ ID NO: 1476 - protein, 1527 aa, Mycobacterium tuberculosis H37Rv; identical to SEQ ID NO: 858

SEQ ID NO: 1477 - protein, 536 aa, Burkholderia xenovorans LB400; identical to SEQ ID NO: 860

SEQ ID NO: 1478 - protein, 1689 aa, Oryza sativa Japonica Group; identical to SEQ ID NO: 861

SEQ ID NO: 1479 - protein, 479 aa, Thermobifida fusca YX
MDKAQILVASNRGPVSFSIGDDGAVKSRRGGGGLVSGLSSVATEIETLWVCAALSDADRKAAAAAPEGRLDKAGYDVGGASVRMLNIPADVFNNAYNSVANSTLWFVHHMLYDTPNKPSFGSRFRAEWEDYRAYNSAFAEALLTGADEGAKVAVQDYHLALVPKMLRVRRPDLRIAHFSHTPWAPPEYFRMLPADIGRELLEGMLGADHLGFLSVRWADAFLRCCEVFLRAPVNWGTRTVEHGGRVIRVGVHGLGADAQGLRERAAAEDVARWRERLRERVGDRKLIVRVDRTELSKNIVRGLEAFGELLRKRPEWRNRVTHLAFAYPSRSGVAEYRAYTESVRATAEAINAEFGTDDWTPVVLEVNDDYPRSLASYQIADVLLVNPIRDGMNLVAKEGPVLSLNGVALVLSTEAGAADDLGADAILVNPYDVSETAEALHRALTMDEEERRQRTERLAEAAAALPPQRWFTDQLRALD

SEQ ID NO: 1480 - protein, 429 aa, Oryza sativa Japonica Group
MAAVWSGCSTSFSQELPPHPRGRRGGDGARIHPWSGGAGRDATTRHAEAARTVVVFARGRVRVCRAAAPCVLEPDVAGKEEVGVAVWGMDDEPPVADGHRRHGLRRRPVRPAAVEEGPVAAARSAASASASAAGSKSEVGGSRLHFLEERDEEMLSRRLIKLSQSNKVRSATELFDSMRASGLQPSAHACNSLLACFVRRGSFADAMKVFEFMKGKGMATGHSYTLILKAVATTEGYFAALKMFDEIEESDKKNVDVIVYNTVISVCGRAKDWRQVERLWRRLGENSLSGTLMTYDLLVSTFVQCGQSELAVDAYQEMFKSGIDPSEDILKAIIASCTKEGKWEFALTTFRRMLSAGMKPSIIVFNSIINSLGKAGEDELAFRMYHLLTSSGLKPDQYTWSALLSALYRSGRCWDVLDLFQGIKTKHSA

SEQ ID NO: 1481 - protein, 461 aa, Triticum aestivum
LKGMSALTLSALIPYLQPPQCIGSFCPQPALHQYLIYFVGLYMIALGAGGIKPCVSSFGADQFDDTDPVERTKKGAFFNWFYFSINIGSLISGTVLIWVQEKYGYGIGFAIPTFFIALAIGSFFLGSEVYRFQIPGGSPLTRACQVVVAAIYKRNVDLPVDSSLLYECRGKRSAIEGSRKLEHSSEFSFLDKSAVVLRSECGDIHNPWRLCTVTQIEELKILMRMFPIWATGIVFFTVCAQNSSMFIEQGMALNNQVGSFKIPPATLSSLDVISIVVWVPIYERFIVPIARRLTGKERGFSELQRMGIGLFVSTIAVAVAALVEIKRLESARSEGLVHQKVPVSMSILWQAPQYLLIGVGEVFTSIGQAEFFYNQSPDSMRSLCSAFALVTVSLGSYLSSFILTLVSYLTTRGEQMGWIPDNLNEGHLDRFFWLIAGLSSLNFLAFVYFAQQYKCKKASVL

SEQ ID NO: 1482 - protein, 2482 aa, Lentisphaera araneosa HTCC2155; identical to SEQ ID NO: 868

SEQ ID NO: 1483 - protein, 525 aa, Zea mays
MESFGVPPAPVAAPEKRKKPLDLKDPVPAAAANGGGATKASPAAKWAEKKKLVGGDAGYVLEDVPHLTDYLPQLPTYPNPLQDNPAYSVVKQYVVNPDDTVTQKIVVHKTSARGTHFRRAGPRQRVYFQPDEVNAAIVTCGGLCPGLNTVIRELVCGLYDMYGVTSVVGIEGGYKGFYSKNTVALTSRSVNGIHKRGGTVLGTSRGGHDTAKIVDCLQDRGINQVYIIGGDGTQKGASVIYEEVRRRGLKCAVVGVPKTIDNDIAVIDKSFGFDTAVEEAQRAINAAHVEAESAENGIGVVKLMGRNSGFIAMYATLASRDVDCCLIPESPFYLEGKGGLLEFVERRLKDNGHMVIVVAEGAGQDLIAKSMNSVDTQDASGNKLLLDVGLWLSQKIKDHFKKKPRFPITLKYIDPTYMIRAVSSNASDNVYCTLLAHSALHGAMAGYTGFIVAPVNGRHAYIPFYRITEKQNKVVITDRMWARVLCSTNQPCFLSHEDVENMKHDDDEHHLHNTLLLDSPENSSK

SEQ ID NO: 1484 - protein, 252 aa, Oryza sativa
MAQRVGHSADGVFVMIVDEDKSHANFARGMLSSLNFHVIVYSSPVNALVFLENNAQDVAVVLAAVDMKQLSGFQFLEAARVKRQDLQVIMMSAETTMSTMMRCVKLGARFLVKKPLNEETVGNLWQHVDLKVLKMEKIRELLQDENNEEEEVNSFEAKKADSVKVQSDEKGHDNAKISNTAAAEGSDEKVSSGDGHVVPKAYNNVNVEESIGSNNTSGEQVSDKIKSDARVGVILVDYPDFEDDETKKPTST

SEQ ID NO: 1485 - protein, 260 aa, Solanum lycopersicum
MADSSREENVYLAKLAEQAERYEEMIEFMEKVAKTADVEELTVEERNLLSVAYKNVIGARRASWRIISSIEQKEESRGNEDHVNTIKEYRSKIEADLSKICDGILSLLESNLIPSASTAESKVFHLKMKGDYHRYLAEFKTGTERKEAAENTLLAYKSAQDIALAELAPTHPIRLGLALNFSVFYYEILNSPDRACNLAKQAFDEAISELDTLGEESYKDSTLIMQLLRDNLTLWTSDNADDVGDDIKEASKPESGEGQQ

SEQ ID NO: 1486 - protein, 454 aa, Desulfotalea psychrophila LSv54; identical to SEQ ID NO: 875

SEQ ID NO: 1487 - protein, 1624 aa, Burkholderia thailandensis E264; identical to SEQ ID NO: 878

SEQ ID NO: 1488 - protein, 255 aa, Elaeis guineensis
MEEMEERERHVYMAKLAEKAERYEEMVESLKKIARMDIELTAEERNLLSVGYKNVIGPRRASWRILAALEEKEEGKESEKNVKRMQDYKKRVEDELTKICNDILSIIAIHLLPSSTAGESIVYFYKMKGDYYRYMAEYKTVNERKEATDQSLKAYQAATSTAMTELPPTHVIRLGLALNFSVFYYEIMNLPERACHLAKQAFDEAITELNSLCEESYKDSTRIMQLLKDNLALWSADLPAEGGEQSPGTNNDMEE

SEQ ID NO: 1489 - protein, 260 aa, Oenothera elata subsp. hookeri
MATAPSPREENVYLAKLAEQAERYEEMVEFMEKVCAAADSEELTVEERNLLSVAYKNVIGARRASWRIISSIEQKEESRGNDDHVSTIRDYRSKIETELSNICGGILKLLDSRLIPSAASGDSKVFYLKMKGDYHRYLAEFKTGAERKEAAESTLSAYKAAQDIANAELAPTHPIRLGLALNFSVFYYEILNSPDRACNLANEAFDEAIAELDTLEEESYKDSTLIMQLLRDNLTLWTSDMQDDGGDEIKEAAPKPDEQY

SEQ ID NO: 1490 - protein, 540 aa, Arabidopsis thaliana
MGAVWLSHVSQLVCGCYLIEQSSCVLRTFHWSLSHSLNFTLTMKPKRRRLGVKMESFSLATPNMCFRKVSSELDSSFNGENVVCGLELEEKTAGDRNRIHFLEERNEETLSKRLRKLSRLDKVRSALELFDSMRFLGLQPNAHACNSFLSCLLRNGDIQKAFTVFEFMRKKENVTGHTYSLMLKAVAEVKGCESALRMFRELEREPKRRSCFDVVLYNTAISLCGRINNVYETERIWRVMKGDGHIGTEITYSLLVSIFVRCGRSELALDVYDEMVNNKISLREDAMYAMISACTKEEKWDLALKIFQSMLKKGMKPNLVACNTLINSLGKAGKVGLVFKVYSVLKSLGHKPDEYTWNALLTALYKANRYEDVLQLFDMIRSENLCCLNEYLYNTAMVSCQKLGYWEKAVKLLYEMEGSGLTVSTSSYNLVISACEKSRKSKVALLVYEHMAQRDCKPNTFTYLSLVRSCIWGSLWDEVEDILKKVEPDVSLYNAAIHGMCLRREFKFAKELYVKMREMGLEPDGKTRAMMLQNLKKHQK

SEQ ID NO: 1491 - protein, 119 aa, Zea mays
NSGAQAVVEGIGDHGCEYMTGGTVVILGKTGRNFAAGMSGGIAYIYDVDGMFSTRCNHELVDLYSVDEEDDITTLRVMIEQHRLNTESVLAKYILSNFEDILPKFVKVFPRDYRRVLEN

SEQ ID NO: 1492 - protein, 260 aa, Pisum sativum
MAAAHTPREENVYMAKLAEQAERYEEMVEFMEKVSANADSEELTVEERNLLSVAYKNVIGARRASWRIISSIEQKEESRGNEDHVAVIRDYRSKIESELSNICDGILKLLDTRLIPSASSGDSKVFYLKMKGDYHRYLAEFKTGAERKEAAESTLTGYKSAQDIANAELPPTHPIRLGLALNFSVFYYEILNSPDRACNLAKQAFDEAIAELDTLGEESYKDSTLIMQLLRDNLTLWTSDMQDDGADEIKEAAPKADEQQ

SEQ ID NO: 1493 - protein, 711 aa, Magnetospirillum magnetotacticum MS-1
MKMSGLPEAQGLYDPRHEHDACGVGFIVDIKNRKSHDIVRDGLEILVNLTHRGAVGADPKAGDGAGILIQMPDAFLRDEAAKLGITLPPEGAYGAGCVFLPQDAAIRKACEAHCEALVKAEGQILLGWRDVPTDSSSLGYSVLPTVPVVRMVFIGKGEGVADQNAFERKLFVIRKQVFNKAPEGSERDFYIPSLSTRTLIYKGMLLADQVGVFYKELSDERMVSALAMVHQRFSTNTFPSWRLAHPFRMISHNGEINTLRGNLNWMNARRQTMESSVLGDDLAKLWPLIPEGQSDSACFDNALELLVMGGYPLAHAMMMLIPEAWSGNPLMDEKRKAFYEYHAALMEPWDGPAAVCFTDGRQIGATLDRNGLRPARYLVTKDDKFMMASEMGVLPIAEDRIKKKWRLQPGKMLLIDLEQGRIIDDSEIKAQLANDKPYAEWLAQSQIMLEDLDIPVETVKADPATLLDRQQAFGYTQEDVKFLLHPMAVTGQEAVGSMGTDTPIAVLSAKPKLLFNYFKQCFAQVTNPPIDSIREESVMSLVSLIGPRPNLLGLDKDGGHAKRLEVRQPILTNEDLEKIRRIEKLPGSGFKSVTIDITWPAAEGPGGLEAAVAGICRQAKAKVTEGYNIIVLSDRSVGPDNVPVPSLLAVSAVHHFLIREGLRTKAGLVVETGEAREIHHMCVLAGYGAEAINPYLAFETLEEMRPNLPEP

SEQ ID NO: 1494 - protein, 143 aa, Zea mays
  misc_feature (43)..(43): Xaa can be any naturally occurring amino acid
  misc_feature (57)..(57): Xaa can be any naturally occurring amino acid
  misc_feature (65)..(66): Xaa can be any naturally occurring amino acid
  misc_feature (126)..(126): Xaa can be any naturally occurring amino acid
VGGLKDDLGGRCGGGQLQAADQLQRRTIRREREIEDAAASAQXLTTATMVELAGGCXSDWGLMGXXIHGKAEGMRRVLEMADALRLETMREVVALLRPAQAVHFLLAAAELHLAVHDFGRRKDGRXATSPPPPRRRSDGRWRA

SEQ ID NO: 1495 - protein, 580 aa, Physcomitrella patens subsp. patens
EVEITNDGTVDFRGRPAIRAKTGGWKTSWFIYSNQVFANMGFYGCSANLVRYLTSVMHQSNATASTNVSNWNGVGYITPLIGAFLADAYWGRYWASFVFTFIFVIGMIFLTVSASLPSLRPQQCATQDLLCPQPSSAQAAFLFFSLYIVDLGAGAFQCVVTPLGADQFDDEDPEEKAQKTSFFNWYYQSMNMGGLLAGTFLIYIQDNVSWGLGFGASLIAVVIGTMCFLGGTPFYRHNLPGGNPITRITQVIVASVRKWYIKIPISSELYEVPEEMESIIQGSRKIRHTNEFRFLDKAAVEMDGDKSDDSSANPWRLCTITQVEEVKVLVRMIPITITSAMFSTIYNQMSTVFVLQGATMDLRMGYFNIPPASLTVVELLSVSVWVPIYDFFLIRLASKFTNNPRGFTELQRIGIGLLISVFSMVAAALLEIQRLEVARLHELLDDPTVPVPLSVFWQIPQYFFVGAAEVFTYVGIYEFFYGESPDAMRGLGTAFALLTVALGSFLSSVLLTIVTHFTSKDGAPGWIADNLNRGHLDYFFWLLAGMSTVNLVFYVVCARWYTTKQTWGPSKPATLSSGTQ

SEQ ID NO: 1496 - protein, 1486 aa, Salmonella enterica subsp. arizonae serovar 62:z4,z23:--; identical to SEQ ID NO: 887

SEQ ID NO: 1497 - protein, 108 aa, Glycine max
VAAGMTGGLAYILDEDDTFIPKVNREIVKIQRVSAPVGQMQLKSLIEAHVEKTGSTKGAAILKDWDKYLSLFWQLVPPSEEDTPEANAKYDTTTADQELERLSIRWKC

SEQ ID NO: 1498 - protein, 1490 aa, Physcomitrella patens subsp. patens; identical to SEQ ID NO: 892

SEQ ID NO: 1499 - protein, 1499 aa, Staphylococcus aureus subsp. aureus MW2; identical to SEQ ID NO: 899

SEQ ID NO: 1500 - protein, 667 aa, Cryptococcus neoformans var. neoformans JEC21
MTTMSSDVPNSPTSTSFTGTFSPAATAANTAANARTRDAPSPTTSSSGPKLETNKDQRLIVVSNRLPVTISKDDNGEYHFKMSSGGLVSALSGCKKTMSFTWIGWPGKDIPMQDRETVNRRLLEEYNCYPVYLSDELADSHYNGFSNSILWPLFHYHPGEMNFDSAHWLAYREANMRFADVVSSLVQAGDMVWVQDYHLMLLPMLLRSMITGESAQGEMVRQELGRVKEGVDDTVVKEVLKMGPGVAQAEDEGVEMLDDVEEEGGEMDVKTSPKRPHYGRGMSTFQKQELVAKEKGKEGIRIGFFLHTPFPSSEIYRILPVRREILLGVLQCDLIGFHTYDYARHFLSSCTRILGLETQPNGIEFDGRYCQVGTYPIGIDPNQFIEGLQKESIVKRLRSLEARFDGVKVIIGVDRLDYIKGIPQKLQALETFLTQHPEWIGKVVLVQLAIPSRQDVEEYQDLRACVNELVGRINGRFGTVESVPIHYMHKSVPFEELTAMYALADACLVTSTRDGMNLVAYEYISSQAERHGSMILSEFAGAAQSFNGSLLINPWDVQSTADAINQALTLSPQQRKTNWQKLFNYVSKYTAEAWGVSFVNELNRLSGQRPAGPTGLAGRRKSGSLSRTSSKASMQRRKSSQSGIATGLGAAAGAAVNWAQAQVGTQT

SEQ ID NO: 1501 - protein, 711 aa, Oryza sativa Indica Group
MEGVVTSSVGEPNQDNEPRDSSIELPRVITDMETSAMHDPEAQKLIGHEADTELTPYEGMEFESEDAARDFYSKYARHAGFRIRISRYTRSRRDNSIISRRIVCSKEGFHETRDCENLHVDQKQQARVGTRVGCKAMLMIKKFGPDKWVVTKFIKIHNHGPVPPRKPHAGEHHDCDLMENPHSIEVDPIDEPVEGMEFESEEAAKLFYINYARVNGFRARISRYCRSRRDNSIISRQIVCSKEGFREVRARKDITDGGKTTKRPRMITRVGCKAMIVVKRMNSGKWMVSKFEKEHNHSLLSSRAVPITSNDSSREVIDFAATSNDPNEVKAEGCSTGIQCNSTDSPTVLYNHLCQEAIKFAKEGSVTEEIYHVAMNALKEAAEKVSEVKRSHPTMSQSKHEVMQMETMSASQCSNDDKQKTMTPQLKFLQEPSPSLVLIPTNLLTHSSSNCADNIPLSCDLTINAGEVKHVSESSCLAANRKEDSSQKSQGKDERFHVLSKETTVAIPAIPLTLYMPIMKNPTGDSAECSPDIFPFSWNADGQYRLLAAPIEAVPISYRPAEPIQQPHGSFPNSGPLPGFLPKLYKRGKGPNSLVHATALACGARVVPPEEAASLIKAIESKIRSGGATIAKLPSSSLTPLIPEVASMSSSSEDDEENDQSEPLMASVEHNCHDQSSEEMKLEADPPSELETEAENCSAQPENENNGPTHC

SEQ ID NO: 1502 - protein, 719 aa, Cryptococcus neoformans var. neoformans JEC21
MTTMSSDVPNSPTSTSFTGTFSPAATAANTAANARTRDAPSPTTSSSGPKLETNKDQRLIVVSNRLPVTISKDDNGEYHFKMSSGGLVSALSGCKKTMSFTWIGWPGKDIPMQDRETVNRRLLEEYNCYPVYLSDELADSHYNGFSNSILWPLFHYHPGEMNFDSAHWLAYREANMRFADVVSSLVQAGDMVWVQDYHLMLLPMLLRSMITGESAQGEMVRQELGRVKEGVDDTVVKEVLKMGPGVAQAEDEGVEMLDDVEEEGGEMDVKTSPKRPHYGRGMSTFQKQELVAKEKGKEGIRIGFFLHTPFPSSEIYRILPVRREILLGVLQCDLIGFHTYDYARHFLSSCTRILGLETQPNGIEFDGRYCQVGTYPIGIDPNQFIEGLQKESIVKRLRSLEARFDGVKVIIGVDRLDYIKGIPQKLQALETFLTQHPEWIGKVVLVQLAIPSRQDVEEYQDLRACVNELVGRINGRFGTVESVPIHYMHKSVPFEELTAMYALADACLVTSTRDGMNLVAYEYISSQAERHGSMILSEFAGAAQSFNGSLLINPCMPAFLLLHATVIEADLFFVFLGDVQSTADAINQALTLSPQQRKTNWQKLFNYVSKYTAEAWGVSFVNERAFSVFSLFLSYFNRIDLYKVLTAPSFISVVNRLSGQRPAGPTGLAGRRKSGSLSRTSSKASMQRRKSSQSGIATGLGAAAGAAVNWAQAQVGTQT

SEQ ID NO: 1503 - protein, 71 aa, Cucumis sativus
SWRILSSIEQKEEAKGNETNAKRIKEYRQKVESELSGICNDIMMVIDEHLIPSASAGESTVFYYKMKGDYY

SEQ ID NO: 1504 - protein, 250 aa, Kluyveromyces lactis NRRL Y-1140
MSLSREDSVYLAKLAEQAERYEEMVENMKNVASSGQELSVEERNLLSVAYKNVIGARRASWRIVSSIEQKEEAKEKSEHQVQLIRTYRSKIESELTKICDDILSVLDTHLIPSATTGESKVFYYKMKGDYHRYLAEFSSGDVRESATQASLEAYKEASDIATTELPPTHPIRLGLALNFSVFYYEIQNSPDKACHLAKQAFDDAIAELDTLSEESYKDSTLIMQLLRDNLTLWTSDMSETGQEDQPAEGA

SEQ ID NO: 1505 - protein, 486 aa, Geobacter sulfurreducens PCA
MGERILVVSNREPYIHIRTGDTVEVHRPASGLVTAVEPVMRACSGTWIAHGSGSADRETVDSHDRVRVPPHKPEYNLRRIWLTKEEEEGYYYGFANEGLWPLCHIAHVRPVFRTSDWQQYVRINQRFADAVVKEADSDDPVVLVQDYHFALLPAMIRKALPKATIITFWHIPWPNPESFGICPWREELLKGMLGSTILGFHTPYHCKNFLETVDRYLETRIEHESSTISRRGQLTMVESYPISIQWPPAWQGTLPPVDVTRSEILGELGLPLDHLIGVGVDRMDYTKGIPERFMAVERLFELHPELVGRFTFVQIAAPSRSALEEYQAFEARVHSHAERINGRFSRDGRPAIILKAEHHEPEQVNRYYRAADVCMVTSLHDGMNLVAKEYVAARDDERGALVLSQFTGAAHELHEALIVNPYHVEQTAEALHRALTMPDYEQRERMRSMRMLVRDFNVYRWAGRMLLDAARVRQREKLAARIGGES

SEQ ID NO: 1506 - protein, 398 aa, Zea mays; identical to SEQ ID NO: 910
  misc_feature (392)..(392): Xaa can be any naturally occurring amino acid

SEQ ID NO: 1507 - protein, 1562 aa, Herminiimonas arsenicoxydans; identical to SEQ ID NO: 914

SEQ ID NO: 1508 - protein, 178 aa, Glycine max
LLSTVTSLEPVMALYTEATDGSFIEHKESAMVWHHQEADPYFGSCQAKELLDHLESVLANEPVGVIRGQHIVEVKPQGVSKGKVVEDLISIMRSKGKSPDFLLCIGDDRSDEDMFESIALSVSNPALSTIISKVFACTVGQKPSMAEYYLDDTSEVIKLLEGLATAAGPSASIIYQDL

SEQ ID NO: 1509 - protein, 671 aa, Zea mays
LWPLFHYMLPICLDKGELFDRTLFQAYVRANKLFADKVMEAINTDDDYVWVHDYHLMLLPTFLRKRLHRIKIGFFLHSPFPSSEIYRTLPVRDEILKSLLNADLIGFQTFDYARHFLSCCSRLLGLHYESKRGYIGIEYFGRTVSLKILSVGVHVGRLESVLKLPATVSKVEEIEQRYKGKILMLGVDDMDIFKGISLKLLALELLLDRNPKLREKVVLVQIINPARSTGKDVQEAITEAVSVAERGNTKYGSSSYKPVVLIDNHIPFYEKIAFYAASDCCIVNAVRDGMNLVPYEYTVCRQGNEEIDKLRGLDKDTHHTSTLIVSEFVGCSPSLSGAFRAHSFAQDLERACKDHYSRRCWAIGFGLNFRVIALSPGFRKLSSEHFVSSYNKASRRAIFLDYDGTLVPQSSINKAPSEEVISILNTLCNDPKNIVFIVSGRGRDSLDEWFSPCEKLGLAAEHGYFIRWSKEAAWESSYSRPQQEWKHIAEPVMQVYTETTDGSSIESKESALVWHYLDADHDFGSFQAKELQGHLERVLSNEPVVVKCGHYIVEVKPQGVSKGLAVNKLIHTLVKNGKAPDFLMCVGNDRSDEDMFESINGMTSNAVLSPTMPELFACSVGQKPSKAKYYVDDTSEVIRLLKNVTRIPSQRQDVSASHGRVTFRGVLDYVD

SEQ ID NO: 1510 - protein, 279 aa, Zea mays
MLLNPASMLDTIRQHLLEEPPAAADESFGILVADQWSDSLPFRTDDADDIVVFGALHDAFSYGWLPDGSFAHVKPEPVRSPDSYYSSSYDGSCFGGLPYPEQPLTPGSEGEAAATPSPRREEAAAAVARGKHYRGVRQRPWGKFAAEIRDPAKNGARVWLGTYDTAEDAALAYDRAAYRMRGSRALLNFPLRIGSEIAAAAAGDKRPLALPEPATSSDSSSSSTGGSPKRRKRGEAAAANMAMALVPPPSQLSRPAQPWFPAAPVEQAAMPPRVEQLVI

SEQ ID NO: 1511 - protein, 596 aa, Oryza sativa Japonica Group
MTNQDVVMPDIAAAAAMPGSSGRAPLFACRGAAAVSASSMLGGGGAAYQAAVVAHVAPVPAIRPCASWVVEAMRASSPTRPAAAAVDAEYDAWTQRKHPSALGSFEQVAAAASGKRVVVFLDYDGTLSPIVADPDMAFMSDEMRAAVRDVAEHFPAAIVTGRCVDKVQSFVGLPELYYAGSHGMDIKGPSSNEEEDTKILLQPAREFLPVINKAYKALMEKTKSTPGARVENNKFCLSVHFRCVDEKRWNPLAEQVKAVLRDYPELKLTQGRKVLEIRPSIMWDKGKAVEFLLKSLGFDDDRRDVLPVYIGDDRTDEDAFKVLRKRGQGLGILVSKCAKETDASYSLQDPAEKYTNAGAHVFVTMLLTVVFTAAVALALVNAVNSHDFAAHLAGVDCRMGLAGPVRCPASGFVELLVLALHVMRARHLRSPACLPNVALATAFDCISMYVRRWQRGEVTNVHEVYVLSRIEFVPYMASTGEQRSTGETAVGAAAAGMYRMVPLHAAKWGDKWRMSGERMAAGVDCRRREDLPSSGDGYRQEEIDGGHGVPCSIGAVEASAIIVSDAPEGLISTLTTDHIYYMTVFPAKLALTSEEV

SEQ ID NO: 1512 - protein, 507 aa, Desulfovibrio desulfuricans subsp. desulfuricans str. G20; identical to SEQ ID NO: 919

SEQ ID NO: 1513 - protein, 1581 aa, Burkholderia mallei ATCC 23344; identical to SEQ ID NO: 921

SEQ ID NO: 1514 - protein, 380 aa, Oryza sativa; identical to SEQ ID NO: 1250

SEQ ID NO: 1515 - protein, 93 aa, Glycine max
SVSFDELIALYAVSDVCLVSSTRDGMNLVSYEYIATQQKRHGVMILSEFAGAAQSLNGSIIVNPWNTEELADAIHDAVTMGAEQRALNYQKLA

SEQ ID NO: 1516 - protein, 141 aa, Nepenthes distillatoria
  misc_feature (48)..(48): Xaa can be any naturally occurring amino acid
  misc_feature (96)..(96): Xaa can be any naturally occurring amino acid
CLDKAAVVSDKEIKCEDFSNPWRLCTVTQVEELKILIRMFPIWATGIXFSAIYAQMSTMFVEQGEVMDRTIGSFTIPAASLSMFDTISVIFWVPVXDKILVPLARKFTGKQRGFSELQRMGIGLFISILSMAAAALVEMKR

SEQ ID NO: 1517 - protein, 261 aa, Hordeum vulgare subsp. vulgare
MSTAEATREENVYMAKLAEQAERYEEMVEFMEKVAKTADVGELTVEERNLLSVAYKNVIGARRASWRIISSIEQKEESRGNEAYVASIKEYRTRIETELSKICDGILKLLDSHLVPSATAAESKVFYLKMKGDYHRYLAEFKAGAERKEAAENTLVAYKSAQDIALADLPTTHPIRLGLALNFSVFYYEILNSPDRACNLAKQAFDEAIAELDSLGEESYKDSTLIMQLLRDNLTLWTSDNAEEGGDEIKEAASKPEGEGH

SEQ ID NO: 1518 - protein, 796 aa, Zea mays
PRVRLRASPDPAAPFGFAFSVDAGTVAYQLRSGLPANAPVLHIGTLPAAAAEAASDELSDYLLANFSCLPVYLPTDLHHRFYHGFCKHYLWPLLHYLLPLTPSSLGGLPFQRTLYHSFLSANRAFADRLTEVLCPDEDLVWIHDYHLLALPTFLRKRFPRAKVGFFLHSPFPSSEIFRTIPVRDDLVRALLNPDLVGFHTFDYARHFLTACSRLLGLDYQSKRGYIGIEYYGRTVTVKILPVGIDMGQLRSVVSAPETEDAVRRVTEAYKGRRLMVGVDDVDLFKGIGLKFLAMEQLLVEHRELRGHAVLVQIANPARSEGRDVQGVQDEARAISARVNARFGTPGYTPIVLIDAPVTPQEKAAYYAAAECCVVSAVRDGLNRIPYIYTVCRQESTALGDDSPKRSVIVLSEFVGCSPSLSGAIRVNPWSVESVAEAMNAALRMPEAEQRLRHEKHYKYVSTHDVAYWARSFDSDLQRACKDHFSRRHWGIGFGMSFKVVALGPNFRRLSVEHIVPSYRRTDNRLILLDYDGTVMPENSIDRTPSSEVISVLNRLCEDPKNRVFIVSGRGKDELSRWFAPCEKLGIAAEHGYLTRWSRDAPWDTSGLAADFDWKKTAEPVMQLYTEATDGSYIEHKESAIVWHHHEADPDFGSCQAKELLDHLENVLANEPVVVKRGQHIVEVNPQGISKGVVVDSLLSSMVRTGKPPDFVLCIGDDRSDEDMFESIVCPASNSGVKLPASSEVFACTVGKKPSMARYYLDDTVDVVKMLDGLASAPSQQRPRPAVQLRVSFEGSL

SEQ ID NO: 1519 - protein, 71 aa, Vitis vinifera
VTAPVRQMQLKSLIEAHVEKTGSSKGSAILKEWDTYLPLFWQLVPPSEEDTPEASAEFERTDASQVRLQSA

SEQ ID NO: 1520 - protein, 899 aa, Oryza sativa Japonica Group
MMSRSYTNLLDLAAGNFEALGPAGGGRRRSFGAKRMTRVMTVPGTLSELDDEDDEPAATSSVASDVPSSAACERLIVVANQLPVVARRRPGAAAGGWAFSWDDDSLLLRLRDGVPDEMEVLFIGTLRADVPACEQDEVSQSLIDGFGCAPVFLPAGLYDRFYQHFCKGYLWPLFHYMLPFASALPAAASGDGRFDRGAWEAYVLANKYFFEKVVEVINPEDDYVWVHDYHLMALPTFLRRRFNRLRIGFFLHSPFPSSEIYRSLPVREEILRTLLNCDLIGFHTFDYARHFLSCCSRMLGIEYQSKRGYIGLDYFGRTVGIKIMPVGIHMGQLQSVLRLSEKEKKVAELRQQFEGKSVLLGVDDMDIFKGINLKLLAFENMLRTHPKWKGRAVLVQIANPARGKGKDLEAVQAEIRESCDRINKEFGQSGYSPVIFIDQSVPSAVRLAYYTVAECVVVTAVRDGMNLTPYEYIVCREGIPGSECAPEVSGPKKSMLVVSEFIGCSPSLSGAIRVNPWNIEATAEALNEAISMSEREKQLRHEKHYRYVSTHDVAYWSKSFVQDLERACKDHFRKPCWGIGLGFGFRVVALDPHFTKLNFDSIIMSYERSKSRAIFLDYDGTLVPQASLNKNPSEELLRIINTLCADRNNTVFIVSGRSKDDLSKKLISCPKLGIAAEHGYFLRWTRDEEWQTTAQTSDFGWMQMAKPVMDLYTESTDGSTIETKETALVWHHQDADQGFGSSQAKEMLDHLESVLANEPVSVKSGQFIVEVKPQGVTKGLIAEKVLTSMKEKGQLADFVLCIGDDRSDEDMFENIADVMKRSIVAPKTPLFACTVGQKPSKARFYLDDTFEVVTMLSSLADASEPDLMADLEDDLATSVSSIEISDRVVSFSNLRTEGS

SEQ ID NO: 1521 - protein, 340 aa, Vitis vinifera
DISIVGYYAKETMPNIQQVFVRVVKEENIDDIERELYICRKLIERAVKSETWGNELYFCSLSNQTIVYKGTLRSEVLGNFYLDLKSDIYKSPFAIYHRRYSTNTSPRWPLAQPMRLLGHNGEINTIQGNLNWMRSREASLKLPVWRGRENEIRPFGNPKASDSANLDSTAELLIRSGRSAEEALMILVPEAYKNHPTLMIKYPEVVDFYNYYKGQMEAWDGPALLLFSDGKTVGACLDRNGLRPARYWRTIDNVVYVASEVGVLPMDESKVVMKGRLGPGMMISVDLTSGQVYENTEVKKQVALSNPYGKWVNENMRSLRPVNFLSATVMDNEGILRHQQ

SEQ ID NO: 1522 - protein, 1039 aa, Oryza sativa Japonica Group
MLIHRHRRLAKSKTTPVTSGNERTYEHLRPCVEAAPTNAAIPRRKTPHPPSAHCYTYPTSHLHPTGDHSEMPHHRHLTPSPSHEEHETPNPSLTPPPMQLAALASDEPPPPPPEQSPRRIVVAHRLPLNATPDPGSPFGFAFSLSADAHALQLSHGLGLAHVVFVGTLPAEAARALRRSDELDRHLLGCFSCLPVFLPPRAHDEFYAGFCKHYLWPRLHYLLPHAPAANGYLHFDAGLYRSYASANRSFAARVVEVLSPDDGDLVFVHDYHLWLLPSFLRRGCPRCRVGFFLHSPFPSAEVFRSIPVREDLLRALLNADLVGFHTYDYARHFLSACSRLLGLAYTSRHGRVGINYHGRTVLIKFLSVGVDMGLLRTAMASPEAAAKFREITEVEYKGRVLMVGVDDVDIFKGVRLKLLAMESLLETYPALRGRVVLVQIHNPTRCGGRDVERVRGETAKIQARINARFGGPGYQPVVVVDRAVPMAEKVAYYAAAECCVVSAVRDGLNRIPYFYTVCREEGPVDAKGAAGGQPRHSAIVLSEFVGCSPSLSGAIRVNPWNIEAMAEAMHGALTMNVAEKQARHVKHYTYLKLHDVIVWARSFAADLQLACKDRSTMRTIGMGIGPSYRVVAVDAAFKKLPPELVNLSYRAAAAAAAGGGGGRLILLDYDGTLEPTGAFDNAPSDAVIVILDELCSDPNNVVFIVSGRSKDDLERWLAPCANLGIAAEHGYFIRWSRDAPWETMASKQLAAAMEWKAAAKNVMRHYAEATDGSYIEAKETGMVWRYEDADPRLAPLQAKELLDHLATVLASEPVAVRSGYKIVEVIPQGVSKGVAAECIVSAMAARRGGALGFVLCVGDDRSDEDMFGALASLCGGGKNGGASSSTTTTTALLAAAQVFACTVGNKPSMASYYLNDKEEVVDMLHGLAFSSPSSRLRAAAAPRRPADFDIKSLLRNSEKDQNKRAICTGEIFRNQRFVGLGTVMSCASEEKQMQMLLSALPAARLNSYVHGNLKILSEQEFTRPRCHSLIRRASSQPVVR

SEQ ID NO: 1523 - protein, 514 aa, Magnetospirillum magnetotacticum MS-1
MAARQASVDSELFGNDISKLWPISYEGQSDTACFDNALEFLVQGGYSLAHAMMMLIPEAWAGNPLMSEERRAFYEYHAALMEPWDGPAAVAFTDGRQIGATLDRNGLRPARYIVTDDGLVVLASEMGVLPIPDEKIVQSWRLQPGRMLLIDLEKGRIVSDEEIKGELAGAHPYSEWVRNTQIVLEELHPIQPRASRTDVSLLDRQQAFGYTQEDLKLLMAPMAVTGQEAVGSMGSDTPLSALSDKPKLLYTYFKQNFAQVTNPPIDPIREEAVMSLVSFIGPRPNLLDMEGASRRKRLEVRQPILTNGDLEKIRSISHFEDRFDTKTLDITYPAETGAAAMEGALDRLCDRAEVAVRGGYNIIILSDRMVGPDRIPIPALLATASVHNYLIRKGLRTSVGLVVESGEPREVHHFACLAGYGAEAVNPYLAFETLIAMKDEFPPDLTDDEIISRYIKSIDKGLLKVMSKMGISTYQSYCGAQIFDAIGLNSDFVARDFFGTATTIEGIGMAEVAQ

SEQ ID NO: 1524 - protein, 1510 aa, Silicibacter sp. TM1040; identical to SEQ ID NO: 946

SEQ ID NO: 1525 - protein, 183 aa, Triticum aestivum; identical to SEQ ID NO: 948

SEQ ID NO: 1526 - protein, 255 aa, Zea mays
SARGAQDSSILYKDRLAKTGRFTVGIDPDKFNETLKQDEVQARIKELNERYKDMKVIVGVDRLDYIKGLTQKLHGFEQFLTDHPKWQGKVVLIQVAVPSREDVKQYQDLETEISCQVGKINGKFSKPEYSPIIYLHRSIPFTELTALYSIADMCLLTSSRDGMNLVAFEYIACQEQRHGVLALSEFAGASVFMADGAVQFHPANIKEMVQGIYKGLTMSKEERKERYDKLEKFVHTNTSAKWGQDFVTELSKLHA

SEQ ID NO: 1527 - protein, 778 aa, Physcomitrella patens subsp. patens
MEVIYIGCLKVEVDDSEQDEVAATLLENFNCVPAFLPLDVRTRFYHGFCKQMLWPLFHYMLPLSPEHEGRFNRSFWQAYVSVNKVFADKVMEVISPDDDYVWIHDYHLMVLPTFLRKRFNKVRLGFFLHSPFPSSEIYRTLPVRDEILRALLNADLIGFHTFDYARHFLSCCSRMLGLEYESKRGYIGLEYYGRTVGIKILPVGIHMEQLNAGLALADTEWRISELRTQYKNRTVFLGVDDMDIFKGIGLKFLALEQLLRQHPKLRNRVVLVQIANPARGRGRDIKDLQNEAYTIAQRINDEFGNEAEGYTPVVLLQRSVPFYERIAYYTIAECCVVTAVRDGMNLIPYEYIACREGSPDLDAVVDHGPGPAPLKKSMLIVSEFIGCSPSLSGAIRVNPWNIEALAEAMNMSITLPDIEQHMRHEKHFRYVNTHDVAYWARSFMTDLERTCKGHARRRCYGTGFGLGFRVVALDPDFRRLRTDLIVSAYKKSMSRAILLDYDGTMIPQASINNPMPTPEVLAMLKTLCNDPKNFVVIVSGRPRDILNECFSSCEELGLAAEHGFFYRWHRDEEWVTCRYQREDFDDHENDHMEWKEIVEPVMQQYTESTDGSYIEQKESAMVWHHRDADPDFGSWQAKELQDHLESVLANQPVTVKSGAHIVEVKPQGVSKGVVVEELLAMMALKSAAPDFVLCVGDDRSDEDMFESIATATARSGLAEVFACTVGQKPSKAKYYLDDIAEVIKLLQGLAAASDPGATPSGLPSATSSQVSLETSLHI

SEQ ID NO: 1528 - protein, 603 aa, Gibberella zeae PH-1
MLVIERSDQIRWMSISRQEHKLTRYVNVASSLLSVIVLLLNNPKLLALSLTPLSTGDLRLSALRQLPVRMPETVGENGNAAPGRLLLLSNRLPITIKRSEDGSYSFSMSSGGLVTGLSGLSKTTSFQWYGWPGLEVPDNEVEGMKQRLKEEYGAHPVFIDDELADRHYNGFSNSILWPLFHYHPGEITFDESAWAAYQEVNRLFAKTVIKDVQDGDLIWVHDYHLMLLPQMLREEIGESKKNVKIGFFLHTPFPSSEIYRILPVREALLTGLLDCDLIGFHTYDYARHFLSSCSRILECPTTPNGVDWNGRFVTVGAFPIGIDPDNFVEGLKKPKVQERIAALSRKFEGVKLVVGVDRLDYIKGVPQKLHALEVFLTEHPEWIGKIVLVQVAVPSRQDVEEYQNLRAVVNELVGRINGKFGTIEFMPIHFLHQSVNFDELTALYAVSDVCLVSSTRDGMNLVSYEYIATQQKNHGVMILSEFTGAAQSLNGSLIVNPWNTEELANALHDAVTMSPEQREANYKKLERYVFKYTSAWWGASFVAEMTRLSAEGSQPKTLRNVSGAVIGLEQKAQQIVTGLEKKADELLSGNEKNETETSEEPSQ

SEQ ID NO: 1529 - protein, 863 aa, Oryza sativa
  misc_feature (761)..(761): Xaa can be any naturally occurring amino acid
MVSKSYTNLLDMSGEDVFDFQQPFRSLPRFVTSPSITSNPDWDTSNADDSVGPASCCVRKIIVSNFLPLNCTKDEATGQWSFSMDDNQLLVQLKDGFPMESEVVYVGSLNAEVDPGEQDQLSQKLFREYKCIPTFLPADLQQQFYHGFCKQQLWPLFHYMLPICLDKGELFDRSLFQAYVRANKIFGDKVMEAINSDDDCVWVHDYHLMLLPTFLRKKLHRIKIGFFLHSPFPSSEIYRTLPVRDEILKSLLNADLIGFQTFDYARHFLSCCSRLLGLNYESKRGHIGIEYFGRTVSLKILAVGVHVGRLESVLRLPATISKVQEIEQRYKGKMVMLGVDDMDIFKGISLKLLGLEFLLERTPKLRGKVVLVQIINPARSTGKDVEEAINEAVSVAERINIKYGSAEYKPVILIDYPIPSYEKIAYYAASDCCIVNAVRDGMNLIPYEYTVCRQGNEEIDKLRGVDKSSHHTSTLIVSEFVGCSPSLSGAFRVNPWSIEDVADALYKAMDLTQSERKLRHDKHYRYVKTHDVAYWARSFSQDLDRACKDHYSRRCWTTGFGLNFRVIALSPGFRRLSLEHFASSYKKTNRRLIFMDYDGTLVPQSSVNKVPSAEVISILTSLCNDPKNCVFIVSGRDRTTLSEWFASCDKLGIAAEHGYFIRWNKEGEWETSSSAQDCEWKNIAEPIMEVYKETTDGSAIETKESGLVWHYQDADHDFGSCQAKELVSHLERVLANEPVVVKRGHQIVEVKPQGVSKGIVXDTVIRTVINNENAPDFLMCIGNDRSDEDMFESINEAVSRSVFPTAPDVFACSVGQKASKAKYYVDGCSEVIRLLKGVTAITPRREVISQSQVTFRDILEVVS

SEQ ID NO: 1530 - protein, 1268 aa, Physcomitrella patens subsp. patens
MDTLKVTEIFSSIYQSIDSSKHTSIHSYIHSWGESEKCIDGGGGYSWMWGTSHSHEGSFCNHHTNSRTQFMRWRRKDLVTNEPVLQLHPLLQPGTLSPCERQREHTKLIENVPGTPRAQWERRIMRTFEALHGMGRGLAISPRLMLVWILFILWGPVSSGDCGSSGSGVHCGALAAGERSFWEYAPGLLDVLEGLVGSIRRHALCCDANFNEIEFAPIILLVTQRNRKSLPVCNQSFTNLHPHCRIAIFLLLAMADVATRCRSQLGSFRIRELKDVLSRLGLPKQGKKQILMDKIMGLINPADKQSLTKGSKSSKKVVSREEAIAIIDEQYRKLRHSGTESKHKVAKSGSSSGYPSAGPEDHEVVEETRTRCPCGSNVETGTMIQCDNNKCKIWQHMDCVVIPEKPSDGTQPEIPSSFYCELCRIARGDPFCEAQTHTLMPTKLLSSTAKTEGSNTLQTIEKSFFLSRADRELLQKLNYDLQVWCVLLSDKVSFRMHWPSYADLRVNGISVRVTNRPGQQLLGANGRDEGPGITVCAREGMNRLNMSAYDARPFCLGVRIIRRLTLEQVKDLIPNEKDGEPFEEAMARVRRCINGGGGQGLGGNDDSDSDLEVVAESITVNLRCPMSGSRIKVAGRFKPCLHMGCFDLDTCVELNQRARKWQCPICLKNYSIENLIIDPFFNQITNAVRTMDEDITEVELKADGSWRPKLEGHAKNGESWRPPPVAVGANIHKATAAPVLFFKHVKTEEGMSSHDNGFSRFKVNPSGDWARNATKHLNDGPSQKVVDAPRLSRSSSATDSNLKIDEDEHSVNHDPSEKNAVSMDDNEEVEYLARPRDAPGGTWQTSGDDPANGADVIVLSDSDDDGGEEEDVVASSAASMYAESDVGNRRMRSREVSHTNGDSSGLALGLESTDVTLASNSVCNPFDPPLSTRVGVGVSDEGTSNNSGFGLQSDRNSFWVSAEKTRNGQYSFYAPRTESVNVLQHPPPVRPTPVQALAGPGFLSVPLVRDDASLASGWKRYSRPYGATGTDGGSVDSDTDASPLQNFLPSQPARAEVQDNLRGPFLPEADDIDNSWFSLSLGGGENLAEPSPARSNLRTSLEQRSPIPQPRVTAHDDTHGRSGRLGKHGSSQRLMDSRPPVRSHFTADGHPFPRHLSSFRRDGCLLSCSVRHSYVTTQNGHPQLAASAFHNARVVLFCQDLMGLTRKNFNGARSRKRLQPVFRVVPLVLARTTIQKGAEIQTGDCMLNLGWAVFVKLHSPEGFGLSGD

SEQ ID NO: 1531 - protein, 100 aa, Arabidopsis thaliana
  misc_feature (52)..(53): Xaa can be any naturally occurring amino acid
  misc_feature (55)..(56): Xaa can be any naturally occurring amino acid
  misc_feature (58)..(58): Xaa can be any naturally occurring amino acid
  misc_feature (60)..(60): Xaa can be any naturally occurring amino acid
  misc_feature (67)..(67): Xaa can be any naturally occurring amino acid
  misc_feature (75)..(75): Xaa can be any naturally occurring amino acid
  misc_feature (78)..(80): Xaa can be any naturally occurring amino acid
ILRVDGGLKSGVDVLMAAAMGADEYGFGSLAMIATGCVMARICHTNNCPVGXXSXXKXLXARFPGVXGDLVPLTXLYXXXKSEVSFNQGEYVFLNPLGPK

SEQ ID NO: 1532 - protein, 228 aa, Nepenthes mapuluensis
  misc_feature (1)..(2): Xaa can be any naturally occurring amino acid
  misc_feature (6)..(7): Xaa can be any naturally occurring amino acid
  misc_feature (9)..(9): Xaa can be any naturally occurring amino acid
  misc_feature (18)..(18): Xaa can be any naturally occurring amino acid
  misc_feature (32)..(32): Xaa can be any naturally occurring amino acid
  misc_feature (48)..(48): Xaa can be any naturally occurring amino acid
  misc_feature (59)..(59): Xaa can be any naturally occurring amino acid
XXGWAXXFXIPAISMGIXITSFFSGTALYRLXKPGGSPLTRMCQVLVXSFRKSRLALPXDSSLLYETSDKNSVIEGSRKLEHTNELKCLDKAAVVSDKEIKCEDFSNPWRLCTVTQIEELKILIRMFPIWATGIIFSAIYAQMSTMFVEQGEVMDRTIGSFTIPAASLSMFDTISVIFWVPVYDKILVPLARKFTGKQRGFSELQRMGIGLFISILSMAAAALVEMKR

SEQ ID NO: 1533 - protein, 260 aa, Solanum lycopersicum
MADSSREENVYLAKLAEQAERYEEMIEFMEKVAKTADVEELTVEERNLLSVAYKNVIGARRASWRIISSIEQKEESRGNEDHVNTIKEYRSKIEAELSKICDGILSLLESNLIPSASTAESKVFYLKMKGDYHRYLAEFKTGTERKEAAENTLLAYKSAQDIALAELAPTHPIRLGLALNFSVFYYEILNSPDRACNLAKQAFDEAISELDTLGEESYKDSTLIMQLLRDNLTLWTSDNADDVGDDIKEASKPESGEGQQ

SEQ ID NO: 1534 - protein, 224 aa, Nepenthes madagascariensis
  misc_feature (13)..(13): Xaa can be any naturally occurring amino acid
  misc_feature (32)..(32): Xaa can be any naturally occurring amino acid
  misc_feature (51)..(51): Xaa can be any naturally occurring amino acid
  misc_feature (62)..(62): Xaa can be any naturally occurring amino acid
  misc_feature (107)..(107): Xaa can be any naturally occurring amino acid
  misc_feature (131)..(131): Xaa can be any naturally occurring amino acid
  misc_feature (136)..(136): Xaa can be any naturally occurring amino acid
  misc_feature (157)..(157): Xaa can be any naturally occurring amino acid
  misc_feature (213)..(213): Xaa can be any naturally occurring amino acid
NLGWALGFGIPAXSMGIAIASFFSGTALYRLXKPGGSPLTRMCQVLVASFXKSKLTLPEDSXLLYETSDKNSVIEGSRKLEHTDELRCLDKAAVLSDKEIKCEDFSXPWRLCTVTQVEELKILIRMFPIWXTGIVXSAIYAQMSTMFVEQGEVMDRXIGSFTIPAASISTFDTISVIFWVPVYDKILVPLARKFTGKQRGFSELQRMGIGLFXSILSMAAAALV

SEQ ID NO: 1535 - protein, 482 aa, Corynebacterium efficiens YS-314
MEELNSFVVVANRLPVDMTAHPDGTYSITPSPGGLVTGLSPVLEQHRGCWVGWPGTVDVAPDPFRTDTGILLHPVRLTASDFEGFYEGFSNATLWPLFHDLIVPPVYDVDWWHDFREVNLKFAEAVNQVAAENATVWVQDYQLLLVPGILRQMRPDLCIGFFLHIPFPNPELFRQLPWREEIVRGMLGADLIGFHLPQNADNFLSLTRQVAGTAGSHTGQPDELEVEGEAAIREVKAHVITADGRKVGVGAFPISIDTGAVEQASQSSVEALRADLGSPEIVFLGVDRLDYTKGILQRLLAFEELLESGGLDPATTVFLQVATPSRERIEHYRVSRSQVEEAVGRINGRFGRMGHPVVHYLHRSLPKDDLQILYTAADVMLVTPFKDGMNLVAKEYVAAHRSGTGALILSEFAGAADELTEAYLCNPFDLESIKRQMLAAVHDLRHNPDYAAERMRANSEQVLSHDVNVWASSFLTCLEDFK

SEQ ID NO: 1536 - protein, 210 aa, Catharanthus roseus
MYQSNAHNSDHLTFLPPLVDYQFLNNDFDFSEIFTDFNYANYNYNTSTSDNFSGFQFNENCEEIISPNYASEDLSDIILTDIFKDQDNYEDEVVAGEQEEELITTPTSRGGGGGGCEQRSNEEWIRYRGVRRRPWGKFAAEIRDPKRKGSRIWLGTYETAEDAALAFDQAAFQLRGSRARLNFPNLIGSANAPVRVSPRRRSSSCHLRPQ

SEQ ID NO: 1537 - protein, 235 aa, Nepenthes khasiana
  misc_feature (7)..(7): Xaa can be any naturally occurring amino acid
  misc_feature (9)..(9): Xaa can be any naturally occurring amino acid
  misc_feature (32)..(32): Xaa can be any naturally occurring amino acid
  misc_feature (37)..(37): Xaa can be any naturally occurring amino acid
  misc_feature (39)..(39): Xaa can be any naturally occurring amino acid
  misc_feature (44)..(44): Xaa can be any naturally occurring amino acid
  misc_feature (69)..(69): Xaa can be any naturally occurring amino acid
LIVWVQXNXGWALGFGIPAISMGIAIASFFSXTALYXLXKPGGXPLTRMCQVLVPSFRKSKLALPEDSXLLYETSDKNSAIEGSRKLEHTDELRCLDKAAVLSDKEIKCDDFSNPWRLCTVTQVEELKILIRMFPIWATGIVFSAIYAQMSTMFVEQGEVMDRTVGSFTIPAASLSTCDTISVIFWVPVYDKILVPLARKFTGKQRGFSELQRMGIGLFISILSMAAAALVEMKR

SEQ ID NO: 1538 - protein, 223 aa, Nepenthes pilosa
  misc_feature (223)..(223): Xaa can be any naturally occurring amino acid
LGWALGFGIPAISMGIAIASFFSGTALYRLQKPGGSPLTRMCQVLVASFRKSKLALPEDSNLLYETSDGNSVIEGSRKLEHTNELKCLDKAAVVSDKEIKCEDFSNPWRLCTVTQIEELKILIRMFPIWATGIIFSAIYAQMSTMFVEQGEVMDRTIGSFTIPAASLSMFDTISVIFWVPVYDKILVPLARKFTGKQRGFSELQRMGIGLFIAILSMAAAALX

SEQ ID NO: 1539 - protein, 330 aa, Gemmata obscuriglobus UQM 2246
KLIVVANREPYIHRYATDGAVEWIRPAGGLTTALDPVMQACGGVWVAHGSGDADRAVTDPSGRVGVPPDDPNYVLRRVWLTPEQEDGYYYGAANGMLWPLCHQVFARPAFDPGHWDAYRRVNQTFADAVLEEAQGGPALVFIQDYHFALLPRLLKAARPDLVTAQFWHIPWPGPEKFLVCPWARDILDGLLGNDLMGFHTQHDCNHFLECVDRALECRIDRERFAVQRGGQATTVKPFPISVDPALADEYLGDDWAARAGAIRRRHGLGDRPLIVGVDRVDYTKGIPERLRAVDRVLHRHPELRGGFHFVQVGAPSRSSIPAYGDLTAEV

SEQ ID NO: 1540 - protein, 849 aa, Schizosaccharomyces pombe
MPSGAQGNTQSAAYKRIVNVSRNFQFKAALNKDTREWTFQHRSSGTALYSAIASLGDPSSPWDAVYVASPGPVQISEGNDHTVETKIDEAAVVHRSSSIVISPEDQEIFLKKATEYYRKKNIEADIVPVWGKVQRVPQAKSSSATITPSVSNKLSTAYQSIKSEALKDGPMYADSVLWDVLHYRIPTLDGYQQHNLWKNFTRWSQYFADNIVSNYRPGDLILIHDYSLFLLPRLIRKQLSDAPIVFFLHAPFCTSEVFRCLSKRAEILKGVLASNVIAMQTDSYTRHFLSTCSNVLGLETTSTHIDTSDGFRVVVFSSHVSIDVPRVYSRCNSKPVSLKIQQLKSLYPSDKKLIVGRDQLTKACGVTHKLRAFRELLIHFPKWRGHVVLIQITSLPVGNNYSNEELKKTENLVAQINSEFGSLDYTPVIHFHQLLDPDEYYALLSVANIACVSSVRDSMNTMALEYVACQQKNKGSLILSEFSGTAELLLSAYLVNPYDYSRFAETINYCLNMTEKERERRFSSLWKQATSQSSQQWIYKLINRAAYEVKALESHMTTPLLTYNILIKPYRNAKRRLFLLDYDGTLIESARNSIDAVPTDRLLRTLKRLASDSRNIVWILSGRSQKFMEEWMGDISELGLSSEHGSAIRPPLAGSWSSCAENLDLSWKDTVRDFFQYYVERTPGSYIEEKKHSISWCYQNANTTYSKFQSLECQTNLEDMLKHYDVEISPAKSFLEVHPNYLNKGSIVRRILKRSGSVDFVFCAGDDKTDENMFEVFLPTAFSNSHLIDEIDSTEYSGSHHTDDNSDANKVENVKVATFRVHIGLTDKPTLSDYHLPAPRDLGELLHNL

SEQ ID NO: 1541 - protein, 234 aa, Nepenthes insignis
  misc_feature (12)..(12): Xaa can be any naturally occurring amino acid
  misc_feature (15)..(15): Xaa can be any naturally occurring amino acid
  misc_feature (219)..(220): Xaa can be any naturally occurring amino acid
IVWVQENLGWAXGFXIPAISMGIAIASFFSGTALYRLQKPGGSPLTRMCQVLVASFRKSKLALPEDSNLLYETSDENSVIEGSRKLEHTNELKCLDKAAVVSDKEIKCEDFSNPWRLCTVTQIEELKILIRMFPIWATGIVFSAIYAQMSTMFVEQGEVMDRTIGSFTIPAASLSMFDTISVIFWVPVYDKILVPLARKFTGKQRGFSELQRMGIGLFXXILSMAAAALVEMKR

SEQ ID NO: 1542 - protein, 930 aa, Dunaliella viridis
MLSSHAKSSSSSRNLAGMLENGGFEGEGSGSCGGSRQQARDPRRTSLSVNSGRVIIASNHLPLRVKKSSTGEWQFEFDEDALTAQAKDGVPRSHFQEVLYVGGLPVDVEPEEQENIAIKLKDLYNCCPVYLDSAVKERFYKGFCKQQLWPLFHYVLPGSPSSSQRFNVEFWQAYVKANKCFADKIVEESLTDTEFVWIHDYHLLVLPSLLRKRFNRIRAGVFLHSPFPSSEIFRTFPKREELLRSLLNADLIGFHTFDYARHFLSCCSRMLGLEHETSRGSITIDYYGRTVGIKIMPTGVNPKRYLDGFSWDEFKWRRGELEAQFKGMTVLAGVDDMDSFKGIDLKLQAFERLLEYHAEWRGKVVLVQVTNPPRSTGHDITELHAFVTNLVASINYKYGNPSTNYVPVHYLERHVPLHERMAFYSIADCVVVTATRDGMNLVPYEYIVCRQGSDTTPCAESTVESGPRDSMLVVSEFVGCSPSLSGAIRVNPWSIDSGYNGMYAAICMPLEHRRLRHQKHWRYVSQHTVAFWAQSYLMDLVRVTRNHVTMKCYGLGLGLDTFRMVALDANFRKMEESQVAATYKSSKSRVFFLDYDGTLTAGQHTSITLAPLDEVLQVLRALTAEPLNKVVLFSGRPKAELQEWFASVPNLALVAENGCYLRLGEGQTWRSHLTPGLQVADQSWVSLVVAADFGWKKMALPILQQYQESTDGSSIEAKESALVWYYKDADPDFGSWQAKELLDHLEGVLSNKPVEIVGGSSAVEIKPQGVSKGQAVEKMLGQLYGYPAIAERRSSSSRPMGRPSSDASERRPSSSRFSMSDRGPSAGSAAVQSAASSVQGGGAEAAAQQELAAAGKGPDFVLCIGDDRSDEDMFTSIEMMRASPQMMSSEVYACTVGQKPSRAPFYLNDPGEVLHLLARLVGINLPNLPL

SEQ ID NO: 1543 - protein, 261 aa, Zea mays
MASAELSREENVYMAKLAEQAERYEEMVEFMEKVAKTVDSEELTVEERNLLSVAYKNVIGARRASWRIISSIEQKEEGRGNEDRVTLIKDYRGKIETELTKICDGILKLLETHLVPSSTAPESKVFYLKMKGDYYRYLAEFKTGAERKDAAENTMVAYKAAQDIALAELAPTHPIRLGLALNFSVFYYEILNSPDRACSLAKQAFDEAISELDTLSEESYKDSTLIMQLLRDNLTLWTSDISEDPAEEIREAPKRDSSEGQ

SEQ ID NO: 1544 - protein, 261 aa, Zea mays
MASAELSREENVYMAKLAEQAERYEEMVEFMEKVAKTVDSEELTVEERNLLSVAYKNVIGARRASWRIISSIEQKEEGRGNEDRVTLIKDYRGKIETELTKICDGILKLLESHLVPSSTAPESKVFYLKMKGDYYRYLAEFKTGAERKDAAENTMVAYKAAQDIALAELAPTHPIRLGLALNFSVFYYEILNSPDRACSLAKQAFDEAISELDTLSEESYKDSTLIMQLLHDNLTLWTSDISEDPAEEIREAPKHDLSEGQ

SEQ ID NO: 1545 - protein, 672 aa, Cryptococcus bacillisporus
MTTMPNNDVPNSPTSTSFSGTFSPAATAANTAANARSRDAPSPTTSSGPKLETNKDQRLIVVSNRLPVTISKDDNGEYHFKMSSGGLVSALSGCKKTMSFTWIGWPGKDIPMQDRETVNRRLLEEYNCYPVYLSDELADSHYNGKFSNSILWPLFHYHPGEMNFDAAHWLAYREANMRFADVVSSLVQAGDMVWVQDYHLMLLPMLLRSMITGESAQGEMVRQELGRVKEGVDDTVVKEVLKMDPGVAQAEDEGVEMLGDVEEEGGEMDVKSSPSKRPPYARGMSTFQKQEMVAKEKGKEGIRIGFFLHTPFPSSEIYRILPVRREILLGVLQCDLIGFHTYDYARHFLSSCTRILGLETQPNGIEFDGRYCQVGTYPIGIDPNQFVEGLQKESIVKRLRSLEARFEGVKVIIGVDRLDYIKGIPQKLQALETFLTQHPEWIGKVVLVQLAIPSRQDVEEYQDLRACVNELVGRINGRFGTVESVPIHYMHKSVPFEELTAMYALADACLVTSTRDGMNLVAYEYISSQAEKHGSMILSEFAGAAQSFNGSLLINPWDVQSTADAIYQALTLSPQQRKSNWQKLFNYVSKYTAEAWGVSFVNELNRLSGQRPSGPAGLAGRRKSGSLSRRSSKASIQRRKSSQSGGIVTGLGAAAGAAVNWAQSQVQGGSQA

SEQ ID NO: 1546 - protein, 532 aa, Oryza sativa Japonica Group
NQKLTSQVHEIVGRINGRFGTLTAVPIHHLDRSLDFHALCALYAVTDVALVTSLRDGMNLVSYEYVACQGSKKGVLILSEFAGAAQSLGAGAILVNPWNITEVADSIKHALTMSSDEREKRHRHNYAHVTTHTAQDWAETFVCELNETVAEAQLRTRQVPPDLPSQAAIQQYLHSKNRLLILGFNSTLTEPVESSGRRGGDQIKEMELKLHPELKGPLRALCEDEHTTVIVLSGSDRSVLDENFGEFNMWLAAEHGMFLRPTNGEWMTTMPEHLNMDWVDSVKNVFEYFTERTPRSHFEHRETSFVWNYKYADVEFGRLQARDMLQHLWTGPISNAAVDVVQGSRSVEVRSVGVTKGAAIDRILGEIVHSKSMITPIDYVLCIGHFLGKDEDIYVFFDPEYPSESKVKPDSSGSVSLDRRPNGRPSNGRSNSRNSQSRTPKAQAAPERSSSSSSSSQGTPNSHHDWREGSSVLDLKGENYFSCAVGRKRSNARYLLNSSEEVVSFLKEMADATAAHNGFQSTTADYMFLDRQ

SEQ ID NO: 1547 - protein, 989 aa, Cryptococcus bacillisporus
MDSMHPDPTPSIPPSLPELKAQVARLEASHKEKGLPLSGRIIHVMHHLPVEIVRIVPADSLESAGTGFLSPPMTPEFKPEDAETTVESADAKWRIHARTAHPALVSGIKSLSETHDQLLVAWTGEVLIQPDNTQSPQVPSQPTFSSIASNLLAPFSGTPGDSTPRLQPPPQQGTLKVFGGEFNEADQKEIASELDRFAEAEAKFDPTDKLKYVPVFLPPDVSKGHYEGFCKKTLWPLFHYLLWLDSTATVPSPDPSWLAYHKTNQMFAQRVAQIYKPGDLIICHDYHLLLAPKMIREALGQVFHPNAGWGTAHPSPSLHHAQGKGFEWESNQQTPTPEKAKGEKIGAFMNHVGTALGNHLGVMEHGQQNEIMIGMFMHTPWPSSEIFRCLPKRREILDGMLGANLVSFQTYSYSRHFVSTCIRVCGYESTPGGVDANGQVTAVGYCPIGIDIKRVVHDRDQPGVLPKAQALRDLYKDKKIIVGREKLDVAKGVYNKLQAFEKFLQVYPQWRGKVVLIQVTTPALSESPKLERMTAELVSHINGTYGSLDFTPVHHYHQALEKDEYFGLLSCADLALITSLRDGMNTTSMEFILCQDKTSKSPLVLSEFMGTAPSFASALQINPHDLLGVAQAINKGLTMRPEEKAERHAKLLEGVLAHTSHTWAATILKQLLENVGGEHTAHHTPVLDTALFADAYKKANKRLLLFDYDGTLTPIVKVPAHAVPTERTRSAITALCKDPKNVVYLISGRDGDFLEEHWGHLDRLGLSAEHGSFVKQPGEEEFINMTETLDMSWMSEVEEIFKYYTERTTGSTIEVKKASITWHYRNSDPDFGEFQCKQALDLLESSLAPRRPIEVLVGKKNLEVRPLAVNKGEIVRRLMYENPDVDMIFCAGDDKTDEDMFRALRTVFPPGGVVDDNPVVLKPPVAVTSAMEPEEADELPDVELSIRPKGVFATTVGPPAKKTLAGWHVTCPEEVVEALESLLEEIQVA

SEQ ID NO: 1548 - protein, 1507 aa, Clostridium acetobutylicum ATCC 824; identical to SEQ ID NO: 974

SEQ ID NO: 1549 - protein, 1527 aa, Mycobacterium leprae TN; identical to SEQ ID NO: 979

SEQ ID NO: 1550 - protein, 1648 aa, Arabidopsis thaliana; identical to SEQ ID NO: 750

SEQ ID NO: 1551 - protein, 510 aa, Oryza sativa Japonica Group
MTNQDVVMPDIAAAAAMPGSSGRAPLFACRGAAAVSASSMLGGGGAAYQAAVVAHVAPVPAIRPCASWVVEAMRASSPTRPAAAAVDAEYDAWTRKHPSALGSFEQVAAAASGKRVVVFLDYDGTLSPIVADPDMAFMSDEMRAAVRDVAEHFPAAIVTGRCVDKVQSFVGLPELYYAGSHGMDIKGPSSNEEEDTKILLQPAREFLPVINKAYKALMEKTKSTPGARVENNKFCLSVHFRCVDEKRWNPLAEQVKAVLRDYPELKLTQGRKVLEIRPSIMWDKGKAVEFLLKSLGFDDDRRDVLPVYIGDDRTDEDAFKVLRKRGQGLGILVSKCAKETDASYSLQDPAEKYTNAGAHVFVTMLLTVVFTAAVALALVNAVNSHDFAAHLAGVDCRMGLAGPVRCPASGFVELLVLALHVASTGEQRSTGETAVGAAAAGMYRMVPLHAAKWGDKWRMSGERMAAGVDCRRREDLPSSGDGYRQEEIDGGGRICRSEWKRRPVAECLAR

SEQ ID NO: 1552 - protein, 848 aa, Dehalococcoides sp. VS; identical to SEQ ID NO: 988

SEQ ID NO: 1553 - protein, 541 aa, Bradyrhizobium sp. BTAi1; identical to SEQ ID NO: 989

SEQ ID NO: 1554 - protein, 179 aa, Dehalococcoides sp. VS
MDGGRIVLRTTAGARYAEHETPILGNTCLYGATGGELYAAGRAGERFGVRNSGATAVVEGAGDHCCEYMTGGVVAVLGRTGLNFGAGFTGGMAYVLDVERDFVDRYNHELIDILRISADGFEHHRSHLHDLLETHVALTGSAWARRILDEMRDYLGKFWLVKPKAASLESLAETLRSAA

SEQ ID NO: 1555 - protein, 496 aa, Shewanella sp. ANA-3; identical to SEQ ID NO: 991

SEQ ID NO: 1556 - protein, 250 aa, Candida glabrata CBS 138
MSPSREDSVYLAKLAEQAERYEEMVESMKEVASSGQELSVEERNLLSVAYKNVIGARRASWRIISSIEQKEESKEKAEHQVELIRTYRGKIETELTKISDDILSVLDSHLIPSATSGESKVFYYKMKGDYHRYLAEFSSGDVRDKATEASLEAYKTASEIATTELPPTHPIRLGLALNFSVFYYEIQNSPDKACHLAKQAFDDAIAELDTLSEESYKDSTLIMQLLRDNLTLWTSDMSEAQDEQNDEPPK

SEQ ID NO: 1557 - protein, 235 aa, Nepenthes villosa
  misc_feature (39)..(39): Xaa can be any naturally occurring amino acid
LIVWVQENLGWALGFGIPAISMGIAIASFFSGTALYRLXKPGGSPLTRMCQVLVASFRKSKLALPEDSNLLYETSDENSVIEGSRKLEHTNELKCLDKAAVVSDKEIKREDFSNPWRLCTVTQIEELKILIRMFPIWATGIVFSAIYAQMSTMFVEQGEVMDRTIGSFTIPAASLSMFDTISVIFWVPVYDKILVPLARKFTGKQRGFSELQRMGIGLFISILSMAAAALVEMKR

SEQ ID NO: 1558 - protein, 235 aa, Nepenthes clipeata
  misc_feature (7)..(7): Xaa can be any naturally occurring amino acid
  misc_feature (39)..(39): Xaa can be any naturally occurring amino acid
  misc_feature (138)..(138): Xaa can be any naturally occurring amino acid
LIVWVQXNLGWALGFGIPAISMGIAIASFFSGTALYRLXKPGGSPLTRMCQVLVASFRKSKLALPEDSNLLYETSDENSVIEGSRKLEHTNELKCLDKAAVVSDKEIKREDFSNPWRLCTVTQIEELKILIRMFPIWXTGIVFSAIYAQMSTMFVEQGEVMDRTIGSFTIPAASLSMFDTISVIFWVPVYDKILVPLARKFTGKQRGFSELQRMGIGLFISILSMAAAALVEMKR

SEQ ID NO: 1559 - protein, 474 aa, Escherichia coli O157:H7 EDL933
MSRLVVVSNRIAPPDEHAASAGGLAVGILGALKAAGGLWFGWSGETGNEDQPLKKVKKGNITWASFNLSEQDLDEYYNQFSNAVLWPAFHYRLDLVQFQRPAWDGYLRVNALLADKLLPLLQDDDIIWIHDYHLLPFAHELRKRGVNNRIGFFLHIPFPTPEIFNALPTYDTLLEQLCDYDLLGFQTENDRLAFLDCLSNLTRVTTRSAKSHTAWGKAFRTEVYPIGIEPKEIAKQAAGPLPPKLAQLKAELKNVQNIFSVERLDYSKGLPERFLAYEALLEKYPQHHGKIRYTQIAPTSRGDVQAYQDIRHQLENEAGRINGKYGQLGWTPLYYLNQHFDRKLLMKIFRYSDVGLVTPLRDGMNLVAKEYVAAQDPANPGVLVLSQFAGAANELTSALIVNPYDRDEVAVALDRALTMSLAERISRHAEMLDVIVKNDINHWQECFISDLKQIVPRSAESQQRDKVATFPKLV

SEQ ID NO: 1560 - protein, 860 aa, Zea mays
MTNAAGTAPHPTPPTPLQQQQHQPPKDQQQKALALNAFRLKGIGDRIRFHLKGMSVPPVAELAHLIYAFARGIDFAVSAGDIPLTAGDIPEILRKVYELRKETIIQSSLMILAISCKNACSNKWFQPADSRDILRMVNELSGNFCTSTGQAASDSTVLEIISQIMPRYYPRLKFERLITSIEAKVGYDILMADFFIERSLSRDEKIRLIVVQKENLDASSCVSSPPHVSFLVNGKGVDKRTNVSMEQGPQLPTDITKMLKYGANIIQGVGYFNANYIIAVAVVNDLTSFSAPKLDDYAQPITVYPADSDVLEGPSRVSLNCPISFRRIKTPIKGRLCKHYQCFDYDNYMEMNSRKPNWRCPYCNTSSSFTDLRIDQKMMKILEETGDDVTDVLVFADGSWKVVPAQDEKSDRHRGDTIQQAGDAVETGSPSRDVIDLINGNDDGDMQMDWASAPEDSKPVLNSQDLSVSDYLTDFPMTAQTEDLNRGDGNNGGSNMASTSRQNLLLPPTSGLGSSSLGTLESILPQNVLHPVITDAVSPSLETSSASGMQHVSQETHCGTVQLQPQIGPVHGSEVRRLPIPRNPRREPIGVQGLTVPPQNPGSSTRLQPNILNCPPPIPLSSPSSSTYQAHQVKNPDSVIASRNSGSGPLPRTPSVAAASLHLQSTARDIRNTSSHLPSRVVGLPAPHLMGARPPPGISVQAGGANAYRTMQQTPTMDPLRHTRMSMNQTALAAAGQTTAAAYVRPTQADIQNHLFPVQQSQAPRSQQVPRTTTPPLQRAPPHLQPPSVPPTVPSTPQAGPSHGLPPELPVDDSWRPTGQMRGSLTGNAYSSAIRHYRGHSEQQQGEPRPPNTSGARRPQ

SEQ ID NO: 1561 - protein, 497 aa, Streptomyces hygroscopicus subsp. limoneus
MTGSEIFLASKRAAITYDTDPATGEPRAWLAPGGTGNVVAEQAGVLNISWIASADSEDDRRASALNPDGVTMELHSGREILVRLIRHDPAVFRNVQNFMTANLMWAANNYGWDRWTQPSFGSDAREGWADFGRFTRDFADAILKSSAQSADPVYLVHDYQLVGVPALLREQRPDAPILLFVHIPWPSADYWRILPKEIRTGILHGMLPATTIGFFADRWCRNFLESVADLLPDARIDREAMTVEWRGHRTRLRTMPLGYSPLTLDGRNPQLPEGIEEWADGHRLVVHSGRTDPIKNAERAVRAFVLAARGGGLEKTRMLVRMNPNRLYVPANADYVHRVETAVAEANAELGSDTVRIDNDNDVNHTIACFRRADLLIFNSTVDGQNLSTFEAPLVNERDADVILSETCGAAEVLGEYCRSVNPFDLVEQAEAISAALAAGPRQRAEAAARRRDAARPWTLEAWVQAQLDGLAADHAARTATAERFDTAPAVSTRADL

SEQ ID NO: 1562 - protein, 886 aa, Glycine max
MDLVPSVKEKLNYFRIKELKDVLTQLHLSKQGKKQDLVDRILSVLSDEQVSKIWAKKNAGGGKEQLLYASDACSDVTYLAEKMQISGATDLASKGQGASDSSSVKVKSEFDDAFQPDVKIRCLCGSRLETENLVKCDDARCHVWQHISCVIIPEKPTEGIPLVPDKFYCELCRLTRADPFWVSVAHPLHPVKLTTTSNPTDGNNPVQSVERTFQLTRADKDLVSKPEFDVEAWCMLLNDKVPFRMQWPQYTDLQVNGVPVRATNRPGSQLLGANGRDDGPIITPYTKDGINKISLTGCDARIFCLGVRIVKRRSMQQILNSIPKESDGEKFEDALARVCRCVGGGNAVDDADSDSDLEVVSDTFTVNLRCPMSGSRMKIAGRFKPCIHMGCFDLEVFVEMNQRSRKWQCPICLKNYALENIIIDPYFNRITSMMMNCGEEIAEIEVKPDGSWRVKVKSESERLELGNLAQWRLPDGTLCVSTAGDVKRVDTLKQVKQEGVSDCPAGLKLGIRKNRNGVWEVSKPEGTNTSSGNKLKGAFGNPEQVVIPMSSSATGSGRDGDDPSVNQGGGGHIDHSTTNGIEMDSLCLNNVDLAYEYNEPNTSAQVGGAEVIVLSDSEEDNDLLVSPAIAYKNNRNDATDGYSVPPPVIVDSYTEEHNLGGNSCLGLFPNDDEFGMSSLWSLPSGSQAGPGFQLFGSDADVSDALVHLQHGPMNCSSSLNGYALAPNTALGSGSILQESSAGRSDADLNGGLVDNPLAFGGDDPSLQIFLPTRPADSSMHNELRDQASVANGVCTEEDWISLSLGGGTGGNNGDASTQNGLNSRHQIPTREGATNTLDDTASLLLGMNDVRSDRARRQRSDSPFSFPRQKRSVRPRLYLSIDSDSE

SEQ ID NO: 1563 - protein, 143 aa, Glycine max
  misc_feature (116)..(116): Xaa can be any naturally occurring amino acid
MGMKKVASGVTMDHVLLASQETKEAREARIRSLFDFFDRENLGFLDYSHIEAGLSALQIPAEYKYAKDLLNACDANKDGRVDFQEFRKYMDDKELELYRIFQAIDVAHNGCILPEXLWEALGRAGIKIDDEELARFVERVDKD

SEQ ID NO: 1564 - protein, 235 aa, Nepenthes gymnamphora
  misc_feature (7)..(7): Xaa can be any naturally occurring amino acid
  misc_feature (39)..(39): Xaa can be any naturally occurring amino acid
  misc_feature (138)..(138): Xaa can be any naturally occurring amino acid
LIVWVQXNLGWALGFGIPAISMGIAIASFFSGTALYRLXKPGGSPLTRMCQVLVASFRKSKLALPEDSNLLYETSDENSVIEGSRKLEHTNELKCLDKAAVVSDKEIKCEDFSNPWRLCTVTQIEELKILIRMFPIWXTGIVFSAIYAQMSTMFVEQGEVMDRTIGSFTIPAASLSMFDTISVIFWVPVYDKILVPLARKFTGKQRGFSELQRMGIGLFISILSMAAAALVEMKR

SEQ ID NO: 1565 - protein, 249 aa, Mycobacterium smegmatis str. MC2 155
MSLSGDLQRALTAVAATPHLLVTSDFDGTLAPIVNNPADARPLADAAEALAALAELPQTASALISGRALEVLRALSGMPDTVHLVGSHGAEFTSGFGHDIDTALLQRITDRLHTIASGRPGVTVETKPASVALHVRNASPEHGAAALTEARTAAAEWDAQLTEGKAVLEFAVIQTDKGEAVDILRQQENATAVVFFGDDVTDEKAFRRLRGDDVGVKVGPGESLAAYRVDSPEDVAAALDHLLAVRRGA

SEQ ID NO: 1566 - protein, 235 aa, Nepenthes sumatrana
  misc_feature (39)..(39): Xaa can be any naturally occurring amino acid
  misc_feature (138)..(138): Xaa can be any naturally occurring amino acid
LIVWAQENLGWALGFGIPAISMGIAIASFFSGTALYRLXKPGGSPLTRMCQVLVASFRKSKLALPEDSNLLYETSDGNSVIEGSRKLEHTNELKCLDKAAVVSDKEIKCEDFSNPWRLCTVTQIEELKILIRMFPIWXTGIVFSAIYAQMSTMFVEQGEVMDRTIGSFTIPAASLSMFDTISVIFWVPVYDKILVPLARKFTGKQRGFSELQRMGIGLFISILSMAAAALVEMKR

SEQ ID NO: 1567 - protein, 838 aa, Ostreococcus tauri
MRYRARVRCAALVASEVDVGGRSSGDLSAQSGASETRGDRVFVVSNTLPLKMREDAAAGKMYGHAYAFEADEESIYDQCREGALKGGQFEVVINVGQLPMEVPMEMQDAVANDLERRYNCMPVFLPKEVKENFYNGFCKQYMWPLMHYVLPMSPMDARFETHQWQAYIASNKRFADKLMETVSSDDDLVWVNDYHLMLLPTFLRKRFNAVKCGFFLHCPFPSSEIFRTTPTRDLILRGLLNADFVGFHTFDYARHFLSCCTRLLGLNHRMERGSLVIDNHGRLVSVKICPTGVKISRLQQVLDTDVCRNRRQELLKEVAGRKILLGVDDFDEFKGIDLRMTAFERMLEEHPRLAEQVCLMQTCTPPRSSGRDINELRNTVNELVERINAKYSVNGVPVLKFEIKPVAIHERIALHSVADVSVVTATRDGMNLAPYEYITCRQGPSDEARGTAEGFSLPRQSALIISEFTGCSPSLSGALRVNPWHIQDVADAMYKALQMSGHEHEARHEKHWRYVSEHHVGFWAQSCLAELQRVTEKANGNRCYGLGFGLNFRVVHLSSQFRKLDTPTVVADYLKAKRRKLVIDYDGTLVPLVSYAQPPSAHLLSLLTVLTSDQANEVCIVSGRERGTLDKWFGNIPRLWMVAEHGYWFRKGSDVAWKELAPIGTDTSVHEWKETVLPILEQYSEATDGSFIQTKESAYVWHYRDADPDFGAWQAKELLDHLDSVLHGDGVDVISGNGTVEIKPKGVHKGLVIDELLNVDEAASNVADFVLAVGDDKSDEDMFSAVATHTALPLYAGSSVYTSTIGQKPSKAPAYLDDTDDVVNLLQTLAQYNVCHRH

SEQ ID NO: 1568 - protein, 320 aa, Arabidopsis thaliana
MKITDISGKIETLVDSLRDMSPTRVRSSFSDEHVSENDDERSSWIALHPSALDMFEQIMRDAEGKQIIMFLDYDGTLSLITEDHDRAYITDEMREVVKEVATYFKTAIISGRSTDKVQSFVKLTGIHYAGSHGMDIKGPTNTDQSNQEEVMFQPASDYLPMIDEVVNVLKEKTKSIPGATVEHNKFCLTVHFRRVDETGWAALAEQVRLVLIDYPKLRLTQGRKVLELRPSIKWDKGKALEFLLNSLGIAESKDVLPVYIGDDRTDEDAFKVLCERGQGFGIIVSKTIKETYASYSLQDPSQVKEFLERLVKWKKQTLGE

SEQ ID NO: 1569 - protein, 460 aa, Rhodospirillum rubrum ATCC 11170
MARLIVVSNRVALPEDQAGRAGGLAVALREALVSFGGIWFGWSGKVAAQTSDRPRFIEEGPVTYAVLDLGRKDHAQYYNGFANRTLWPLFHYRMGLAEFTRQDYEGYMRVNTVFAEQLQPLLTDDDLIWVHDYHLIPLGGELRRLGARQRMGIFLHTPFPAMEVLLALTHHRRLVGSLCAYDVVGFQTENDRRSFFDYVLHEAGGWIGENGHVTVWGRSLVARVYPIGIEKGAFAEAAQRAQRTVAYRRLRASLNGRKLMIGVERLDYSKGLPERFEAFSRLLEKHPEHRAKVSFMQVAPISRSEVPEYRRLREELESLSGQINGQFGDYDWVPIRYLTRNFARSVLAGFYRQGAVGVVTPMRDGMNLVAKEYVASQNPQDPGVLVLSRFAGAARELTTALQVNPFDREDMADAMDRALGMALDERKERWVEMMRMVDENSLEAWREKYLADLNAAPFNG

SEQ ID NO: 1570 - protein, 841 aa, Oryza sativa Japonica Group
MYGAVEAIASAAVTTCSMRNIRQIHDTSGPAMVYDLAAVAQRERGERGWYSWSRPARDCTEILRMANELSGKFCTPVSQPDNDSTVIQIISTIMPRYYPQLKFERLVTSLEAKVGYDVLMADFFIHKNVPREEKINLIVVQKEDLNASSCIANPPHVSFLVNGKGVDKRTNVSMETGPQFPTDITRMLKYGANIIQAIGYFNANYIIAVAFLNKLESFDAPNLNDYAQPVAADPPDSDLLEGPSRVSLKCPISFRRIKTPIKGRLCKHYQLNLRKPTWRCPFCNTPSNFTDLRIDQKMVKSLFFHKILQETGEDTIDVLVFADGSWKAISTNDERSDRHSSDVIQQSRDTMDTDATADDVIDLINEDNDGDVPMSFTSASEDVKPFLNCQDLSVADYLSDLPMNTVSQAEDLYAGGASRGNNERGNATSTSGQNSSLPSTGGLGSSSFGTLESILPHNILHPVITDAVSPSLDTSNSVVLRQHVAQGTRSDIVPSQPRIDPQLRLEIARPPIPRNVAREPTGIQALPVQPQRVRPNIYNCPPPFPQSSPASAYQVHQVTNADSVITAMSTGIGSLSRAPDAAPLLQHQSTQQGQIFNRHLNYFTIFITHFVLLACVLQIQVEIRATQNYHQGQFIGLTAPQNFMGTRPPPGVPGQAIGANAHGAPPAQQSHHVHRLVSNLMNQLGQATVAQPSTAPQVLPSQPGGTSAVNPQIRGHLFPAQQRSQAMRPQAVPRPTISQAPPRAQSPFLPATARPPSTPPPIGTSDDLQELPVDESWRPTGQMRGSLTGEAYSVAIGRYNPSVNIAGQQTSHVTSQARPAGPDARSFRRLREPSEGANALN

SEQ ID NO: 1571 - protein, 1428 aa, Bacillus anthracis str. A2012; identical to SEQ ID NO: 1028

SEQ ID NO: 1572 - protein, 380 aa, Zea mays
MPSISCHNLLDLAAADEVPLPSPTPLRLPRVMSVASPASPTSPPAPAPPRRVIVSHRLPLRASPDPAAPFGFAFSVDAGTVAYQLRSGLPANAPVLHIGTLPAAAAEAASDELSDYLLANFSCLPVYLPTDLHHRFYHGFCKHYLWPLLHYLLPLTPSSLGGLPFQRTLYHSFLSANRAFADRLTEVLCPDEDLVWIHDYHLLALPTFLRKRFPRAKVGFFLHSPFPSSEIFRTIPVRDDLVRALLNADLVGFHTFDYARHFLTACSRLLGLDYQSKRGYIGIEYYGRTVTVKILPVGIDMGQLRSVVSAPETEDAVRRVTEAYKGRRLMVGVDDVDLFKGIGLKFLAMEQLLVEHRELRGRSRVSLEGPKLTRTQLSLQ

SEQ ID NO: 1573 - protein, 922 aa, Salmonella typhimurium; identical to SEQ ID NO: 1030
  misc_feature (188)..(188): Xaa can be any naturally occurring amino acid

SEQ ID NO: 1574 - protein, 186 aa, Zea mays
  misc_feature (83)..(83): Xaa can be any naturally occurring amino acid
  misc_feature (89)..(89): Xaa can be any naturally occurring amino acid
  misc_feature (132)..(132): Xaa can be any naturally occurring amino acid
  misc_feature (143)..(143): Xaa can be any naturally occurring amino acid
  misc_feature (165)..(165): Xaa can be any naturally occurring amino acid
GTKDATGSSEAATRATAFGFHAAVEEAQRALNAAHVEAESVDNGIGVVKLMGHNCCIFISLFKLTATSTVNSCIFCSTMIITXLTKLFXNPFQLMQVLLQCASLASRYVDCCLIPESPFYLEGKRRLLEFIXRRREDKGHVVXIVLAEGADQDLIVRSMNFMDTXDASGDKLLLDGCPLAILEDKG

SEQ ID NO: 1575 - protein, 235 aa, Nepenthes lavicola
  misc_feature (39)..(39): Xaa can be any naturally occurring amino acid
LIVWVQENLGWALGFGIPAISMGIAIASFFSGTALYRLXKPGGSPLTRMCQVLVASFRKSKLALPEDSNLLYETSDENSVIEGSRKLEHTNELKCLDKAAVVSDKEIKYEDFSNPWRLCTVTQIEELKILIRMFPIWATGIVFSAIYAQMSTMFVEQGEVMDRTIGSFTIPAASLSMFDTISVIFWVPVYDKILVPLARKFTGKQRGFSELQRMGIGLFISILSMAAAALVEMKR

SEQ ID NO: 1576 - protein, 235 aa, Nepenthes adnata
  misc_feature (138)..(138): Xaa can be any naturally occurring amino acid
  misc_feature (220)..(220): Xaa can be any naturally occurring amino acid
LIVWVQENLGWALGFGIPAISMGIAIASFFSGTALYRLQKPGGSPLTRMCQVLVASFRKSKLALPEDSNLLYETSDQNSVIEGSRKLEHTNELKCLDKAAVVSDKEIKCEDFSNPWRLCTVTQIEELKILIRMFPIWXTGIVFSAIYAQISTMFVEQGEVMDRTIGSFTIPAASLSMFDTISVIFWVPVYDKILVPLARKFTGKQRGFSELQRMGIGLFXSILSMAAAALVEMKR

SEQ ID NO: 1577 - protein, 558 aa, Zea mays
MVEFLTAAFAFLLSLACCSGIPLFHQAADLNHILSERGACGVGFVANLKNMSSFDIVRDALMALGCMEHRGGCGADSDSGDGAGLMSAVPWDLFDDWASKQGLALFDRRNTGVGMVFLPQDEKSMEEAKAATEKVFVDEGLEVLGWRPVPFNVSVVGRNAKETMPNIQQIFVKVAKEDNADDIERELYISRKLIERAAKSFSWADELYFCSLSSRTIVYKGMLRSEVLGQFYLDLQNELYKSPFAIYHRRFSTNTSPRWPLAQPMRLLGHNGEINTIQLLLRSGRSPAEALMILVPEAYKNHPTLSIKYPEVTDFYDYYKGQMEAWDGPALLLFRTVSSCIGRTQCRRLSALCGVWGRVSLSVKPYPHNMQKLGSNPGPSGYRRTVGATLDRNGLRPARYWRTSDDFVYVASEVGLSCYFLLYEIVGVIPMDESKVVMKGRLGPGMMITVDRQTGQVLENTEVKKTVASASPYGTWLQECTRLIKPVNFLSSTIMDNETVLRHQQAFGYSSEDVQMVIESMASQGKEPTFCMGDDIPLAVLSQRPHLLYDYFKQRFAQ

SEQ ID NO: 1578 - protein, 942 aa, Arabidopsis thaliana
MPGNKYNCSSSHIPLSRTERLLRDRELREKRKSNRARNPNDVAGSSENSENDLRLEGDSSRQYVEQYLEGAAAAMAHDDACERQEVRPYNRQRLLVVANRLPVSPVRRGEDSWSLEISAGGLVSALLGVKEFEARWIGWAGVNVPDEVGQKALSKALAEKRCIPVFLDEEIVHQYYNGYCNNILWPLFHYLGLPQEDRLATTRSFQSQFAAYKKANQMFADVVNEHYEEGDVVWCHDYHLMFLPKCLKEYNSKMKVGWFLHTPFPSSEIHRTLPSRSELLRSVLAADLVGFHTYDYARHFVSACTRILGLEGTPEGVEDQGRLTRVAAFPIGIDSDRFIRALEVPEVKQHMKELKERFTDRKVMLGVDRLDMIKGIPQKILAFEKFLEENANWRDKVVLLKIAVPTRPDVPEYQTLTSQVHEIVGRIIGRLGTLTAVPIHHLDRSLDFHALCALYAVTDVALVTSLRDGMNLVSYEFVACQEAKKGVLILSEFAGAAQSLGAGAILVNPWNITEVAASIGQALNMTAEEREKRHRHNFHHVKTHTAQEWAETFVSELNDTVIEAQLRISKVPPELPQHDAIQRYSKSNNRLLILGFNATLTEPVDNQGRRGDQIKEMDLNLHPELKGPLKALCSDPSTTIVVLSGSSRSVLDKNFGEYDMWLAAENGMFLRLTNGEWMTTMPEHLNMEWVDSVKHVFKYFTERTPRSHFETRDTSLIWNYKYADIEFGRLQARDLLQHLWTGPISNASVDVVQGSRSVEVRAVGVTKGAAIDRILGEIVHSKSMTTPIDYVLCIGHFLGKDEDVYTFFEPELPSDMPAIARSRPSSDSGAKSSSGDRRPPSKSTHNNNKSGSKSSSSSNSNNNNKSSQRSLQSERKSGSNHSLGNSRRPSPEKISWNVLDLKGENYFSCAVGRTRTNARYLLGSPDDVVCFLEKLADTTSSP

SEQ ID NO: 1579 - protein, 278 aa, Zea mays
  misc_feature (59)..(59): Xaa can be any naturally occurring amino acid
  misc_feature (262)..(262): Xaa can be any naturally occurring amino acid
MAATTPAPPSHGGGRNGTLPTPLPSNESFSKFFESWISEQSRDLEELRAAASADPPAPXAELRRLVGQVLGHYAQYYRAKAAAAADDVLCMFTPSWTSTTENLYLWCGGWRPTAAIQLLYTKSGMQLQHQLPAFLDGGGLKDDLGDLGAAQLQAADQLQRRTIRREREIEDAAASAQEALTTATMVELAGGGGRDAGAMDREMQAKAEGMRRVLEMADALRLETMREVVALLRPAQAVHFLLAAAELHLAVHDFGRRKDGRXATSPPPRRRSDGRWRA

SEQ ID NO: 1580 - protein, 300 aa, Salmonella enterica subsp. arizonae serovar 62:z4,z23:--
MAVLNGEQRHTVYTYMVNETVCESHYDDKEETRVAEPLTVSPELTANYAYFFDLDGTLAEIKPHPDQVVVPHKILQLLDRLAAHNAGALALISGRSMTELDALAKPFRFPLAGVHGAERRDINGKTYVVSLPESVVRQVEELLRSTLAELPGAELETKGMAFALHYRQAPEHEAALLALSQHVTQHWPQLALQPGKCVVEIKPKGTNKGEAIASFMQEAPFAGRIPVFVGDDLTDEVGFGVVNHAGGISVKVGVGTTQAAWRLESVPDVWRWLEQINYPQQEQEVMNNRRDGYESFSRSI

SEQ ID NO: 1581 - protein, 475 aa, Salmonella enterica subsp. arizonae serovar 62:z4,z23:--
MAMSRLVVVSNRIAPPDNKGGAGGLAVGVLGALKAAGGLWFGWSGETGNEDEPLKKVTKGNITWASFNLSEQDYEDYYCQFSNAVLWPAFHYRLDLVQFQRPAWEGYMRVNALLADKLLPLIKENDIIWVHDYHLLPFASELRKRGVNNRIGFFLHIPFPTPEIFNALPPHDELLEQLCDFDLLGFQTENDRLAFLDSLSSQTRVTTRSGKHHIAWGKDFQTEVYPIGIEPDEIALQAAGPLPPKLVQLKAELKNVKNIFSVERLDYSKGLPERFLAYEALLENYPQHRGKIRYTQIAPTSRGEVQAYQDIRHQLETEAGRINGRYGQLGWTPLYYLNQHFDRKLLMKIFRYSDVGLVTPLRDGMNLVAKEFVAAQDPANPGVLVLSQFAGAANELTSALIVNPYDRDDVAAALNRALTMPLAERISRHAEMLDVIVKNDINRWQERFIHDLKEVTPRSAERRQQNNVATFPKLA

SEQ ID NO: 1582 - protein, 272 aa, Thellungiella halophila
MATQPPSSSSAREEFVYMAKLAEQAERYEEMVEFMEKVAKAVDKEELTVEERNLLSVAYKNVIGARRASWRIISSIEQKEESRGNNDHVSLIRDYRTKIETELSGICDGILKLLDTMLIPAAASGDSKVFYLKMKGDYHRYLAEFKTSQERKDAAEHTLNAYKAAQDIANAELAPTHPIRLGLALNFSVFYYEILNSPDRACNLAKQAFDDAIAELDTLGEESYKDSTLIMQLLRDNLTLWTSDMQDDDDVIKEAAAAAPAAPKPAEEQQQS

SEQ ID NO: 1583 - protein, 691 aa, Staphylococcus aureus
DHRGGVGADGITGDGAGIMTEIPFAFFKQHVTDFDIPGEGEYAVGLFFSKERILGSEHEAVFKKYFEGEGLSILGYRNVPVNKDAIAKHVADTMPVIQQVFIDIRGIEDVEKRLFLARKQLEFYSTQCDLELYFTSLSRKTIVYKGWLRSDQIKKLYTDLSDDLYQSKLGLVHSRFSTNTFPSWKRAHPNRMLMHNGEINTIKGNVNWMRARQHKLIETLFGEDQHKVFQIVDEDGSDSAIVDNALEFLSLAMEPEKAAMLLIPEPWLYNEANDANVRAFYEFYSYLMEPWDGPTMISFCNGDKLGALTDRNGLRPGRYTITKDNFIVFSSEVGVVDVPESNVAFKGQLNPGKLLLVDFKQNKVIENNDLKGAIAGELPYKAWIDNHKVDFDFENIQYQDSQWKDETLFKLQRQFAYTKEEIHKYIQELVEGKKDPIGAMGYDAPIAVLNERPESLFNYFKQLFAQVTNPPIDAYREKIVTSELSYLGGEGNLLAPDETVLDRIQLKRPVLNESHLAAIDQEHFKLTYLSTVYEGDLEDALEALGREAVNAVKQGAQILVLDDSGLVDSNGFAMPMLLAISHVHQLLIKADLRMSTSLVAKSGETREVHHVACLLAYGANAIVPYLAQRTVEQLTLTEGLQGTVVDNVKTYTDVLSEGVIKVMAKMGISTVQSYQGAQIFEAIGLSHDVID

SEQ ID NO: 1584 - protein, 533 aa, Vitis vinifera
MDLSLSSFARSSIPPPLKSCNLTSLSNFPNYSFKSRNFSLTPLISRQNRRIRAQYSCNSGSGGGGGGDDDGFVVDEVPHLTNFLPDLPSYPNPLQQNLAYTIVKKNFVSPEDVVAQKIVVQKGSPRGVHFRRAGPREKVYFKSEEVRACIVTCGGLCPGINTVIREIVCGLNYMYGVHDILGIEGGYRGFYSKNTIQLTPKVVNDIHKRGGTFLRTSRGGHDTDKIVDNIQDRGINQVYIIGGDGTQKGAALIYKEVEKRGLQVAVAGIPKTIDNDIAVIDKSFGFDTAVEEAQRAINAAHVEVESVENGVGIVKLMGRYSGFIAMFATLASRDVDCCLIPESPFYLEGQGGLFEFIEQRLKENGHVVIVLAEGAGQEYVAQSMHAVSEKDASGNRLLLDVGLWLSQKIKDHFTKVQKMAVNMKYIDPTYMIRAIPSNASDNIYCTLLAHSAVHGAMAGYTGFTIGPVSSRHAYIPIDRVTETTKTIKLTDRMWARLLSSTNQPSFLKGSPVMQERVDKETIEMIDNMKITSI

SEQ ID NO: 1585 - protein, 257 aa, Zea mays
MSREDNVYMAKLAEQAERYEEMVEYMEKVAKTVDVEELTVEERNLLSVAYKNVIGARRASWRIISSIEHKEESRKNEEHVIQIKEYRGKIEAELSNICDGILKLIDSHLVPSSTAAESKVFYLKMKGDYHRYLAEFKTGAERKEAAESTMIAYKAAQDIALAELASTHPIRLGLALNFSVFYYEILNSPDKACNLARQAFDEAISQLDTLGEDSYKDSTLIMQLLRDNLTLWTADSATEDGIEEGNEASKGDAGEGQ

SEQ ID NO: 1586 - protein, 513 aa, Schizosaccharomyces pombe
MSDAHDTIKSLTGDASNSRRLIVVSNRLPITIKRKDNGTYDFSMSSGGLVSALSGLKKLMTFQWLGWCGQEIPEDEKPMIIQRLQDECSAIPVFLDDETADRHYNGFSNSILWPLFHYHPGEINFDEENWEAYRAANYAFAEAIVKNLQDGDLIWVQDYHLMVLPQMLRELIGDKFKDIKIGFFLHTPFPSSEIYRVLPVRNEILEGVLNCDLVGFHTYDYARHFLSACSRILNLSTLPNGVEYNGQMVSVGTFPIGIDPEKFSDALKSDVVKDRIASIERRLQGVKVIVGVDRLDYIKGVPQKFHAFEVFLEQYPEWVGKVVLVQVAVPSRQDVEEYQNLRAVVNELVGRINGRFGTVEYTPIHFLHKSVRFEELVALYNVSDVCLITSTRDGMNLVSYEYICTQQERHGALILSEFAGAAQSLNGSIVINPWNTEELANSIHDALTMPEKQREANENKLFRYVNKYTSQFWGQSFVGELQRIQHYSHPHPRRTNPILRTKSAQVLSMNSSS

SEQ ID NO: 1587 - protein, 235 aa, Nepenthes hamata
  misc_feature (3)..(4): Xaa can be any naturally occurring amino acid
  misc_feature (6)..(7): Xaa can be any naturally occurring amino acid
  misc_feature (10)..(11): Xaa can be any naturally occurring amino acid
  misc_feature (15)..(17): Xaa can be any naturally occurring amino acid
  misc_feature (19)..(20): Xaa can be any naturally occurring amino acid
  misc_feature (22)..(24): Xaa can be any naturally occurring amino acid
  misc_feature (26)..(26): Xaa can be any naturally occurring amino acid
  misc_feature (28)..(31): Xaa can be any naturally occurring amino acid
  misc_feature (33)..(34): Xaa can be any naturally occurring amino acid
  misc_feature (37)..(39): Xaa can be any naturally occurring amino acid
  misc_feature (47)..(48): Xaa can be any naturally occurring amino acid
  misc_feature (55)..(55): Xaa can be any naturally occurring amino acid
  misc_feature (58)..(58): Xaa can be any naturally occurring amino acid
  misc_feature (69)..(69): Xaa can be any naturally occurring amino acid
LIXXVXXNLXXALGXXXPXXSXXXAXAXXXXGXXLYXXXRPGGSPLXXMCQVLVXSFXKSKLALPEDSXLLYETSDKNSAIEGSRKLEHTDELRCLDKAAVVSDKEIKCEDFSNPWRLCTVTQIEELKILIRMFPIWATGIVFSAIYAQMSTMFVEQGEVMDRTIGSFTIPAASLSMFDTISVIFWVPVYDKILVPLARKFTGKQRGFSELQRMGIGLFISILSMAAAALVEMKR

SEQ ID NO: 1588 - protein, 260 aa, Camellia sinensis
MATSTPREESVYMAKLAEQAERYEEMVEFMEKVSSTVVESEELTVEERNLLSVAYKNVIGARRASWRIISSIEQKEESRGNADHVSTIKDYRSKIENELSSICDGILKLLDTKLIPSATAGDSKVFYLKMKGDYHRYLAEFKTGSERKEAAENTLNAYKAAQDIANTELAPTHPIRLGLALNFSVFYYEILNSPDRACSLAKQAFDEAIAELDTLVEDSYKDSTLIMQLLRDNLTLRTSDTQDDGAEEIKEAPKHEEEKQ

SEQ ID NO: 1589 - protein, 551 aa, delta proteobacterium MLMS-1
MESAQRLDHNSELSLLEFPYIIRWREDRCSRCGRCTAVCPTRAIEASVLAQRLVHSEGDTPLPATIKRVSSVIRQVNDIDRHCVGCGTCSLVCPNMAIMPEYNPRHKFLFHKNRGGIPYARGGRRNDPATSTLDKLKFTRISMLTDPSLDAGRHEFHIRTLMGRNLPAEELPLERQGDLLLPRPGAFVPPVREIFPIRIGGMSIGALSPPMWEGLAMGVAYLNEVENIPVVMCSGEGGLPPRLLKSRYLKYFIPQIASGYFGWDEIIHALPEMIEDPAAIEIKYGQGAKPGDGGLLMAYKVLKLIAKIRGVPVYVDLASPPTHQTKYSIEEAVAKMIQSVSMAWGFRVPVYPKISGTKTALAVLNNLARNPYAAALTIDGEDGATGAAYNVSMDKMGHPIASNLRDCYLELVKSGKQNELPLFAAGGVGKEANLAANAAALILLGASGVDIGKYIMQAAAECYGDEYNRCNLCNLGRCPRGITTQDPRLYRRLDADRVAERVVDIFKTAETELKKIFAPMGRSTQLPIGMADGLGVGDQAIADRLSISYVC

SEQ ID NO: 1590 - protein, 235 aa, Nepenthes glabrata
  misc_feature (138)..(138): Xaa can be any naturally occurring amino acid
LIVWVQENLGWALGFGIPAISMGIAIASFFSGTTLYRLQRPGGSPLTRMCQVLVASFRKSKLALPEDSSLLYETSDKNSAIEGSRKLEHTDELRCLDKAAVVSDKEIKCEDFSNPWRLCTVTQIEELKILIRMFPIWXTGIVFSAIYAQMSTMFVEQGEVMDRTIGSFTIPAASLSMFDTISVIFWVPVYDKILVPLARKFTGKQRGFSELQRMGIGLFISILSMAAAALVEMKR

SEQ ID NO: 1591 - protein, 2260 aa, Physcomitrella patens subsp. patens; identical to SEQ ID NO: 1061

SEQ ID NO: 1592 - protein, 235 aa, Nepenthes albomarginata
  misc_feature (208)..(208): Xaa can be any naturally occurring amino acid
LIVWVQENLGWALGFGIPAISMGIAIASFFSGTALYRLQKPGGSPLTRMCQVLVASFRKSKLALPEDSNLLYETSDENSVIEGSRKLEHTNELKCLDKAAVVSDKEIKREDFSNPWRLCTVTQIEELKILIRMFPIWATGIVFSAIYAQMSTMFVEQGEVMDRTIGSFTIPAASLSMFDTISVIFWVPVYDKILVPLARKFTGKQRGXSELQRMGIGLFISILSMAAAGLVEMKR

SEQ ID NO: 1593 - protein, 374 aa, Zea mays
MPTSSPFVGDSGGAGSPIRVERMVRERSRRYDIFASDAMDTDAEAAFALDGVQSPGRASPANMEDAGGAAAARPPLAGSRSGFRRLGLRGMKQRLLVVANRLPVSANRRGEDHWSLEISAGGLVSALLGVKDVDAKWIGWAGVNVPDEVGQRALTKALAEKRCIPVFLDEEIVHQYYNGYCNNILWPLFHYLGLPQEDRLATTRNFESQFDAYKRANQMFADVVYEHYQDGDVIWCHDYHLMFLPKCLKDHDINMKVGWFLHTPFPSSEIYRTLPSRLELLRSVLCADLVGFHTYDYARHFVSACTRILGLEGTPEGVEDQGRLTRVAAFPIGIDSDRFKRALELPAVKRHINELTQRFAGRKDKDLLCMVPNP

SEQ ID NO: 1594 - protein, 305 aa, Zea mays
GEARRWTWDEVTSPFMASNSKVKSLLLHHSVSILKIPVPSPSADLSDGGKLPLEAIFVSCSCKGSSRSPTVVVLHGGPHSVSVSSYSKSSAFLASLGFNLLVVNYRGTPGYGEEALQSLPGKVGSQDVQDCLAALDFAVEEELVDASRVAVVGISHGGFLTTHLIGQAPDRFAVAAARNPVCNLSLMAGTTDIPDWCYVVACGTQAKRYASEAPSPDHLRLFYQRSPIAHVSKVKAPLLMLLGGADLRVPASNGLQYARSLIERGGDVKIMMFPEDIHEINLPRSDFESFLNIGVWFKKHLNAVA

SEQ ID NO: 1595 - protein, 525 aa, Staphylococcus epidermidis ATCC 12228; identical to SEQ ID NO: 1067

SEQ ID NO: 1596 - protein, 524 aa, Zea mays
VDDMDIFKGISLKLLAMEELLRQHPEWRGKLVLVQVANPARGRGKDVAEVQTETYAMVRRINEVYGEPGYEPVVLIDEPLQFYERVAYYVIAEVCLVTAVRDGMNLIPYEYIVSRQGNEKLDRMLRQGKPEEKKSMLVVSEFIGCSPSLSGAIRVNPWNIEAVADAMETALVLPENEKRLRHDKHFRYVSTHDVGYWANSFLLDLERTCKYHSQKRCWGIGFGLRFRVVSLDLTFRKLSLENILMAYRRAKTRAILLDYDGTLMPQAINKSPSTESVRILNSLCRDKDNVVYLCSGYDRRTLHEWFPCENLGIAAEHGYFLRCKRDAEWKTCVAATDCSWKQIAEPVMCLYRETTDGSTIEDRETVLVWNYEDADPDFGSCQAKELVDHLESVLANEPVSVKTTPHSVEVKPQGVSKGLVARRMLVSMKERGQCPDFVLCIGDDKSDEDMFQLIATAACGDSLASKAEVFACTVGRKPSKAKYYLDDAAEVVRLMQGLSYVSEELALANQRDEDEDSSLDDVWE

SEQ ID NO: 1597 - protein, 669 aa, Coprinopsis cinerea okayama7#130
MASTELWRDFEQIRDIVAHRLTVDKLKSVISSLNDDCAAGLQKTGKKQDLINRLSSFLDNLRNSRMDSKWQRAKTIINEVKSGSHIHRISVASLQTSFPSVAGSSSSYSGIKTGGYPSPIIGTSGPSTLHRYDPYAPPVPNGASASASTSSTSSRPIAIRFKDSPFFTIEQQVSSVVECPESTSAMDRRQQTLTFTLNNDQVYKLKSSGSRYQLRLFCTSSVFYSPSRNSGFPCPIEFPPTCEVRVNGAQITASLKGLKKKPGTAPPPDLMNRCNRRYGAHAPHVNTLFTGYLKKFYLVVMLVETKTVDSLVENLKANCRRSSLEVRQKMLESLNDDDDIQAGPQKMSLKCPLSFMRVNTPCRSSKCVHPQCFDAASWFYMMEQTTTYLCPTCERVLDHRDLIIDGYFEEILQQTDDDVEDVIVEADGEWHTSDNKYASAKWRAGHPVAPKTISPNPVPATTTNGAERDKGKAKNLEVFVLSDDDDEDAVKRELSPSLSHRHSLDSASHPPPSVRSQSHVAEEVIDLTLSDDDEPQPQPPPPPAPVLKRKATELDLPPIDTWKKARGDLQEQQPHSTRPSQHHQAPPPNQISPVYRNPPANDIRPHSGFDHNTRLPGVNGYPLPQPPPIPTVPYYSGRPSLTESRQLPPPPPYPAPYQHQPRGSRWGGQ

SEQ ID NO: 1598 - protein, 173 aa, Zea mays
  misc_feature (22)..(22): Xaa can be any naturally occurring amino acid
NYRQSVEAGLFKILSKMGISLXLASYHGAQIFEAIGLGAELVEYAFAGTTSRVGGLTIADVAGEVMVFHGMAFPEMAKKLENFGFVNYRPGGEYHMNSPEMSKSLHKAVAAYKVGGNGNNGEAYDHYELYRQYLKDRPVTALRDLLDFNADQPAISLEEVESVESIVKRFCTG

SEQ ID NO: 1599 - protein, 757 aa, Marinobacter sp. ELB17
MLLATDLDGTFLAGDPENRLKLYRLIVAHPEIDLVFVTGRGLEAVLPLLSDPTIPQPDYIICDVGCTVVHGASQQAIQPLQGEIDELWPGEQVVESALSSFEGLQRQEVPQERRVSYFCDNDLVSEDMLARVSALSCDVLFSAGKYLDILPRGVNKGRTLSRLVEHLGVDPESVLVAGDTLNDLSMYQHEFKGVCVGESEAGLLAATEHQARVLHAGASGCGGILEAFEHFGYLGHLGIEAEIPDYMNRGKSDLVIVYHRLPYEEVVENGELIRRRPKSPNGIIPTLLSFFSDGKAGSWVAWSVDDPDLGPFQTHTEVDTSRYEKLVAARVALSEEDVEIFYKRFSKEAFWPTLHTFWERATFRDDHWQVYLKVNRLFAERAAEEAAENAVVWIHDYNLWMVPAYLREMRPDLTIAFFHHTYFPSADVFNVLPWRREIIGSLLQCDHIGFHIPRQAENFVDVARGVTPLEVTHKMGCAPRFLTYGCAVGLDEMSTEITVNDRKIGLGAHPVGLDLNRVRTALSDQSVIAQMETLREEFKDVRLILSVERLDFTKGIIEKLQAYERILNEHPELKTKVTLMLICVPAAAGMTIYEELLSQIEQTVGRINGQFAQVGWTPVQFFFRALPFEELVAYYTIADVMWITPLRDGLNLVAKEYIATQGLTQGSGVLVLSEFAGAAAELRGAILANPHHPQDLADTCYYALAISRSEARNRLSEAFEVVCRYDIEYWGREFINEVERRRATKLNKILAIGHRAA

SEQ ID NO: 1600 - protein, 92 aa, Arabidopsis thaliana
  misc_feature (74)..(74): Xaa can be any naturally occurring amino acid
RYVSSRVRIWELAHRMMSLAHTGDINTIYGNLDWVTSREASLRSPIWHGREKKIRPTSSPRASESAILDSAADXLVTSGRAPEESPMRRVPT

SEQ ID NO: 1601 - protein, 865 aa, Zea mays
MVSKSYSNLLDLTSGDGFDFRQPFKSLPRVVTSPGIISDTDWDTISDGDSVGSASSTERKIIVANFLPLNCTRDETGVLSFSLDHDALLMQLKDSFSNETDVVYVGSLKVQVDPGEQDQVAQKLLREYRCIPTFLPSDLQQQFYHGFCKQQLWPLFHYMLPICLDKGELFDRSLFQAYVRANKLFADKVMEAINADDDFVWVHDYHLMLLPTFLRKRLHRIKIGFFLHSPFPSSEIYRTLPVRDEILKSLLNADLIGFQTFDYARHFLSCCSRLLGLHYESKRGYIGIEYFGRTVSLKILSVGVHIGRLESVLKLPATVSKVQEIEQRYKGKILMLGVDDMDIFKGISLKFLGLELLLDRNPKLREKVVLVQIINPARSTGKDVQEAITEAVSVAERINTNYGSSSYKPVVLIDHHIPFYEKIAFYAASDCCIVNAVRDGMNLVPYEYTVCRQGNEEIDKLRGLGKDTHHTSTLIVSEFVGCSPSLSGAFRVNPWSVDDVADALCRATDLTESEKRLRHEKHYRYVSTHDVAYWARSFAQDLERACKDHYSRRCWAIGFGLNFRVIALSPGFRKLSSEHFVSSYNKASRRAIFLDYDGTLVPQSSINKAPSEEVISVLNTLCNDPKNIVFIVSGRGRDSLDEWFSPCEKLGLAAEHGYFIRWSKEAAWESSYSRPQQEWKHIAEPVMQVYTETTDGSSIESKESALVWHYLDADHDFGSFQAKELQGHLERVLSNEPVVVKCGHYIVEVKPQGVSKGLAVNKLIHTLVKNGKAPDFLMCVGNDRSDEDMFESINSMTSNAVLSPTTPELFACSVGQKPSKAKYYVDDTSEVIRLLKNVTRIPSQRQDVSASHGRVTFRGVLDYVD

SEQ ID NO: 1602 - protein, 385 aa, Emericella nidulans
ALFTFSDGRYCGANLDRNGLRPCRFYVTDDDRIICASEVGAVDIDQERVVQKGRLQPGKMLLVDTVAGRIIDDSELKYTVAHRHDFSRWLKKELVKLPAITEKLVEQNMDLRHDLDNTTVQNDPRLKAFGYSFEQVTLLLGPMGADSKEALGSMGNDAPLACIAKQPRLLYEYFRQLFAQVTNPPIDPIREAVVMSLECYVGPQGNLLEMDPSQCRRLLLPSPILSIPEFNALKNINTVHKDWTVRLIDITFEKKKGVPGYIEALDRICDAATEAIQQGDKILILSDRATSADRVPVSALLATGLVHHHLVRNKWRSLAALIVETAEAREVHHMCVLVGYGADGINPYLAMECILKMNREKLIRKELSDEKVIENYRASCDGGIL

SEQ ID NO: 1603 - protein, 383 aa, Methanothermobacter thermautotrophicus str. Delta H; identical to SEQ ID NO: 1084

SEQ ID NO: 1604 - protein, 235 aa, Nepenthes boschiana
  misc_feature (7)..(7): Xaa can be any naturally occurring amino acid
  misc_feature (77)..(77): Xaa can be any naturally occurring amino acid
  misc_feature (109)..(109): Xaa can be any naturally occurring amino acid
  misc_feature (185)..(185): Xaa can be any naturally occurring amino acid
  misc_feature (208)..(208): Xaa can be any naturally occurring amino acid
  misc_feature (220)..(220): Xaa can be any naturally occurring amino acid
LIVWVQXNLGWALGFGIPAISMGIAIASFFSGTALYRLQKPGGSPLTRMCQVLVASFRKSKLALPEDSNLLYETSDXNSVIEGSRKLEHTNELKCLDKAAVVSDKEIKXEDFSNPWRLCTVTQIEELKILIRMFPIWATGIVFSAIYAQMSTMFVEQGEVMDRTIGSFTIPAASLSMFDTISVIXWVPVYDKILVPLARKFTGKQRGXSELQRMGIGLFXSILSMAAAALVEMKR

SEQ ID NO: 1605 - protein, 235 aa, Nepenthes burbidgeae
  misc_feature (39)..(39): Xaa can be any naturally occurring amino acid
  misc_feature (138)..(138): Xaa can be any naturally occurring amino acid
  misc_feature (211)..(211): Xaa can be any naturally occurring amino acid
LIVWVQENLGWALGFGIPAISMGIAIASFFSGTALYRLXKPGGSPLTRMCQVLVASFRKSKLALPEDSNLLYETSDENSVIEGSRKLEHTNELKCLDKAAVVSDKEIKREDFSNPWRLCTVTQIEELKILIRMFPIWXTGIVFSAIYAQMSTMFVEQGEVMDRTIGSFTIPAASLSMFDTISVIFWVPVYDKILVPLARKFTGKQRGFSEXQRMGIGLFIAILSMAAAALVEMKR

SEQ ID NO: 1606 - protein, 1535 aa, Acidobacteria bacterium Ellin345; identical to SEQ ID NO: 1091

SEQ ID NO: 1607 - protein, 680 aa, Triticum aestivum
  misc_feature (186)..(186): Xaa can be any naturally occurring amino acid
  misc_feature (509)..(509): Xaa can be any naturally occurring amino acid
DYVWVHDYHLMALPTFLRRRFNRLRIGFFLHSPFPSSEIYRTLPVREEILKALLNCDLIGFHTFDYARHFLSCCSRMLGIEYQSKRGYIGLEYFGRTVGIKIMPVGIHMDQLQAVLCLPDRQWRVSELQQQFEGKTVLLGVDDMDIFKGINLKLLAFENMLRTHPKWQGRAVLVQIAKPVRGKGKXDLEAIEAEIRESYNRINGEFGRSGYSPVVFIDRDVSSVEKSAYYTIAECVVVTAVRDGMNLTPYEYIVCRQGTPRSESSSEVTGPKKSMLVVSEFIGCSPSLSGAIRVNPWNVEATAEAMNEAISMSDQEKQLRHEKHYRYVSTHDVAYWSKSFIQDLERACKDHFRRTCWGIGLGFGFRVVALDPHFTKLNMDSIVMAYERSESRAIFLDYDGTLVPQTSINKTPSAEVLRIINTLCSDERNIVFIVSGRGRDKLGEWFSSCPKLGIAAEHGYFLRWSRDDEWQTCAQASDFGWMEMAEPVMNLYTESTDGSYIENKESALXVWHHQDADPGFGSSQAKEMLDHLESVLANEPVSVKSGQYIVEVKPQGVSKGVIAENILISMKERGKQADFVLCIGDDRSDEDMFENIADIIKRGMVAPKTPLFACTVGQKPSKAKFYLDDTFEVATMLSALAEATDPEPMTGYTDELATSMSSIDIGGEQSQSRGRPFDGL

SEQ ID NO: 1608 - protein, 249 aa, Glycine max; identical to SEQ ID NO: 1094

SEQ ID NO: 1609 - protein, 914 aa, Zea mays
MMSRSYTNLLDLAEGNFAALGPAAGAGGGGRQRQGSFGLRRMSRVMTVPGTLSELDGEDESEPAATSSVASDAPSSVAADRLIVVSNQLPIVARRRPDGRGWSFVWDDDSLLLQLRDGIPEDMEVLFVGSLRADVPVAEQDEVSQALLDRFRCAPVFLPDRLNDRFYHGFCKRQLWPLFHYMLPFSSSASAAGTTSSSVATSSPGNGRFDRSAWEAYVLANKFFFEKVVEVINPEDDYVWVHDYHLMALPTFLRRCFNRLRIGFFLHSPFPSSEIYRTLPVREEILKALLNCDLIGFHTFDYARHFLSCCSRMLGIEYQSKRGYIELDYFGRTVGIKIMPVGVHMGQLESGLRLPDREWRLSELQRQFQGKTVLLGVDDMDIFKGINLKLLAFENMLRTHPKWQGRAVLVQIANPARGRGKDLEAIQAEIEESCQRINGDFGQSGYSPVVFIGRDVSSVEKIAYYTIAECVVVTAVRDGMNLTPYEYVVCRQGAPGSQSVSEVSGPKKSMLVVSEFIGCSPSLSGAIRVNPWNIEATAEAMNEAISMPEQEKQLRHEKHYRYVRSHDVAYWSKSFIIDLERVCKDHFKRTCWGIGLGFGFRVVALDPHFTKLNMDSIINAYELSESRAILLDYDGTLVPQTSLNKEPSPQVLSIINTLCSDSRNIVFLVSGRDKDTLGKWFSSCPRLGIAAEHGYFLRWSREEEWQTCTQALDFGWMQMAKPVMNLYTEATDGSYIEAKESALVWHHQDADLGFGSSQAKEMLDHLESVLANEPVSVKSGQFIVEVKPQGISKGIVAERILASVKERGKQADFLLCIGDDRSDEDMFENIADIIGRNLVAPRTALFACTVGQKPSKAKFYLDDTFEVVTMLSALADATGPELETDSADESVAYISSLDIGDEQSESSDKPVEGS

SEQ ID NO: 1610 - protein, 511 aa, Picea sitchensis
MSGAGQAVDQIPFSKMESIPKTQQDNRRAECCNPVRNSGEASLEHVMLALRETKEERELRIRCLFNFFDAMNSGHLDNSQIERGLQALRIPAEYKYAKDLLNVCDSNQDGRVEYQEFRRYMDDKELELYRIFQAIDVEHNGCILPEELWEALVKAGIEMSDEELARFVEHIDKDNNGIITFEEWRDFLLLYPHEATIENIYRYWERVCPIDIGEQAVIPEGINRHTHASNYLIAGGVAGALSRTATAPLDRLKVILQVQTSGAHVIPAINNIFREGGLKGFFRGNGINVLKVAPESAIKFFAYEMMKNFVVNINGEEKEDIGAFGRLFAGGTAGAIAQAVIYPMDLVKTRLQTYTCEGGKVPKLSKLSKDIWVHEGPRAFYRGLLPSLLGMIPYAGIDLAVYETLKDMSRQYMLKDKDPGPIVQLGCGTVSGALGATCVYPLQLIRTRLQAQSMNSPSRYKGMSDVFWKTLQHEGFSGFYKGLFPNLLKVAPAASITYLVYEKMKKVLQLD

SEQ ID NO: 1611 - protein, 435 aa, Nicotiana tabacum
MLINGFIYLKDWANAFAIFEDVIRDGLKPDVVLYNNIIRAFCGMGNMDRALRIVEQMKKERHRPTSRTFMPIIHAFAKAGAIRKALDVFDMMRRSGCIPTVQTYNALILGLVEKRQMDKAVEVVDEMLLAGIRPNERTYTTIMDGYASLGDTGKAFEYFSRIKDEGLELDVYTYEALLKACCKSGRIESALAVTKEMNAKNIPRNTFVYNILIDGWARRSDVWEAADLMQQMRQEGVQPDIHTYTSFVNACCKAGDMQKAMNTIQEMKRVGLNPMLKPIPLSYTVGHASLPEKALKCFEEMKKSGLKPDKAVYHCLMTSLLSRATVAEDYIITGIHRVCEEMVESGLTVDMGTAVHWSRCLRKIERTGGDITEALQKTFPPDWNSHRNLNAASYDTGNNEGLNDRVTTMVLCMRLTVTATVTMIQMPPRCNQKVA

SEQ ID NO: 1612 - protein, 760 aa, Arabidopsis thaliana
MSTAAAARPVAGTGLREKTAASLVNSFRLASVTQRLRYHIQDGAKVDPKEFQICCISFAKGIDFAIANNDIPKKVEEFPWLLKQLCRHGTDVYTKTALMVLMISVKHACHLGWFSDSESQELIALADEIRTCFGSSGSTSPGIKSPGSTFSQIMERFYPFVKLGHVLVSFEVKAGYTMLAHDFYISKNMPHSLQEKIRLFVAQTDNIDTSACISNPPEVSFLLNGKGVEKRVNIAMDTGPQLPTNVTAQLKYGTNLLQVMGNFKGNYIIIIAFTGLVVPPEKPVLKDYLQSGVIEASPDSDIIEGPSRVSLSCPISRKRIKLPVKGQLCKHLQCFDFSNYVHINMRNPTWRCPHCNQPVCYPDIRLDQNMAKILKDVEHNAADVIIDAGGTWKVTKNTGETPEPVREIIHDLEDPMSLLNSGPVVFDLTGDDDAELEVFGDNKVEDRKPCMSDAQGQSNNNNTNKHPSNDDYSSIFDISDVIALDPEILSALGNTAPQPHQASNTGTGQQYSNLSQIPMSIDPMPVPVPFSQTPSPRDRPATTSTVFTIPNPSPQYSQVHASPVTPTGTYLGRTTSPRWNQTYQSQAPPMTTPYTSRKVSVPVTSQSPANVSSFVQSQHVPRVLSQPNNYGVRGLTSSHASTSRQHPSGPTVQSVSRLSDLVDVDLTVPDTSNWRPRMRGSLVPGSHSTALDHMIIRPSQQSQTSTRLNSSQPVQTPSVQTSQAQSPFTTAAYRTETVLGNRNHPVPAPPGIVRPTGPTS

SEQ ID NO: 1613 - protein, 1448 aa, Klebsiella pneumoniae subsp. pneumoniae MGH 78578; identical to SEQ ID NO: 1108

SEQ ID NO: 1614 - protein, 468 aa, Rhizobium leguminosarum bv. viciae 3841
MSRLVVVSNRVPMPAKDGSAAAGGLAVALQAALQERGGIWMGWSGESSGDREPGPLSQLQKGNITYALTDLTDTDVEEYYRGFANRVLWPICHYRLDLAEYGRKEMAGYFRVNRFFAHRLAPMIEPDDIIWVHDYHLIPLAAELRQMGLKNRIGFFLHIPWPPADILVTMPVHEEIMRGLSHYDLVGFQTDYDLQNFAGYLRREGIGDDLGNGLFDSHGRIFKAGAYPIGIETAGFAEFAERAANNIMVQKTRRSVEGRDMIIGVDRLDYSKGIIQRLEAFETFLTSNPAYQNKVTYLQVTPKSRSEVPEYEHMQKMVAEQAGRVNGAIGTVDWVPIRYVNRSISRNVLAGIYRLATIGLVTPLRDGMNLVAKEYVAAQDPDRPGVLVLSRFAGAARELKGALLVNPYDVEGTANAIAKGLSMSLEERRDRWSMMMEHLLSHDVSLWCENFLGDLVLAPELRPEHDPG

SEQ ID NO: 1615 - protein, 326 aa, Physcomitrella patens subsp. patens
MPIPVVPQKKYSAHADKGNIHTWIDAMRAQSPPHYHGDTVEAFDIETTIYNSWLEKHPSALSSFDKVIKHAVKKQIVVFLDYDGTLSPIVEDPERAFMSAEMRSTVKDVASCFPTAVISGRSRPKVYDFVQLSELYYAGSHGMDIMGPANGSDGFRGNDVVLFQPAIEYLPLINKVTTALLESTKAIKGSKVENNKYCVSVHFRRVKEELWEALAERVGNVMKDFPTLSLTHGRKVLEVRPSIAWDKGKAVEFLLKSLGFKDTSDVIPIYLGDDKTDEDAFKMVNTTKYGCSILVSSVVKPTEAKFSLRDPLEVMEFLRRLVDWKK

SEQ ID NO: 1616 - protein, 228 aa, Nepenthes stenophylla
  misc_feature (4)..(4): Xaa can be any naturally occurring amino acid
  misc_feature (6)..(6): Xaa can be any naturally occurring amino acid
  misc_feature (8)..(8): Xaa can be any naturally occurring amino acid
  misc_feature (14)..(14): Xaa can be any naturally occurring amino acid
  misc_feature (22)..(22): Xaa can be any naturally occurring amino acid
  misc_feature (30)..(33): Xaa can be any naturally occurring amino acid
  misc_feature (42)..(42): Xaa can be any naturally occurring amino acid
  misc_feature (106)..(106): Xaa can be any naturally occurring amino acid
  misc_feature (113)..(113): Xaa can be any naturally occurring amino acid
  misc_feature (131)..(131): Xaa can be any naturally occurring amino acid
  misc_feature (178)..(178): Xaa can be any naturally occurring amino acid
  misc_feature (181)..(181): Xaa can be any naturally occurring amino acid
  misc_feature (187)..(187): Xaa can be any naturally occurring amino acid
  misc_feature (190)..(190): Xaa can be any naturally occurring amino acid
  misc_feature (194)..(194): Xaa can be any naturally occurring amino acid
  misc_feature (196)..(203): Xaa can be any naturally occurring amino acid
  misc_feature (218)..(218): Xaa can be any naturally occurring amino acid
  misc_feature (220)..(220): Xaa can be any naturally occurring amino acid
  misc_feature (224)..(224): Xaa can be any naturally occurring amino acid
NVGXAXGXGIPAIXMGIAIASXFSGTALYXXXXPGGSPLTRXCQVLVASFRKSKLALPEDSNLLYETSDENSVIEGSRKLEHTNELKCLDKAGVVSDKEIKREDFXNPWRLCXVTQIEELKILIRMFPIWXTGIVFSAIYAQMSTMFVEQGEVMDRTIGSFTIPADSLSMFDTISVIXWVXVYDKIXVPXARKXTXXXXXXXXLQRMGIGLFISILSXAXAALXEMKR

SEQ ID NO: 1617 - protein, 491 aa, Candida glabrata CBS 138
MTQIDKKEVSGNIIVVSNRLPVTISKDDTGKYQYKMSSGGLVTALQGLKKTATFKWYGWPGLEIPDDEKEQVKQDLLEQFNAVPVFLSDEVADLHYNGFSNSILWPLFHYHPGEINFDENAWLAYNEANRAFAEVIFETMQDDDLIWVHDYHLMLLPQMLQEEITKRKLRNVKLGWFLHTPFPSSEIYRILPVRQEILRGVLSCDLLGFHTYDYARHFLSSVQRVLNVNTLPNGVEYQGRFVNVGAFPIGIDVSTFQDGLLKQQVKDRISQLKETFKGQKIIIGVDRLDYIKGVPQKLHAMEVFLSEHPEWRGKVVLVQVAVPSRGDVEEYQYLRSVVNELVGRINGQFGTAEFVPIHFMHKSVPFEELISLYAVSDVCLVSSTRDGMNLVSYEYIACQEETKGSLILSEFAGAAQSLNGAIIVNPWNIDEMSDAINEALTLPEVKREVNWEKLFKYISKYTSAFWGENFVHELYNTSSSSGSIKSSEEKH

SEQ ID NO: 1618 - protein, 231 aa, Nicotiana benthamiana
MAPKEKGTAAGKVNGVSKEVHYRGVRKRPWGRYAAEIRDPGKKSRVWLGTFDTAEDAARAYDAAAREFRGTKAKTNFLVLEQENVKLANGNRSPSYSSTVENSPPVMPENSPPAVILDTSPLDLSLGGSGSLFSNGVGRFHMYYLEAVQREQVISSYKKSCRTTAEFIAGCGGGASGESDCRTTAEFIAGCGGGASGESDSSSVIDFMGHDLKPTTRPINLDLNLPPPENM

SEQ ID NO: 1619 - protein, 235 aa, Nepenthes thorelii
  misc_feature (7)..(7): Xaa can be any naturally occurring amino acid
  misc_feature (39)..(39): Xaa can be any naturally occurring amino acid
LIVWVQXNLGWALGFGIPAISMGIAIASFFSGTALYRLXKPGGSPLTRMCQVLVASFRKSKLALPEDSNLLYETSDENSVIEGSRKLEHTNELKCLDKAAVVSDKEIKFEDFSNPWRLCTVTQIEELKILIRMFPIWATGIVFSAIYAQMSTMFVEQGEVMDRTIGSFTIPAASLSMFDTISVIFWVPVYDKILVPLARKFTGKQRGFSELQRMGIGLFISILSMAAAALVEMKR

SEQ ID NO: 1620 - protein, 235 aa, Alexandrium fundyense
MCILRNGRAGERYDEMASHMEAVGKVNEELSVEERNLLSVAYKNAVGSRRAAWRIITSVEQKEKTKGNEEQAKYAKEYCAKVEAELQRICDTILGLLDGNLITKASSGESKVLYQKMKADYYRYIAEFSDGDKKSKAAESARLAYEDASKVAEKDLAVTHPIRLGLALNYSVFQYEVLSNPDEACKMARTAFEDAIAELDNVAEDSYKDSTLIMQLLRDNLTLWTSDQEPGEGAQ

SEQ ID NO: 1621 - protein, 234 aa, Nepenthes tobaica
  misc_feature (1)..(3): Xaa can be any naturally occurring amino acid
  misc_feature (16)..(16): Xaa can be any naturally occurring amino acid
  misc_feature (19)..(19): Xaa can be any naturally occurring amino acid
  misc_feature (25)..(27): Xaa can be any naturally occurring amino acid
  misc_feature (37)..(38): Xaa can be any naturally occurring amino acid
  misc_feature (53)..(53): Xaa can be any naturally occurring amino acid
  misc_feature (58)..(58): Xaa can be any naturally occurring amino acid
  misc_feature (65)..(66): Xaa can be any naturally occurring amino acid
  misc_feature (68)..(69): Xaa can be any naturally occurring amino acid
  misc_feature (76)..(77): Xaa can be any naturally occurring amino acid
  misc_feature (84)..(84): Xaa can be any naturally occurring amino acid
  misc_feature (135)..(135): Xaa can be any naturally occurring amino acid
  misc_feature (137)..(137): Xaa can be any naturally occurring amino acid
  misc_feature (193)..(193): Xaa can be any naturally occurring amino acid
  misc_feature (198)..(198): Xaa can be any naturally occurring amino acid
  misc_feature (201)..(201): Xaa can be any naturally occurring amino acid
  misc_feature (203)..(203): Xaa can be any naturally occurring amino acid
  misc_feature (207)..(207): Xaa can be any naturally occurring amino acid
  misc_feature (218)..(218): Xaa can be any naturally occurring amino acid
  misc_feature (220)..(220): Xaa can be any naturally occurring amino acid
  misc_feature (224)..(225): Xaa can be any naturally occurring amino acid
  misc_feature (233)..(233): Xaa can be any naturally occurring amino acid
XXXVQENLGWALGFGXPAXSMGIAXXXFFSGTALYTXXKPGGSPLTRMCQVLXASFRXSKLALPXXRXXLYETSDXXSVIEGSXKLEHTNELKCLDKAAVVSDKEIKCEDFSNPWRLCTVTQIEELKILIRMFPXWXTGIVFSAIYAQMSTMFVEQGEVMDRTIGSFTIPAGSLSMFDTISVIFWVPVYDKIXVPLAXKFXGXQRGXSELQRMGIGLXIXILSXXAAALVEMXR

SEQ ID NO: 1622 - protein, 886 aa, Vitis vinifera
  misc_feature (182)..(182): Xaa can be any naturally occurring amino acid
  misc_feature (432)..(432): Xaa can be any naturally occurring amino acid
  misc_feature (663)..(663): Xaa can be any naturally occurring amino acid
MMSRSYTNLLDLATGNFPAIGRERKRLPRVMTVPGNVYELDDDQANSVSSDNPSSVAQDRLIIVANQLPVKANRRADDRGWVFSWNEDSLLLQLKEGLPEDMEVLYVGSLRVDVDLEEQEEVSQILLETFKCVPTFLPHDVLEKFYHGFCKKLLWPLFHYMLPFSADHGGRFDRSMWEAYVXANKLFSQKVIEVINPDDDYVWIHDYHLMVLPTFLRRHFNQLRMGFFLHSPFPSSEIYRTLPVREEILKALLNSDLIGFHTFDYARHFLSCCSRMLGLEYQSKRGYIGLEYYGRTVGIKIMPVGIHMGRIASVMKLADKQKKVGELKQQFEGKTVLLGVDDMDIFKGINLKLLAMEQLLQQHSKWQGKAVLVQIANPARGKGADLEEIQAEIRESCRRINEEFGEPGYEPIVFVDRPVSISERIAYYSIAXCVVVTAVRDGMNLTPYEYIVCRQGTDDSESSSDLSGPKKSMLVLSEFIGCSPSLSGAIRVNPWNVEATAEAMNEAISMSQSEQLLRHEKHFRYVSTHDVAYWSRSFLQDMERTCSEHFRRRCWGIGLSFGFRVVALDPNFRKLSMEAIVSAYCRAKSRAILLDYDGTVMPQNSINKAPSQEVISILNTLCWDKKNTVFIVSGRGRDNLSQWFSPCRKLGLAAEHGYFLRWXQDKEWETCGQSSDFGWKQIAEPVMKLYTETTDGSSIESKESALVWQYGDADPGFGSSQAKEMLDHLESVLANEPVAVKSGHFIVEVKPQGVSKGLAAEKIFTTMTENGKQADFLLCIGDDRSDEDMFEIIGSAMSTNILSANTSLFACTVGQKPSKAKYYLDDASEVICMLESLAEASDSGPSSEEETQFVLHEANLEEVEEEVNLKSLLEEILRPTVLLSQF

SEQ ID NO: 1623 - protein, 1535 aa, Synechococcus sp. RS9917; identical to SEQ ID NO: 1121

SEQ ID NO: 1624 - protein, 235 aa, Nepenthes densiflora
  misc_feature (55)..(55): Xaa can be any naturally occurring amino acid
  misc_feature (138)..(138): Xaa can be any naturally occurring amino acid
  misc_feature (185)..(185): Xaa can be any naturally occurring amino acid
  misc_feature (220)..(220): Xaa can be any naturally occurring amino acid
LIVWVQENLGWALGFGIPAISMGIAIASFFSGTALYRLQKPGGSPLTRMCQVLVXSFRKSKLALPEDSNLLYETSDENSVIEGSRKLEHTNELKCLDKAAVVSDKEIKYEDFSNPWRLCTVTQIEELKILIRMFPIWXTGIVFSAIYAQMSTMFVEQGEVMDRTIGSFTIPAASLSMFDTISVIXWVPVYDKILVPLARKFTGKQRGFSELQRMGIGLFXSILSMAAAALVEMKR

SEQ ID NO: 1625 - protein, 235 aa, Nepenthes diatas
  misc_feature (7)..(7): Xaa can be any naturally occurring amino acid
  misc_feature (39)..(39): Xaa can be any naturally occurring amino acid
  misc_feature (55)..(55): Xaa can be any naturally occurring amino acid
  misc_feature (136)..(136): Xaa can be any naturally occurring amino acid
  misc_feature (138)..(138): Xaa can be any naturally occurring amino acid
  misc_feature (220)..(221): Xaa can be any naturally occurring amino acid
LIVWVQXNIGWALGFGIPAISMGIAIASFFSGTALYRLXKPGGSPLTRMCQVLVXSFRKSKLALPEDSNLLYETSDGNSVIEGSRKLEHTNELKCLDKAAVVSDKEIKCEDFSNPWRLCTVTQIEELKILIRMFPXWXTGMVFSAIYAQMSTMFVEQGEVMDRTIGSFTIPAASLSMFDTISVIFWVPVYDKILVPLARKFTGKQRGFSELQRMGIGLFXXILSMAAAALVEMKR

SEQ ID NO: 1626 - protein, 134 aa, Glycine max
VGTMLSHEVTKLYHLAGLPNDTIHIRFTGSAGQSFGAFLCPGITLELEGDSNDYVGKGLSGGKIVVYPPKESNFDPKENIVIGNVALYGATRGEAYFNGMAAERFCVRNSGAKAVVEGVGDHGCEYMTGGTVVV

SEQ ID NO: 1627 - protein, 1494 aa, Campylobacter upsaliensis RM3195; identical to SEQ ID NO: 1124

SEQ ID NO: 1628 - protein, 415 aa, Triticum aestivum
  misc_feature (236)..(236): Xaa can be any naturally occurring amino acid
  misc_feature (280)..(280): Xaa can be any naturally occurring amino acid
FLHQRRPSRPDRGFLVWDGGDAPQRKSMLVVSEFIGCSPSLSGASRVNPWNIDTTAEAMNESIALSENENQLRHEKHYRYVCTHDVAYWSKSYIHDLERSCRDHFRRRCWGIGLGFGFRVVALDRNFKKLTVDSIVADYKKSNSRVILLDYDGTLVPQTTINRTPNETVVNIMNALCADKKNVVFIVSGRGRSSLEKWFNSCPELGIAAEHGYFMRRTRDEQWQINNQCSEFGWMXMAEPVMNLYTEATDGSYIETQESALVWHHQDADPGFGSAQAKEXMLDHLESVLANEPVSVKSGQHIVEVKPQSVSKGFVAEKILSMLTEKKRQADFVLCIGDDRSDEDMFEGIADIMRRSIVDPQTSLYACTVGQKPSKAKYYLDDTNDVLNMLEALADVSEEVGSPEESEILSPSEGA

SEQ ID NO: 1629 - protein, 525 aa, Staphylococcus aureus subsp. aureus MW2; identical to SEQ ID NO: 1125

SEQ ID NO: 1630 - protein, 94 aa, Azospirillum brasilense
LQQAVTNDSYTTFKKYSEQVNKRPPMQLRDLLELRSTKAPVPVDEVESITAIRKRFITPGMSMGALSPEAHGTLNVAMNRIGAKSDSGEGGEDP

SEQ ID NO: 1631 - protein, 151 aa, Azospirillum brasilense
MTTELNQGEQFVADFRANAAALTTANAYNPEDEHDACGVGFIAAIDGKPRRSVVEKGIEALKAVWHRGAVDADGKTGDGAGIQRRVPQKFFKDHVKVIGHRAPDNKLAVGQVFLPRISLDAQEACRCIVETEILRFGYYIYGWRQVPINVD

SEQ ID NO: 1632 - protein, 1444 aa, Arabidopsis thaliana
MEAEKSKQNPGKKPVEATMEHVLVALRETKEKREIRIQKLFEFFDNSKLGFLDDTQIEKGLSSLSIPPKYRYASDFLKVCDSNRDGRVDYQEFRRYMDAKELELYKIFQAIDIEHNGDICPAELWEALDKADSQRINNVCHSFDIALVCKTVGCIKIKDEELASFMEHVDKDNNGIITFEEWRDFLLLNPHEATIENIYHHWERVCLIDIGEQAVIPDGISAHAQRSKLLLAGGIAGAVSRTATAPLDRLKVALQVQRTNLGVVPTIKKIWREDKLLGFFRGNGLNVAKVAPESAIKFAAYEMLKPIIGGADGDIGTSGRLLAGGLAGAVAQTAIYPMDLVKTRLQTFVSEVGTPKLWKLTKDIWIQEGPRAFYRGLCPSLIGIIPYAGIDLAAYETLKDLSRAHFLHDTAEPGPLIQLGCGMTSGALGASCVYPLQVIRTRMQADSSKTSMGQEFLKTLRGEGLKGFYRGIFPNFFKLCRTLKHLHQFHAQFITSGRISNDFKQNSVFANVLFAITSISPSASASKEVVSYATSVFRFITNPSTFCFNTIIRICTLHEPSSLSSKRFFVEMRRRSVPPDFHTFPFVFKACAAKKNGDLTLVKTLHCQALRFGLLSDLFTLNTLIRVYSLIAPIDSALQLFDENPQRDVVTYNVLIDGLVKAREIVRARELFDSMPLRDLVSWNSLISGYAQMNHCREAIKLFDEMVALGLKPDNVAIVSTLSACAQSGDWQKGKAIHDYTKRKRLFIDSFLATGLVDFYAKCGFIDTAMEIFELCSDKTLFTWNAMITGLAMHGNGELTVDYFRKMVSSGIKPDGVTFISVLVGCSHSGLVDEARNLFDQMRSLYDVNREMKHYGCMADLLGRAGLIEEAAEMIEQMPKDGGNREKLLAWSGLLGGCRIHGNIEIAEKAANRVKALSPEDGGVYKVMVEMYANAERWEEVVKVLYESFDEPFDGRWIVSKNSDYEGVWKHAKSEGHEDYGLLVSEKARKYGIVKELDEPLNLKEGTVVLQYEVRFQEGLECGGAYLKYLRPQEAGWTPQGFDSESPYSIMFGPDKCGGTNKVHFILKHKNPKSGEYVEHHLKFPPSVPYDKLSHVYTAILKPDNEVRILVDGEEKKKANLLSGEDFEPALIPAKTIPDPEDKKPEDWDERAKIPDPNAVKPEDWDEDAPMEIEDEEAEKPEGWLDDEPEEVDDPEATKPEDWDDEEDGMWEAPKIDNPKCEAAPGCGEWKRPMKRNPAYKGKWSSPLIDNPAYKGIWKPRDIPNPDYFELDRPDYEPIAAIGIEIWTMQDGILFDNILIAKDEKVAETYRQTTWKPKFDVEKEKQKAEEEAAGSADGLKSYQKVVFDLLNKVADLSFLSAYKSKITELIEKAEQQPNLTIGVLVAIVVVFFSLFLKLIFGGKKAAAPVEKKKPEVAESSKSGDEAEKKEETAAPRKRQPRRDN

SEQ ID NO: 1633 - protein, 243 aa, Arabidopsis thaliana
MYGQCNIESDYALLESITRHLLGGGGENELRLNESTPSSCFTESWGGLPLKENDSEDMLVYGLLKDAFHFDTSSSDLSCLFDFPAVKVEPTENFTAMEEKPKKAIPVTETAVKAKHYRGVRQRPWGKFAAEIRDPAKNGARVWLGTFETAEDAALAYDIAAFRMRGSSALLNFPLRVNSGEPDPVRITSKRSSSSSSSSSSSTSSSENGKLKRRRKAENLTSEVVQVKCEVGDETRVDELLVS

SEQ ID NO: 1634 - protein, 242 aa, Alexandrium fundyense
MVSRDKEVYFAKLAEQAERYDEMASHMEAVGNVHEELTIEERNLLSVAYKNAVGSRRAAWRIITSVEQKEKTKGNEEQAKYAREYCAKVEAELQTICDTILGLLDGNLITKASTGESKVFFQKMKADYYRYIAEFSDSDKKSKAAESARLAYEDASKVAEKDLAVTHPIRLGLALNYSVFQYEVLSNPDEACKMARTAFEDAIAELDNVAEDSYKDSTLIMQLLRDNLTLWTSDQEPGEGAQ

SEQ ID NO: 1635 - protein, 144 aa, Zea mays
RVIHIIQEDWGAYQQANTLFAKAITEIVRDGDLVWVQDYHLMLLPRLLREEVHNQRESDQPVKNIKIGFFLHTPFPSSEVYRILPVRKEILLGVLNSDLIGFHTYDYARHFLSSCTRILGLSTMPNGGRLLTGPYAQVRHPSPL

SEQ ID NO: 1636 - protein, 241 aa, Alexandrium fundyense
MASRDKDVYFAKLAEQAERYDEMASHMEAVGKVNEELSVEERNLLSVAYKNAVGSRRAAWRIITSVEQKEKTKGNEEQAKYAKEYCAKVEAELQRTCDTILGLLDGNLITKASSGESKVFYQKMKADYYRYIAEFSDGDKKSKAAESARLAYEDASKVAEKDLAVTHPIRLGLALNYSVFQYEVLSNPDEACKMARTAFEDAIAELDNVAEDSYKDSTLIMQLLRDNLTLDLRPEPGEGAQ

SEQ ID NO: 1637 - protein, 97 aa, Triticum aestivum
VALKVYRRMTHERCSPDTFTHLSVIRACIWGSLWDEVEDILEEVAPDSSIYNTVIHGLCLRDKIRLARRVYTKMRSIGLTPDGKTRSFMLQHITSAE

SEQ ID NO: 1638 - protein, 85 aa, Carica papaya
SPKYNVCRQGVSGAESSESSGPKKSMLVVSEFIGCSPSLSGAIRVNPWNVESTAEAMNEAISMADAEKQLRHEKHYRYVSTLLSQ

SEQ ID NO: 1639 - protein, 242 aa, Alexandrium fundyense
MASRDKEVYFAKLAEQAERYDEMASHMEAVGKVNEELSVEERNLLSVAYKNAVGSRRAAWRIITSVEQKEKTKGNEEQAKYAKEYCAKVEAELQKICDTILGLLDGNLITKASTGESKVFFQKMKADYYRYIAEFSDGDKKSKAAESARLAYEDASKVAEKDLAVTHPIRLGLALNYSVFQYEVLSNPDEACKMARTAFEDAIAELDNVAEDSYKDSTLIMQLLRDNLTLWTSDQEPGEGAQ

SEQ ID NO: 1640 - protein, 2188 aa, Oryza sativa Japonica Group; identical to SEQ ID NO: 1141

SEQ ID NO: 1641 - protein, 242 aa, Alexandrium fundyense
MVSRDKEVYFAKLAEQAERYDEMASHMEAVGKVNEELSVEERNLLSVAYKNAVGSRRAAWRIITSVEQKEKTKGNEEQAKYAKEYCAKVEAELQKICDTILGLLDGNLITKASTGESKVFFQKMKADYYRYIAEFSDGDKKSRAAESARLAYEDASKVAEKDLAVTHPIRLGLALNYSVFQYGVLSNPDEACKMARTAFEDAIAELDNVAEDSYKDSTLIMQLLRDNLTLWTSDQEPGEGAQ

SEQ ID NO: 1642 - protein, 285 aa, Lotus japonicus
MHGESTYDSDLAILESIRRHLLGESDICIFGAPISNSGNPPVYVRSSSFSKLYPCLTDNWGELPLKEDDSEDMMLYGVLRDAVNEGWVPSLDSSGFLPVKSEPELFPAVQSPPERVVPAPVIPKEEVMPAAAPAKGKHYRGVRQRPWGKFAAEIRDPAKNGARVWLGTFETAEDAALAYDRAAYRMRGSRALLNFPLRVNSGEPDPVRVPSKRSLSSSSSCSSSSSSESGLTAKRRKKVVGPTVPVVTAQVGLKTEQVEESSCKVHTWRTVIGELKADVECNLLM

SEQ ID NO: 1643 - protein, 235 aa, Nepenthes ephippiata
  misc_feature (7)..(7): Xaa can be any naturally occurring amino acid
  misc_feature (39)..(39): Xaa can be any naturally occurring amino acid
LIVWVQXNVGWALGFGIPAISMGIAIASFFSGTALYRLXKPGGSPLTRMCQVLVASFRKSKLALPEDSNLLYETSDENSVIEGSRKLEHTNELKCLDKAAVVSDKEIKREDFSNPWRLCTVTQIEELKILIRMFPIWATGIVFSAIYAQMSTMFVEQGEVMDRTIGSFTIPAASLSMFDTISVIFWVPVYDKILVPLARKFTGKQRGFSELQRMGIGLFISILSMAAAALVEMKR

SEQ ID NO: 1644 - protein, 235 aa, Nepenthes eustachya
  misc_feature (6)..(7): Xaa can be any naturally occurring amino acid
  misc_feature (13)..(13): Xaa can be any naturally occurring amino acid
  misc_feature (15)..(15): Xaa can be any naturally occurring amino acid
  misc_feature (17)..(17): Xaa can be any naturally occurring amino acid
  misc_feature (24)..(24): Xaa can be any naturally occurring amino acid
  misc_feature (34)..(34): Xaa can be any naturally occurring amino acid
  misc_feature (38)..(38): Xaa can be any naturally occurring amino acid
  misc_feature (66)..(66): Xaa can be any naturally occurring amino acid
  misc_feature (185)..(185): Xaa can be any naturally occurring amino acid
  misc_feature (230)..(230): Xaa can be any naturally occurring amino acid
LIVWVXXNLGWAXGXGXPAISMGXAIASFFSGTXLYRXQKPGGSPLTRMCQVLVASFRKSKLALPXDSNLLYETSDGNSVIEGSRKLEHTNELKCLDKAAVVSDKEIKCEDFSNPWRLCTVTQIEELKILIRMFPIWATGIVFSAIYAQMSTMFVEQGEVMDRTIGSFTIPAASLSMFDTISVIXWVPVYDKILVPLARKFTGKQRGFSELQRMGIGLFISILSMAAAAXVEMKR

SEQ ID NO: 1645 - protein, 214 aa, Nepenthes faizaliana
LGFGIPAISMGIAIASFFSGTALYRLQKPGGSPLTRMCQVLVASFRKSKLALPEDSNLLYETSDENSVIEGSRKLEHTNELKCLDKAAVVSDKEIKREDFSNPWRLCTVTQIEELKILIRMFPIWATGIVFSAIYAQMSTMFVEQGEVMDRTIGSFTIPAASLSMFDTISVIFWVPVYDKILVPLARKFTGKQRGFSELQRMGIGLFIAILSMA

SEQ ID NO: 1646 - protein, 699 aa, Arabidopsis thaliana
MDYIGWPGFDVYDEVEKDAVSKSLAEMKCIPVFLNEVFDQYYNGYSNGILWPILHHMGLPQEYDHDTIKTFETQYDAYKKANRMFLDVIKENYKDGDIVWCQDYHLMFLPQYLKEYNNKIKVGWFLHSPFPSSEIYKTLPSRSELLRSVLAADLISFHTYDFARHFVNTCTRILGVEGTHEGVVYQGRVTRVVVLPMGIYPNRFIKTCKLPEVIQQMNELKDRFSGKKVILGVDRLDMIKGIPQKYLGFEKFLDENPNWRDKIVLVQIAVPTRNEVPEYQKLKNQVHRLVGRINGRFGSVSSLPIHHMDCSVDSNYLCALYAISDVMLVTSLRDGLNLVSHEFVACQEAKRGVLILSEFAGAGQSLGAGALLVNPWNVTEVSSAIKKALNMPYEERETRHRVNFKYVKTHSAEKWGFDFLSELNDAFDESELQIRKIPHELPQQDVIQRYSLSNNRLIILNFGEYKIWLAAENGMFLKHTTEEWVTNMPQNMNLDWVDGLKNVFKYFTDRTPRSFFEASKTSLVWNYEYADVEFGRAQARDLLQYLWAGPISNASAEVVRGKYSVEVHAIGVTKEPEIGHILGEIVHKKAMTTPIDYVFCSGYFLEKDEDIYTFFESEILSPKLSHETRSKSSSSNHSLEKKVSLNVLDLKQENYFSTAIGQARTKARYVVDSSHNVVNLLHKLAVANTTTTSVKKPNV

SEQ ID NO: 1647 - protein, 878 aa, Oryza sativa; identical to SEQ ID NO: 1458

SEQ ID NO: 1648 - protein, 235 aa, Nepenthes fusca
  misc_feature (7)..(7): Xaa can be any naturally occurring amino acid
  misc_feature (39)..(39): Xaa can be any naturally occurring amino acid
  misc_feature (77)..(77): Xaa can be any naturally occurring amino acid
  misc_feature (185)..(185): Xaa can be any naturally occurring amino acid
LIVWVQXNVGWALGFGIPAISMGIAIASFFSGTALYRLXKPGGSPLTRMCQVLVASFRKSKLALPEDSNLLYETSDXNSVIEGSRKLEHTNELKCLDKAAVVSDKEIKREDFSNPWRLCTVTQIEELKILIRMFPIWATGIVFSAIYAQMSTMFVEQGEVMDRTIGSFTIPAASLSMFDTISVIXWVPVYDKILVPLARKFTGKQRGFSELQRMGIGLFISILSMAAAALVEMKR

SEQ ID NO: 1649 - protein, 1567 aa, Burkholderia xenovorans LB400; identical to SEQ ID NO: 1156

SEQ ID NO: 1650 - protein, 466 aa, Gibberella zeae PH-1
MASSGLGSITHSTSSQGAGILRQEAAALARQVNRLLNRQLSSVCQVNGVKSTGIKAELQGRIHNLIQEAVNANDPVRLQQIRQSVHNSISNSHASSSPSRTTISHPHGHASTPTFGLPSMSFPSTHSSLSNGQRFGGSQAVTLTFKSSPFYQIEAHVGDVKVCEVMSQHRNTVSYPIRLEDHPYLQKCVDDPSYRVMIFCAGECSGMQEVAFPHQSELKVNGGEVKANLRGLKNKPGSTRPVDITKALRLRPKYTNNVDFTYALTSKAGLSQVRISRQSWHTSPTSQGPQWQCPICYKSATFDQLAVDGYVKDILAKTSKSQETVTIEPNGDWHTKSSEDSNQGQTNGNSSYQGTYDDDDEDDDDLVISEVNPIGHRRLETPKNGTPSINTPGMAGRDSSSAGPRGLASTSAKRPVAAIIDLTLSDDDDDEPAPPPKRQNTSTNGYSGSNGLSGSSPVSPDGLGYQ

SEQ ID NO: 1651 - protein, 539 aa, Nocardioides sp. JS614; identical to SEQ ID NO: 1158

SEQ ID NO: 1652 - protein, 442 aa, Sinorhizobium meliloti 1021; identical to SEQ ID NO: 1164

SEQ ID NO: 1653 - protein, 259 aa, Vigna angularis
MAAAPTPREENVYMAKLAEQAERYEEMVEFMEKVSAAADNEELNVEERNLLSVAYKNVIGARRASWRIISSIEQKEESRGNEDHVTVIRDYRSKIESELSNICDGILKLLDSRLIPSASSGDSKVFYLKMKGDYHRYLAEFKTGAERKEAAESTLAAYKSAQDIANAELPPTHPIRLGLALNFSVFYYEILNSPDRACNLAKQAFDEAIAELDTLGEESYKDSTLIMQLLRDNLTLWTSDMQDDGADEIKEAAPKQDDQ

SEQ ID NO: 1654 - protein, 69 aa, Zea mays
MADWGPVVIATVLFVLLTPGLLFQLPAHGRIVGFGTMHTSGIAILVHAVLYFALITIFLIAIGVHIYAG

SEQ ID NO: 1655 - protein, 270 aa, Schizosaccharomyces pombe
MSNSRENSVYLAKLAEQAERYEEMVENMKKVACSNDKLSVEERNLLSVAYKNIIGARRASWRIISSIEQKEESRGNTRQAALIKEYRKKIEDELSDICHDVLSVLEKHLIPAATTGESKVFYYKMKGDYYRYLAEFTVGEVCKEAADSSLEAYKAASDIAVAELPPTDPMRLGLALNFSVFYYEILDSPESACHLAKQVFDEAISELDSLSEESYKDSTLIMQLLRDNLTLWTSDAEYNQSAKEEAPAAAAASENEHPEPKESTTDTVKA

SEQ ID NO: 1656 - protein, 235 aa, Nepenthes gracilis
  misc_feature (50)..(50): Xaa can be any naturally occurring amino acid
  misc_feature (66)..(66): Xaa can be any naturally occurring amino acid
  misc_feature (80)..(80): Xaa can be any naturally occurring amino acid
  misc_feature (110)..(110): Xaa can be any naturally occurring amino acid
  misc_feature (124)..(124): Xaa can be any naturally occurring amino acid
  misc_feature (129)..(129): Xaa can be any naturally occurring amino acid
  misc_feature (136)..(136): Xaa can be any naturally occurring amino acid
  misc_feature (138)..(138): Xaa can be any naturally occurring amino acid
  misc_feature (167)..(167): Xaa can be any naturally occurring amino acid
  misc_feature (176)..(176): Xaa can be any naturally occurring amino acid
LIVWVQENLGWALGFGIPAISMGIAIASFFSGTALYRLQKPGGSPLTRMXQVLVASFRKSKLALPXDSNLLYETSDENSXIEGSRKLEHTNELKCLDKAAVVSDKEIKCXDFSNPWRLCTVTQXEELKXLICMFPXWXTGIVFSAIYAQMSTMFVEQGEVMDRTIGXFTIPAASLXMFDTISVIFWVPVYDKILVPLARKFTGKQRGFSELQRMGIGLFISILSMAAAALVEMKR

SEQ ID NO: 1657 - protein, 181 aa, Brassica napus
MKKPASVTMDHVLLALRETSEEREVRIRSLFDFFDNSSLGFLDYAQIEKGLASLQIPPEYKYARDLFRVCDANRDGRVDYQEFRRYIDAKELELYRIFQAIDVAHNGCILPEELWEALVKAGIEIDDEELARFVEHVDKDNNGTITFEEWRDFLLLYPHEATIENIYHHWERVCLIDIGEQ

SEQ ID NO: 1658 - protein, 235 aa, Nepenthes hirsuta
  misc_feature (7)..(7): Xaa can be any naturally occurring amino acid
LIVWVQXNLGWALGFGIPAISMGIAIASFFSGTALYRLQKPGGSPLTRMCQVLVASFRKSKLALPEDSNLLYETSDGNSVIEGSRKLEHTNELKCLDKAAVVSDKEIKCEDFSNPWRLCTVTQIEELKILIRMFPIWATGIVFSAIYAQMSTMFVEQGEVMDRTIGSFTIPAASLSMFDTISVIFWVPVYDKILVPLARKFTGKQRGFSELQRMGIGLFISILSMAAAALVEMKR

SEQ ID NO: 1659 - protein, 235 aa, Nepenthes inermis
  misc_feature (39)..(39): Xaa can be any naturally occurring amino acid
LIVWVQENLGWALGFGIPAISMGIAIASFFSGTALYRLXKPGGSPLTRMCQVLVASFRKSKLALPEDSNLLYETSDENSVIEGSRKLEHTNELKCLDKAAVVSDKEIKCEDFSNPWRLCTVTQIEELKILIRMFPIWATGIVFSAIYAQMSTMFVEQGEVMDRTIGSFTIPAASLSMFDTISVIFWVPVYDKILVPLARKFTGKQRGFSELQRMGIGLFIAILSMAAAALVEMKR

SEQ ID NO: 1660 - protein, 234 aa, Nepenthes maxima
  misc_feature (1)..(1): Xaa can be any naturally occurring amino acid
  misc_feature (228)..(228): Xaa can be any naturally occurring amino acid
XGWVQENLGWALGFGIPAISMGIAIASFFSGTALYRLQKPGGSPLTRMCQVLVASFRKSKLALPEDSNLLYETSDENSVIEGSRKLEHTNELKCLDKAAVVSDKEIKREDFSNPWRLCTVTQIEELKILIRMFPIWATGIVFSAIYAQMSTMFVEQGEVMDRTIGSFTIPAASLSMFDTISVIFWVPVYDKILVPLARKFTGKQRGFSELQRMGIGLFISILSMAAAXLVEMKR

SEQ ID NO: 1661 - protein, 916 aa, Zea mays
MPTSSPFVGDSGGAGSPIRVERMVRERSRRYDIFASDAMDTDAEAAFALDGVQSPGRASPANMEDAGGAAAARPPLAGSRSGFRRLGLRGMKQRLLVVANRLPVSANRRGEDHWSLEISAGGLVSALLGVKDVDAKWIGWAGVNVPDEVGQRALTKALAEKRCIPVFLDEEIVHQYYNGYCNNILWPLFHYLGLPQEDRLATTRNFESQFDAYKRANQMFADVVYEHYQDGDVIWCHDYHLMFLPKCLKDHDINMKVGWFLHTPFPSSEIYRTLPSRLELLRSVLCADLVGFHTYDYARHFVSACTRILGLEGTPEGVEDQGRLTRVAAFPIGIDSDRFKRALELPAVKRHVSELTERFAGRKVCPSEKHLQNIINLEDSKNVFWKVMLGVDRLDMIKGIPQKILAFEKFLEENPDWNNKVVLLQIAVPTRTDVPEYVALVTSLRDGMNLVSYEYVACQGSKKGVLILSEFAGAAQSLGAGAILVNPWNITEVADSIRHALTMPSDEREKRHRHNYAHVTTHTAQDWAETFVFELNDTVAEALLRTRQVPPGLPSQMAIQQYLRSKNRLLILGFNSTLTEPVESSGRRGGDQIKEMELKLHPDLKGPLRALCEDERTTVIVLSGSDRSVLDENFGEFKMWLAAEHGMFLRPTYGEWMTTMPEHLNMDWVDSVKHVFEYFTERTPRSHFEHRETSFVWNYKYADVEFGRLQARDMLQHLWTGPISNAAVDVVQGSRSVEVRSVGVTKGAAIDRILGEIVHSENMITPIDYVLCIGHFLGKDEDIYVFFDPEYPSESKVKPEGGSASLDRRPNGRPPSNGRSNSRNPQSRTQKAQQAASERSSSSSHSSTSSNHDWREGSSVLDLKGENYFSCAVGRKRSNARYLLSSSEEVVSFLKELATATAGFQATCADYMHVLG

SEQ ID NO: 1662 - protein, 764 aa, Arabidopsis thaliana
MDSSGTDSAKELHVGLDPTTEEEYATQSKLLQEFINIPSIDKAWIFNSDSGSQAMFALSQANLLANKKKKFMLSGHISNESNQSVNFHWAPFPIEMTGASAFVPSPSGLKLLVIRNPENESPTKFEIWNSSQLEKEFHIPQKVHGSVYVDGWFEGISWDSDETHVAYVAEEPSRPKPTFDHLGYYKKENSLDKGIGSWKGEGDWEEEWGEAYAGKRQPALFVINVDSGEVEPIKGIPRSISVGQVVWSPNSNGSAQYLVFAGWLGDKRKFGIKYCYNRPCAIYAIKFTSDEPKDDDANEFPIHNLTKSISSGFCPRFSKDGKFLVFVSAKTAVDSGAHWATESLHRIDWPSDGKLPESTNIVDVIQVVNCPKDGCFPGLYVTGLLSDPWLSDGHSLMLSTYWRSCRVILSVNLLSGEVSRASPSDSDYSWNALALDGDSIVAVSSSPVSVPEIKYGKKGLDSAGKPSWLWSNIQSPIRYSEKVMAGLSSLQFKILKVPISDVSEGLAEGAKNPIEAIYVSSSKSKENGKCDPLIAVLHGGPHSVSPCSFSRTMAYLSSIGYSQLIINYRGSLGYGEDALQSLPGKVGSQDVKDCLLAVDHAIEMGIADPSRITVLGGSHGGFLTTHLIGQAPDKFVAAAARNPVCNMASMVGITDIPDWCFFEAYGDQSHYTEAPSAEDLSRFHQMSPISHISKVKTPTLFLLGTKDLRVPISNGFQYVRALKEKGVEVKVLVFPNDNHPLDRPQTDYESFLNIAVWFNKYCKL

SEQ ID NO: 1663 - protein, 1530 aa, Oceanobacillus iheyensis HTE831; identical to SEQ ID NO: 243

SEQ ID NO: 1664 - protein, 484 aa, Rubrobacter xylanophilus DSM 9941
MAHSGGVVIVSNRAPVTFSRSGSGERTHSRGAGGLVTALNAVSRRAEGAVWIASAASDEDVRVARESEGPCEVDDLRLVLVEHDAGAYDLMYNRLANPLLWFVQHGLYDLPYAPELGEETLRAWEEGYLPVNRSFARAAAEAISGAEEPVVLLHDYHLYMVPELLREEVGEGPLISFFVHIPWPEPDLWRVLPSYIREGALRSLLRSDIVAFHTRRYARNFMAAASEILGAEADPARGTLRRGGREVWVRSYPISIDPAEFEEVAESPEVRREEEYVRNLPGALLVRVDRTDLSKNIVRGFRAYGRMLELHPEMRGRVTFFAQLQPSRGDIPEYAAYAEAIRRSAEEVNEAHGTPSWRPVELSMQDNFPRSVAAYKNYDALLVNAVRDGMNLVAKEAAVVNRRDGALILSENAGAHEELGEHALTVNPFDLDDQAAAIHRALTMPPEERARRARALRETVLSNTIEDWAAAQMRDIAARRAASS

SEQ ID NO: 1665 - protein, 388 aa, Cyanidium caldarium; identical to SEQ ID NO: 245

SEQ ID NO: 1666 - protein, 1549 aa, Cyanidium caldarium; identical to SEQ ID NO: 250

SEQ ID NO: 1667 - protein, 494 aa, Ashbya gossypii ATCC 10895
MTEEVRKQAQQLTLDTQRSEEHSGNVVVVSNRLPVTIKKNDSGEYEYSMSSGGLVTALQGLKKSTKFQWYGWPGLEIPEGDREQVQRDLLEKFNAIPIFLSDELADLHYNGFSNSILWPLFHYHPGEINFDENAWLAYNEANRAFAEAIQKNLRDDDIVWVHDYHLMLLPELLRNYIATANLQNVKLGWFLHTPFPSSEIYRILPVRQEILRGVLSCDLLGFHTYDYARHFLSSVHRILNVNTLPNGVKFQGRFVNVAAFPIGIDVNNFTEGLQKESVVQRVKQLKETFKDCKIIVGVDRLDYVKGVPHKLHAIEVFLNEHPEWIGKVVLVQVAVPSRGHVEEYQYLRNVVNELVGRINGQFGTVEFVPIHFMHKSVPFEELISLYSISDVCLVSSTRDGMNLVSYEYIACQAENKGSLILSEFTGAAQSLNGAFIVNPWNTDELAEAIHESLTLPIEKREANWEKLYKYISKYTSSYWGETFVHELYKLSSQK

SEQ ID NO: 1668 - protein, 1468 aa, Prochlorococcus marinus str. MIT 9312; identical to SEQ ID NO: 254

SEQ ID NO: 1669 - protein, 707 aa, Yarrowia lipolytica CLIB122
MFNQIPSTPSPFVVPPSSYSAANININTMEAPHYLQGASEDVKQKHAYISSVLSRGKMTVPMLKSVLKSLNLGTTGLKQVLKERLMYYVTQVTTTDMFSHRITTMYDLIKSELNGTASPVAASTNRGPYNTVFYSPPQAQTVAAKVKTMPPQSDLVVSLPPPLSFSNTPFYKIKEALLPGMILSKSAEQRVTRMEFKLPEYYIRAVEEEAEQRKQGTIYPKYGVRLFGQILQPECTSKTASCEFPIALQLKVNDKAVEANTRGMKNKRGTTVPPDVTDLIKPQKATQRLETYYSHCAEIRYGIWAYVVEAQSMTQVLNDIKTRHILRDKPLEIIRSFYSDEDVVVDNYPLKLKCPISFSRMEVPVRSVFCKHVQCFDGRSFLQMQHQAAQWRCPVCDDPMSYASLAVDDFMSEILAHAPEGADSVSLLKDGSYEIPQDDSDGEASSPEPDWLKKRHPDPPLVVSLDSDDDDDGNNNSSNANDSTAAPATASPTPSRPQTNGTHSNGSARSSLGDTSRSTAATSVTSATHAPLELPPPEQYQHPLPVLPATANQASPEQPQQSPSSRPERSGSTHSTSSIPEPKRRRTSLDFALPPWTGGILGDASAYPDVITMVDDSSSDSTSPPRNLPTLPKTYSHNDLGLPSWESGIFSSKNTNKLTSASPDTAATSVSPNANGNGTPLGRSNAVRRGPRPQKTVVEVVDLTLSD

SEQ ID NO: 1670 - protein, 585 aa, Arabidopsis thaliana
MGSIEEEARPLIEEGLILQEVKLYAEDGSVDFNGNPPLKEKTGNWKACPFILGNECCERLAYYGIAGNLITYLTTKLHQGNVSAATNVTTWQGTCYLTPLIGAVLADAYWGRYWTIACFSGIYFIGMSALTLSASVPALKPAECIGDFCPSATPAQYAMFFGGLYLIALGTGGIKPCVSSFGADQFDDTDSRERVRKASFFNWFYFSINIGALVSSSLLVWIQENRGWGLGFGIPTVFMGLAIASFFFGTPLYRFQKPGGSPITRISQVVVASFRKSSVKVPEDATLLYETQDKNSAIAGSRKIEHTDDCQYLDKAAVISEEESKSGDYSNSWRLCTVTQVEELKILIRMFPIWASGIIFSAVYAQMSTMFVQQGRAMNCKIGSFQLPPAALGTFDTASVIIWVPLYDRFIVPLARKFTGVDKGFTEIQRMGIGLFVSVLCMAAAAIVEIIRLHMANDLGLVESGAPVPISVLWQIPQYFILGAAEVFYFIGQLEFFYDQSPDAMRSLCSALALLTNALGNYLSSLILTLVTYFTTRNGQEGWISDNLNSGHLDYFFWLLAGLSLVNMAVYFFSAARYKQKKASS

SEQ ID NO: 1671 - protein, 1478 aa, Bacillus cereus ATCC 10987; identical to SEQ ID NO: 260

SEQ ID NO: 1672 - protein, 59 aa, Oryza sativa
CLFFRFHTYDYARHFVSACTRILGLEGTPEGVEDQGRLTRVAAFPIGIDSERFKRALEL

SEQ ID NO: 1673 - protein, 510 aa, Methanococcus maripaludis S2; identical to SEQ ID NO: 264

SEQ ID NO: 1674 - protein, 255 aa, Oryza sativa Indica Group
MAQRVGHSADGVFVMIVDEDKSHANFARGMLSSLNFHVIVYSSPVNALVFLENNAQDVAVVLVAVDMKQLSGFQFLEAARVKRQDLQVIMMSAETTMSTMMRCVKLGARFLVKKPLNEETVDPGQETVITISYEEQFSRETEADENNENNEEEEVNSFEAKKADSVKVQSDEKGHDNAKISNTAAAEGSDENVSSGDGHVVPKAYNNVNVEESTGSNNTSGEQVSDKIKSDARVGVSLVDYPDSEDDETKKPTST

SEQ ID NO: 1675 - protein, 491 aa, Physcomitrella patens subsp. patens
MGSTSKVSAGDGGAVLEDVPHLTDWLPDLPTYENPLKHNPAYAAVRQYFIEDTDVVAKDVVVNINTAGDGVHFRRAGPRDKIYFQSEDVKACIVTCGGLCPGINTVIREIVCGLWTQYGVREIFGIDGGYKGFYSRNTISLNPKVVSDIHKRGGTFLKSSRGGHDTKKIVDSIEDREFNQVYIIGGDGTHKGASAIHEECKKRGLKVAVAGIPKTIDNDLDVIDKSFGFDTAVEEAQRAINAAHVEAESVHNGIGLVKLMGRYSGYIALYATLASRDVDLCLIPEVPFYLLGPGGLIEYVHHRLKENGHMVIVVAEGAGQELIAESMGSFKNLNDASGNKLLLDVGLWLCQNLKEHFLKEFKEPLNLKYIDPTYMIRAVPSNASDNVYCTLLAHSAIHGAMAGYCGFTVGPVNVRHCYIPIPRVVAKSRHVNVADRMWARLMSSTNQPSFSQYNEIIIQKRQEEALRGGGAPTSANGTTTMVICHSQVHSL

SEQ ID NO: 1676 - protein, 376 aa, Oryza sativa Indica Group
MVIDEDKCHADSTSYMLSAELNFSVTVFTSPIKALDFLQNHAEGVDLVLADVHMEEMNGFDFLKVARELHKSIQVIMMSTETTMYTMKRCVKLGAQFLVNKPLDAGTIKNLWQYVDLKVLRMEKIKDLLQGIGDESTCANETNSLAENPKNDTKKKYYLMWTPHLQKKFLHALQILGKDASPKNIKKIMGVDNIDCRQIAAHLQKHRLRLTKDLKKASFTTDTSKDESNSRIGPAESHHVCRNASTLQPRSNTQPTETTMQILSEDAEYDDVYAAMRRALQYGIVFDESKHSSDPSGDEDEQVVVGGDQDGCANEANDIDSSGDHHQVAAVVTKPCNTNASQEIINKMTNSDGMQATKGSKAAVFRLVDYSESDSD

SEQ ID NO: 1677 - protein, 260 aa, Brassica napus
MVSAREEFVYMAKLAEQAERYEEMVEFMEKVSASVDGDELTVEERNLLSVAYKNVIGARRASWRIISSIEQKEESRGNDDHVAAIRDYRGKIETELTGICEGILKLLDSRLVPAAASGDSKVFYLKMKGDYHRYLAEFKTGQERKDAAENTLSAYKSAQDIANAELAPTHPIRLGLALNFSVFYYEILNSPDRACSLAKQAFDDAIAELDTLGEESYKDSTLIMQLLRDNLTLWTSDMQDDAADEEIKEESAPKPAEEQQ

SEQ ID NO: 1678 - protein, 181 aa, Apium graveolens var. dulce
GNSIAYKNVIGARRASWRIISSIEQKEESRGNDAHVATIREYRSKIENELSSICDGILKLLDSKLIGAASNGDSKVFYLKMKGDYYRYLAEFKIAAERKEAAENTLNAYKAAQDIANAELAPTHPIRLGLALNFSVFYYEILSSPDRACNLAKQAFDEAIAELDTLGEESYKDSTLIKSLV

SEQ ID NO: 1679 - protein, 1548 aa, Frankia sp. EAN1pec; identical to SEQ ID NO: 268

SEQ ID NO: 1680 - protein, 474 aa, Zea mays
MSTAQGTALRSAPLGAGRWARRGRPVAAPYRSGWQAYGGVSLEGSGFLGGVHRTEERVAPRAPHAAARDAEVVRPLSKLPNSSIGLYDSSFERDACGVGFVAELSGDYKRETVNDAIEMLERMAHRGACGCEKNTGDGAGIMVALPHDFFKEVAKDAGFELPPPGEYAVGMFFMPTDEKRREKGKAEFMKVAESLGHVILGWRLVPTDNSDLGESALETEPVIEQVFVTKSSRSEAEFEQQLYILRRLSIISVRASLNIKRGGERDFYMCSLSSRTIVYKGQLKPSQLKGYYYADLGHENFMSYMALVHSRFSTNTFPSWDRAQPMRVLGHNGEINTLRGNKNWMTAREGLLEAEKLGLSKEQLSRILPIVDATSSDSGAFDNVLELLVRGGRSLPEAVMMMIPEAWQNDVNMATATATATESRSALMEPWDGPALISFTDGRYLGATLDRNGLRSREFRTGTSLLFCTNLFYS

SEQ ID NO: 1681 - protein, 380 aa, Oryza sativa Indica Group
MAQNEGIPNGTLSAMVIDEDKCHADSTCSMICTQLNFCVTVFTSPIKALDFLQNQAEGVHLVLADVQMEEMNGFEFLKVARELHKSIQVIMMSTETTIYTMKRCVQLGAQILVKKPLDVVTIQNLWQHLDIKVLKMEKIKDMLQGVGDKSTCANEMNSFPENQKDGTKRKYYLMWTPHLQKKFLHALEILGEGQISLMIMDVDNIDRKQISTHLQKHRLQLKKKLSKASFTKGSNEDTSNPSAKNHLTCRTMTLQPHPYTNQPAETTMQIHSEDVEHDDIYDAMRRALQDGTAFDESKYSSDPFSNEDEDVVGDGYADKANAIDSSGDHYQVAVVLTTPHNVDYTQEIMNKVTTSDDVQVTRGGKATVSRLVDYSDSDSD

SEQ ID NO: 1682 - protein, 2208 aa, Arabidopsis thaliana; identical to SEQ ID NO: 274

SEQ ID NO: 1683 - protein, 68 aa, Populus trichocarpa
MNDWAASLIAAALFAFLSPGLVFQMPGKERPLDFMNMKTSLAAIFVHLVIYGLLLVLFLVILHVHLYV

SEQ ID NO: 1684 - protein, 689 aa, Pyrobaculum aerophilum str. IM2; identical to SEQ ID NO: 277

SEQ ID NO: 1685 - protein, 1527 aa, Prochlorococcus marinus str. MIT 9303; identical to SEQ ID NO: 287

SEQ ID NO: 1686 - protein, 484 aa, Desulfovibrio desulfuricans subsp. desulfuricans str. G20
MTPAKGLIVVSNRLPVVLSRNEDGWGITTGAGGLVSAMAPVLRDRGGTWVGWTGASGEHEAESLLGEFSREAGYSLKPVRLEKEDVADFYYGFANEVIWPLFHDFQSLCNFFPKYWKSYLRVNELYARAVMDSGDPEAYVWVHDYHLMHVGEMLKSMGSRRRAGFFLHIPFPPMDNYLKLPWRRRLLSALLEYDLVGFQTYRDRRNFMQSVQVLLPHVKPQGRGPVIELLLDGRKVRLGAFPISIDYRSFVRTARSPAVSGRVNELKSAMDGRRMLLAVDRLDYSKGITFRLEAFREALEKYPGLRGNVTLMQIMVPSRQEVPRYNALKQEIERLVGEINGLFSRPGWNPVQYQYRSLGREELVAYYRAASMAIVTPLRDGMNLVAKEYCACNVNRRGVLLLSEFAGAAAQLQNGAVLVNPFDREGMAQSIKEALDMPAEEARRRMDRMRDVIRKNDIFRWVDMFLLAAFSRHLDDFPPTYARK

SEQ ID NO: 1687 - protein, 433 aa, Picrophilus torridus DSM 9790
MKYLVVTSRGPFSHEKKGKNETIENNVGGVATALKMLLSKNGGTWVCWGSGSLDINYKSENFSNYVIKRIILNSTEKKKFYDEYSNGTLWPVFHYFRDRTTFYKDAFRYYLEVNRKFAREVIENIDDDTVIWIHDYQLAMLPGILRESNVKNKIIFTWHIPWVSPEFFSIIPESREIIKSISSSNYITFHIDNYRENFINSQRFLLGSSTPSRVYSIPLGIDTKFFSPKNAKKINNIKAKIIFSIDRLDYTKGLTLRVLAIEDLLTEHPELLKKFVYIMNVTPSRTTVSEYINMKKELEMSVGRVNGRFGTIDWRPIIYMYRKIRDKTLLSYYKSADVALITPLIDGLNLVSKEFVATTENGVLIISRFAGASKELSSAITVNPYNIKETANAIIKALSMDVNERNNMISKLKNTVVKRDIKWWYRRITALPR

SEQ ID NO: 1688 - protein, 480 aa, Debaryomyces hansenii CBS767
MIKGKVLVVSNRLPVTIKRSPNGTYDYSMSSGGLVTALQGLKKSTEFQWLGWPGLEIPEDEQSKVNKDLMEKFNCTAIFLSDSIADLHYNGFSNSILWPLFHYHPGEMNFDENAWAAYIEANRKFAITIAQQVDDNDMIWVHDYHLMLLPQMLREEIENKKKNIRIGFFLHTPFPSSEIYRILPVREEILVGVLSCDLIGFHTYDYARHFLSSVSRIVSNVNILPNGIEYQGRSIGIGAFPIGIDVDKFTEGVTKPKVVDRIKQLKQKFTDTKIIVGVDRLDYIKGVPQKLHAFEIFLTENPEWIGKVILVQVAVPSRGDVEEYQSLRATVNELVGRINGRFGTVEFVPIHFMHKSIPFDELISLYHISDVCLVSSTRDGMNLVCYEYIACQQENKGVLILSEFAGAAQSLNGAIVVNPWNTEELSYAIKESLTLPEEKKELNFKKLFDYISKYTSGFWGESFVKELRKCSSQDKITEIR

SEQ ID NO: 1689 - protein, 174 aa, Arabidopsis thaliana
MRLYTETTDGSTIETKETALVWNYQFADPDFGSCQAKELMEHLESVLTNDPVSVKTGQQLVEVKPQGVNKGLVAERLLTTMQEKGKLLDFILCVGDDRSDEDMFEVIMSAKDGPALSPVAEIFACTVGQKPSKAKYYLDDTAEIIRMLDGLAATDTTISDQTDSTATVPTKDLF

SEQ ID NO: 1690 - protein, 524 aa, Frankia sp. EAN1pec
MAPRQGTRWPTLRCVRHMLGIGEFTAPGSEYPAQADLLIASNRGPVSFVVGDDGLLHPRRGGGGLVSGLAQVVQDTPEDGREIVWVCAALSDADRRAARSAPGGRIDRSGYDTGGASVRMLDLDRVLFDRAYNAVANRTLWFVLHLLHAPATEPSFGASFRKDWAAYEAYNAAFADALAELAAPGACVLVQDYHLTLVPARLRQMRPDLRIAHFSHTPWSPPEYFRMLPDDVSAAILHGMLGADRLGFLAPAWAAAFRDCCAEILGAEVVGDTVTAGGRTVRTSLYPLGVDAAELRDRAARPDVRARAAELRELAGGCRLVVRVDRTELSKNIVRGLDAYRELLRSHPEWHGRVMHLVCAYPSRHDLPEYREYTAAVQRLAAEIEDEFGTDTWLPVHLEINDDFPRSLAAMTLADVLVVNPIRDGMNLVAKEGMVVSADGGVLVLSREAGACSQMGADAVVVNPFDVTATAEAMHTALVMPAAERRERARRLAAVAGELPPRAWFRAQLDEIRGHAPAEPDRAG

SEQ ID NO: 1691 - protein, 177 aa, Brassica napus
MAEGQSPQNSPPSSTPPSPPSSDNTQQQSPPSPDSSSSSPPSSSPPATTPPPDNASSPPPPDNASSPPPPSSESQSPPQGNNNNNNNNGGNNDNNNNNNNNGGGSNNGNNNNNGNSNNGNNNNNNGNSGGGSNNNSPSPPSRNNNGGGSNNNSPSPPRSLAPPRSSGGGSNSSRNDV

SEQ ID NO: 1692 - protein, 500 aa, Dehalococcoides ethenogenes 195; identical to SEQ ID NO: 306

SEQ ID NO: 1693 - protein, 911 aa, Zea mays
MSRSYTNLLDLAEGNFAALGPAGGSGRQRHGSFGLRRMSRVMTVPGTLSELDGEDESEPAATSSVASDVPSSVAVDRLIVVSNQLPIVARRRPDGRGWSFSWDGDSLLLQLRDGIPDEMEVLFVGSLRADVPAAEQDEVSQTLLDRFRCAPVFLPDHLNDRFYHGFCKRQLWPLFHYMLPFSSPASASAAATSSSVATSSPGNGRFDRSAWEAYVLANKFFFEKVVEVINPEDDYVWVHDYHLLALPTFLRRRFNRLRIGFFLHSPFPSSEIYRTLPVRDEILKALLNCDLIGFHTFDYARHFLSCCSRMLGIEYQSKRGHIGLDYFGRTVGIKIMPVGVHMGQLESGLRLPDREWRLSELQQQFQGKTVLLGVDDMDIFKGINLKLLAFENMLRTHPKWQGRAVLVQIANPARGRGKDLEAIQAEIEESCQRINGDFGQSGYSPVVFIDRDVSSVEKIAYYTIAECVVVTAVRDGMNLTPYEYIVCRQGAPGSESVSEVGGPKKSMLVVSEFIGCSPSLSGAIRVNPWNIEATAEAMNEAISMPEQEKQLRHEKHYRYVSSHDVAYWSKSFILDLERACRDHFKRTCWGIGLGFGFRVVALDAHFRKLNMDSIVNAYEISGSRAILLDYDGTLVPQTSINKEPSPEVLNIINTLCSDSRNIVFLVSGRDKDMLGKWFSSCPKLGIAAEHGYFLRWSSEEEWQTCTQAMDFGWMQMAKPVMNLYTEATDGSYIETKESALVWHHQDADPGFGSSQAKELLDHLESVLANEPVSVKSGQFIVEVKPQGVSKGIVAERILASVKERGKQADFVLCIGDDRSDEDMFENIADIIKRNMVAPRTSLFACTVGQKPSKAKFYLDDTFEVVAMLSALADATGAELESDSADELAASISSLDIGDEQSETSDTPIGGS

SEQ ID NO: 1694 - protein, 221 aa, Oryza rufipogon
CNRLALEGPLVSIDEMEAIKKMNYRGWRSKVLDITYPKKSGRKGLEETLDRICTEARGAIKKGYTVLVLSDRGFSSDRVAVSSLLAVGAVHQHLVANLERTRVGLLVESAEPREVHHFCTLVGFGADAVCPYLAIEAIWCLQNDGKIPPNGDGKPYSKEELVKKYFYASNYGMMKVLAKMGISTLASYKGAQIFEALGLSSEVIRKCFDGTPSRIEGATFE

SEQ ID NO: 1695 - protein, 265 aa, Oryza sativa
MSPAEPTREESVYKAKLAEQAERYEEMVEYMERVARAAGGASGGEELTVEERNLLSVAYKNVIGARRASWRIISSIEQKEEGRGNDAHAATIRSYRGKIEAELARICDGILALLDSHLVPSAGAAESKVFYLKMKGDYHRYLAEFKSGDERKQAAESTMNAYKAAQDIALADLAPTHPIRLGLALNFSVFYYEILNSPDRACNLAKQAFDEAISELDSLGEESYKDSTLIMQLLRDNLTLWTSDANDDGGDEIKEAAAPKEPGDQ

SEQ ID NO: 1696 - protein, 221 aa, Oryza officinalis
CNRLALEGPLVSIDEMEAIKKMNYRGWRSKVLDITYPKKSGRKGLEETLDRICTEARGAIKKGYTVLVLSDRGFSSDRVAVSSLLAVGAVHQHLVANLERTRVGLLVESAEPREVHHFCTLVGFGADAVCPYLAIEAIWCLQNDGKIPPNGDGKPYSKEELVKKYFYASNYGMMKVLAKMGISTLASYKGAQIFEALGLSSEVIHKCFDGTPSRIEGATFE

SEQ ID NO: 1697 - protein, 179 aa, Zea mays; identical to SEQ ID NO: 143
  misc_feature (49)..(49): Xaa can be any naturally occurring amino acid
  misc_feature (99)..(99): Xaa can be any naturally occurring amino acid
  misc_feature (130)..(130): Xaa can be any naturally occurring amino acid
  misc_feature (141)..(141): Xaa can be any naturally occurring amino acid
  misc_feature (163)..(163): Xaa can be any naturally occurring amino acid

SEQ ID NO: 1698 - protein, 555 aa, Thermodesulfovibrio yellowstonii DSM 11347; identical to SEQ ID NO: 310

SEQ ID NO: 1699 - protein, 81 aa, Glycine max
MSGAGQAIDMEHVGFSKAKADHGRGKKTGPVSMDHVLLALRETKEERDLRIRSLFNFFDAANNGYLDYAHIEAGLSTLQAC

SEQ ID NO: 1700 - protein, 1515 aa, Magnetospirillum magnetotacticum MS-1; identical to SEQ ID NO: 317

SEQ ID NO: 1701 - protein, 747 aa, Sulfolobus solfataricus P2; identical to SEQ ID NO: 316

SEQ ID NO: 1702 - protein, 492 aa, Synechococcus sp. WH 5701
MKRGSSNFVLVYHRSPYEETFDSEGNRQWVDQKSPNGVIPTLRNLFLEERSGTWISWRQDANCSANADERLNLTSPSPFTLRRLPLTPEQISSFYHVTSKESFWPILHNFPGLFSVDNSDWATFEEVNRSFARAACEEAAPGATIWIHDYNLWLTPAMIREQRQDVRIAFFHHTPFPSSDVFSILPWRDEILDSLLSCDLVGFHIPSYANNFARCAINLRGAEGADPVPVAKKFRRYGSALSEPTVVPWIDHNCRRVHIQASPVGTSPELIRDLVVTPAVKAMANTIAEQHEGRKLILSASRVDYTKGNEEMLLAYERLLEQQPRWHGGVELFLGCVAAASGMRIYEDIQRSVEEIVGRINGRFGRIDWTPVRLSTHRTSYEELMGWFSQADVCWITPLRDGLNLVAKEYVAARQGLGGVLVLSEFTGASVELEDAVLTNPYSHRSMDRAISDALDMPQEEQVQRMASMTQAVDEFTVQHWAEQQLGTLRSL

SEQ ID NO: 1703 - protein, 225 aa, Zea mays
  misc_feature (221)..(221): Xaa can be any naturally occurring amino acid
PAGTFKVHFQTPSSSTVRMPETVGENGNAAPGRLLLLSNRLPITIKRSEDGSYSFSMSSGGLVTGLSGLSKTTSFQWYGWPGLEVPDNEVEGMKQRLKEEYGAHPVFIDDELADRHYNGFSNSILWPLFHYHPGEITFDESAWAAYQEVNRLFAKTVIKDVQDGDLIWVHDYHLMLLPQMLREEIGESKKNVKIGFFLHTPFPSSEIYRILPVREALLTGXLDCD

SEQ ID NO: 1704 - protein, 511 aa, Haloarcula marismortui ATCC 43049
MTCYAMSLRQRSTTASRRGSPYQRQMGPGVSGNAQNDAVPDSLVVVSNREPYSHEQDDDGEIQVQSAAGGLTSALDPVMQSRGGTWVAWGSGDADMAVADEGIVEVPPSDPAYDLKRVPLSDAAVQGYYYGYANQVLWPLCHEDTGRIWAEPAYWEQYRAVNEQFAEAVDTVADAGQPVWFQDYHLALAPRLVRERRPDATLLQFWHIPWPAPSVFRHCPHSDALLDGLLACDIIGFHTAGYAEQFLHCVDSAFPAATVDTDSGTVTRDGDRTRAVANPLGIDVGGVRDRARATDVASIRDTVLGGSRSDTSIRLALGVERLDYSKGIPERIEALAHLWDRRPDLRGDFTYVQKASRTREGIAAYRRYRADVVDAIERVNDRFGTDDWQPIVYTEANLDNETLAGLYRAAEVAVVTPHRDGMNLVAHEYPVACTDGDGALVLSELAGAATHLDGALTVNPHDIEAIADAIERALELDEAETSDRLSRLQHSVETLDSAEWVARQFSAGQSL

SEQ ID NO: 1705 - protein, 473 aa, Burkholderia vietnamiensis G4
MSRLIVVSNRVAAGEDTRPSAGGLAVGVMDALKQTGGVWFGWNGEIVGTPDAAPAVRRDGNVTYATLGLTRRDYDQYYRGFSNATLWPVFHYRSDLARFDRQEYAGYLRVNAMLARQLAALLRPDDLIWVHDYHLLPFAHCLRELGVKNPIGFFLHIPFPSPDMLRVVPPHDELVKFMCAYDIAGFQTDADKRAFSDYIERRGIGTASDDGMLHAHGRVVKVAAYPIGVYPDAIAEAAVQYGGRKPVKMLRDALGGRKLVMSVDRLDYSKGLVERFQSFERMLAGAPDWQGRVSFVQIAPPTRSDVQTYQRIRETLEREAGRINGRFAQLDWTPIQYLNRKYERNLLMAFFRMSQVGYVTPLRDGMNLVAKEYVASQDPADPGVLVLSEFAGAAAELGGALLVNPYDHAQMADALARALAMPLAERQARHEENLAQLRNNDLSVWRDTFVADLRSVAAAASVTQRAGRRTAHV

SEQ ID NO: 1706 - protein, 69 aa, Oryza sativa Japonica Group; identical to SEQ ID NO: 1402

SEQ ID NO: 1707 - protein, 69 aa, Brassica napus
MADWGPVVVAVVLFVLLTPGLLFQIPARGRVVEFGNMHTSGASILVHTIIYFGLITIFTIAIRLHIYAG

SEQ ID NO: 1708 - protein, 296 aa, Daucus carota
MGSSPDHIADEGLALDVIRQHLLLDDFSFMENYVFPNSNSSIDQSATTSSDNTSLVSDLTFNNNVAVDSYVAGSHDATLNHFSFQPNSAIKRTNSSSFSERKPTLNIAVPPASKVGFQPAAKLSDRRVADSGEKRHYRGVRQRPWGKFAAEIRDPNRKGSRVWLGTFDTAIDAAKAYDRAAFRLRGSKAILNFPHEIAQSPETSPPVSNIGRKRVKENKAEQEREIKREKVSADSNCEVVAAGACPLTPSMWTEVWEGGEEKGGIFEIPPLSPLSPYLNFTQLNAGDVKKQQVAQQ

SEQ ID NO: 1709 - protein, 1532 aa, Synechococcus sp. WH 7803; identical to SEQ ID NO: 323

SEQ ID NO: 1710 - protein, 262 aa, Ipomoea nil
MVSTESSREENVYMAKLAEQAERYEEMVEFMEKVAKTVDVDELTVEERNLLSVAYKNVIGARRASWRIISSIEQKEESRGNEELVKTIKEYRGRIEAELSKICDGILSLLESHLVPSASTAESKVFYLKMKGDYHRYLAEFKTGAERKEAAESTLLAYKSAQDIALGELAPTHPIRLGLALNFSVFYYEILNSPDRACNLAKQAFDEAILELDTLGEESYKDSTLIMQLLRDNLTLWTSDTADDGGDEIKEASKRESGEGPQ

SEQ ID NO: 1711 - protein, 221 aa, Oryza australiensis
CNRLALEGPLVSIDEMEAIKKMNYRGWRSKVLDITYPKKSGRKGLEETLDRICTEARGAIKKGYTVLVLSDRGFSSDRVAVSSLLAVGAVHQHLVANLERTRVGLLVESAEPREVHHFCTLVGFGADAVCPYLAIEAIWCLQNDGKIPPNCDGKPYSKEELVKKFFYASNYGMMKVLAKMGISTLASYKGAQIFEALGLSSEVIHKCFDGTPSRIEGATFE

SEQ ID NO: 1712 - protein, 264 aa, Hypocrea jecorina
MGHEDAVYLAKLAEQAERYEEMVENMKIVASEDRDLTVEERNLLSVAYKNVIGARRASWRIVTSIEQKEESKGNSSQVALIKEYRQKIEAELAKICDDILEVLDQHLIPSAKSGESKVFYHKMKGDYHRYLAEFAIGDRRKDSADKSLEAYKAATEVAQTELPPTHPIRLGLALNFSVFYYEILNAPDQACHLAKQAFDDAIAELDTLSEESYKDSTLIMQLLRDNLTLWTSSEAETSAGQVEAPPKEDTPAEAAAPAEEPKAE

SEQ ID NO: 1713 - protein, 221 aa, Oryza brachyantha
CNRLALEGPLVSVDEMEAIKKMNYRGWRSKVLDITYPKKSGRKGLEETLERICTEAREAIKKGYTILVLSDRGFSSDRVAVSSLLAVGAVHHHLVDNLERTRVGLLVESAEPREVHHFCTLVGFGADAVCPYLAIEAIWCLQNDGKIPPNSDGKPYSKEELVKKYFYASNYGMMKVLAKMGISTLASYKGAQIFEALGLSSEVIRKCFNGTPSRIEGATFE

SEQ ID NO: 1714 - protein, 1545 aa, Zymomonas mobilis subsp. mobilis ZM4; identical to SEQ ID NO: 327

SEQ ID NO: 1715 - protein, 272 aa, Hypocrea jecorina
MATERESKTFLARLCEQAERYDEMVTYMKEVAQLGGELSVDERNLLSVAYKNVVGTRRASWRIISSIEQKEESKGSDKHVATIKEYRSKIELELEKVCEDVLNVLDTSLIPNAATGESKVFYHKMKGDYHRYLAEFASGEKRKVAATAAHEAYKNATDVAQTELTPTHPIRLGLALNFSVFYYEILNSPDRACHLAKQAFDDAIAELDSLSEESYRDSTLIMQLLRDNLTLWTSSDSGEAEQAGEAKKDEGEAAKPAEEEPKAEEPAPEATS

SEQ ID NO: 1716 - protein, 221 aa, Oryza granulata
CNRLALEGPLVSIDEMEAIKKMNYRGWRSKVLDITYPKKSGRKGLEITLDRICTEAQEAIKKGYTILVLSDRGYSSDRVAVSSLLAVGAVHHHLVANLERTRVGLLVESAEPREVHHFCTLVGFGADAVCPYLAIEAIWCLQNDGKIPLNGDGKPYSKEELVKKYFYASNYGMMKVLAKMGISTLASYKGAQIFEALGLSSEVIRKCFNGTPSRIEGATFE

SEQ ID NO: 1717 - protein, 274 aa, Zea mays
EMYKGKKILVGRDKLDVVRGVVQKLQAFHKFLAEYPEWRNKVVLIQVTAPALNDSPKLERQVSELVSHINGEFGSLSFTPVHHYHQIIDRDEYFALLSVADLALITSVRDGMNTTSMEYIICQNKFNKSPLILSEFTGTAGRMRSAIQVNPWNIFGVAKAIDYALRLTDEEKRARHDQLYHQVVMHTSHTWAAGLVKQLLTRLHGEHSAHLTPPLDRKEMVEKYRNAKKRLLLLDYDGTLTPIVKVPEMALPSTRLLKALEILSQDEKDVIYII

SEQ ID NO: 1718 - protein, 221 aa, Leersia tisserantii
CNRLALEGPLVSIDEMEAIKKMNYRGWRSKVLDITYPKRSGRKGLEETLDRICTEAREAIKKGYTILVLSDRGFSSDRVAVSSLLAVGAVHQHLVANLERTRVGLLVESAEPREVHHFCTLVGFGADAVCPYLAIEAIWCLQKDGKIPPNGDGKPYSKEELIKKYFYASNYGMMKVLAKMGISTLASYKGAQIFEALGLSSEVIRKCFDGTPSRIEGATFE

SEQ ID NO: 1719 - protein, 1524 aa, Prochlorococcus marinus str. MIT 9515; identical to SEQ ID NO: 331

SEQ ID NO: 1720 - protein, 1543 aa, Nitrosococcus oceani C-27; identical to SEQ ID NO: 330

SEQ ID NO: 1721 - protein, 111 aa, Glycine max
  misc_feature (94)..(95): Xaa can be any naturally occurring amino acid
  misc_feature (97)..(98): Xaa can be any naturally occurring amino acid
DEALDIGSESPRTSALVVSEFIGCSPSLSGAIRVNPWDINAVADALNLAITMPSGEKQLRHEKHYRYVSSHDVAYWAKSFVQDLEYSCKDHYSXXRXXIGFGLNFRVLSLS

SEQ ID NO: 1722 - protein, 510 aa, Frankia sp. CcI3
MSDFNPLDLSLDLPLVLLSNRGPVRFDRDATGRTVTRGAGGLVSALSGLAEHLDDAVWVCGAASEEDVAVAGESAGSSILVQTYPSPRLVEGDPDGPAIRVRLVVTDPTAYADFYSVWSNPVLWFIQHGLYGRSLSPVFTRAEHDAFENGYAAVNRAYADAVVDEVRARGGKALVLLQDYHFYLVADWVREQCPDAVLTHFIHIPWPGPDEWRILPADIRERLLRGLLGSDVVGFHTRRYARNFVLCAQELLGLPIDLEQLTVTVADRVVRARYHPISVDPAALDATQASEEVAAHVAMLRYIFLDDDRQLILRVDRTDPSKNVVRGFLAFGTLLDQHPELVGKVSFLALLQPSRTDVPEYADYIALIGAVVAEINARHTKEGRQPIDLRMVEDFPLAVAAYSICDVLIVNAIADGMNLVAKEVAVVNRRGGVLALSEMAGAHEELGEFAVTLHPFDVQQMADALYTALTMPMEERHRRLAAAARQVRTHDVRRWLDDQLVDLRRVAGFG

SEQ ID NO: 1723 - protein, 754 aa, Candida glabrata CBS 138
MATSGGLQREMEDAANSIESLRVSDLKAICRSISLGVTGRKVELQDRIKQFIKQSMAKGHIDPWRPKAIKILAQKAILNEDLPQYEQLWLSLRTGAFAHPVATGHAPAETLGRGATNIMGASAVRPSDVNPYQISASHTAATRSTTAKSRNPNLKDPFTCRASIFYKIKKMIPGSGLRLKQHNGRERKITSFKLNASDYDYIKQNPNHKVYLFCGLFASLESGGDKSIEFPLPNEITINNTVLRENLKGLKNKKGTVKPVDITEHIRPAGQHNVLEIIYVYAKVDYYMYCCTVEEKTPEFLIDSIKDRQVIPKLETLQYIDKMMNDEDDEFVTTSTIMSLQCPISYTRMKLPVKTRKCDHLQCFDAYWFLHSQKQVPTWECPVCSKEVDLNSLATSEYVLEILKNTDDEVEQVEISADGSWKPIQEEEEDHRPQSGAVGMKRSASDNDEDENLLHPKKKHTEEPVVISLDSSDEEDLPLNETIRANSTRDSETNRLPNESVSRSSTVSNSNSVVMNGDSVLPGTEIGQTSGDDSARTTTGNHINSTVIENTTVSNGEDVTVTALASNQPQTPVSEPPVVNNVAGSTSGDSVGSSPPRRASRLERRGSVISTTENLLGLSGSPVQLNSITTSTQDQTETTQQAKDTEQEKTHQQKANKSISAPTPTTEPSPALRDIPVVERNIFSKRTNEPQLVSPFIPKKPYAYLARRRQQPPAASQPEKMNTSSSSTGPSASFNSSTHASTSVSDIIDLTSDD

SEQ ID NO: 1724 - protein, 478 aa, Arabidopsis thaliana
MEAEKSKQNPGKKPVEATMEHVLVALRETKEKREIRIQKLFEFFDNSKLGFLDDTQIEKGLSSLSIPPKYRYASDFLKVCDSNRDGRVDYQEFRRYMDAKELELYKIFQAIDIEHNGDICPAELWEALDKAGIKIKDEELASFMEHVDKDNNGIITFEEWRDFLLLNPHEATIENIYHHWERVCLIDIGEQAVIPDGISAHAQRSKLLLAGGIAGAVSRTATAPLDRLKVALQVQRTNLGVVPTIKKIWREDKLLGFFRGNGLNVAKVAPESAIKFAAYEMLKPIIGGADGDIGTSGRLLAGGLAGAVAQTAIYPMDLVKTRLQTFVSEVGTPKLWKLTKDIWIQEGPRAFYRGLCPSLIGIIPYAGIDLAAYETLKDLSRAHFLHDTAEPGPLIQLGCGMTSGALGASCVYPLQVIRTRMQADSSKTSMGQEFLKTLRGEGLKGFYRGIFPNFFKVIPSASISYLVYEAMKKNLALD

SEQ ID NO: 1725 - protein, 520 aa, Mesorhizobium loti MAFF303099
MQWSPETLRHILATELPDAQVIVVSNREPYIHNREGDDIQLVVPASGLVSALEPITRACAGTWIAYGGGSADKLVVDKNDRIEVPPDNPSYTLRRVWLSEEEQQGYYLGFANEGLWPLCHIAFTRPIFRASDWEAYEAVNRKFADTVVAEARNERPIVLVQDYHFALLPRMIRERLPEAIIITFWHIPWPNSEVFSICPWREKILDGLLGSSIVGFHTQFHCNNFIDSVDRFLESRIEREDSAISYGGQISLVHAYPISIEWPPAQLGKLPDVAQCRRQVREKFGLAENVKLCVGVERLDYTKGILDRFNALDELLTLHPEWIGKVAFLQIAAPSRGTLPAYQQLYEECLRHAEDLNQRYGREGYTPVLMITEHHSQQQVYEIYRAADVCMVTSLHDGMNLVAKEFVAAREDEQGVLLLSMFAGASKELLDALIVNPYDAAMMGDALLQALTMSQEEQSQRMRRMREIVRDNNVYRWAGSMLLDAARLRKRDAVDRAVSAAPAAPANVISLLDRRRVAAL

SEQ ID NO: 1726 - protein, 1500 aa, Hydrogenobacter thermophilus; identical to SEQ ID NO: 339

SEQ ID NO: 1727 - protein, 979 aa, Coccidioides immitis RS
MAKGKGKGKGKGKGKGKGKGKQPATETMSISSSSELSDYEEVYDPKIEDEIHAAYQRIQGQSSSDPLALGLPGASHGGTSSTPKTNLGQVPLTNRFNALRNSPSISQSQSPSADTGQSSSDPLGDSVGSHGRTSSTPKTNLGQVPLTNRFNALRNSLSISQSQSPSADTGQSSSNPLGDNVSHNALGLPGASQGKSSSSSSFDDLIASAEQQRLYLKQALTFSYVDKITIANYIIEIPASSYLDLLGLEPGATASDIAIAISLLQNLLNLDWFWFPAHQEQQQSALARLREAEKFIIQDFPDIWEALTRVNVGRLREPLAQYHRDAHAQATNFVQKFFQCVSEDNMDGAMEATQQLNYINQGLEAKNKARHLAADLGKIPYDILQEAWVKGVPPSSLKIIVEALQVPSGWAEKPPTAEGEYAEDENNYWKPLWMKLTPYLKAYWDSLFHSEEQKHQAYSNLTEEWQKLQETIKHMNRENLHPLCLHHFDPRPLTELYNMIHRSAQDGDQQGYFQNLSVLLNWLELVGIPEWLVSANPAQNPPQNNNQNNNPLQNNNPLQNNNPLQNNNPLQNNNPLQNNNPLQNNNQENNPLQNSNQNNNPPQSNNPPQNSNPPQNNNQNNNPLQNNNQENNPLQNSNQNNNPPQSNNPPQNSNPPQNNSQNNNPLQNNNQENNPLQNSNQNNNPPQNSNPLQNNNSPQNNASNADRGRSPTPGQCPICQENIGESRSVCRCCRAGFHTSCLNTWANQIGNMSRLGLHGLACPHCRQTQGYDTHVPAQHSRTQAIALPRRRVNRRISPGYTADGRRIVCLQKFGDNGRVVAEHANGSLSLLTQGEAGGRAVVDAANEEGVPHVKTDGWKALRHNLRDAGDYGINFVAVGTWDPTKQRLPFVICGFYHHIGGVYTEVAGSRSNILQTLGSREGEKMIAEAMAPGSGATTTEQALQALFGVSYEDRLRARMVASQERAQRIGQDLTRRQRN

SEQ ID NO: 1728 - protein, 1498 aa, Leptospira interrogans serovar Lai str. 56601; identical to SEQ ID NO: 341

SEQ ID NO: 1729 - protein, 500 aa, Mycobacterium tuberculosis H37Rv
MAPSGGQEAQICDSETFGDSDFVVVANRLPVDLERLPDGSTTWKRSPGGLVTALEPVLRRRRGAWVGWPGVNDDGAEPDLHVLDGPIIQDELELHPVRLSTTDIAQYYEGFSNATLWPLYHDVIVKPLYHREWWDRYVDVNQRFAEAASRAAAHGATVWVQDYQLQLVPKMLRMLRPDLTIGFFLHIPFPPVELFMQMPWRTEIIQGLLGADLVGFHLPGGAQNFLILSRRLVGTDTSRGTVGVRSRFGAAVLGSRTIRVGAFPISVDSGALDHAARDRNIRRRAREIRTELGNPRKILLGVDRLDYTKGIDVRLKAFSELLAEGRVKRDDTVVVQLATPSRERVESYQTLRNDIERQVGHINGEYGEVGHPVVHYLHRPAPRDELIAFFVASDVMLVTPLRDGMNLVAKEYVACRSDLGGALVLSEFTGAAAELRHAYLVNPHDLEGVKDGIEEALNQTEEAGRRRMRSLRRQVLAHDVDRWAQSFLDALAGAHPRGQG

SEQ ID NO: 1730 - protein, 768 aa, Stenotrophomonas rhizophila
MSPLTVSTPSLSTPTRTPPATPAPQLILATDLDGTFLAGDAAARHRLYRLVDQHPGIALIFITGRGLEAVMPLLSDPAIPRPDYVVCDVGATVVDGHTLQPLQPLQSMIDAHWPGEHVVAAAMRPFTALQRQDVPQERRCSYFCDPQTLAPLRAQIQAAAQALGCDVLYSADRYLDILPPDTDKGRTLAALARLLDLPRERILVAGDTLNDLSMYTAGFRGVCVGDSEPALTEATATLATTFHAQAPGCGGILEAIEHFALLADDDRYLYPPKQARAAGADLVMVYHRLPFDEVMENGVLVQRPPRSPNGIIPSLLSFFEGGQKGSWVAWGIDDPKRGPFQTHLAVDAERYPTLTAARVPLSRQEVDIFYKRFSKEAYWPMLHVFWERARFREDDWQVFLKVNRKFAEATAAEAAHGATVWIHDYNLWMVPATLRELRPDLKIAFFHHTYFPSADVFNVVPWRREIIGSLLSCDYIGFHIPRQVENFVDVVRGAVPAERLAWESCAPRFLTYGCAVGLDTMTTRLRVGDREIALGAHPVGTDLRRIHNVLARSDVRNDIFKLRREIGARKLVLSVERLDYTKGTLAKLEAFERLLEQHPERQGKVTLLMVCVPAAREMTVYRTLQNQIEQAVGRINGRFSRLDWTPVRFFAQALPFEEVVAHYAAAQVMWITPLRDGMNLVAKEFVATHGIEGSSGVLVLSEFAGAAAELKGAVLTNPHDPADLTAGLLQALSMPEEEATGRMRQLFGSVEYYDVDRWGREFLEAVRG

SEQ ID NO: 1731 - protein, 719 aa, Triticum aestivum
  misc_feature (209)..(209): Xaa can be any naturally occurring amino acid
QSPNESGASAGGRVERASWEAYVLANKHFFEKIVEVINPEDDYVWVHDYHLMALPTFLRRRFNRLRIGFFLHSPFPSSEIYRSLPVREEILRTMLNCDLIGFHTFDYARHFLSCCSRMLGIEYQSKRGYIGLDYYGRTVGIKIMPVGIHMGQLQSVLRLPEMQQKVAELRQQFEGKTVLLGVDDTDIFKGINLKLLAFEYMLKTHPKWXGRAVLVQIANPARGKGKDIESIRAEIQDSCERINREFGQSGYSPIVLIDRNVPSVEKLAYYTVAECVVVTAVRDGMNLTPYEYIVCRQGIPSSESAPEVSGPRKSMLVVSEFIGCSPSLSGAIRINPWNVESTAESLNEAISMSERDKELRHEKHYRYVSTHDVAYWSRSFIQDLERACKDHFRKPCWGIGLGFGFRVVALDPNFSKLSFDSIIMSYGRSKSRAIFLDYDGTLVPQASLYQKPSEELVSIINTLCSDKNNIVFIVSGRSKNSLGSMFSSCPILGIAAEHGYFLRWTRDEEWQTSTQSPDIGWMQMAEPVMNLYTEATDGSYIETKETALVWHHRDADQGFASSQAKEMLDHLESVLANEAVSVKSGQFIVEVKPQGVSKGLIAEKILASMKEKGQQADFVLCIGDDRSDEDMFENIADAMKKGIVAPKTPLFACTVGQKPSKAKFYLDDTYEVVSMLSALAEVSEPDPTAGLTDDLATSVSSLDIGDEQIQFSNTRIEGS

SEQ ID NO: 1732 - protein, 351 aa, Oryza sativa Japonica Group
MPGSSGRAPLFACRGAAAVSASSMLGGGGAAYQAAVGGARGAGCQLSGRAPAGSSRPCARRRRHGPPPPRSTPSTTRGRFEQVAAAASGKRVVVFLDYDGTLSPIVADPDMAFMSDEMRAAVRDVAEHFPAAIVTGRCVDKVQSFVGLPELYYAGSHGMDIKGPSSNEEEDTKILLQPAREFLPVINKAYKALMEKTKSTPGARVENNKFCLSVHFRCVDEKRWNPLAEQVKAVLRDYPELKLTQGRKVLEIRPSIMWDKGKAVEFLLKSLGFDDDRRDVLPVYIGDDRTDEDAFKVLRKRGQGLGILVSKCAKETDASYSLQDPAEVMEFLVRLVQWKLRRSSSAMRPRV

SEQ ID NO: 1733 - protein, 446 aa, Pseudomonas syringae pv. syringae B728a; identical to SEQ ID NO: 356

SEQ ID NO: 1734 - protein, 772 aa, Oryza sativa Japonica Group
MDALASEEYASQSKLLQEFTNAPSIDGAWVFQTNNEDRSTAMYSISQTNLLANNKRKYILFSHIMRNGTNLLDFQWSPFPIQMDGVSAVVPSPSGSKLLVVRNGEKGSPTKLEIVDQSHVEKEIHVAQSVHGPLYTDEWFHGISWNQEETLIAYIAEDSPEPKPVFDDTGYRKEGSSEKDCNNWKGQGDWEEDWGETYSKKGRPSLFVLDINSGEVRAAKGISRSLSVGQVVWAPPSSCGRQKYLIFVGWLEHNGFQNTPRKLGIKYCSNRPCSLYSTLCPFEESDVDNAPASDSKLEPASVAINLTPSISSAFFPRFSKDGKLLVFLSANRAVDSGAHNATDSLHKINWPSDWKMDQYLEITDVIPIVMCPQDGCFPGLYCSSMLSNPWLSDRCTMILTSAWRSTEVILSIDVLSGKATRISPENSEYSWSALAVDGHNVLAVSSSPIDPPQIKYGHQVSLKDQTCTWVWDEVNNNPLMAANNKVKALLSHHQFSILKIPVTNPSDDLSDGSKLPFEAIFVSCKDSSHKPTILVLHGGPHSVSVSSYSKTSAFLASLGFNLLIVNYRGTPGFGEEALQSLPGKVGSQDVQDCLTALDYVIEGGLIDASKVAVIGISHGGFLTTHLIGQAPDRFMVAAARNPVCNLSLMIGTTDIPDWCYAVACGSEGRQHASESPSPDHLRLFYQKSPIAHISKVKAPLLMLLGGADLRVPISNGLQYARALRERGGEIRIMMFPDDIHEINIPQSDFESFLNIGVWFKKHLSISASDASA

SEQ ID NO: 1735 - protein, 2166 aa, Oryza sativa; identical to SEQ ID NO: 363

SEQ ID NO: 1736 - protein, 243 aa, Arabidopsis thaliana
MYGQCNIESDYALLESITRHLLGGGGENELRLNESTPSSCFTESWGGLPLKENDSEDMLVYGLLKDAFHFDTSSSDLSCLFDFPAVKVEPTENFTAMEEKPKKAIPVTETAVKAKHYRGVRQRPWGKFAAEIRDPAKNGARVWLGTFETAEDAALAYDIAAFRMRGSRALLNFPLRVNSGEPDPVRITSKRSSSSSSSSSSSTSSSENGKLKRRRKAENLTSEVVQVKCEVGDETRVDELLVS

SEQ ID NO: 1737 - protein, 1912 aa, Oryza sativa; identical to SEQ ID NO: 372

SEQ ID NO: 1738 - protein, 460 aa, Polaromonas sp. JS666
MSRLVVVSNRVADPRKTAAGGLAVALGDALNATGGMWFGWSGTVIEGGAPGEGELHVQQAGNVKLATVDLSAEDHAGYYLGYSNGVLWPVFHYRIDLARFDAGNIRAYRRVNQLFARKLMTQLRPDDIIWVHDYHLIPLAAELRAMGATQRIGFFLHIPLPPQQVLAAIPQHEWLMRAMFAYDLLGFQSEADLQNFSHYVQAEAGAEDLGDNRFRAFNRTVRAGAFPIGIDVDEFAALTHAKEGHDMYERMKDEYSRRKLLLGVERLDYSKGLPQRLRAFKSLLEKYPENIRSATLIQIASPSREDMGTYTDLLQELESLCGAINGDFGELDWMPVRYMHRNVARKRLPGLYRVARVALVTPLRDGMNLVAKEFIAAQDPADPGVLVLSRFAGAAEQLKEALLVNPYDTDGTADTIQHALQMSLQERQGRHQRLLKNIREQDVHWWRKTFLDTLRDAGSD

SEQ ID NO: 1739 - protein, 313 aa, Triticum aestivum
MPTAQGIGLKHATPTGVGRRARRSHAASAHGRSARQAHGAMSLEGGGFLGGAHRIEERVAPCPPRAAARDAESIRPMSLLPESSIGLYNPAFERDSCGVGFVAELSGVDNRATVVDAIQMLERMAHRGACGCEKNTGDGAGILVALPHNFFREVTKDAGFELPPPGEYAVGMVFLPTDEKRRERSKTEFTKVAESLGHSILGWRQVPTDNSDLGQAALDTEPAIEQVFLTKSSKSKADFEQQLFILRRLSIVSIRAALNLKRGGERDFYMCSLSSRTIVYKGQLMPSQLQGYYYADIGHENFSSYMALVNTKP

SEQ ID NO: 1740 - protein, 1549 aa, Synechococcus sp. PCC 7002; identical to SEQ ID NO: 378

SEQ ID NO: 1741 - protein, 1534 aa, Microcystis aeruginosa PCC 7806; identical to SEQ ID NO: 380

SEQ ID NO: 1742 - protein, 431 aa, Neocallimastix patriciarum
MKNLLLASVLSLGLAGLANAACGGAWAQCGGENFHGDKCCVSGHTCVSINQWYSQCQPGGAPSNNASNNNNNNNNNNNNNNNNNNNHNNNNNNNNNNNNNNNGGSGSTKNFFDNQIYANPKFIEEVNSSIPRLSYDLQQRAQKVKDVPTAVWLAWDGATGEVAQHLKAAGSKTVVFIMYMIPTRDCNANASAGGAGNLNTYKGYVDNIARTIRSYPNSKVVMILEPDTLGNLVTANSANCQNVRNLHKNALSYGVNVFGSMSNVSVYLDAAHGAWLGSSTDKVASVVKEILNNAPNGKIRGLSTNISNYQSISSEYQYHQKLASALAAVGVPNMHFIVDTGRNGVTINSGTWCNLVGTGLGERPRGSPNAGMPLLDAYMWLKTPGESDGSSSGSRADPNCSSNDSLRGAPDAGQWFHDYFAQLVRNARPSF

SEQ ID NO: 1743 - protein, 261 aa, Zea mays; identical to SEQ ID NO: 1543

SEQ ID NO: 1744 - protein, 1143 aa, Bacillus cereus G9241; identical to SEQ ID NO: 395

SEQ ID NO: 1745 - protein, 58 aa, Zea mays
NNNNNNNNNNNNNNNNNNNNNNNNNNNNNNNNNNNNNNNNKANAMGHGCWQINTPSAG

SEQ ID NO: 1746 - protein, 499 aa, Synechococcus sp. RS9917
MLKEEGKSSFILLYHRTPFDEGKDEQGKRIWIDQKSPNGIIPTLRNLFRSRLDGTWIAWRQVESTEGVEDERIAMKAPAEFTLRRIPLEQEQISSFYHVTSKESFWPILHTFPTYFDVNNTDWTIFQDVNRRFAQAACHEAGHGATVWVHDYNLWLAPGYIREQRPDLKIAFFHHTPFPGNDVFAILPWREQILESLLSCDLVGFHIPRYTENFARAANCLLGARKGPKQPVNARFLSTGSALTEPSETPWLDYKGRRIQLLSSPVGTSPDVIQALVNRDDIQDYAARIEDDTRKGRQLILSASRVDYTKGNEELLLAFERLLERRPELHGQVVLMLACVSAASGMKIYDDTQRSIEEMAGRINGRFSLMDWVPIRFSTRRIPYEEMVAWFSKADVCWITPLRDGLNLVAKEYAAARRDHGGVLVLSEFTGASVVLDGAVLTNPYSHRRMDEAIDQALAMPPEEQQQRMRKMSAAVEAFTVSDWAEEQMGALREESAAA

SEQ ID NO: 1747 - protein, 1484 aa, Pseudomonas fluorescens Pf-5; identical to SEQ ID NO: 407

SEQ ID NO: 1748 - protein, 621 aa, Oryza sativa Japonica Group
MEGVLLQQELPKKQFKAEHLSSWRVQQPFRAAKGAFMGSSLEAEQQSLIVRTTEPEDVDDYTGDGSVGFSGQPILKHETGNWRACSLILGTEVCERLAYYGISKSLVTYLSTRLHEGNVSAARNFTTWQGTCYLTPLIGATLADSYWGKYKTIAVFSTIYFLGMAALTFSALVPSLQPPQCFGSFCPQPTVPQYLIYFVGLYMIALGSGGIKPCVSSFGADQFDDTDPVERTKKGAFFNWFYFAINIGSLISGTVLIWVQQNCGYGIGFGIPTIFIALAIGSFFIGSQRYRYQIPGGSPLIRVCQVVIAAIHKRNVDLPVDSSVLYELHGKTSAIEGSRKLEHSSEFSFLDKAAVILSNERGGSHDPWRLCTITQVEELKILMRMFPIWATGIVFFTVCAQNSSMFIEQGMALNNQIESFKIPPATLSSLDVISIVVWVPIYETFVVPIASRLTGKERGFSELQRMGIGLFVATTAVATAALVEIKRLEIARSEDLIHSKVPVPMSILWQAPQYLLVGIGEVFTAIGQAEFFYNQSPDSMRSLCSAFALVTVSLGSYLSSFILTLVSYFTTRDDNPGWIPDNLNEGHLDRFFWLIAGLSFLNLLLFVYYAQQYKCKKAAAI

SEQ ID NO: 1749 - protein, 474 aa, Aspergillus nidulans FGSC A4
MADKKRQLLIISNRLPLSLQKVDGKYESTLSSGGLVTALSGVSKSTNVRWFGWPGSNIEDPEERKTANEALAENNAVGIFLDEALAHSHYNVFSNGIAWPILHYQSGVDFNEDAWKSYKKVNEIFADSVAESASDGDLIWIHDYHLLLLPAYLRDRLEKQGKKCPIGFTLHTPFPAEDFWRALPVQKELLAGVLACDLIGFHTDEYKRNFIECCSRGLDVSVKDDSIVYQGHTARTGTFVVGVDPAKFTDGLQTTEVKNRIKELEDEYKHKTVILGVDRLDYTKGLVQKLQGYDYFLRQHPELKNKVRLIQVAIPSREDVKEYQELERELSMLVGKINGEHSTPDGTPIIYLHHSVPFTDLTALYRIADICLITSRRDGMNLVAAEYVACQKDRFGVLVLSELAGAASFMSKGSITFNPSSAQQLADAVYKAATMSPEEKKQGYLQLEEFITNNTRYAPHLPTSSAQQLWYTDQ

SEQ ID NO: 1750 - protein, 111 aa, Physcomitrella patens subsp. patens
MAGGRSSPAQQASSVDQKSKSNDSVPVHNSESSPTVARAPIQKPPRSLNYRGVRRRPWGKFAAEIRDSAQNGARIWLGTYDTAYDAACAYDQAAFEMRGCKALLNFPLKAN

SEQ ID NO: 1751 - protein, 116 aa, Saccharomyces cerevisiae
MSQTREDSVYLAKLAEQAERYEEMVENMKAVASSGQELSVEERNLLSVAYKNVIGARRASWRIVSSIEQKEESKEKSEHQVELIRSYRSKIETELTKISDDILSVLDSHLIPSATT

SEQ ID NO: 1752 - protein, 1536 aa, Antithamnion sp.; identical to SEQ ID NO: 423

SEQ ID NO: 1753 - protein, 383 aa, Saccharum arundinaceum
MCGGAILSGFIPPSGVAAAAAAKKKQQQQRRVTADLLWPGPGKKGAPQEEDFEADFREFERGLSEGGDDEVQELPAPQPARFAFAAAPKAPRPEVDGVMTPKDAYGDRPTANSIKRNRKNQYRGIRQRPWGKWAAEIRDPSKGVRVWLGTYNTAEEAARAYDAEARKIRGKKAKVNFPDEVSGAQKSTAKPTAANATKLAQPPKACADEVFNNLNNDNNDLFAMFAFNDNKVPVKPAEGARFLPAVKPLVPSKRSATYMLSDQSSNSYGSSDFGWDDDTMTSDYTSVFAPNNVIPAPYMQGGVSKRMRNNYGVAMLQGNGVPSLTQVMPCFDPEMNYQPLPYVESSSSDASMDSLLQTDIPQDVASNGDIWSLDELLMAAGAY

SEQ ID NO: 1754 - protein, 167 aa, Prototheca wickerhamii
MDGPVDREEAVYLAKLAEQAERYDEMVAEMKKVAQMVHDQELSVEERNLLSVAYKNVIGARRASWRIISSIEQKEESKGNDENVKRIRKYREVVEKELQEICSSILSLLDEHLIPTASSGESKVFYLKMKGDYHRYLAEFKTGGERKEAAEHTLLAYKAAQDIALVD

SEQ ID NO: 1755 - protein, 1529 aa, Mycobacterium avium 104; identical to SEQ ID NO: 425

SEQ ID NO: 1756 - protein, 539 aa, Pseudomonas fluorescens Pf-5; identical to SEQ ID NO: 432

SEQ ID NO: 1757 - protein, 1495 aa, Bacillus sp. SG-1; identical to SEQ ID NO: 442

SEQ ID NO: 1758 - protein, 1536 aa, Mycobacterium sp. JLS; identical to SEQ ID NO: 441

SEQ ID NO: 1759 - protein, 447 aa, Triticum aestivum
  misc_feature (222)..(222): Xaa can be any naturally occurring amino acid
  misc_feature (319)..(319): Xaa can be any naturally occurring amino acid
  misc_feature (340)..(340): Xaa can be any naturally occurring amino acid
  misc_feature (346)..(346): Xaa can be any naturally occurring amino acid
  misc_feature (362)..(362): Xaa can be any naturally occurring amino acid
QREELRARFPGVPGDLVNYFLFVAEEVRATLAQLGYEKLDDIIGRTDLLKPKHISLVKTQHIDLAYLLMNAGLPKWSSSQIRSQDVHSNGPVLDETILADPEVSDAIENEKEVSKTYPIYNVDRAVCGRVAGAIAKKYGDTGFAGQLNITFTGSAGQSFGCFLTPGMNVRLVGEANDYVGKGMAGGELVVVPVDDTGFVPEDAAIVGNTCLYGATGGQVFVXRGKTGERFAVRNSLGQAVVEGTGDHCCEYMTGGCVVVLGKVGRNVAAGMTGGLAYMLDEDDTLVPKVNKEIVKMQRVNAPAGQMQLKGLIEAYVEKXTGSTKGAKILSEWEAYLPLFXQLVPPXSEEDPPEACADLERYXPGKKRNSILLMILKANRQDAKRRKLAILEMISQTRPSEHYSPRNLLEPVKGTRKHSSGLRTPAPSTTPVIVPVAAPLASEDPLPE

SEQ ID NO: 1760 - protein, 876 aa, Solanum lycopersicum
MLSRSCFNLLNLDDCSVTDRARIPKLMNVPGIITDFGGGGGEEEKGEVSPGVKNGSRRIIVANQLPVKAFCKDEKEGKKWCFEWDRYALDTLILQLKDGLSPDLEIVYVGCLKADVELNDQEEVANFLWEKFRCVPTFLSLDLINKYYHGFCKHYLWPLFHYMLPLTSSHGVRFDRSNWLAYVSANKIFADKVYEVINPDDDYVWIQDYHLMILPTMLRKKYSRIKVGFFLHSPFPSSEIYRTLPVRDEILRALLNCDLVGFQTFDYARHFLSCCSRMLGLDYQSKRGYIGIDYFGRTVTIKILPVGIHMGQIQNVMSLPDTAKKAKELKEKYEGKIVLLGIDDMDVFKGIGLKFLAMGHLLEQSPSLRGRVVLVQITNPPRSRGNDIREVEEEVKKIASEINTKYGKPGYEPIVCINGPVSTQDKIAHYAISECVVVNAVRDGMNLVPYEYTVSRESNSNLDKALGPGFNGGRRKSMIVVSEFIGCSPSLSGAIRVNPWDIESVATGMTSGAMMNDREKELRHEKHYRYVSSHDVAYWARSFDQDLKRACEDHYHKRCWGIGLGLGFRVVALGPNFKKLSVAHIVSSYKLTNSRLILLDYDGTMLPEDKVDKAPSQEVISVLNGLCSDPKNIVFIVSGRGRDTLSKWFSPCAELGLSAEHGYFTRWRKDSDWESRLVPADTEWKKVVLPIMKKYTEATDGSSIEQKESALVWHHLEADPDFGIWQAKELLDHLESVLANEPVVVKRGQHIVEVKPQDVSKGLVFQSLLASMKSKGKSPDFVLCIGDDRSDEDMFESIASSLDNSSLPDNAEVFACTVGQKPSMAKYYLDDPAEVIKMLQGLSAASTAMQLPPKSPVHQLASVEDLSLVKNHASFV

SEQ ID NO: 1761 - protein, 1502 aa, Photorhabdus luminescens subsp. laumondii TTO1; identical to SEQ ID NO: 448

SEQ ID NO: 1762 - protein, 287 aa, Saccharomycopsis fibuligera
GEINFDENAWFAYNEANKLFAEEIAKHTKENDMIWVHDYHLMLLPELLKQRIAEKKIFNVKLGFFLHTPFPSSEIYRILPVRKEIMAGVLSCDLIGFHTYDYARHFLSSVSKVLHLNTLPNGIEYNDRFISVGAFPIGIDVDKFVNGLKTDTVQQRIKQLRAKLGDDIKVIVGVDRLDYIKGVPQKLHAFEVFLNEHPEMVGKVILIQLAIPSRGDVEEYQNLRATVNELVGRINGKFGTIDFVPIHFMHRSVPFNELISLYNISDVCLVSSTRDGMNLVSYEYIAC

SEQ ID NO: 1763 - protein, 681 aa, Oryza sativa Indica Group
MVSRSYSNLLDLATGAADQAPAPAALGALRRRLPRVVTTAGLIDDSPLSPSTPSPSPRPRTIVVANHLPIRAHRPASPSEPWTFSWDEDSLLRHLQHSSSSPAMEFIYIGCLRDDIPLADQDAVAQALLESYNCVPAFLPPDIAERYYHGFCKQHLWPLFHYMLPLSPDLGGRFDRALWQSYVSANKIFADKVLEVINPDDDFVWVHDYHLMVLPTFLRKRFNRIKLGFFLHSPFPSSEIYKTLPVREELLRALLNSDLIGFHTFDYARHFLSCCGRMLGLSYESKRGHICLEYYGRTVSIKILPVGVNMGQLKTVLALPETEAKVAELMATYSGKGRVVMLGVDDMDIFKGISLKLLAMEELLRQHPEWRGKLVLVQVANPARGRGKDVDEVKGETYAMVRRINEAYGAPGYEPVVLIDEPLQFYERVAYYVVAEVCLVTAVRDGMNLIPYEYIVSRQGNEALDRMLQPSKPEEKKSMLVVSEFIGCSPSLSGAVRVNPWNIEAVADAMESALVLPEKEKRMRHDKHYRYVDTHDVGYWATSFLQDLERTCKDHAQRRCWGIGFGLRFRVVSLDLSFRKLAMEHIVMAYRRAKTRAILLDYDGTLMPQAINKSPSANSVETLTSLCRDESNKVFLCSGFEKGTLHDWFPCENLGLAAEHGYFLRYDPVTYSGLCSCKDSS

SEQ ID NO: 1764 - protein, 444 aa, Pseudomonas syringae pv. phaseolicola 1448A; identical to SEQ ID NO: 453

SEQ ID NO: 1765 - protein, 233 aa, Zea mays
MTVRVVMRYLVNKLGLEDDSQHRLTKHLGEPHKAQATSHLLESRESYRQMANCGLWELEKQATNCSGALRAVEESACDAEVVRPLSKLPNSSIGLYDSSFECDACGVGFVAELSGDYKHVTVNDTIEMLERMAHRGACGCEKNTGDGAGIMVALPHDFFKEVAKDAGIELPPLGEYAVAMFFMPTDEKRRKKGKAEFKKVAESLGHVILGWRLVPTDNSDLGESALETEPVIE

SEQ ID NO: 1766 - protein, 1546 aa, Trichodesmium erythraeum IMS101; identical to SEQ ID NO: 455

SEQ ID NO: 1767 - protein, 334 aa, Malus x domestica
MEEQAQHYTSCCSATMSNISSPHVMPCLTEQWGNLPFQVDDSEDMIVYNSLRDAFSLGWSPDHTFPFQVDDWEDMINNNSDALSLGWSPDHTLECIKPEQAYDLDHLFDQYHDQLPPDLFTQSQPHDFDVSINGNKPSQALVLPPDTDIPPLDHDDRDQNQVQVGDAVAEQEELNVNVPKLQKSGVARGRHYRGVRQRPWGKFAAEIRDPAKNGARVWLGTYETSEEAALAYDRAAFRIRGSKALLNFPHRIGLNEPPPVRVTGKRKEPDQEAAASSSTSSSSSATPTAATKRSKLDKSVSSSADHDHQANVCHTRQKNNTSYMLAIGEQLLVS

SEQ ID NO: 1768 - protein, 666 aa, Oryza sativa Indica Group
MVSKSYSNLFEMSCGDGVDFRQPFKSLPRVVTSPGIISDPDWDTRIDGDSVGSASSVERKIIVANFLPLNCTKDEAGQWSFSRDDDALLMQLKDGFSNETDVIYVGSLKVQVDPSEQDQVAQKLLRDYRCIPTFLPPDLQQQFYHGFCKQQLWPLFHYMLPICLDKGELFDRSLFQAYVRANKLFADKVMEAINTDDDHVWVHDYHLMLLPTFLRKRLHRIKLGFFLHSPFPSSEIYRSLPVRDEILKSLLNADLIGFQTFDYARHFLSCCSRLLGLHYESKRGYIGIDYFGRTVSLKILSVGVHVGRLESILKLHATVKKVQEIEQRYKGKMLMLGVDDMDIFKGISLKLLGLELLLDRNPKLRGKVVLVQIVNPARSTGKDVEEAITESVSVAERINLKYGSVDYKPVVLIDHSIPFYEKIAFYAASDCCIVNAVRDGMNLVPYEYTVCRQGNEEIDNARGSDTNCHHTSTLIVSEFVGCSPSLSGAFRVNPWSVDDVADALHHATDLTESEKRLRHEKHYRYVRSHSVAYWAHSFAQDLERACKDHYSRRCWAIGFGLNFRVIALSPGFRKLSLEHFASSYNKATRRAIFLDYDGTLVPQSSINKAPSDELITILNSLCDDPKNDVFIVGLHSQKYCVLITGKKSFSFRLAFILKNIFQLAHC

SEQ ID NO: 1769 - protein, 727 aa, uncultured archaeon GZfos34A6
MRRLLIISNRLPVSVERRKNEFRFSSSVGGLATGLNALHQRYESVWVGWPGIAINREETDYVESKLSEFNCYPVFLSQGEVEKYYYGFSNKTLWPLFHYFPQYAKYEHSEWSAYEHVNRKFCERVAEIAKPEDVIWIHDYHLMLLPGLIRERFPDATIGFFLHIPFPSADLFRLIPWRRRILEGVLGADLIGFHTYDYAHNFLCSVLRLLGYEHELGKFAIGDRIVQVDVHPMGIEVQKFVSATSGRGIKREVARLRSRFKNCKIIFSMDRLDYTKGIPERLFAFELFLETHPEWHEKVVFILKIAPSRTKGGQYRVLKQEIDELVGRINGKYGTPEWAPISYFYRSLPFQTIVAFYLAADVALLTSMRDGMNLIAKEFVASRVDGKGVLILSEMAGAARELGEALVVNPNNKEEVVEALNEALRMPEEEQKSRNEEMQKRLCHYDVFHWGSGFIRSVLETKRLQEELNMKKLSEKIREELKNAYKAADKCLLLLDYDGTLVPFADKPERAKPDKELLYLFRALSEPPENTVVIISGRDKETLERWFGGTEVCLVAEHGVWLREEEGEWEAIELLKEDWKEKIIPILDLFVDRAPGSFIEEKSFSLVWHYRKVDPELGELRAKELTDQLIDLAACTELQVMKGNKVVEVKDGRVNKGIAASHWLTKGFGFILAVGDDLTDEDMFKVLPGDAYSVKIGFTPSKARFYLGSPKEVRALLDEMEMVEVYK

SEQ ID NO: 1770 - protein, 1530 aa, Listeria monocytogenes EGD-e; identical to SEQ ID NO: 474

SEQ ID NO: 1771 - protein, 300 aa, Arabidopsis thaliana; identical to SEQ ID NO: 1401

SEQ ID NO: 1772 - protein, 492 aa, Leifsonia xyli subsp. xyli str. CTCB07
MIVSNRLPVDRVVDETGESSWRPSPGGLVAALKPVMRAEDGVWIGWAGVAGEEVEPFEVDGIAILPVPLSEQDLQEYYEGFSNDTLWPLYHDVIAPPSYHREWWETYVAVNRRFAAAAAAVAAKGAVVWVHDYQLQLVPEMLRESRPDLVIGFFNHIPFPPYGIYSQLPWRRQIIDGLLGADVVGFQRVADASNFSRAVRRLKGYETRGPIIDVPIESDDPEAGSHRHVTANRHGGLVRTVLARAFPISIDVEQYQELARRPEIRARAAAIREELGNPETIMLGVDRLDYTKGIGHRLKAFGELLRDGRLDVEKATLVQVASPSRERVETYRQLRDEIELTVGRINGDYSTLGHTAVAYLHHGYPREEMVALYLAADVMLVTALRDGMNLVAKEYVATRVDEDGVLILSEFAGASDELRQALLINPHDIEGLKDAIAQAVEMPRRDRTRRMRALRKKVLTNDVARWSASFLDALIRRAHGDHPLQNSPVNRR

SEQ ID NO: 1773 - protein, 264 aa, Mesembryanthemum crystallinum
MSSESSREENVYMAKLAEQAERYEEMVEFMEKVAKMTDTEELSVEERNLLSVAYKNVIGARRASWRIISSIEQKEESRGNEDHVSTIKEYRGKIETELSKICDGILNLLESHLIPSASTAESKVFYLKMKGDYHRYLAEFKTGAERKEAAENTLLAYKSAQDIALAELAPTHPIRLGLALNFSVFYYEILNSPDRACNLAKQAFDEAISELDTLGEESYKDSTLIMQLLRDNLTLWTSDNAEEGGDEIKEAAAKRESGEEKPQQ

SEQ ID NO: 1774 - protein, 654 aa, Zea mays
LPTFLRKRFNRIKLGFFLHSPFPSSEIYKTLPVREELLRALLNSDLIGFHTFDYARHFLSCCGRMLGLSYESKRGHICLEYYGRTVSIKILPVGVHMEQLKTVLGLPETEAKVSELMEMYSGKGRVVMLGVDDMDIFKGISLKLLAMEELLRQHPEWRGKLVLVQVANPARGRGKDVAEVQTETYAMVRRINEAYGEPGYEPVVLIDEPLQFYERVAYYVIAEVCLVTAVRDGMNLIPYEYIVSRQGNEKLDRMLRQGKPEEKKSMLVVSEFIGCSPSLSGAIRVNPWNIEAVADAMETALVLPENEKRLRHDKHFRYVSTHDVGYWANSFLLDLERTCKYHSQKRCWGIGFGLRFRVVSLDLTFRKLSLENILMAYRRAKTRAILLDYDGTLMPQAINKSPSTESVRILNSLCRDKDNVVYLCSGYDRRTLHEWFPCENLGIAAEHGYFLRCKRDAEWKTCVAATDCSWKQIAEPVMCLYRETTDGSTIEDRETVLVWNYEDADPDFGSCQAKELVDHLESVLANEPVSVKTTPHSVEVKPQGVSKGLVARRMLVSMKERGQCPDFVLCIGDDKSDEDMFQLIATAACGDSLASKAEVFACTVGRKPSKAKYYLDDAAEVVRLMQGLSYVSEELALANQRDEDEDSSLDDVWE

SEQ ID NO: 1775 - protein, 531 aa, Zea mays
MEAVGVTPAPVAAPEKKKLLDLKDPFPAAANGGAKASPAAKWAMKKKLVGGDAGYVLEDVPHLTDYMPQLPTYPNPLQDNPAYSVVKQYFVNPDDTVTQKIVVHKTSARGTHFRRAGPRQRVYFQSDEVNAAIVTCGGLCPGLNTVIRELVCGLYDMYGVSSVVGIEGGYKGFYSKNTVALTPKSVNDIHKRGGTVLGTSRGGHDTAKIVDCLQDRGINQVYIIGGDGTQKGASVIYEEVRRRGLKCSVVGVPKTIDNDIAVIDKSFGFDTAVEEAQRAINAAHVEAESAENGIGVVKLMGRNSGFIAMYATLASRDVDCCLIPESPFYLEGKGGLLEFVERRLKDNGHMVIVVAEGAGQDLIARSMNFVDTQDASGNKLLLDVGLWLSQKIKDHFKKKPSFPITLKYIDPTYMIRAVRSNASDNVYCTLLAHSALHGAMAGYTGFTVAPVNGRHAYIPFYRITEKQNKVVITDRMWARVLCSTNQPCFLSHEDVENMKHDDDEHHHMHNTQLLEGGSSPVSKCNGSAAAV

SEQ ID NO: 1776 - protein, 181 aa, Glycine max
ARVAKDPKNVIYVISGRDRTALNEWFKGVPVGFSCEHGCFFKMYPGAEGKDHWEDVGSELDLSWKATVGSIFDDYTDRVPGSHVEAKEICLTWHYRNADPEFGENQKNELVLHLQSLAGLPIDILLGKKAVEARPQGIHKGSVVKRVMSMLSDADFVLCIGDDVTDEDMFEETVGTREARF

SEQ ID NO: 1777 - protein, 162 aa, Cichorium intybus
VQQLESSRMKLSQLEQELQRARQQGIFISSSGEQSQSTSGNGASSFHVEYSRWLEEQNRRISELREAVSSHAADGELRLIVDGVITHYEDIFRIKNDAAKADVFHILSGMWKTPAERCFLWLGGFRSSELLKLLITQLEPLTEQQLLAINNLQQTSQQAEDA

SEQ ID NO: 1778 - protein, 865 aa, Glycine max
DKSRSCLNLLDLVSGDTLNFPRTPRSLPRVMTDPVIMSSGDGKQSNDDDLSFFSSEHHRKIIIVSNSLPLNAKRDKISGVWCFSYDEDSIFWQLKDGLSPEADVVYVGSLKADVDANEQEKVSLQLLEEFNCVPTFIPSDLYKQFHDGFCKQQLWPLFHYMLPMYPGNRRFDRSQWQAYVSANKIFADKVMEVLNPEDDYVWVHDYHLMVLPTFLRKRCSRVRLGFFLHSPFPSSEVYKTLPVRGEILKALLNADLVGFHTFDYARHFLFCCRRMLGLEHESKRGYIGLEYFGRTIFIKILPPGIHMGRLQSTLDHPSSSNKVREIHQQYKGKKLIVGVDDMDLFKGIGLKFLAMEQLLQQYPEQQGELILIQILNPPSSSDKDVEDAKEEAYISAKRINERFGLEGYEPIIIIDRHVPFYEKAAYYALAECCIVNAVRDGLNLVPYKYTVCRQGSSKLDEALEIASDSPRVSALVVSEFIGCSPSLSGAIRVNPWDIDAVAEALNLAITMPDGEKQLRHEKHYRYVSSHDVAYWARSFEQDLVFSCKDHYNNRCWGFGFGLNFRILSLSPSFRRLSIDHIVPAYERSSCRAIFLDYDGTVVPQASIVKPPSPEVISVLNNICSDVRNTVFIVSGRGKTSLSEWFDQCENLGIAAEHGYFIRWGKHTSWQMSHADTDFAWKKIAEPVMRSYMEATDGSSVETKESALVWHYRDADPDFGSWQAMELLDHLENVLANEPVVVKKGQHIIEVKPQGITKGSVAQEVLSSLTKKGKSPDFVLCIGDDRSDEDMFESILAKPYSTTSSSAPQIFACTVGQKPSKARYYLDDTVDVMALLEGLGATSGPKSRYSTETPFEKREVCFENDV

SEQ ID NO: 1779 - protein, 186 aa, Brassica napus
MAGGEIVVTPVDKIGFVPEEATIVGNTCLYGATGGQIFARGKAGERFAVRNSLAEAVVEGTGDHCCEYMTGGCVVVLGKVGRNVAAGMTGGLAYLLDEDDTLLPKINREIVKIQRVTAPAGELQLKSLIEAHVEKTGSSKGETILKEWEKYLPLFWQLVPPSEEDTPEASAAYVRTATGEVTFQSA

SEQ ID NO: 1780 - protein, 1557 aa, Azoarcus sp. BH72; identical to SEQ ID NO: 500

SEQ ID NO: 1781 - protein, 181 aa, Populus trichocarpa
MDCDWKKIVQPVMERYTETTDGSFIEPKESALVWHHQDADPDFGSCQAKELLDHLESVLANEPVVVRRGQQIVEVKPQGVSKGIVVENLISTMRSQGKSPDFLFCIGDDRSDEDMFESIARLVDNPSIPPIAEVFACTVGLKPSKAKYYLDDTPEVIKLLQGLATASVGSKYAHTLEDEDV

SEQ ID NO: 1782 - protein, 257 aa, Glycine max
MSDSSREENVYMAKLADEAERYEEMVEFMEKVAKTVEVEELTVEERNLLSVAYKNVIGARRASWRIISSIEQKEESRGNEDHVAIIKEYRGKIEAELSKICDGILNLLESNLIPSAASPESKVFYLKMKGDYHRYLAEFKTGAERKEAAESTLLAYKSAQDIALADLAPTHPIRLGLALNFSVFYYEILNSPDRACNLAKQAFDEAISELDTLGEESYKDSTLIMQLLRDNLTLWTSDITDIAGDEIKETSKQQPGE

SEQ ID NO: 1783 - protein, 896 aa, Saccharomyces cerevisiae YJM789
MTTTAQDNSPKKRQRIINCVTQLPYKIQLGESNDDWKISATTGNSALYSSLEYLQFDSTEYEQHVVGWTGEITRTERNLFTREAKEKPQDLDDDPLYLTKEQINGLTTTLQDHMKSDKEAKTDTTQTAPVTNNVHPVWLLRKNQSRWRNYAEKVIWPTFHYILNPSNEGEQEKNWWYDYVKFNEAYAQKIGEVYRKGDIIWIHDYYLLLLPQLLRMKFNDESIIIGYFHHAPWPSNEYFRCLPRRKQILDGLVGANRICFQNESFSRHFVSSCKRLLDATAKKSKNSSNSDQYQVSVYGGDVLVDSLPIGVNTTQILKDAFTKDIDSKVLSIKQAYQNKKIIIGRDRLDSVRGVVQKLRAFETFLAMYPEWRDQVVLIQVSSPTANRNSPQTIRLEQQVNELVNSINSEYGNLNFSPVQHYYMRIPKDVYLSLLRVADLCLITSVRDGMNTTALEYVTVKSHMSNFLCYGNPLILSEFSGSSNVLKDAIVVNPWDSVAVAKSINMALKLDKEEKSNLESKLWKEVPTIQDWTNKFLSSLKEQASSDDDMERKMTPALNRPVLLENYKQAKRRLFLFDYDGTLTPIVKDPAAAIPSARLYTILQKLCADPHNQIWIISGRDQKFLNKWLGGKLPQLGLSAEHGCFMKDVSCQDWVNLTEKVDMSWQVRVNEVMEEFTTRTPGSFIERKKVALTWHYRRTVPELGEFHAKELKEKLLSFTDDFDLEVMDGKANIEVRPRFVNKGEIVKRLVWHQHGKPQDMLKGIREKLPKDEMPDFVLCLGDDFTDEDMFRQLNTIETCWKEKYPDQKNQWGNYGFYPVTVGSASKKTVAKAHLTDPQQVLETLGLLVGDVSLFQSAGTVDLDSRGHVKNSESSLKSKLASKAYVMKRSASYTGAKV

SEQ ID NO: 1784 - protein, 1515 aa, Vibrio fischeri ES114; identical to SEQ ID NO: 510

SEQ ID NO: 1785 - protein, 261 aa, Solanum berthaultii
MASSKERENLVYIARLAEQAERYDEMVDAMKNVANLDVELTVEERNLLSVGYKNVVGSRRASWRILSSIEQKEEGRGNEQNVKRIQNYRQKVEAELTDICNNIMTVIDEHLIPSCTAGESTVFYYKMKGDYYRYLAEFKTGDDKKEVSDLSLKAYQTATTTAEAELPITHPIRLGLALNFSVFYYEIMNSPERACQLAKQVFDEAISELDSLNEDNYKDGTLILQLLRDNLTLWTSDIPEDGEEALKGDAANKVGAGEDAE

SEQ ID NO: 1786 - protein, 1492 aa, Exiguobacterium sibiricum 255-15; identical to SEQ ID NO: 514

SEQ ID NO: 1787 - protein, 474 aa, Klebsiella pneumoniae subsp. pneumoniae MGH 78578
MSRLVVVSNRIALPDDKKSSAGGLAVGILGALRAAGGLWFGWSGEIGDDQQPLKQVSRGNISWASFNLNERDHDEYYNQFSNAVLWPAFHYRLDLVSFQREAWEGYLRVNAMLADKLLPLIEPDDTLWIHDYHLLPFASELRKRGVNNRIGFFLHIPFPTPEIFNALPPHAELLEQLCDYDLLGFQTESDRTAFLDSIAMQTRLSDLGDKRYQAWGKAFSTEVYPIGIDPDEITRNAKGPLPPKLAQLKNELKNVKNIFSVERLDYSKGLPERFLAYETLLEKYPQHHGKIRYTQIAPTSRGDVQAYQDIRHQLETAAGRINGQFGQLGWTPLYYLNQHFDRKLLMKVFRYSDVGLVTPLRDGMNLVAKEYVAAQDPDNPGVLVLSQFAGAAQELTSALIVNPYDRDEVAAALDRALSMPLAERIARHSAMLDVIRENDIHNWQARFVEDLQHISPRSEESRLRGKIATFPKLA

SEQ ID NO: 1788 - protein, 318 aa, Zea mays
MYGVSSVVGIEGGYKGFYSKNTVALTPKSVNDIHKRGGTVLGTSGGGHDTAKIVDCLQDRGINQVYIIGGDGTQKGASVIYEEVRRRGLKCSVVGVPKTIDNDIAVIDKSFGFDTAVEEAQRAINAAHVEAESAENGIGVVKLMGRNSGFIAMYATLASRDVDCCLIPESPFYLEGKGGLLEFVERRLKDNGHMVIVVAEGAGQDLIARSMNFVDTQDASGNKLLLDVGLWLSQKIKDHFKKKPSFPITLKYIDPTYMIRAVRSNASDNVYCTLLAHSALHGAMAGYTGFTVAPVNGRHAYIPFYVSRRPNAVEHTAS

SEQ ID NO: 1789 - protein, 733 aa, Vitis vinifera
  misc_feature (660)..(660): Xaa can be any naturally occurring amino acid
MMSRSYTNLLDLASGNFPLMGQRKRLPRVMTVPGVISELDDDQANSVTSDVPSSIVQDRVIIVANQLPVKAKRRPDNKGWSFSWDEDSLLLQLKDGLPDDMEVLYVGSLRVDVDSNEQDDVSQVLLDRFKFDRSLWEAYVSANKIFSQRVIEVLNPEDDYVWIHDYHLMVLPTFLRRRFNRLRMGFFLHSPFPSSEIYRTLPVREEILKALLNSDLIGFHTFDYARHFLSCCSRMLGLEYQSKRGYIGLEYYGRTVGIKIMPVGVHMGQIESVLRFADKEWRVGELKQQFEGKTVLLGVDDMDIFKGVNLKLLAMEQMLTQHPKWQGRAVLVQIANPARGSGRDLEVIQAEIQASCKRINENFGQPGYEPIVFIDRPVSLSEKAAFYTIAECVVVTAVRDGMNLIPYEYIVSRQGVSGSESGSESSGPKKSMLVVSEFIGCSPSLSGAIRVNPWNVEATAEAMNEAISMADAEKQLRHEKHYRYVSTHDVAYWSKSFFQDMERSCKDHFRRWCWGIGLSFGFRVVALDPNFRKLSIDSIVSAYSRAKNRAILLDYDGTVMPQTSINKTPSEDVILILNTLCSDPRNTVFVVSGRGRDSLGKWFSPCNRLGIAAEHGYFLRWSVNEEWEICGQSNDFGWIQMAEPVMKLYTEATDGSYIEXKESALVWHHQDADPGFGSSQAKEMLDHLESVLANEPVAVKSGQFIVEVKPQDSKLSLKGTLYRCKELGMRRKT

SEQ ID NO: 1790 - protein, 805 aa, Oryza sativa Indica Group
MFSRSYTNLVDLANGNLSALDYGGGGGGGGGGNGAGGRPPRARRMQRTMTTPGTLAELDEERAGSVTSDVPSSLASDRLIVVANTLPVRCERRPDGRGWSFCWDEDSLLLHLRDGLPDDMEWEAYVLANKLFSQRVIEVLNPEDDYIWIHDYHLLALPSFLRRRFNRLRIGFFLHSPFPSSELYRSLPVRDEILKSLLNCDLIGFHTFDYARHFLSCCSRMLGIEYQSKRGYIGLDYFGRTVGIKIMPVGINMTQLQTQIRLPDLEWRVAELRKQFDGKTVMLGVDDMDIFKGINLKVLAFEQMLRTHPKWQRKAVLVQIANPRGGGGKDLEEIQAEIDESCRRINAQFSRPGYVPVVIINRALSSVERMAYYTVAECVVVTAVRDGMNLTPYEYIVCRQGFPDLDGSGDDGPRRKSMLVVSEFIGCSPSLSGAIRVNPWNIDTTAEAMNESIALSENEKQLRHEKHYRYVSSHDVAYWSKSYIHDLERSCRDHFRRRCWGIGLGFGFRVVALDRNFKKLTVDSIVTDYKNSKSRVILLDYDGTLVPQTTINRTPNESVVKIMNALCDDKKNVVFIVSGRGRDSLEKWFSPCQDLGIAAEHGYFMRWTRDEQWQLNNQCSEFGWMQMAKPVMNLYTEATDGSYIETKESALVWHHQDADPGFGSSQAKEMLDHLESVLANEPVCVKSGQQIVEVKPQGVSKGFVAEKILSTLTENKRQADFVLCIGDDRSDEDMFEGIADIMRRSIVDPQTSLYACTVGQKPSKAKYYLDDTNDVLNMLEALADASEETDSQENAEEITSIPDPE

SEQ ID NO: 1791 - protein, 602 aa, Oryza sativa
ELPKKQFKAEHLSSWRGQQPFRAAKGAFMGSSLEAEQQSLIVRTTEPEDVDDYTGDGSVGFSGQPILKHETGNWRACSLILGTEVCERLAYYGISKSLVTYLSTRLHEGNVSAARNFTTWQGTCYLTPLIGATLADSYWGKYKTIAVFSTIYFLGMAALTFSALVPSLQPPQCFGSFCPQPTVPQYLIYFVGLYMIALGSGGIKPCVSSFGADQFDDTDPVERTKKGAFFNWFYFAINIGSLISGTVLIWVQQNCGYGIGFGIPTIFIALAIGSFFIGSQRYRYQIPGGSPLIRVCQVVVAAIHKRNVDLPVDSSVLYELHGKTSAIEGSRKLEHSSEFSFLDKAAVILSNERGGSHDPWRLCTITQVEELKILMRMFPIWATGIVFFTVCAQNSSMFIEQGMALNNQIESFKIPPATLSSLDVISIVVWVPIYETFVVPIASRLTGKERGFSELQRMGIGLFVATTAVATAALVEIKRLEIARSEDLIHSKVPVPMSILWQAPQYLLVGIGEVFTAIGQAEFFYNQSPDSMRSLCSAFALVTVSLGSYLSSFILTLVSYFTTRDDNPGWIPDNLNEGHLDRFFWLIAGLSFLNLLLFIYLV

SEQ ID NO: 1792 - protein, 559 aa, Prunus dulcis
  misc_feature (46)..(46): Xaa can be any naturally occurring amino acid
MGSLEEERSLLEDGLIQDETNGLYTGDGSVDITGKPVLKQSTGNWXACPFILGTECCERLAFYGISTNLVTYLTHKLHEGNVSAARNVTTWSGTCYLTPLIGAVLADAYWGRYWTIAIFSTIYFIGMCTLTISASVPALKPPQCVDSVCPSASPAQYGVFFFGLYLIALRTGGIKPCVSSFGADQFDDTDSRERVKKGSFFNWFYFSINIGALVSSTLIVWVQDNAGWGLGFGIPALFMGIAIVSFFSGTPLYRFQKPGGSPLTRMCQVLVASFRKWNLDVPRDSSLLYETQDKGSAIKGSRKLEHSDELNCLDKAAVISETETKTGDFSNPWRICTVTQVEELKILIRMFPIWATGIVFSAVYAQMATMFVEQGMMMDTSVGSFTIPPASLSSFDVISVIFWVPIYDRFIVPIARKFTGKERGFSELQRMGIGLFLSVLCMSAAAVVEMKRLQLATELGLVDKEVAVPLSIFWQIPQYFLLGAAEIFTFIGQLEFFYDQSSDAMRSLCSALSASDDFIGKLSELFDSDIVTYFTTQGGKAGWIPDNLNDGHLDYFSGS

SEQ ID NO: 1793 - protein, 318 aa, Oryza sativa Japonica Group
MTARSMLRNHPEASVLDTIRQHLLEEPRGGGGGEAAEASFGSLVADMWSDSLPFRDDDADDMVVFGAMRDAFSCGWLPDGVFAEVKPEPLLSPDSSSYDGSSCCFGFADVSEPVTPSDAASGAAEAAAAAAAATAEHGKEEEAAAAVARGKHYRGVRQRPWGKFAAEIRDPAKNGARVWLGTFDTAEDAALAYDRAAYRMRGSRALLNFPLRIGSEIAAAAAAAAAAAAGDKRPSPEPATSESSFSSSSSCTTTTTSSSTSSSGSPKRRKRGEAAAASMSMPLVPPPSQLNWPVQAWYPAAAPVEQVAITPRVEQLVI

SEQ ID NO: 1794 - protein, 503 aa, Methanosarcina acetivorans C2A; identical to SEQ ID NO: 534

SEQ ID NO: 1795 - protein, 1512 aa, Cytophaga hutchinsonii ATCC 33406; identical to SEQ ID NO: 536

SEQ ID NO: 1796 - protein, 432 aa, Triticum aestivum
  misc_feature (172)..(172): Xaa can be any naturally occurring amino acid
  misc_feature (181)..(181): Xaa can be any naturally occurring amino acid
  misc_feature (197)..(197): Xaa can be any naturally occurring amino acid
  misc_feature (210)..(210): Xaa can be any naturally occurring amino acid
  misc_feature (225)..(225): Xaa can be any naturally occurring amino acid
LLSRRLMKLSQSNKVRSAIELFDSMLASGLQPNSHACNSLLASFVRRGSSVDAMKMYEFMKGKGLATGHTYTLILKAVARSEGYISALQMFSEIEECNESRETLDVIVYNTMISACGRAKDWRQVEKLWGRLAENSLSGTLMTYDLLVSTFVQCGQSELAIAAYEEMLRDGXDPSEDIMKXIIAPCTKEGRWEFALXTFRRMLSAGMKPXIIVFNPVINSLGKAXGEDELAFRMYHLLTSSELEPDQYTWSALLSALYRSGRCWDALELFQGIKSKHPSVLNSHLYNIALMSCERLGQWEHALQLLWMMEKSGLQISAVSYNHVIRACEVACEPKVALKVYRRMTHERCSPDTFTHLSVIRACIWGSLWDEVEDILEEVAPDSSIYNTVIHGLCLRGKIRLARRVYTKMRSIGLTPDGKTRSFMLQHIASAE

SEQ ID NO: 1797 - protein, 860 aa, Oryza sativa Indica Group
MALDPADDPLLADCKYKLNHFRIKELKDVLHQLGLPKQGRKQELVDKIIAVLSDQQEQDSRLNGLPNKKMVGKETVAKIVDDTFAKMNGSTNAVPASRNQTDSGHIVKPKRKSDDSAQLDVKVRCPCGYSMANDSMIKCEGPQCNTQQHVGCVIISEKPADSVPPELPPHFYCDMCRITRADPFWVTVNHPVLPVSITPCKVASDGSYAVQYFEKTFPLSRANWEMLQKDEYDLQVWCILFNDSVPFRMQWPLHSDIQINGIPIRVVNRQPTQQLGVNGRDDGPVLTAYVREGSNKIVLSRSDSRTFCLGVRIAKRRSVEQLVGYGQNSVDSLSIYNTSWYLGGTWQLLRFRNPVLFIKGPLNFHSIQVLSLVPKEQDGENFDNALARVRRCVGGGTEADNADSDSDIEVVADSVSVNLRCPMTGSRIKIAGRFKPCVHMGCFDLEAFVELNQRSRKWQCPICLKNYSLDNIIIDPYFNRITALVQSCGDDVSEIDVKPDGSWRVKGGAELKGLAQWHLPDGTLCMPTDTRSKPNIRIVKQEIKEEPLSEETGGRLKLGIRRNNNGQWEINKRLDSNNGQNGYIEDENCVVSASNTDDENSKNGIYNPEPGQFDQLTSNIYDLDSSPMDAHFPPAPTEQDVIVLSDSDDDNVMVLSPGDVNFSSAHDNGNAFPPNPPEASGICGEQPRGAGPDVTSFLDGFDDLELPFWESSSSQDAAGTQVTDNQCEMQNFIVNHQFLHEPILGVNLGGTAASNTLECEHDGALQACQSSDQDGDQNQTCHDGHSGDLTNLSIISTQDSLTNGKNASQKRTNCEDGTAGLDGSVVRSANGLRGEMPPLGQEQDRTVRQKLILTIESDSD

SEQ ID NO: 1798 - protein, 86 aa, Physcomitrella patens subsp. patens
MPKKDDVPLRANLQTLQVNSKRTRLFNYRGVRRRPWGKFAAEIRDSSQNGARIWLGTYETAEAAAVAYDHAAFEMRGCKALLNFPL

SEQ ID NO: 1799 - protein, 1546 aa, Novosphingobium aromaticivorans DSM 12444; identical to SEQ ID NO: 548

SEQ ID NO: 1800 - protein, 469 aa, Yarrowia lipolytica CLIB122
MPNVLVISNRLPVTISREEDGTYKYTMSSGGLVTALSGLKQSTTFQWFGWPGLEIPEKDKPRLINDLETMFSCVPVFMDDDLADLHYNGFSNSILWPLFHYHPGEMNFDQVAWEAYTQANRLFAKKVASIVKPGDIVWVHDYHLMLLPEMLREECENNSALDGLKIGFFLHTPFPSSEIYRILPVRKEVLTGVLSCNLIGFHTYDYARHFLSSVSRILDLETMPNGTYYKGRHVVVGAFPIGIDVNKFLEGCKRPAVQERIAQLQDKFKGIKVVVGVDRLDYIKGVPQKLHAFEVFLSEHPEWIGKVVLVQVAVPSRGLVEEYQNLRAVVNELVGRINGMFGTVEFTPIHFMHRSVDFNELIALYSISDVCFVSSTRDGMNLVSYEYVACQTEKHGSLILSEFTGAAQSLNGALIVNPWNTEDMAEALYDSLTFSPEKKAENHRKLFKYVSKYTSQHWGEAFVSELKRC

SEQ ID NO: 1801 - protein, 446 aa, Mycobacterium sp. MCS; identical to SEQ ID NO: 551

SEQ ID NO: 1802 - protein, 1539 aa, Desulfitobacterium hafniense Y51; identical to SEQ ID NO: 554

SEQ ID NO: 1803 - protein, 1530 aa, Vibrio cholerae O1 biovar eltor str. N16961; identical to SEQ ID NO: 553

SEQ ID NO: 1804 - protein, 113 aa, Brassica napus
  misc_feature (10)..(10): Xaa can be any naturally occurring amino acid
  misc_feature (92)..(92): Xaa can be any naturally occurring amino acid
AKGKHYRGVXQRPWGKFAAEIRDPAKFGARVWLGTFEKAEDAALAYDRAAFRMRGSRALLNFPWRVNSGEPDPVRIPSKRSYTSSSSSDKGXPKRRRNTEEVPSELQVKCEVA

SEQ ID NO: 1805 - protein, 266 aa, Aspergillus nidulans FGSC A4
MTSERENKTFLARLCEQAERYDEMVTYMKIGGELTVDERNLLSVAYKNVVGTRRASWRIISSIEQKEESKGSEQHVSIIREYRQKIETELEKVCQDVLDVLDESLIPKAETGESKVFYYKMKGDYHRYLAEFASGNKRKLAATAAHEAYKNATDVAQTELTPTHPIRLGLALNFSVFYYEILNSPDRACHLAKQAFDDAIAELDSLSEESYRDSTLIMQLLRDNLTLWTSSDGNEPENVSAPKEEKPEEDAAAPEEKPEEAKAPES

SEQ ID NO: 1806 - protein, 1487 aa, Vibrio cholerae O1 biovar eltor str. N16961; identical to SEQ ID NO: 557

SEQ ID NO: 1807 - protein, 157 aa, Platanus x acerifolia
RSKVESELSALCDGILKILDGHLIPSASASESKVFYLKMKGDYHRYLAEFKVGVERKEAAEDTLTAYKAAQDIAVADLSPTHPIRLGLALNFSVFYYEILNSSEKACSMAKLAFEEAIAELDALGEESYKDSTLIMQLLRDNLTLWTSDMQDQLDEA

SEQ ID NO: 1808 - protein, 1498 aa, Staphylococcus epidermidis ATCC 12228; identical to SEQ ID NO: 559

SEQ ID NO: 1809 - protein, 455 aa, Xanthomonas campestris pv. campestris str. ATCC 33913
MSRLVVVSNRVAVPGESRAGGLAVGLLAALKERGGVWFGWSGKTVRGDSGGMHEQTDGDIKFVTMDLNKRDIDSYYNGFANRTLWPLLHFRLDLVDYDRATREGYLRVNRLFAEKLAPLLKDSDTLWIHDYHMIPLGAMLRELGVGCKMGFFLHVPMPSADLMQAMPDHARLFSTFYAYDLVGFQTQRDAERFKAYVRLFGGGRVLEGDLVEGPGGRRFSAAAFPIGIDTDLIANQAKASVSKQAVRDLRESLRGRQLAIGVDRLDYSKGLPERFQGFERYLERYPDQSGSLTYLQIAPVSRGDVNEYRQLRGQLEQIAGHINGGHAEPDWTPLRYVNQNFSHATLTGFYRAAAVGLVTPLRDGMNLVAKEFVAAQDPENPGVLVLSLLAGAADEMKEALLVNPHDLDGVADAIATAASMPLATRVERWHAMMDHLRKNNINHWRQRYLQALADI

SEQ ID NO: 1810 - protein, 250 aa, Gibberella zeae PH-1
MVTYMKEVAKLGGELTVDERNLLSVAYKNVVGTRRASWRIISSIEQKEESKGSDKHVSTIKDYRNKIETELEKVCQDVLDVLDDFLIPNAATGESKVFYHKMKGDYHRYLAEFASGEKRKGAATAAHDAYKSATDVAQTELTPTHPIRLGLALNFSVFYYEILNSPDRACHLAKQAFDDAIAELDSLSEESYRDSTLIMQLLRDNLTLWTSSDSAEGEAAGAADAPKKEEGEAAKPAEEAAEEPAPAPAS

SEQ ID NO: 1811 - protein, 1567 aa, Burkholderia pseudomallei K96243; identical to SEQ ID NO: 569

SEQ ID NO: 1812 - protein, 272 aa, Saccharomyces cerevisiae YJM789
MSQTREDSVYLAKLAEQAERYEEMVENMKAVASSGQELSVEERNLLSVAYKNVIGARRASWRIVSSIEQKEESKEKSEHQVELIRSYRSKIETELTKISDDILSVLDSHLIPSATTGESKVFYYKMKGDYHRYLAEFSSGDAREKATNSSLEAYKTASEIATTELPPTHPIRLGLALNFSVFYYEIQNSPDKACHLAKQAFDDAIAELDTLSEESYKDSTLIMQLLRDNLTLWTSDISESGQEDQQQQQQQQQQQQQQQQAPAEQTQGEPTK

SEQ ID NO: 1813 - protein, 431 aa, Magnaporthe grisea 70-15
MTAQQPTKSEIQSLVSLIQSNTLLNRQLQSICQINGLKGSGVKADLQRRIVERVTFKPSPFYEPKALVADVRVCDAMAHHRNTVAISLKAHELGNHLSDPSIRIFVFCSTADTGVQDIAFPYQSDLKVNGGDVKANLRGLKNKPGSTRPVDITDQLRLRPAGYINNVEFTYALTDKGRVPSKKKKETQRYYISIYACKSHKAPALVEKIRAGKKIPRASVVSEITRKAQDTEIETTSSNMSLKCPLSYSRLVDPVRSTACKHIQCFDALSYLQLQEQGPQWICPICNKPAPFDSLAVDEYAREILAKTSQSIEQVTIDPSGEWRIPGSESVDLRDEAGNGGGNETNYIVDDEVILSDISIFSGRRTATPSRSLQLPSTPNTGVSREGSTMPRSVASAGTKRSAAVIDLTLSDDDEPSGPPPTKRQNVNGFY

SEQ ID NO: 1814 - protein, 539 aa, Pseudomonas putida GB-1; identical to SEQ ID NO: 576

SEQ ID NO: 1815 - protein, 465 aa, Ralstonia solanacearum GMI1000
MSRLIVVSNRVAPIAEGQASAGGLAVGVYDALRDTGGVWFGWSGEIAPGASGEPSIAAKGAITFATVGLSRRDYDQYYRGFANATLWPVFHYRVDLARYERQEYHGYRRVNTQFAHQLKALVQPDDILWVHDYHLIPFAAECRALGLRNRIGFFLHIPFPSPEILTTIPPHEELMRALCAYDLLGFQTETDRVAFYDYIEREARGYIENKEHNGPVHAYGNTLRAEVYPIGVHPDEIARQAVSSLARRNPFAREADASGGRPLKLIMSVDRLDYSKGLPERFRAFEQLLDDFPDHRRHVTFVQIAPTSRQDVQSYQQIRQRLEAESGRINGKHSELDWTPIRYINKQYDRRMLMALFRASHIGYVTPLRDGMNLVAKEYVAAQDPEAPGVLVLSRFAGAARELDAALIVNPYDTRGMAEALNRALTMPLEERKARHAHMMDRLRAADLTAWRERFLADLRGASAR

SEQ ID NO: 1816 - protein, 494 aa, Synechococcus sp. CC9311
MAVTKGQSPFILLYHRTPFDEGRDEKGNRIWCDQKSPNGIIPTLRNLFRTRENGTWIAWRKVDKVEDANDENIPMSNPKPFTLCRIPLEEDQISSFYHVTSKESFWPILHTFPTHFNVNNADWSIFEEVNYRFAKAACHQAAESATVWVHDYNLWLVPGYIRELRPDLKIAFFHHTPFPGNDVFAILPWREQILESLLCCDVVGFHIPRYTENFARAANCLLGAKKGSKQPVNSRFVSTGSALTEPSETPCLHYKGRKIQLLSSPVGTSPDVIQELAARADVQELADKIDDDTKKGRKLILSASRVDYTKGNEELLLAFERLLERRPDWHGKVVLMLACVAAASGMKIYEDTQRTIEETAGRINGRFSLIDWVPIRFSTRRIPYEEMVAWFTRSDICWITPLRDGLNLVAKEYAAARKDRGGALVLSEFTGASVVLDGAILTNPYSHRQMDEAIERALEMPKDEQIKRMSRMSSAVESFTVSDWVREQMDALEA

SEQ ID NO: 1817 - protein, 946 aa, Arabidopsis thaliana
MGSKSFGNLLDLASGDLLDIPQTPRYLPRVMTVPGIISDVDGYGISDGDSDVISLPCRERKIIVANFLPLNGKKDSETGKWKFSLDNDSPLLHLKDGFSPETEVIYVGSLKTHVDVSEQDEVSHNLFEEFNCVATFLPQDVHKKFYLGFCKQQLWPLFHYMLPMCPDHGERFDRGLWQAYVSANKIFADKVMGVINLEEDYIWIHDYHLMVLPTFLRRRFHRVKLGFFLHSPFPSSEIYRTLPVREELLRGLLNCDLIGFHTFDYARHFLSCCCRMLGLEYESKRGHIALDYLGRTVFLKILPIGIHMGRLESVLNLPATAEKLKEIQEKYRGKKIILGVDDMDIFKGLSLKILAFEHLLQQYPSMLGKIVLIQIVNPARGSGKDVQEARKETYDTVKRINERYGSHDYEPVVLIDRPVPRFEKSAYYALAECCIVNAVRDGMNLVPYKYTVCRQGTPSMNKSLGVSDDLPRTSTLVLSEFIGCSPSLSGAIRVNPWDVDAVADSLYSAITMSDFEKQLRHKKHFHYISTHDVGYWARSFSQDLERASRDHYSKRCWGVGWGLGFRLVALSPNFRRLSIEQTVSAYRRSSKRAIFLDYDGTLVPETSIVKDPSAEVISALKALCSDPNNTIFIVSGRGKVSLSEWLAPCENLGIAAEHGYFTRWNKSSDWETSGLSDDLEWKKVVEPIMRLYTETTDGSNIEAKESALVWHHQDADPDFGSCQAKELLDHLETVLVNEPVIVNRGHQIVEVKPQGVSKGLVTGKILSRMLEDGIAPDFVVCIGDDRSDEEMFENISTTLSAQSSSMSTEIFACTVGRKPSKAKYFLDEVSDVVKLLQGLANTSSPKPRYPSHLRVSFESVKTRKNREAKPNVARFGPVLVQPLWKFLSFVLDHIISSQKVEFMGSYTRSKCPQEWTESIYRKIYLTLGPFAKRSMDHAVTTWDTRL

SEQ ID NO: 1818 - protein, 249 aa, Phytophthora infestans
MDRDSLVFLAKLAEQAERYDEMVDHMKAVANNHNVELTVEERNLLSVAYKNVIGSRRASWRVISSIENKGDSERSEHIKAYRQKIEGELVDICNDILTIIENNLIPNSSSEEGKVFYYKMKGDYHRYLAEFQVDDERKESSDKALESYKQASTIAMAELPPTHPIRLGLALNFSVFYYEILNSPDRACNLAKQAFDDAIAELDTLSEESYKDSTLIMQLLRDNLTLWTSDQEPDNADANQGDMNVQDVE

SEQ ID NO: 1819 - protein, 614 aa, Ustilago maydis 521
MTSASTSSQGAPSTDPVTAAQQQHIEDLCKAGPVMEGASLIVVSNRLPVTIKVDPSVPGGYTFTLSSGGLVSALSGCKKTMNFTWIGWPGLSVPPKDEEYIEKRLREEYSCQPVWISDEIADRHYNGFSNSILWPLFHYHPGEMNFDETNWLAYREANLRFAEKIRSIVRQGDMVWVQDYHLMLLPLMLRTLIEGSEQQGATSQRELEHVRHGVDGTLQLQDDDLLAAPSAYDSLRGNGRINTPPADDGEGEGDDQGDYQGRDAALRSNSSATGRGLGTSDGSSGRGSIKIGFFLHTPFPSSEIYRILPVRREILLGILHCDLIGFHTYDYARHFLSSCTRILGLPTMPNGAEFEGRYVHVGTYPIGIEPSQFEDGLERESVKERIKSLQRRFEGVKIIVGVDRLDYIKGVPQKLHALETFLQDHPEWIGKVVLVQVAVPSRQDVEEYQNLRATVNEAVGRINGRFGTVESMPIHFLHRSVSFDELCALYAISDACLVTSTRDGMNLVSYEYIACQQQRAGVMILSEFAGAAQSLNGSLICNPWDAFAVSDAIHEALTMPANVRRENFEKLSRYVKKHTASWWGLSFVNDLKRIKVEGEAESPSAGVPSLPSRP

SEQ ID NO: 1820 - protein, 913 aa, Oryza sativa
MMSRSYTNLLDLAEGNFAALGPGGGGGGRRRSGSFGLKRMSRVMTVPGTLSELDGEDDSEHAATNSVASDVPSSVAGDRVIVVSNQLPVVARRRPDGRGWSFSWDDDSLLLQLRDGIPDEMEVFFVGSLRAEIPVADQEEVSQALLDRFRCAPVFLPDPLNERFYHRFCKRHLWPLFHYMLPFSSSASPSPSSSSSSSSSPSSSSGSGHFDRGAWEAYVLANKFFFEKVVEVINPEDDYVWVHDYHLMALPTFLRRRFNRLRIGFFLHSPFPSSEIYRTLPVREEILKALLNCDLIGFHTFDYARHFLSCCSRMLGIEYQSKRGYIGLDYFGRTVGIKIMPVGVHMGQLKTVLSLPDREWRVSELQQQFEGKTVLLGVDDMDIFKGINLKLLAFENMLRTHPKWQGRAVLVQIANPARGKGKDLEAIQAEIHESCKRINGEFGQSGYSPVVFIDRDVSSVEKIAYYTIAECVVVTAVRDGMNLTPYEYIVCRQGSDSTSEVNGPKKSMLVVSEFIGCSPSLSGAIRVNPWNIEATAEALNEAISMSEQEKHLRHEKHYRYVSTHDVAYWSKSFIQDLERACKDHFRRTCWGIGLGFGFRVVALDPHFTKLNMDSIVMAYERSESRAIFLDYDGTLVPQTSISRTPSAEVLRIINTLCSDRRNKVFLVSGRRRDKLGEWFSSCPDLGIAAEHGYFLRWTRDEEWQTCTQTSDFGWMEMAKPVMNLYTEATDGSYIDPKESALVWHHQDADPGFGSSQAKELLDHLESVLANEPVSVKSGQFIVEVKPQGVSKGVVAEKILVSMKERGKQADFVLCIGDDRSDEDMFENIADTIKKGMVATNTSLFACTVGQKPSKAKFYLDDTFEVVTMLSALADATEPEPETDLTDEFDELAVSVSSVDIDDEQTPSDKLIGG

SEQ ID NO: 1821 - protein, 847 aa, Arabidopsis thaliana
MVSRSYSNLLELASGDSPTFGRMNRQIPRIMAVAGIMSNIDNDSKDTDLSPKDRIIIVANELPIRAQRRVDGNGWNFSWDENSLLLQLKDGLGDEAIEVIYVGCLKEEIPLNEQEEVYQILLESFKCVPTFLPLDLYTRYYHGFCKQQLWPLFHYMLPLSPDLGGRFDRTLWQAYVSVNKIFADRIMEVINPEDDFVWIHDYHLMVLPTFLRKRFNRVKLGFFLHSPFPSSEIYKTLPIREELLRALLNSDLIGFHTFDYARHFLSCCSRMLGLTYESKRGYIGLEYYGRTVSIKILPVGIHMGQLQSVLSLPETERKVGELIERYGRKGRTMLLGVDDMDIFKGITLKLLAMEQLLMQHPEWQGKVVLVQIANPARGKGKDVKEMQAETYSTVKRINETFGRPGYDPIVLIDAPLKFYERVAYYVVAECCLVTAVRDGMNLIPYEYIVSRQGNEKLDKILKLEANNRNKKSMLVVSEFIGCSPSLSGAIRVNPWNVDAVADAMDSALEVAEPEKQLRHEKHYKYVSTHDVGYWARSFLQDLERSCGEHGRRRCWGIGFGLSFRVVALDQSFRKLSMEHIVSAYKRTKTRAILLDYDDTLMPQGSIDKRPSSKSIDILNTLCRDKGNLVFIVSAKSRETLSDWFSPCEKLGIAAEHGYFLRLRKAVEWENCVAAVDCSWKQIAEPVMELYTETTDGSTIEDKETALVWSYEDADPDFGSCQAKELLDHLESVLANEPVTVKRGQNYVEVKPQGVSKGLIARRMLSMMQERGTLPEFVLCIGDDRSDEDMFEVICSSTEGPSIAPRAEIFACTVGQKPSKAKYYLDDTTEIVRLMHGLASVTDQITPV

SEQ ID NO: 1822 - protein, 1533 aa, Synechococcus sp. WH 8102; identical to SEQ ID NO: 597

SEQ ID NO: 1823 - protein, 526 aa, Rhodococcus sp. RHA1; identical to SEQ ID NO: 608

SEQ ID NO: 1824 - protein, 428 aa, Arabidopsis thaliana
  misc_feature (67)..(67): Xaa can be any naturally occurring amino acid
  misc_feature (90)..(90): Xaa can be any naturally occurring amino acid
TRAPKVKVFAQKGPPNFFGGVQFAGLRALEVPPPIKRVQKFGVNWGQFGNFGVEDRDFLKGSSLNLXGLELLLKRQQHLSPLPFQLYCVXTARSIGKDIEEAKYEAVSVAQRINDKYGSANYKPVVLIDYSIPFYEKIAFYAASDCCIVNAVRDGMNLIPYEYTVCRQGNEELDKLRGLNKSSSHTSTLIVSEFVGCSPSLSGAFRVNPWSMEDVADALYSVTDLTRYEKNLRHEKHYRYVRSHDVAYWARSFDQDLDKACIEQYSQRCWTTGFGLNFRVIALSPGFRRLSLEHLASSYKKANRRMIFLDYDGTLVPQTSHDKSPSAELISTLNSLCSDMKNTVFIVSGRGRDSLSEWFASCENLGIAAEHGYFIRWNKAAEWETSFSGIYSEWKLIADPIMHVYVETTDGSFIEPKESALVWHYQNT

SEQ ID NO: 1825 - protein, 524 aa, Bacillus cereus ATCC 14579; identical to SEQ ID NO: 614

SEQ ID NO: 1826 - protein, 899 aa, Oryza sativa; identical to SEQ ID NO: 1520

SEQ ID NO: 1827 - protein, 510 aa, Methanocaldococcus jannaschii DSM 2661; identical to SEQ ID NO: 620

SEQ ID NO: 1828 - protein, 1521 aa, Myxococcus xanthus DK 1622; identical to SEQ ID NO: 619

SEQ ID NO: 1829 - protein, 1532 aa, Synechococcus sp. WH 5701; identical to SEQ ID NO: 622

SEQ ID NO: 1830 - protein, 234 aa, Brassica napus
DFSSYAKRRSELTDKSCSSYFAPSWNSSLENGLLWMGGCRPSSFVRVIYALCGSCAEAHLSRYLLQIDENIDDGHDGDSSMSDLTATQLEKINDLHVKVIREEDKLTKKYANFQEDVADMPIAVNAFWRDSVEADVAVEDALDKHEECMGVLMAEADKVRVETLKRIVEVLTPVQAAEFLLSGKRLHVSLHEWGRAREERRFGCVHVRRLLPRLPAPLGRRRDQPLVDVCVRVL

SEQ ID NO: 1831 - protein, 257 aa, Zea mays
MSREDNVYMAKLAEQAERYEEMVEYMEKVAKTVDVEELTVEERNLLSVAYKNVIGARRASWRIISSIEHKEESRKNEEHVIQIKEYRGKIEAELSNICDGILKLIDSHLVPSSTAAESKVFYLKMKGDYHRYLAEFKTGAERKEAAESTMIAYKAAQDIALAELASTHPIRLGLALNFSVFYYEILNSPDKACNLARQAFDEAISQLDTLGEDSYKDSTLIMQLLRDNLTLWTADSTTEDGIEEGNEASKGDAGEGQ

SEQ ID NO: 1832 - protein, 525 aa, Staphylococcus aureus subsp. aureus COL; identical to SEQ ID NO: 629

SEQ ID NO: 1833 - protein, 462 aa, Alkalilimnicola ehrlichei MLHE-1
MSLITISNRVALPSQLQGAQGGLAVGLRSALEDGGGLWFGWDGRHEPRLPDPRPLAVQNANGVRYATLRLTRAEYERFYLGFSNQVLWPLFHYRLPYVHCQRADREGYWAVNRLFADRLPDLPDAESPIWIHDYHFIPLGQMLRERGITNPLGFFLHTPFPAWDVYRALPDHQALLEALCAHDLVGFQTDLDRDNFLDCLRHTDAIEVIDTARARYRGRVVHIGVFPIGIDVDSVAAHARHGFYSQQGRRLQASLGDRRLIIGVDRLDYSKGLDIRFEAYRRMLERRREHRARVVYLQIAPISRGEVPEYDEIRRELEYQAGHLNCQFAEYDWAPLRYLNRGFHRANVLGFLSRAHVGLVTPMRDGMNLVAKEFVAAQDPDDPGVLVLSHLAGAARELDAAVLVNPYDPDEVAERLHQALTMPLAERRERWTRMIRCLREQDITCWRDDYLQALQTAAGASG

SEQ ID NO: 1834 - protein, 475 aa, Pichia angusta
MVKGNVIVVSNRIPVTIKKTEDDENGKSRYDYTMSSGGLVTALQGLKNPFRWFGWPGMSVDSEQGRQTVERDLKEKFNCYPIWLSDEIADLHYNGFSNSILWPLFHYHPGEMNFDEIAWAAYLEANKLFCQTILKEIKDGDVIWVHDYHLMLLPSLLRDQLNSKGLPNVKIGFFLHTPFPSSEIYRILPVRKEILEGVLSCDLIGFHTYDYVRHFLSSVERILKLRTSPQGVVYNDRQVTVSAYPIGIDVDKFLNGLKTDEVKSRIKQLETRFGKDCKLIIGVDRLDYIKGVPQKLHAFEIFLERHPEWIGKVVLIQVAVPSRGDVEEYQSLRAAVNELVGRINGRFGTVEFVPIHFLHKSVNFQELISVYAASDVCVVSSTRDGMNLVSYEYIACQQDRKGSLVLSEFAGAAQSLNGALVVNPWNTEELSEAIYEGLIMSEEKRRGNFQKMFKYIEKYTASYWGENFVKELTRV

SEQ ID NO: 1835 - protein, 785 aa, Xanthomonas campestris pv. campestris str. ATCC 33913
MTDQTRLPNTSSLTHPRPDPAVILATDLDGTFLAGSAEHRHQLYRLVDQHPEIRLIFITGRGLEAVMPLLTDPTIPRPDYVVCDVGATVVDGHTLQPLQPLQSMIDAHWPGEQVVAQAMRAFPQLQRQDMPQERRCSYFCDPHTLAPLRAQIEQTARALGCDVLYSADRYLDILPPDTDKGRTLGALARQLELPRERILVAGDTLNDLSMYLAGFRGVCVGDSEAALTQATAQLDATYHASAPGCGGILEAIAHFGLLADDDPHVPAVQAPRKGGAELVMVYHRLPYDEVVEHGELVRRAPRSPNGIIPSLLSFFEGGQRGSWVAWSVDDPKRGPFQTHTEVDAQRYPTLTAARVPLSKSEVDIFYKRFSKEAFWPMLHVFWERARFREDDWQVFLAVNRKFAQATSAEAAHGATVWIHDYNLWMVPAYLRELRPDLKIAFFHHTYFPSADVFNVVPWRREIIGSLMCCDYVGFHIPRQVENFVDVVRGVMPVERLAQESCAPRFLTYGCAVGLDTMTTCLRVADRDVALGAHPVGTDLRRIRAALSKPDVRNDIFKLRREIGARKLVLSVERLDYTKGTLAKLEAFERLLDSQRQLLGKVTLLMVCVPAAREMTIYRTLQTQIEQAVGRINGRFSRLDWTPVRFFAQALPFEQVVAHYAAAQVMWITPLRDGLNLVAKEFVAVQGIEGGSGVLVLSEFAGAAAELKGAVLTNPHDPADLAAGLLQALAMPDDEAAGRLRQLYDSVEYYNIDHWGRDFLDAVARSRGAHARVPLAAASTVAEPVA

SEQ ID NO: 1836 - protein, 164 aa, Glycine max
  misc_feature (53)..(53): Xaa can be any naturally occurring amino acid
  misc_feature (79)..(79): Xaa can be any naturally occurring amino acid
SLHPWALSHYMLPLSPALVVRIHTTLSACYLSVTNIFAPNSWGCISPDADCEXYRDYHLMVLPRLWRCTFTILTIGSLXHSHFPSSEIYPTRPARNELHKSLLKSDLIDVPTFDYAKHFLSCCSRMIGISYQSRRGYFGLDNYGSPVCIIMLPAGIHRGRLHSD

SEQ ID NO: 1837 - protein, 553 aa, Bordetella parapertussis 12822; identical to SEQ ID NO: 668

SEQ ID NO: 1838 - protein, 657 aa, Medicago truncatula
MRSEDVHKTAFRTHEGHYEFLVMPFGMMNAPSTFQALMNDIFKPLLRKFVLPIKRNAILPSSVEYLGPIISHEGVAMDPAKIKCVLQWPVPKHVKGVRGFLGLTSYYRKFIKDYGKLAKPLTELTKKEGFMWGAQEQVAFEVLKHRVTTAPVLALPDFSKEFYIESDASGNGLGAILLQNGRLIAYFSKALGDRNLTKSAYEKELMAVALSIQHWRPYLMGRKFTVCTDQKSLRQLLQQQITTMDQQNWAAKLFGYQFDILYKPGLENKGADALSRVHDSPELHSLVHYPEWLEGKEVLEEVHKDEVLKGIISALQKGEPTKPGFAYRRGVLFYEDRLVLAANSKWIPKLLLEFHSSPQATTPGRLLQSLPVPSQIWEDVSKDFITGLPKSKGYEAVMVVVDRLSKYAHFIPLKHPYSAKTLADVFVKEVIRLHGVPISIIFMDSVVVDSDKGNEADHSFLEESTHILDGVELQEPYVGMEFDSEEAARKFYAEYARRVGFVVRVMQRRRSGIDGRTLARRLGCNKQGFSPNSKGTLGKEKRPRPSAREGCMATILVKMEKSGKWVVTRFIKDHNHPLTATANGFRTEDDKDKKIAELTMELERQDELCAAYREKLLSFINNIEEQTEEMSTRVQLIIENIRRAESEMQKSSQKVYN

SEQ ID NO: 1839 - protein, 1515 aa, Azospirillum brasilense; identical to SEQ ID NO: 675

SEQ ID NO: 1840 - protein, 550 aa, Burkholderia cenocepacia J2315; identical to SEQ ID NO: 674

SEQ ID NO: 1841 - protein, 526 aa, Bacillus pumilus SAFR-032; identical to SEQ ID NO: 677

SEQ ID NO: 1842 - protein, 209 aa, Bacillus subtilis
IEKLRDVGQKPVGIKLVAGHPEELHELFSHMQKSGKHPDFITIDGSEGGTGASFYELADTVGLPIMTALPIVDTLLKQYGLRSQLKIFASGKLLTPDKIAVALALGADFVNIARGMMFSVGCIRALVCHTNTCPAGVATTDPKLQKALSVEEKQHRVCNYVISLREGLFNLAAAAGINSPIHFSKEHVVYRKEDGSIINIDNLIHQFVS

SEQ ID NO: 1843 - protein, 498 aa, Mycobacterium leprae TN
MTSRGNHGSKTSSDKHLGDSDFVVVANRLPVDQVRLPDGTAIWKRSPGGLVTALEPLLRQRRGAWVGWPGVINDNVDLDLTIKSIVQDGLTLYPVRLNTHDVAEYYEGFSNATLWPLYHDVIVKPIYHCEWWERYVDVNRRFAETTSRTAAYGGTVWVQDYQLQLVPKMLRIMRPDLTIGFFLHIPFPPVELFMQIPWRTEIIEGLLGADLVGFHLTSGAQNFLFLSRHLLGANTSRGLVGVRSRFGEVQLKSHTVQVGAFPISIDSKEIDQATRDRNVRRRAREIRAELGNPRKILLGVDRLDYTKGIDVRLRAFAELLAEGRAKRDDTVLVQLATPSRERVESYKILRNDIERQVGHINGEYGEVGHPVVHYLHRPIPRDELIAFYVASDVMLVTPLRDGMNLVAKEYVACRNDLGGALVLSEFTGAAAELRQAYLVNPHDLEGVKDTIEAALNQLAEEARRRMRSLRRQVLAHDVDRWARSFLDALAEAPARDAT

SEQ ID NO: 1844 - protein, 455 aa, Xanthomonas campestris pv. vesicatoria str. 85-10
MSRLVVVSNRVAVPGETRAGGLAVGLLAALKERGGMWFGWSGKTVRGDSGGMHEQTEGDITFVTMDLNKRDIDSYYNGFANRTLWPLLHFRLDLVDYDRATREGYMRVNRLFAEKLAPLLKDSDTLWIHDYHMIPLGAMLRELGVGCKMGFFLHVPMPSADLVQAMPDHARLFSTFYAYDLVGFQTQRDAERFKAYVRLFGGGRILEGDLVEGPGGRRFTASSFPIGIDTDLIAHQAKASAGKQAVRDLRESLRGRQLAIGVDRLDYSKGLPERFQGFERYLERYPDQSGSLTYLQIAPVSRGDVTEYRQLRSQLEQIAGHINGGHAEPDWTPLRYVNQNFSHATLTGFYRAASVCLVTPLRDGMNLVAKEFVAAQDPADPGVLVLSLFAGAADEMKEALLVNPHDLDGVADAIATAASMPLASRIERWHAMMDHLRKNNINHWRQRYLQALSEV

SEQ ID NO: 1845 - protein, 497 aa, Nitrosomonas europaea ATCC 19718; identical to SEQ ID NO: 690

SEQ ID NO: 1846 - protein, 349 aa, Glycine max
  misc_feature (239)..(239): Xaa can be any naturally occurring amino acid
  misc_feature (277)..(277): Xaa can be any naturally occurring amino acid
MEAIKKMNYRGWRSKVIDITYSKECGKRGLDEALDRMCAEAHDAINEGYTTLVLSDRAFSKKRISVSSLLAVAPVHQHLVKNLERTRVALIVESAEPREVHHFCTLVGFGADAICPYLAVDAIWRLQVDGKIPPKASGEFHSKDELVKKYFKASNYGMMKVLAKMGISTLASYKGAQIFEALGLSSEVIAKCFAGTPSRVEGATFEMLARDAFQLHELAFPSWVFSPGSAEAVALPNPXDYHWRKGGEVHLNDPLAMAKLHEAASSNSVDAYKQYSXLSHELNKACNLRGLLKFKETAVKIPIDEVEPASEIVKRFCTGAMSYGSISLEAHTALAMAMNKMGGKSNTGE

SEQ ID NO: 1847 - protein, 872 aa, Zea mays
GHAARPPLAGSRSGFRRLGLRGMKQRLLVVANRLPVSANRRGEDHWSLEISAGGLVSALLGVKDVDAKWIGWAGVNVPDEIGQRALTKALAEKRCIPVFLDEEIVHQYYNGYCNNILWPLFHYLGLPQEDRLATTRNFESQFDAYKRANQMFADVVYQHYQEGDVIWCHDYHLMFLPKCLKDHDINMKVGWFLHTPFPSSEIYRTLPSRLELLRSVLCADLVGFHTYDYARHFVSACTRILGLEGTPEGVEDQGRLTRVAAFPIGIDSDRFKRALELPAVKRHINELTQRFAGRKVMLGVDRLDMIKGIPQKILAFEKFLEENPDWNDKVVLLQIAVPTRTDVPEYQKLTSQVHEIVGRINGRFGTLTAVPIHHLDRSLDFHALCALYAVTDVALVTSLRDGMNLVSYEYVACQGSKKGVLILSEFAGAAQSLGAGAILVNPWNITEVADSIHHALTMPSDEREKRHRHNYAHVTTHTAQDWAETFVFELNDTVAEALLRTRQVPPGLPGQTAIQQYLRSKNRLLILGFNSTLTEPVESSGRRGGDQIKEMELKLHPDLKGPLGALCEDERTTVIVLSGSDRSVLDENFGEFKMWLAAEHGMFLRPTYGEWMTTMPEHLNMDWVDSVKHVFEYFTERTPRSHFEHRETSFVWNYKYADVEFGRLQARDMLQHLWTGPISNAAVDVVQGSRSVEVRSVGVTKGAAIDRILGEIVHSENMITPIDYVLCIGHFLGKDEDIYVFFDPEYPSESKVKPEGGSASLDRRPNGRPASNGRSNSRNPQSRPQKAQQAASERSSSSSHSSTSSNHDWREGSSVLDLKAENYFSCAVGRKRSNARYLLSSSEEVVSFLKELATETAGFQSSCADYMFLDRQ

SEQ ID NO: 1848 - protein, 259 aa, Helianthus annuus
MAAASSPREENVYLAKLAEQAERYEEMVEFMEKVVAAADGGEELTIEERNLLSVAYKNVIGARRASWRIISSIEQKEESRGNEGHVSTIRDYRSKIESELSSICDGILKVLDSKLIGSASGGDSKVFYLKMKGDYYRYLAEFKTGDERKLAAENTLSAYKAAQDIANAELAPTHPIRLGLALNFSVFYYEILNSPDRACNLAKQAFDEAIAELDTLGEDSYKDSTLIMQLLRDNLTLWTSDMQDDTAEEVKEAPKPDDQ

SEQ ID NO: 1849 - protein, 917 aa, Triticum aestivum; identical to SEQ ID NO: 701
  misc_feature (450)..(450): Xaa can be any naturally occurring amino acid
  misc_feature (627)..(627): Xaa can be any naturally occurring amino acid

SEQ ID NO: 1850 - protein, 1498 aa, Leptospira interrogans serovar Copenhageni str. Fiocruz L1-130; identical to SEQ ID NO: 705

SEQ ID NO: 1851 - protein, 260 aa, Nicotiana tabacum
MAESTREENVYMAKLAEQAERYEEMVEFMEKVAKTVDVEELTVEERNLLSVAYKNVIGARRASWRIISSIEQKEESRGNEDHVSSIKEYRGKIEAELSKICDGILNLLESHLIPVASTAESKVFYLKMKGDYHRYLAEFKTGAERKEAAENTLLAYKSAQDIALAELAPTHPIRLGLALNFSVFYYEILNSSDRACNLAKQAFDDAIAELDTLGEESYKDSTLIMQLLRDNLTLWTSDTTDDAGDEIKEASKRESGEGEQ

SEQ ID NO: 1852 - protein, 260 aa, Nicotiana tabacum
MAESTREENVYMAKLAEQAERYEEMVEFMEKVAKTVDVEELTVEERNLLSVAYKNVIGARRASWRIISSIEQKEESRGNEDHVSSIKEYRGKIEAELSKICDGILNLLESHLIPVASTAESKVFYLKMKGDYHRYLAEFKTGAERKEAAENTLLAYKSAQDIALAELAPTHPIRLGLALNFSVFYYEILNSSDRACNLAKQAFDDAIAELDTLGEESYKDSTLIMQLLRDNLTLWTSDSTDDAGDEIKEASKRESGDGEQ

SEQ ID NO: 1853 - protein, 469 aa, Vitis vinifera
MDHVLLALQESKEERDVRIRSLFNFFDSANLGYLDYAQIEGGLSALQIPPEYKYAKDLLKVCDSNSDGRVDYQEFRRYMDDKELELYRIFQAIDVKHNGCILPEELWDALLKAGIEIDDEELARFVENVDKDNNGIITFEEWRDFLLLYPHEATIENIYQYWGRVCLVDIGEQAVIPEGISKHVHASKYLLAGGVAGAASRTATAPLDRLKVVLQVQTTHARIVPAIKNIWKEGGLLGFFRGNGLNVVKVAPESAIKFYTYEMFKNVVRDAKGEAKDDIGAAGRLFAGGMAGAVAQTAIYPLDLVKTRLQTYTCEGGKVPYLKTLARNIWFQEGPQGFYRGLVPSVLGIIPYAGIDLAAYETLKDMSKTYLLHDSEPGPLVQLGSGTISGALGATCVYPLQVIRTRMQAQRTNTDASYNGMSDVFRRTLQHEGFRGFYKGLFPNLLKVVPSASITYLVYETMKKSLDLD

SEQ ID NO: 1854 - protein, 411 aa, Arabidopsis thaliana
MVLESYTNLLDMCCEDVFDFQQPLRSLRHVVNSPGIISDPDWESSNDGNSVGSMPFCFKRKIIVANFLPVICAKNEATGEWSFAMDDNQLLVQLKDGFPIDNEVIYVGSLNVQVDPIEQDRVSQKLFKEHRCVPTFLPAELQHQFYHIFCKQHLWPLFHYMLPVCHDKDELFDRSLFQAYVRANKIFAGKIVEAVNSDDDCVWVHDYHLMLIPTLLRKKLHRIKVGFFLHSPFPSSEIYRTLPVRDEILKSLLNADLIGFQTFDYARHFLSCCSRLLGLNYESKRGHIGIEYFGRTVSLKILAAGVHVGRLEATLKLPATIKKVQEIESRYSGKLVILGVDDMDIFKGISLKLLGLELLLERTPKLRGKVVLVQIVNPARSIGKDIEEAKYEAVSVAQRCLNTIKLEREGG

SEQ ID NO: 1855 - protein, 270 aa, Zea mays
MAATPAPPSHGGGRNGTLPPPLPSNESFSKFFESWISEQSRDLEELRAAASADPPAPEAELRRLVGQVLGHYAQYYRAKAAAAADDVLCMFTPSWTSTTENLYLWCGGWRPTAAIQLLYTKSGMQLQHQLPAFLDGGGLKDDLGDLGAAQLQAADQLQRRTIRREREIEDAAASAQEALTTATMVELAGGGGRDAGAMDREMQAKAAGMRRVLEMADALRLEDDARGVNLSHATISRYGANTYIWRDKGRHVSGMEVLSYRASDHADSLA

SEQ ID NO: 1856 - protein, 876 aa, Zea mays
MSDLASSCKDKLAYFRIKELKDILNQLGLPKQGKKQDLVDRVLAILSDEQGQHHHGWGRKNALTREAVAKVVDDTYRKMQVCAPDLPSRSHSGSDFSHFRPKEEAPDFYHVDTKVRCLCNSTLLNDNMIKCEDGKCQVWQHITCVLIPDKPTEGAGPDIPPHFYCELCRLKRADPFWVTTGNPLLPVKFMSSGVGNDGASVPQIVEKTFQLSRADRETVQRQEYDLQVWCILINDKVQFRMQWPQYAELQVNGIPVRVMTRPGSQLLGINGRDDGPLVTTCSREGINKISLSRVDARTFCFGVRIVRRRTVPQVLNLIPKEGEGESFEDALARVRRCLGGGGATDNADSDSDLEVVTESVTVNLRCPNSGSRMRIAGRFKPCVHMGCFDLETFVELNQRSRKWQCPICLKNYSLENLMIDPYFNRITSLLHNCSEDVNELDVKPDGSWRVKGDAATRDLSQWHMPDGTLCDSKEDTNPGVVSVNEFKREGTSDGHRTLKLGIKKTPNGLWQVSSKPDDKKPVVRNHIQNNTGYSIPNIVPMISSPTGSCRDGEDVSVNQEGGGIQFDISLNQEFDSFAHNFGQTYNTEDRQQEPQHNAADVIVLSDSDEENDPIVRLPAVYANTPTNGDSFPFVTDAAVSGYPEGYQEDAGVGTSGLGLLSNNTGDFEINNWQMHSYPQPEQGFQFFGTDTDVGNPFVGPHNSFSITPEDYSLDCNVGIEDPSAAHDVSICRNSNDVHGSLVDNPLALAGDDPSLQIFLPSQPSTVPLQEELSERANTPNGVHPDDWRISLTLAAGGGGNEEPTSVDGLKSQPKVPSKEAGVEPLLDAASALPSMNNDRCNGSNLNPRRIENIFSHPRQPRSVRPRLCLSLDSDSE

SEQ ID NO: 1857 - protein, 535 aa, Rhodococcus sp. RHA1; identical to SEQ ID NO: 715

SEQ ID NO: 1858 - protein, 1489 aa, Chlorobium tepidum TLS; identical to SEQ ID NO: 722

SEQ ID NO: 1859 - protein, 469 aa, Burkholderia pseudomallei K96243
MSRLIIVSNRVAPISEGEPAAGGLAIGVYDALKETGGMWFGWSGEVIASGVPQIRIEEHGPVTFATIGLSRRDYDQYYRGFSNATLWPAFHYRADLIQFDRHEFEGYSRVNVWLAQQLVPLLRDDDVIWVHDYHLIPFARALRTAGVKNRIGFFLHIPFPAAQVLVNVPPHRELVEALCSFDLLGFQTDTDLRAFFEYVEYEAGGTVDRAAHPARVDAFGRTLRAAAYPIGVYPDEIAALAKAGENGRAVKSLAASLRGRQLVMSVDRLDYSKGLVERFRAFEKLLEHETSFRNRVSFLQIAPSTRADLRAYQDIRRQLEGESGRINGRFAELDWAPILYIHRQYERPVLAALYRLARVGYVTPLRDGMNLVAKEYVSAQDPDDPGVLVLSRFAGAACELTGALIVNPIDIGGMADALSRALSMPLAERRARHADMLARLRENNVSVWRDHFLRDLGRQRAASGAGRGR

SEQ ID NO: 1860 - protein, 506 aa, Frankia sp. EAN1pec
MSDIDLLDLPLVLLSNRGPVSFDRDASGRTVNRGAGGLVSALSGLAEHLDDAVWVCGAATPEDAAVAGENDGGAILVQTQPTPHVVEGQPDGPSIRVRLVVTDPDAYADFYSVWSNPILWFIQHGLYGRSLAPVLTRAEHDAFENGYAAVNRAYADAVADEVQSRGGKALVLLQDYHFYLVAEHVREQCPDVVLTHFVHIPWPGPDEWRVLPGNIRERLLRGLLGSDVVGFHTRRYARNFVLCAGELLGLPINLDDLTVTVNNRVVSARYYPISVDPAALDATLASEDVAAHMAMLRYVFLDEDRQLVLRVDRTDPSKNVVRGFLAFGTLLDQHPELVGRVSFLALLQPSRTDVPEYADYIALIGAVVAEINAKHTKEGRQPIDLRMVEDFALAVAAYSICDVLMVNAIADGMNLVAKEVAVVNRRGGVLALSEMAGSHEELGEFAVTLHPFDVQQMADALYTALTMPMEERHRRLAAAAEQVRTHDVRRWLNDQLADLRHLAGFS

SEQ ID NO: 1861 - protein, 1581 aa, Agrobacterium tumefaciens str. C58; identical to SEQ ID NO: 731

SEQ ID NO: 1862 - protein, 260 aa, Nicotiana tabacum
MADSSREENVYMAKLAEQAERYEEMIEFMEKVAKTGDVEELTVEERNLLSVAYKNVIGARRASWRIISSIEQKEESRGNEDHVKTIKEYRAKIEAELSKICDGILGLLESHLIPSASAAESKVFYLKMKGDYHRYLAEFKTGSERKEAAENTLLAYKSAQDIALTELAPTHPIRLGLALNFSVFYYEILNSPDRACNLAKQAFDEAISELDTLGEESYKDSTLIMQLLRDNLTLWTSDNAEDAGDDIKEAPKHESSEGQQ

SEQ ID NO: 1863 - protein, 260 aa, Nicotiana tabacum
MAESSREENVYMAKLAEQAERYEEMIEFMEKVAKTGDVEELTVEERNLLSVAYKNVIGARRASWRIISSIEQKEESRGNEDHVKTIKEYRAKIEAELSKICDGILGLLESHLIPSASTAESKVFYLKMKGDYHRYLAEFKTGSERKEAAENTLLAYKSAQDIALTELAPTHPIRLGLALNFSVFYYEILNSPDRACNLAKQAFDEAISELDTLGEESYKDSTLIMQLLRDNLTLWTSDNAEDAEDDIKEAPKHESGEGQQ

SEQ ID NO: 1864 - protein, 66 aa, Physcomitrella patens subsp. patens
MHYRGVRQRPWGKFAAEIRDSSRQGSRLWLGTFDTAEEAALAYDDAALRLRGSRALLNFPLRAASG

SEQ ID NO: 1865 - protein, 442 aa, Mesorhizobium loti MAFF303099; identical to SEQ ID NO: 735

SEQ ID NO: 1866 - protein, 1517 aa, Escherichia coli O157:H7 EDL933; identical to SEQ ID NO: 738
  misc_feature (382)..(382): Xaa can be any naturally occurring amino acid
  misc_feature (1285)..(1285): Xaa can be any naturally occurring amino acid

SEQ ID NO: 1867 - protein, 201 aa, Glycine max
IKYSEVADFYDYYKGQMEAWDGPALLLFSDGKTVGACLDRNGLRPARYWRTSDNMVYVASEVGVVPVDESKVVLKGRLGPGMMITVDLLGGQVYENTEVKKRVALSSPYGNWIKENLRTLKLGNFLSASVLDNEAVLRHQQAFGYSSEDVQMVIESMAAQGKEPTFCMGDDIPLAALSQKPHMLFDYFKQRFAQVTNPAID

SEQ ID NO: 1868 - protein, 1527 aa, Gracilaria tenuistipitata var. liui; identical to SEQ ID NO: 740

SEQ ID NO: 1869 - protein, 1000 aa, Gossypium raimondii
MSKIKGTKKLVSAHLTLPQGLNQKNIKPNAALNREIAPPIISCHLIIMTSLVTSFTSMSSRIPQNTFVRITWRCREQGKCKNEVMFKYGGGPQIVQVPFKWFSDTVLGQYEEHVIHSSPLFNEDDAWGHRVALNNTRGDSPVSHMISLLKPNADLASGNFPAMGQPREKKRLPRVMTVPGVISELDDDQANSVTSDAPSSAIQDRIIIVANQLPVKAKRRPDNKGWSFSWDDDSLLLQLKDGLPEEMEVLYVGSLKVDVDPVEQDDVSQLLLDKFKCVPAFLPSDILTKFYHGFCKQHLWPLFHYMLPFSASHGGRFDRSLWEAYVAANKIFSQRVIEVINPEDDYVWIHDYHLMVLPTFLRRRFNRLRMGFFLHSPFPSSEIYRTLPVREEIMKALLNSDLIGFHTYDYARHFLSCCSRMLGLEYQSKRGYIGVEYYGRTIGIKIMPVGIHMGQIKSVLSLADKEWRVAELKQQFEGKTVLLGVDDMDVFKGIDLKLLAMEQMLKQHPKWQGRAVLVQIANPSRGRGKDLEDIQAEIQASCKRINETFGQPGYEPIVLIDRPVSLCERFAYYTIAECVVVTAVRDGMNLTPYEYIVGRQGVSESESSSESSGPKKSMLVVSEFIGCSPSLSGAIRVNPWNTESTAEAMNEAISMSDAEKQLRHEKHYRYVSSHDVAFWSRSFFQDLERTCKDHFRRRCWGIGLSFGFRVVALDPNFGKLSIDHIVSVYLRSKNRAILLDYDGTVMPQTSHNKTPSAEVISIINALSGDTKNTVFVVSGRGRESLGKWFSPCKKLGIAAEHGFFMRWSANDEWELCGQNSEFGWKQIAEPVMKLYTESTDGSSIETKESALVWHHRDADPGFGSSQAKEMLDHLESVLANEPVAVKSGQFIVEVKPQGVSKGMVAEKIFTTMSEKGKQADFVLCIGDDRSDEEMFEIISNAISSGILSSSTSVFACTVGQKPSKARYYLDDPAEVLNMLEALAEASDPESFTDTESEGSL

SEQ ID NO: 1870 - protein, 435 aa, Hordeum vulgare
GVGFVANLSNEPSFNVVRDALTALGCMEHRGGCGADNDSGDGAGLMSGIPWDLFDDWASKEGLVPFERTHTGVGMVFLPQNENSMEEAKAAVEKVFTDEGLEVLGWRPVPFNLSVAGRNAKETMPNILQIFVRIAKEDDADDIERELYICRKLIERATKSASWADELYFCSLSSRTIIYKGMLRSEVLGQFYLDLQNELYKSPFAIYHRRFSTNTSPRWPLAQPMRLLGHNGEINTIQGNLNWMRSREATIQSPVWRGRENELRPFGDPKASDSANLDNAAELLLRSGRSPAEAMMMLVPEAYKNHPTLSVKYPEVIDFYEYYKGQMEAWDGPALLLFSDGRTVGACLDRNGLRPARYWKTSDGFVYVASEVGVIPMDESKVVMKGRLGPGMMITVDLETGQVLENTEVKKNVASAKPYGTWLQESTRSIKPVNF

SEQ ID NO: 1871 - protein, 214 aa, Physcomitrella patens subsp. patens
DEQECAKLVKKCYDHYTEAAHAKVRAAHEDASYIATGAWKTPFEAGMMWMGGWRPTTAIVLVFSLIGLQIENELQRLLEGINVSSMAALSAKQLAKLNALQQHTSTEEDEISNRLAVLQVCFDAFNHRGLQMLVADQQMTRATTADPPSSDCFNMAEIREAIEPKLAGLRDLFVEAETLRLRTLQELFDVLSPIQAAQYAVAALEMAKAIHKLG

SEQ ID NO: 1872 - protein, 550 aa, Coxiella burnetii RSA 493; identical to SEQ ID NO: 746

SEQ ID NO: 1873 - protein, 938 aa, Oryza sativa Japonica Group
MADLVSSCKDKLAYFRIKELKDILNQLGLPKQGKKQDLIDRVLALLTDEQGQRHHGWGRKNSLTKEAVAKIVDDTYRKMQIQCAPDLATRSHSGSDFSFRPIEEAYDSFQPEAKVRCICSSTMVNDSMIQCEDQRCQVWQHLNCVLIPDKPGESAEVPPVFYCELCRLSRADPFWVTAGNPLLPVKFVSSGVTNDGTSVPQSVEKSFQLSRSDRETVQRQEYDLQVWCMLLNDKVQFRMQWPQYAELHVNGISVRVVTRPGSQLLGINGRDDGPLITTCSREGINKICLSRVDARTFCFGVRIAKRRTVAQVLNLVPKEAEGESFEHALARVRRCLGGGDTAENADSDSDLEVVAESVTVNLRCPNSGSRMRIAGRFKPCIHMGCFDLETFVELNQRSRKWQCPICLKNYSLESLMIDPYFNRITSLLRNCNEDVNEVDVKPDGSWRVKGDAASRELSQWHMPDGTLCNPKEDVKPAMQNGNEQMMEGTSDGQKSLKIGIKRNPNGIWEVSSKADDKKPSVVGNRMQNNSGFRALNNIMHMSNSPTSSYRDGEDPSVNQESNRHVDLSLNNGNNEFDSFSLNFGQACNTDDRPQQQHNATDVIVLSDSDEENDAMVCPPAVYDNTTTANGSGFPFTTNGIGYTERYQEDAGVGTSGLGLLSNNVDDFEMNNWQMHSSYQQPEQGFQFFGNDTDVHNTFVGSHNSFGLAPNDYSLDCNVGVEEASVTPALSVCRNSNEMHGSLVDNPLALVGDDPSLQIFLPSQPSSVPLQEELSERANAPNGVQSDDWISLTLAAGGGGNEEPAPADVNSQPQIPSTETGIEPLTDAASAFLSTNIERRSGADLNPRRIENIFSHPRQPRFAMQCTRMLGFVLTAPSMLAHPTVRILHLDDGFWRSALLRLGMTHECLPGSLLAQGARGNMQFVPEAAPDLPGDGIAQ

SEQ ID NO: 1874 - protein, 795 aa, Oryza sativa Indica Group
MVSKSYTNLLDMSGEDVFDFQQPFRSLPRFVTSPSITSNPDWDTSNADDSVGPASCCVRKIIVSNFLPLNCTKDEATGQWSFSMDDNQLLVQLKDGFPMESEVVYVGSLNAEVDPGEQDQLSQKLFREYKCIPTFLPADLQQQFYHGFCKQQLWPLFHYMLPICLDKGELFDRSLFQAYVRANKIFGDKVMEAINSDDDCVWVHDYHLMLLPTFLRKKLHRIKIGFFLHSPFPSSEIYRTLPVRDEILKSLLNADLIGFQTFDYARHFLSCCSRLLGLNYESKRGHIGIEYFGRTVSLKILAVGVHVGRLESVLRLPATISKVQEIEQRYKGKMVMLGVDDMDIFKGISLKLLGLEFLLERTPKLRGKVVLVQIINPARSTGKDVEEAINEAVSVAERINIKYGSAEYKPVILIDYPIPSYEKIAYYAASDCCIVNAVRDGMNLIPYEYTVCRQGNEEIDKLRGLDKSSHHTSTLIVSEFVGCSPSLSGAFRVKSLEVIALSPGFRRLSLEHFASSYKKTNRRLIFMDYDGTLVPQSSVNKVPSAEVISILTSLCNDPKNCVFIVSGRDRTTLSEWFASCDKLGIAAEHGYFIRWNKEGEWETSSSAQDCEWKNITEPIMEVYKETTDGSAIETKESGLVWHYQDADHDFGSCQAKELVSHLERVLANEPVVVKRGHQIVEVKPQGVSKGIAVDTVIRTLINNENAPDFLMCIGNDRSDEDMFESINEAVSRSVFPTAPDVFACSVGQKASKAKYYVDGCSEVIRLLKGVTAITPRREVISQSQVTFRDILEVVS

SEQ ID NO: 1875 - protein, 1487 aa, Vibrio parahaemolyticus RIMD 2210633; identical to SEQ ID NO: 752

SEQ ID NO: 1876 - protein, 774 aa, Vitis vinifera
MAGESRMNMAITGSVGGGGHVSLLVASVADLLEMHIQSGQLLDSAEFSNLCLSLARGIDYAVANNEIPVRARDLPLLLKQVLRCMNDSSLLAVFVVLMISVKNACKIGWFPDHDANDLLALAKEIGKNFSTMEDINVQPIFLYSRSLCLSRYYPRFRMGHMLASLDVKPGYGAFVVDFHITKSMLSPAQKRICLFVAQTDNMDTSSCIVLPPQANFMLNGQGVRGRINGSMDNGPQLPTNVTAMLKYGKNLLQVVGQFNGNYVIVIAFMSMISTSNTPELQDYIQPVAVTPDSEVIEGQARISLNCPISFKRIKIPVKGHLCKHHQCFDYGNFMEINSRRPSWRCPHCNQPVCNPDIRIDQKMVLKEVEENVVDVIISPDGSWKPVVESIDHETQSNQQEHSEQCESVGFSNIPAQVVDLTMGEDDEDECLSSLGTEDVKPLSYNLQGSSAAENFLPPGVNYMVEADQSGSSQTEDHVWSAEQFPPSVSNGFVLPTMSSNGQRNFGVSRTPSSFMSSHVLTDAISPSLWETLGVHRETQMPISSLQNQYFRAGNTEIQQTRFGSLSTSNEYRMVCLPNLGATQVIKSRNIVHPSIRIQPGQVQQRRSSVQVTGAAGQERAQMSSMPPSVPVQLQPARTGTRFSYAMVAEQLRTAAEEERRNMMGRTGMAVEQLGTAWSSPGADALAENWQPPGTMRGSLTGEADSAAISQFMLQPPTSLTATLESGLPAFWPFPSSSTDHNAMYSQTETQGRLRSNWAGTGSSGGLPEWTPWIP

SEQ ID NO: 1877 - protein, 1583 aa, Vibrio parahaemolyticus RIMD 2210633; identical to SEQ ID NO: 754

SEQ ID NO: 1878 - protein, 1522 aa, Shigella flexneri 2a str. 301; identical to SEQ ID NO: 753

SEQ ID NO: 1879 - protein, 418 aa, Candidatus Kuenenia stuttgartiensis
MGKLKNEYFLKHIGDHGAEVYDSTIDFIHSLKKQGCKTAIISSSRNCAMILDSTNLSSLFDVRVDGLDSEVLGIKGKPAPDIFLEAARQLKAKPERAVVIEDAISGVQAGKAGKFRLVVGVARTGDKESLLENGADVVVEDLSEIGVRNDIEVIHGLPSALDSIDDIANQARGKRIAVFLDYDGTLTPIVETPDKAIMAEDMREAVIKLSNNCTVGIISGRDLKDVQEKVEIDSFVYAGSHVFDIAGPEGLNIKSQAGAEFLPVLDKAEKELSEKLRSIEGVFVERKKFAIAIHYRLVTPEKAELVDEIVDKVASVYPELRKAYGKKIFELQPDIDWHKGKALLTLLKALKLDGDDVLPFYIGDDVTDEDAFWTLKGSGIGIVVWDEPYETAASYSLKNPEEVRKFLLKLIPLGGGHE

SEQ ID NO: 1880 - protein, 1515 aa, Vibrio angustum S14; identical to SEQ ID NO: 763

SEQ ID NO: 1881 - protein, 1487 aa, Vibrio angustum S14; identical to SEQ ID NO: 764

SEQ ID NO: 1882 - protein, 358 aa, Zea mays
  misc_feature (160)..(160): Xaa can be any naturally occurring amino acid
MTGAAAPAAPPRGGASASQPHAAAPAGKRAGCEPVRKAGPVTMEHVLLALHETEAEREARIRDMFAFFDTAGSGQLDYAQIEAGLAALQVPAECKYARELLRACDRDRDGRVGYDDFRRYMDDKELELYRIFQAIDVEHNGCILPEELWDALIKAVCCLXGIEINDEELARFVEHVDKDNNGIITFEEWRDFLLLYPNEATIENIYHHWERVCLVDIGEQAAIPEGISKHVNASKYLIAGGIAGAASRTATAPLDRLKVIMQVQTTRTSVMHAIKDIWTKGGMLGFFRGNGLNVVKVAPESAIRFYAYEMLKEYIMKRKGENKSEVGASERLIAGGLAGAVAQTAIYPIELVKTRLQT

SEQ ID NO: 1883 - protein, 521 aa, Rhodococcus sp. RHA1; identical to SEQ ID NO: 767

SEQ ID NO: 1884 - protein, 777 aa, Oryza sativa Japonica Group
MEFVYVGGLRDDVPAAEHDEVAHHLLEGFRCVPTFLPADLRSRFYHGFCKQQLWPLFHYMLPLSPELGGRFDRALWQAYVSVNKIFADKILEVISPDEDYVWVHDYHLMILPTFLRKRFNRVKLGFFLHSPFPSSEIYKTLPAFPVLLWKDARVEYESQRGYIALEYYGRTVTIKILPVGVHLEQLRSVLNLPETGVKVAELLKQFCDQNRLMLLGVDDMDIFKGISLKLLAFEQLLMQHPEWRGRVVLVQIANPARGRGKDVKEVQDESYAMVRRINEAFGQPGYQPVILIDRPLQFYERMAYYVVAECCLVTAVRDGMNLIPYEYVIARQGNEKLDGILGLGPSARKKSMLVVSEFIGCSPSLSGAIRVNPWNIDAVADAMDSALEMPEGEKVLRHEKHHKYVSTHDVGYWANRFLQDLEKTCLEPSRKRCLGDRFGAKNNMVFLVSTKKRSTLEEWFSSCDNLGLAAEHGYFLRLKRDAEWETCVPVTDRSWKQIAEPVMKTYTETTDGSTIEDKETAIVWSYEDADPDFGSCQAKELHDHLESVLANEPVTVKAGLNHVEVKPQGVSKGLVAKRLLSIIRENSLLPDFVLCIGDDRSDEDMFEVITTAAQDNCLSPDAEVFACTVGRKPSKAKYYLDDLADIVRLIQGLANVSDEMHSTMPTPVDSAYTALRSISPSQSDQAPKFGRDESATTGAGATPFAGMVQVSNGCFKRMCKACSVDYTSGYPKLCVGYNVINLYTLLLKLQPNGSKGSLALAIHEESSGDSNSQKAHQ

SEQ ID NO: 1885 - protein, 222 aa, Synechococcus sp. WH 7805
MRDDVATLTKQINEDTKKGRKLILSASRVDYTKGNEELLLAFERLLERREDLRGKVVLMLACVAAASGMKIYEDTQRLIEETAGRINGRFSLIDWVPIRFSTNRIPYEEMVAWFSMSDICWITPLRDGLNLVAKEYVAARKGRDGVLVLSEFTGASVVLDGAVLTNPYSHKQMDQAIESALEMSEDEQIIRISKMVSAVEDFTVSDWANEQMQSLEVEYKNS

SEQ ID NO: 1886 - protein, 1023 aa, Glycine max; identical to SEQ ID NO: 770

SEQ ID NO: 1887 - protein, 162 aa, Glycine max
MEHVGFSKAAIADHGRGKKTGPVSMDHVLLALRETKDERDLRIRSLFNFFDAANNGYLDYAHIEAGLSALQIPPEYKYAKNCGEPKDANRDGRIDYRDFRRYMDDKELELYRIFQAIDVEHNGCILPEELWDALVKAGRYSGTTTLFIVFCASWLVSCNYCM

SEQ ID NO: 1888 - protein, 1626 aa, Physcomitrella patens subsp. patens; identical to SEQ ID NO: 773

SEQ ID NO: 1889 - protein, 969 aa, Musa balbisiana
MRPASGQPPDEQRGMQGSKYGGSRNPTRVERLLRDRELRKINRAFQQDEAGGNGGREAESSEHLPEDCGREVGGEPDEEIVDGSLAPVITTGQGSRRSGGRPMKQRLLVVANRLPVSAVRRGEDSWSLEISAGGLVSALLGVKDVDAKWIGWAGVSVPDEVGQRALTKALAEKRCIPVFLDEEIVHQYYNGYCNNILWPLFHYLGLPQEDRLATTRSFQSQFDAYKRANQMFADVVNQHYQEGDVVWCHDYHLMFLPKCLKEYNSKMKVGWFLHTPFPSSEIHRTLPSRSELLRSVLAADLVGFHTYDYARHFVSACTRILGLEGTPEGVEDQGRLTRVAAFPIGIDSDRFKRALELPAVKEHINELTHRFAGRKVMLGVDRLDMIKGIPQKILAFEKFLEENPSWRDKVVLLQIAVPTRTDVPEYQKLTSQVHEIVGRINGRFGTLTAVPIHHLVCLTTILMDRSLDFHALCALYAVTVYIFHFFSDVALVTSLRDGMNLVSYEFVACQGSKKGVLILSEVHLGKQLEKYLTIFIGAILQMGGDGKSYALNMSPDEREKRHRHNYAHVTTHTAQDWAETFVSELNDTVVEAQLRTRQVPPLLPTNIAIERYLQSMNRLLILGFNATLTESVESSGRRGGDQIKEMELKLHPELKVPLTTLCNDAQTTVVVLSGSDRSVLDDNFGEYNMWLAAENGMFLRHTGGDWMTTMPEHLNMDWVDSVKHVFEYFTERTPRSHFEHRETSLVWNYKYADVEFGRLQARDMLQHLWTGPISNTAVDVVQGSRSVEVRSVGVTKGAAIDRILGEIVHSKSMVTPIDYVLCVGHFLGKDEDIYTFFEPELPAEPASSTRMKISETSKASPDKRSTGRSSNIRNNSRMSHVRPQRAPVGSERRMPANHNILTGWRSPQETMSWREGSSVLDLKGDNYFSCAVGRKRSNARYLLNTSDDVVVFLREMAEAACQGALAALF

SEQ ID NO: 1890 - protein, 1604 aa, Cupriavidus taiwanensis; identical to SEQ ID NO: 777

SEQ ID NO: 1891 - protein, 1530 aa, Listeria monocytogenes str. 4b H7858; identical to SEQ ID NO: 779

SEQ ID NO: 1892 - protein, 111 aa, Triticum aestivum
GRNVAAGMTGGLAYILDEDDTLLPKVNKEIVKMQRVNAPAGQMQLKSLIESYVEKTGSEKGATILREWEAYLPLFWQLVPPSEEDSPEACAEFERVLAKQAKQATTQLSAK

SEQ ID NO: 1893 - protein, 272 aa, Glycine max
  misc_feature (99)..(99): Xaa can be any naturally occurring amino acid
MMALHSVPSVSHVLRLAEPFPSLHNAHVLLDLAPLRRKPKRRTRRLTAFPSPSSSPLRHSAVKAVLHLDRSTDHNRLHNSSASSSSDSKPQVADLEDIXSQRGACGVGFIADLENKGSHEIVKDALNALSCMEHRGGCGADNDSRDGSGLMTGGPWELFDKWANTHAIAAFDKPHTGAGMVFLPKEAQLLNEAKKVIVNIFRQEGLEVLGWRPVPVNTSVVGYYAKETMPNIQQVFVKIVKEENVDDIERELYICRKLIEKAVSSESWGKEL

SEQ ID NO: 1894 - protein, 670 aa, Cryptococcus neoformans var. grubii
MTTMSNDIPNSPTSTSFTGTFSPAATAANTAANARTSDAPSPTTSSSGPKLETSKEQRLIVVSNRLPVTISKDDNGEYHFKMSSGGLVSALSGCKKTMSFTWIGWPGKDIPMQDRETVNRRLLDEYNCYPVYLSDELADSHYNGSFSNSILWPLFHYHPGEMNFDAAHWLAYREANMRFADVVSSLVQAGDMVWVQDYHLMLLPMLLRSMITGESAQGEMVRQELGRVKEGVDDTVVKEVLKMGPGVAQAEDEGVEMLDDVEEEGGEMDVKSSPKRPHYARGMSTFQKQELVAKEKGKEGIRIGFFLHTPFPSSEIYRILPVRREILLGVLQCDLIGFHTYDYARHFLSSCTRILGLETQPNGIEFDGRYCQVGTFPIGIDPNQFIEGLQKESIVKRLRSLEARFEGVKVIIGVDRLDYIKGIPQKLQALETFLTQHPEWIGKVVLVQLAIPSRQDVEEYQDLRACVNELVGRINGRFGTVESVPIHYMHKSVPFEELTAMYALADACLVTSTRDGMNLVAYEYISSQAERHGSMILSEFAGAAQSFNGSLLINPWDVQSTADAINQALTLSPQQRKTNWQKLFNYVSKYTAEAWGVSFVNELNRLSGQRPSGPTGLAGRRKSGSLSRTSSKASIQRRKSSQSGIVTGLGAAAGAAVNWAQAQVQGGSQT

SEQ ID NO: 1895 - protein, 2168 aa, Ustilago maydis 521; identical to SEQ ID NO: 792

SEQ ID NO: 1896 - protein, 153 aa, Glycine max
PTRSPTRPPASGDDVDMENMGIHGLLAPLKAFGYTVESLEMLLLPMAKDGTEALGSMGNDTPLAIMSNREKLTFEYFKQMFAQVTNPPIDPIREKIVTSTECMAGPEGDLTEITEEQCHRLSLKGPLLSIEEMEAIKKMNYRGWRGKVIDITY

SEQ ID NO: 1897 - protein, 303 aa, Oryza sativa Japonica Group
MLLNPASREVAALDSIRHHLLEEEEETPATAPAPTRRPVYCRSSSFGSLVADQWSESLPFRPNDAEDMVVYGALRDAFSSGWLPDGSFAAVKPESQDSYDGSSIGSFLASSSSEAGTPGEVTSTEATVTPGIREGEGEAVAVASRGKHYRGVRQRPWGKFAAEIRDPAKNGARVWLGTFDSAEEAAVAYDRAAYRMRGSRALLNFPLRIGSEIAAAAAAAAAGNKRPYPDPASSGSSSPSSSSSSSSSSSSGSPKRRKRGEAAAASMAMALVPPPPPPAQAPVQLALPAQPWFAAGPIQQLVS

SEQ ID NO: 1898 - protein, 513 aa, Nitrosococcus oceani C-27; identical to SEQ ID NO: 794

SEQ ID NO: 1899 - protein, 262 aa, Malus x domestica
MSPTDSSREENVYMAKLAEQAERYEEMVEFMEKVAKTVDVEELTVEERNLLSVAYKNVIGARRASWRIISSIEQKEESRGNEDHVAIIKEYRSKIETELSKICDGILNLLESHLIPSASSAESKVFYLKMKGDYHRYLAEFKTGGERKEAAESTLLAYKSAQDIALAELAPTHPIRLGLALNFSVFYYEILNSPDRACNLAKQAFDEAISELDTLGEESYKDSTLIMQLLRDNLTLWTSDITDDAGDEIKEASKRESSETQQ

SEQ ID NO: 1900 - protein, 468 aa, Burkholderia vietnamiensis G4
MSRLVVVSNRIADPRKAAAGGLAVAVKDSLQESGGVWFGWSGRLRSEGERPAQGDDVQIQNVGGIQLATIDLDPQDYDAYYLGYSNNVLWPVFHYRLDLAQFDRRFADGYRRVNQLFARKLSTLLRPDDTIWVHDYQLIPLAAELRAMGCTNPIGFFLHIPMPPPPIMAAIPEHEWLMRALFAYDLIGFQTESDLLHFEHYVEAEAGAARLPDGRLRAFGRTLSAGAFPIGINVDEFAALAENRDGIDMFERMRDEYSRRQLLVGVDRLDYTKGLPQRVHAFRQLLEQYPENRDRATLIQIAAPSREDLGAYDDLRREMDSLCGAINGDYGELEWMPMRYIHRTVARKRLPGLYRASRVALVTPLRDGMNLVAKEFLAAQDEADPGVLVLSRFAGAAEQLKPALLVNPYDTQGTAQAIQRALTMPLDERRQRHNALMAIVRKTDVHWWRTRFLDALTEAAEVAAAAAS

SEQ ID NO: 1901 - protein, 857 aa, Gossypioides kirkii
MMSRSYTNLLDLASGNFPAMGQPREKKRLPRVMTVPGVISELDDDQANSVTSDAPSSAIQDRIIIVANQLPVKAKRRPDNKGWSFSWDDDSLLLQLKDGLPEEMEVLYVGSLTVDVDPVEQDDVSQLLLDKFKCVPAFLPPDILTKFYHGFCKQHLWPLFHYMLPFSASHGGRFDRSLWEAYVTANKIFSQRVIEVINPEDDYVWIHDYHLMVLPTFLRRRFNRLRMGFFLHSPFPSSEIYRTLPVREEIMKALLNSDLIGFHTYDYARHFLSCCSRMLGLEYQSKRGYIGVEYYGRTIGIKIMPVGIHMGQIKSVLSLADKEWRVAELKQQFEGKTVLLGVDDMDVFKGIDLKLLAMEQMLKQHPKWQGRAVLVQIANPSRGRGKDLEDIQAEIQASCKRINETFGQPGYEPIVLIDRPVSLCERFAYYTIAECVVVTAVRDGMNLTPYEYIVGRQGVSESESSSESSGPKKSMLVVSEFIGCSPSLSGAIRVNPWNTESTAEAMNEAISMADAEKQLRHEKHYRYVSSHDVAFWSRSFFQDMERTCKDHFRRRCWGIGLSFGFRVVALDPNFRKLSIDHIVSVYLRCKNRAILLDYDGTVMPQTSHNKTPSAEVISIINALSGDTKNTVFVVSGRGRESLGKWFSPCKKLGIAAEHGYFMRWSANDEWELCGQNSEFGWKQIAEPVMKLYTESTDGSSIETKESALVWHHRDADPGFGSSQAKEMLDHLESVLANEPVAVKSGQFIVEVKPQGVSKGMVAEKIFTTMSEKGKQADFVLCIGDDRSDEEMFEIISSAISSGILSSSTSVFACTVGQKPSKARYYLDDPAEVLNMLEALAEASDPESFTDTESEGSL

SEQ ID NO: 1902 - protein, 274 aa, Triticum aestivum
MLLLNPASEAAAAALDSIRQQLLEEPARPAYCRSASFGSLVADQWSESLPFRPNDADDMVVYGALRDAFSCGWLPDGSFAAVKPEPLPSPDGSYDGSCLGSFLAPPAPGPDAPWAEEEAEVAAAASRGKHFRGVRQRPWGKFAAEIRDPAKNGARVWLGTFDSAEDAAVAYDRAAYRMRGSRALLNFPLRIGSEIAAAAAAAGQKRPSPQPASPDSSSPSCSAPGSSKRRKRGEAAAASMAMALVPPPPAQAPVQLTLPAQPWLAAGAVQQLVS

SEQ ID NO: 1903 - protein, 409 aa, Ochromonas danica; identical to SEQ ID NO: 801

SEQ ID NO: 1904 - protein, 921 aa, Oryza sativa Japonica Group
MEFIYIGCLRDDIPLADQDAVAQALLESYNCVPAFLPPDIAERYYHGFCKQHLWPLFHYMLPLSPDLGGRFDRALWQSYVSANKIFADKVLEVINPDDDFVWVHDYHLMVLPTFLRKRFNRIKLGFFLHSPFPSSEIYKTLPVREELLRALLNSDLIGFHTFDYARHFLSCCGRMLGLSYESKRGHICLEYYGRTVSIKILPVGVNMGQLKTVLALPETEAKVAELMATYSGKGRVVMLGVDDMDIFKGISLKLLAMEELLRQHPEWRGKLVLVQVANPARGRGKDVDEVKGETYAMVRRINEAYGAPGYEPVVLIDEPLQFYERVAYYVVAEVCLVTAVRDGMNLIPYEYIVSRQGNEALDRMLQPSKPEEKKSMLVVSEFIGCSPSLSGAVRVNPWNIEAVADAMESALVLPEKEKRMRHDKHYRYVDTHDVGYWATSFLQDLERTCKDHAQRRCWGIGFGLRFRVVSLDLSFRKLAMEHIVMAYRRAKTRAILLDYDGTLMPQAINKSPSANSVETLTSLCRDKSNKVFLCSGFEKGTLHDWFPCENLGLAAEHGYFLRSSRDAEWEISIPPADCSWKQIAEPVMCLYRETTDGSIIENRETVLVWNYEDADPDFGSCQAKELVDHLESVLANEPVSVKSTGHSVEVKPQGVSKGLVARRLLASMQERGMCTDFVLCIGDDRSDEEMFQMITSSTCGESLAATAEVFACTVGRKPSKAKSSRDAEWEISIPPADCSWKQIAEPVMCLYRETTDGSIIENRETVLVWNYEDADPDFGSCQAKELVDHLESVLANEPVSVKSTGHSVEVKPQGVSKGLVARRLLASMQERGMCTDFVLCIGDDRSDEEMFQMITSSTCGESLAATAGGLRLQRWAASRTKAKYYLDDTAEVVRLMQGLASVSNELARAASPRRTTTNEHP

SEQ ID NO: 1905 - protein, 255 aa, Gossypium barbadense
MEMYPSTIDSDLMMLDSIRRLLLGESSDLRFTSSNDCTNVGAAPPMFCRSSSFSRLYPCLTDIWGDLPLKENDSEDMLVFGYLRDALTVGWAPSDHSSPTFPPIKPEPQEIPTETAVKEVPTVANAAVPTVVPAKGKHYRGVRQRPWGKFAAEIRDPAKNGARVWLGTFETAEDAALAYDKAAYRMRGSRALLNFPLRVNSGEPDPVRITSKRATPEPSTSSSSGSENGSPKRRRKVGSAAPVVAQAGLNMGFGA

SEQ ID NO: 1906 - protein, 1532 aa, Synechococcus sp. WH 7805; identical to SEQ ID NO: 802

SEQ ID NO: 1907 - protein, 441 aa, Bradyrhizobium sp. BTAi1; identical to SEQ ID NO: 804

SEQ ID NO: 1908 - protein, 231 aa, Melampsora medusae f. sp. deltoidis
LDQELTIEERNLLSVAYKNVIGARRASWRIVSSIEQKEEAKGNESQLGQIKAYRDKIEAELAKICEDILEVLDGHLIKSAESGESKVFYHKMKGDYHRYLAEFATGDKRAVSSDASLEAYKAASSIATVELPPTHPIRLGLALNFSVFYYEILNAPDKACQLAKQAFDDAIAELDTLSEESYKDSTLIMQLLRDNLTLWTSDLNDSVPEDKEDKPAEPAAAPEAAEAAPEA

SEQ ID NO: 1909 - protein, 1493 aa, Acinetobacter sp. ADP1; identical to SEQ ID NO: 811

SEQ ID NO: 1910 - protein, 523 aa, Botryotinia fuckeliana
MPSVAGEEPKASSRLLLVSNRLPITIKRTEDGQYDFTGSSGGLVTGLSGLAKTTTFQWYGWPGLEVPDAEAKPLVKRLKDEHGAHPVFVDDELADKHYNGFSNSILWPLFHYHPGEITFDESQWMAYKEVNRLFAKTIAKDVQDGDLIWVHDYHLMLLPEMLRDEIGTSKKNVKIGFFLHTPFPSSEIYRILPVRESLLLSVLHCDLIGFHTYDYARHFLSSCSRILETQTTPNGVEFRGKYVTVAAFPIGIDPEKFIETLKKPKVEERIAQLERKFEGVKLIVGVDRLDYIKGVPQKLHALEVFLTEHPEWIGKVVLVQVAVPSRQDVEEYQNLRAVVNELVGRINGRFGTVEFMPIHFLHQSVNFDELTALYAVSDACLVSSTRDGMNLVSYEYIATQRKRHGVMILSEFTGAAQSLNGALIVNPWNTEELADAIHDAVTMSPEQREINFKKLEKYVFKYTSSWWGESFVSELQRISEHAAKKSNSKGTVDKMPDLVEGVQQFNLGEQREEGRLEPGEFDD

SEQ ID NO: 1911 - protein, 503 aa, Mycobacterium abscessus
MATQSDERSPVKPVTGTSDFVVVANRLPIDLVKLPDGSTTWKRSPGGLVTAMEPLLRKRRGAWVGWPGVPDADVEPVSEDDMVLYSVRLSTQEVAEYYEGFSNATLWPLYHDVIVKPEYHREWWQAYVDVNRKFAEATAAVAAEGATVWVQDYQLQLVPKMLRMLRPDLTIGFFLHIPFPPVELFMQMPWRTEIVDGLLGADLIGFHLAGGAQNFMYLARRLVGASTSRASIGVRSRFGEIRVGFRTVKVGAFPISIDSTQLDSVSRSRQIRQRAKEIRAELGGPRKILLGVDRLDYTKGIDIRLHAYEELLAEGRASREDTVFVQLATPSRERVDSYKKMRGDVEQQVGHINGEFGEVGHPVVHYLHRPVPREDLIAFFVAADVMLVTPLRDGMNLVAKEYVACRSDLGGSLVLSEFTGAAAELRQAYLVNPHDIDGVKDGIESALNQTPEEGRRRMRALRRQVLAHDVDRWARAFLEALSTPATGDSIAPEQPAVLGGEPL

SEQ ID NO: 1912 - protein, 1559 aa, Nostoc sp. PCC 7120; identical to SEQ ID NO: 821

SEQ ID NO: 1913 - protein, 1490 aa, Xanthomonas campestris pv. vesicatoria str. 85-10; identical to SEQ ID NO: 820

SEQ ID NO: 1914 - protein, 1782 aa, Agrobacterium tumefaciens str. C58; identical to SEQ ID NO: 823

SEQ ID NO: 1915 - protein, 809 aa, Zea mays
  misc_feature (320)..(320): Xaa can be any naturally occurring amino acid
PSEFCSSSGSSRCACVLGEREENPVCRMDAMAPEEYASQSKLLQEFTNVPSIDSASILKTNDEDRSRAMFSISQPDLLANTNRKYVLYSHITTRAGTGTTSPDFQWSPFPTETTGVSATVPSPSGSKLLVVRNGERGCPTKLEIVCQSHVEKEIHVAGSVHGPLYTDEWFHGVSWNQEETLVAYVAEAPATPRPAFNRSGYTREEGCSEGDCSAWKGQGVWEEDWGETYSKKGRPSLFVLDIPRGEVVAAKGVPTSLSVGQVVWAPESPGGRHKYLVFVGWSERNGFFQNTARKLGIKYCSNRPCALYAAPCPIQGPEPXHPPATTSDGKSGSGGAVARNLTPGFSSALFPRFSRDGRLLVFLSSKQAVDSGAHNATDSLHVINWPSDWKMDEQLDVTQVVPVVMCPEDDDGGCFPGLYCSSVLPDPWLSDGRTVILTSSWRSAEVILSVDVLSGKVARITPQDSCYSWRALALDGTNVLAVSSSPIDPPSISYGRRLAVTPAEGEARRWTWDEVTSPFMASNSKVKSLLLHHSVSILKIPVPSPSADLSDGGKLPLEAIFVSCSCKGSSRSPTVVVLHGGPHSVSVSSYSKSSAFLASLGFNLLVVNYRGTPGYGEEALQSLPGKVGSQDVQDCLAALDFAVEEELVDASRVAVVGISHGGFLTTHLIGQAPDRFAVAAARNPVCNLSLMAGTTDIPDWCYVVACGTQAKRYASEAPSPDHLRLFYQRSPIAHVSKVKAPLLMLLGGADLRVPASNGLQYARSLIERGGDVKIMMFPEDIHEINLPRSDFESFLNIGVWFKKHLNAVA

SEQ ID NO: 1916 - protein, 1539 aa, Desulfitobacterium hafniense DCB-2; identical to SEQ ID NO: 825

SEQ ID NO: 1917 - protein, 529 aa, unidentified eubacterium SCB49; identical to SEQ ID NO: 829

SEQ ID NO: 1918 - protein, 1577 aa, Acidovorax sp. JS42; identical to SEQ ID NO: 830

SEQ ID NO: 1919 - protein, 1140 aa, Debaryomyces hansenii
MSGIGNQAILSDEEYSDTIGCLNKLKVPQIKDIVRCLSLPLSGKKQDLIDRVVGYLEQGRRFNDNVRLLAVRTIVLKVRNNDPIPNFTALYDALRTGAYNFVEGIGQYSNYKNQSTSSSSSSQNKSSNESHPYKGHVLYFKESPFYKLKRLVHGGPQIAIPSKAKAVCRYQFILNDEENKLLKLSDEKIRFYLLCGVSNNSTASTSSALLQFPIPIEIHVNGTHIKENVRGIKGKPGTARPANVTAHILPDQQLNKIEMAYAGTTESFLLYLYIVEYVSCEEIIQTIVQQPHIHKNSTIVEIKKEYSNDDGEDDDIIVSTSSISLKCPLTYARMRYPTKSIFCQHIQCFDGLSYLQLQEQVPNWICPVCSNKIEISHLAISDYYCDILENTNDEVENVRINDDGTWEAINETSNSNNNNSNNNNNNNYRSSESSYNENKLTEVKRSPSSRVLSEETRERTPSYQPEAIEIISIDSDTDDDVDMNEPTDPYSPHGIGAQMLTLSDSNRTQPPNLPHSNTVTDHTSVVDDSDVHSLNRHTIRDNNVPNPSKINNDNISLPPINQQTVTNNDEHLAASNRNVPATVLARKSTINEHNNLHSDITNSKSGASNSEFGNERGVRNVPPHGAINNLNRFNSTNNRKNTETEGNILAPINQNNSNSNPRNNESLIIRPAPLPGHHSIGHTSHNRSMPGVQLNNTPSIQDQESMSIQRIHGLLPISNNAPMEDRRIQSVTNINSMSSSSVPKRTSTTESVPLLEKPKGQTTSNQRSTSVPVPLTSKAHEQNVRDKGKNYSDPPTTLLGAKLRPLKSLPMKVNPSQNSSALPNIHQLENSLGIRNHDDRQSYQLSKRTPNQTTNQRASISNIYEAPREHSKHGPSLAADISRTPNSSRPSPLMFYGRDSFSNVYQSHNPTIRESNQQMGSVSLNDYYRINRTDKTQHSSSATSHELDTNEKSPLQSQNLPLYNSKQAPRVEPLNQAYNQKQASNMNGSDNGSNYDPTQSVDKTSVSPPAQPNSLRYSRSAFDLMNKNQSEPVTSDKQQGVVGLLGIVLSEDSMHMNQPSPQPPHSQRSDLTPLKGKIDNMRLGTSSDKKRSLSGSSSGRTWNKKMNPDHNDSIEGKGTNHDTTPSKPVYDTLNNQRLHG

SEQ ID NO: 1920 - protein, 699 aa, Ostreococcus tauri
  misc_feature (1)..(2): Xaa can be any naturally occurring amino acid
XXSSSYADLERALRSTDEEGGSSAAWDANDELWSRDAAVMLRAAETGDAPQAIASLQRMKRTGERNNVAVPLAFYNQTLRACKRSRPPASDDATALLREMREQGPGPDEKTYHEVIAAYARAIEWRLAEQTFEEMKRDFRGRGQSWTPSVRVYTSLISAYGKGGQFEKASELFENIISNTQVQLDTGVYNAFLSAAVNSGRYKDAAAIFERMQADGVRRNVTTYNGMLQSLGRQRRIRDMESMSQAMQRAGVMPNETTYTALITAHGNSGNIDRALELLHQVVIAPRLHATAVIFNSALGACVKTGDLAGTQRVLRVMESEGVRATLVTYNTLLMEASAERDWQRAANVYKELILAGFAPDAITLDCLCGIEKLQQKREQALREAIEQAEKDGFDLSDIEKRKCDVNDTPIGNLPVLIRAIADDPALENVPGSSGYVSDALLRTLDVNNEFIAVEEEFNHMMREGIDRTVHSYNSLLIAYESRNEWQKAGEAMKQMSREGITPDALTFDALIDVCEEMGQWERATTWLEQAQAEGFFQCEDDLGVLDLHRIRSAGTAQCVLRWWLRRMRQRALAPLDVRAAGKGTRALVSGLTAGKKSIPVDIRDLPEEIQVVTGWGKHSTVYGHSPVKERAVATLSRLNSPFEVPSHNIGCLVADRGAVRAWLVRDELLSLVRFLGGNRDALRRNFNPESGPLSARAK

SEQ ID NO: 1921 - protein, 485 aa, Moorella thermoacetica ATCC 39073
MSQKQPAKIVMVSNRGSYNLQATRDGIQVVPAISGLVSAVEPFLREKGGVWVAWGGREAPQENSPGLRLPVPEGNPAYTFREVPLTADEINLYYHGFTNSALWPLCHYFLEKCRYEVREWSAYVDVNAKFAAATLEEAGERDTVWVNDYHLALVPAHLRHRRPQLKQFFFWHIPFPHHDLLATLPWATHILRGLLGTDVLGFHLQAYVDNFLQAVAHMLGARVDFEAGIVFWEQRRIHVGAWPMGIDYQAFQRQAASPATMARAQKLREQIGVERLALSVERLDYTKGILERLLAWERLLEEAPEWRGRAALIQVAVPSRTAVPAYRQLKEQVEATVGRINGRFSDGNYQPVYYFWRGLPRRELVAYYLAADVMLVTPLRDGLNLVAKEYVASRRDQTGVLVLSRFAGAAQELKGAVLVNPYDIDGMAMIFNTALGMGRAEQSKRLQLLQERVRRHDVHWWMNCFHQAMAVREGETGDVSGSAGS

SEQ ID NO: 1922 - protein, 253 aa, Moorella thermoacetica ATCC 39073
MSPDQLAARVQEYPELLLMCDYDGTLVPLAPRPEDAVPDPGLLKLLRQLVSRPGLHLAVISGRPLADLRDLLPIPGLLLAGLHGAQVAGPEGPVINLLPPPPGKNPWPEIFSLARQLAAGVPGLLVENKGEGVALHYRLAEPDAAAGILEEFRHALEPFLQDGLELIPGHKVLEVRRRGVNKGLAVTYFTRRWPRAFPVYLGDDRTDEDAFAALPGNGLAIGVGQRQSGYAHYFLASPAEVIEFLQLLNRSRT

SEQ ID NO: 1923 - protein, 1567 aa, Xanthobacter autotrophicus Py2; identical to SEQ ID NO: 838

SEQ ID NO: 1924 - protein, 191 aa, Brassica napus
  misc_feature (9)..(9): Xaa can be any naturally occurring amino acid
TFDTASVIXWVPLYDRFIVPLARRFTGVDKGFTEIQRMGIGLFVSVLCMAAAAIIEIIRLRLADELGLVESGAPVPISVLWQIPQYFILGAAEVFYFIGQLEFFYDQSPDAMRSLCSALALLTNALGNYLSSLILTLVTYFTTRNGGEGWISDNLNTGHLDYFFWLLAGLSLVNMAVYFFSAAKYKQKKAS

SEQ ID NO: 1925 - protein, 498 aa, marine gamma proteobacterium HTCC2143; identical to SEQ ID NO: 843

SEQ ID NO: 1926 - protein, 259 aa, Fritillaria agrestis
MSPAEPSREENVYMAKLAEQAERYEEMVEFMEKVARTVDTEELTVEERNLLSVAYKNVIGARRASWRIISSIEQKEESRGNEDHVALIKDYRGKIEAELSKICDGILKLLDSHLVPSSTAAESKVFYLKMKGDYHRYLAEFKSGAERKEAAESTLLAYKSAQDIALAELAPTHPIRLGLALNFSVFYYEILNSPDRACNLAKQAFDEAISELDTLGEESYKDSTLIMQLLRDNLTLWTSDINEEAGDEIKEASKAGEGQ

SEQ ID NO: 1927 - protein, 509 aa, Geobacter metallireducens GS-15; identical to SEQ ID NO: 847

SEQ ID NO: 1928 - protein, 1522 aa, Verrucomicrobium spinosum DSM 4136; identical to SEQ ID NO: 848

SEQ ID NO: 1929 - protein, 161 aa, Zea mays
DRSLDFHALCALYAVTDVALVTSLRDGMNLVSYEYVACQGSKKGVLILSEFAGAAQSLGAGAILVNPWNITEVADSIRHALTMPSDEREKRHRHNYAHVTTHTAQDWAETFVFELNDTVAEALLRTRQVPPGLPSQMAIQQYLRSKNRLLILGLLYFLLHT

SEQ ID NO: 1930 - protein, 1538 aa, Porphyra yezoensis; identical to SEQ ID NO: 850

SEQ ID NO: 1931 - protein, 232 aa, Brassica oleracea
MYGQSEVESDYALLESIRRHLLGGEAELRFAESIPSSCFTESWGDLPLKENDSEDMLVYGLLNDPYDTSSPSSDLSCITEFVDLETSSKRPSDSPVAKAEPAESFAAATVEKQKAATAKGKHYRGVRQRPWGKFAAEIRDPAKNGARVWLGTFETAEDAAFAYDRAAFRMRGSRALLNFPLRVNSGEPDPVRITSKRSYTSSSSSSSENRKLKRRRKTENVPSEFQVKCEVV

SEQ ID NO: 1932 - protein, 582 aa, Oryza sativa Japonica Group
MAAVWSGCSTSFSQELPPHPRGRRGGDGARIHPWSGGAGRDATTRHAEAARTVVVFARGRVRVCRAAAPCVLEPDVAGKEEVGVAVWGMDDEPPVADGHRRHGLRRRPVRPAAVEEGPVAAARSAASASASAAGSKSEVGGSRLHFLEERDEEMLSRRLIKLSQSNKVRSATELFDSMRASGLQPSAHACNSLLACFVRRGSFADAMKVFEFMKGKGMATGHSYTLILKAVATTEGYFAALKMFDEIEESDKKNVDVIVYNTVISVCGRAKDWRQVERLWRRLGENSLSGTLMTYDLLVSTFVQCGQSELAVDAYQEMFKSGIDPSEDILKAIIASCTKEGKWEFALTTFRRMLSAGMKPSIIVFNSIINSLGKAGEDELAFRMYHLLTSSGLKPDQYTWSALLSALYRSGRCWDVLDLFQGIKTKHSALLNNHLYNIALMSCERLGQWEHGLQLLWMMERGGLQISAVSYNHVIGACEVARMPKVALKVYRRMTHRGCSPDTFTHLSVIRACIWGSLWNEVEDILEEVAPDSSVYNTVIHGLCLRGKIRLARKVYTKMRSIGLKPDGKTRSFMLQNLATDY

SEQ ID NO: 1933 - protein, 248 aa, Zea mays
MEEREKLVCLAKLAEQAERYDDMVEFMKNLARMDVDMSAEERHLFSVGFKNTIGAKRASWRIICSHEQKVAADRQTGVMIDAYKKKVEEELRKVCNEVLSVIAIHCLPLASTGENIVFFYKMKGDYYRYLAEFSTGTEKKAASDQSLMAYQHAMVVASSELSPAHQIRLGLALNLSVFFYEIMNSHERACQVAKQAFDEALTEINSGEGVYKDSTLMMQLLKDNLALWTSELTGGEASKGNDDVDMEG

SEQ ID NO: 1934 - protein, 625 aa, Physcomitrella patens subsp. patens
MEARLLGAEGRKEGSGVAEDMAAEYATARMRRRLRRRCCRNLIPNLVFRDRRRRGKGAGGNTRIEWSMLHERKAFGAMMLPDDMTGDAATFALHQSGVKEPIAMDDEAESRPPLLSIPSFQRFYNTWVQQEDNLLSELKRSLENPRNEQEFARLVRKCYQLYAEAAHAKIRAAHEDVSYITAGTWKTPFEAGMMWMGGWRPTAAIVLTYSLMGIQMESELERLLEGITLPSMATLSAKQLSRLNVMQQRTSSAEDEISTRLSVLQMLVADQQTTRATTADPPPSESFNMAEIKEVMKSKLVELRHLFIEAEKLRLQTLQELYSVLSSIQAAQYSVAALEMAKAIYKLGEIFQESHAGDANARSSGHPGVNIWEIASQGDVKKLREALDMCPDPSSTDYEGRTPLHLAAGKGHSECVALLVERGAEINIKDNDGVTPLLEALKGGHDWTAKILRNNGAKPDVKDAGNELCKAAACGDMEFVERLVKAGVDPNETDYSQRTPLHIVAADGTAKDAEFLVHKGADVFAKDRYALNFPYFSTRLNEHSLEIAKIMLSCSHGYTPLDEAQGSDNKATLRVLEAAVALRQQQLDDEEDYSTSDDNSSSSPLDDAQCDSDMELTEGDQWSMC

SEQ ID NO: 1935 - protein, 1512 aa, Vibrio vulnificus CMCP6; identical to SEQ ID NO: 862

SEQ ID NO: 1936 - protein, 541 aa, Zea mays
  misc_feature (496)..(496): Xaa can be any naturally occurring amino acid
MVLKSHTNLLDMCCEDVFDFQQPLRSPRHVVNSPGIISDPDWESSNDGNSVGSMPFCFKRKIIVANFLPVICAKNEATGEWSFAMDDNQLLVQLKDGFPIGNEVIYVGSLNVQVDPIEQDRVSQKLFKEHRCVPTFLPAELQHQFYHIFCKQHLWPLFHYMLPVCHDKDELFDRSLFQAYVRANKIFADKIVEAVNSDDDCVWVHDYHLMLIPTLLRKKLHRIKVGFFLHSPFPSSEIYRTLPVRDEILKSLLNADLIGFQTFDYARHFLSCCSRLLGLNYESKRGHIGIEYFGRTVSLKILAAGVHVGRLEATLRLPATIKKVQEIESRYSGKLVILGVDDMDIFKGISLKLLGLELLLERTPKLRGKVVLVQIVNPARSIGKDIEEAKYEAESVAQRINDKYGSANYKPVVLIDYSIPFYEKIAFYAASDCCIVNAVRDGMNLIPYEYTVCRQGNEELDKLRGLNKSSSHTSTLIVSEFVGCSPSLSGAFRVNXPWSMEDVADALYSVTDLTRYEKNLRHEKHYRYVRSHDVAYWAPSF

SEQ ID NO: 1937 - protein, 1487 aa, Vibrio vulnificus CMCP6; identical to SEQ ID NO: 865

SEQ ID NO: 1938 - protein, 253 aa, Gossypioides kirkii
MKSPVGERFSEFFDKWICQLDGYLQQLVRVPSEGLSESEQQALVSKLTAHYKEYYTVKWAAAHEDVLVFYCPVWLSKLENAYSWLTGWKPSMIFGVVESTRRKSVAELTEEQVRKIEQLRVKIKLEEEKVEREMERQQVAMADRKVVELVRTARRIRNEELVVVVGNHQVEGLVEVALKGVLAGLERVMKAADCVRLKALKGVLDILNPSQSLDFLAGTCMLQIQIRKWGQNRDNQKGSNPIILGELHNSVIF

SEQ ID NO: 1939 - protein, 263 aa, Triticum aestivum
  misc_feature (79)..(79): Xaa can be any naturally occurring amino acid
  misc_feature (145)..(145): Xaa can be any naturally occurring amino acid
MSTAEATREENVYMAKLAEQAERYEEMVEFMEKVAKTADVGELTVEERNLLSVAYKNVIGARRASWRIISSIEQKEESXRGNEAYVASIKEYRTRIETELNKICDGILKLLDSHLVPSATAAESKVFYLKMKGDYHRYLAEFKAXGAERKEAAENTLVAYKSAQDIALADLPTTHPIRLGLALNFSVFYYEILNSPDRACNLAKQAFDEAIAELDSLGEESYKDSTLIMQLLRDNLTLWTSDNAEEGGDEIKEAASKPEGEGH

SEQ ID NO: 1940 - protein, 2144 aa, Aspergillus nidulans FGSC A4; identical to SEQ ID NO: 872

SEQ ID NO: 1941 - protein, 522 aa, Bacillus cereus E33L; identical to SEQ ID NO: 870

SEQ ID NO: 1942 - protein, 1527 aa, Mycobacterium bovis AF2122/97; identical to SEQ ID NO: 874

SEQ ID NO: 1943 - protein, 700 aa, Arabidopsis thaliana
MVSRSYSNLLELASGDSPTFGRMNRQIPRIMAVAGIMSNIDNDSKDTDLSPKDRIIIVANELPIRAQRRVDGNGSGSSSSSTCCSKGWNFSWDENSLLLQLKDGLGDEAIEVIYVGCLKEEIPLNEQEEVYQILLESFKCVPTFLPLDLYTRYYHGFCKQQLWPLFHYMLPLSPDLGGRFDRTLWQAYVSVNKIFADRIMEVINPEDDFVWIHDYHLMVLPTFLRKRFNRVKLGFFLHSPFPSSEIYKTLPIREELLRALLNSDLIGFHTFDYARHFLSCCSRMLGLTYESKRGYIGLEYYGRTVSIKILPVGIHMGQLQSVLSLPETERKVGELIERYGRKGRTMLLGVDDMDIFKGITLKLLAMEQLLMQHPEWQGKVVLVQIANPARGKGKDVKEMQAETYSTVKRINETFGRPGYDPIVLIDAPLKFYERVAYYVVAECCLVTAVRDGMNLIPYEYIVSRQGNEKLDKILKLEANNRNKKSMLVVSEFIGCSPSLSGAIRVNPWNVDAVADAMDSALEVAEPEKQLRHEKHYKYVSTHDVGYWARSFLQDLERSCGEHGRRRCWGIGFGLSFRVVALDQSFRKLSMEHIVSAYKRTKTRAILLDYDDTLMPQGSIDKRPSSKSIDILNTLCRDKGNLVFIVSAKSRETLSDWFSPCEKLGIAAEHGYFLRYSTKTFYFLALPLYLITQAPSNYYTG

SEQ ID NO: 1944 - protein, 196 aa, Brassica napus
  misc_feature (134)..(134): Xaa can be any naturally occurring amino acid
  misc_feature (171)..(171): Xaa can be any naturally occurring amino acid
RPTRPGRENEIRPFGNPRGSDSANLDSAAEILIRSGRTPEEALMILVPEAYKNHPTLSIKYPEVLDFYDYYKGQMEAWDGPALLLFSDGKTVGACLDRNGLRPARYWKTSDNFVYVASEVGVVPVDEAKVTMKXGRLGPGMMIAADLVNGQVYENTEVKKRVSSLNPYGRXIKENLRFLKPVNFKSSTVMENERIL

SEQ ID NO: 1945 - protein, 1488 aa, Idiomarina loihiensis L2TR; identical to SEQ ID NO: 888

SEQ ID NO: 1946 - protein, 1020 aa, Magnaporthe grisea 70-15
MSQDAASAPSDLGAQTQQPHQAGNGGTNSSHGTDNIAKRALKLGTSTSLSPELPPTGLQEEVPVTPGITTAAYHDFEFDNGESGGGPGYFSRRGQNMMTTPVGKGVEDDGLGPSASSSAPDPEVLKRINQFRLGGRKESLTNIRAMNPDLSLSGNIISATFNIPYSLEYRKGADWVLNPRRGQSALFDSLSHLSSDNTPWNHTVVAWTGEIEPPSDLPSPPATPPATTTNLPALNSLSKPIPVNGEAPAPAPSHAEGLWIPREDQLRLESQLSHNAKIKTSAVWLSDSNEATEEGITLKDQARWRRFAEHELYNLFHYKQHEPNDGRKERVQWADYYRMNQKFANKIIENYKPGDIVIIHDFYLMLLPSMLRQRAPHIYIAFFLHSPFPSSEFFRCLPRRKEVLEGVLGSNMIGFQSYSYSRHFSSCCTRILGYKSDARGVNVYGSRVEVGVFPIGIDAKKVEQLAWSDSVNKLVQQLQTQTTQGRKLIVGRDRLDSVHGVAQKLKAFERFLENYPEWRDKVVLIQVTSPTSIEEEKDESKVSTLVNELVLKINGMYGGLGFEPVRHFSQYIGQDEYFALLRGADIGLITSVRDGMNTTSMEYVVCQRDSHGPLILSEFSGTAGSLTDAIHINPWDFSAVADEINRALTMPPHKRQEMQTKLYEHVTTKTVHEWIGGVVAKLIQVLGSGQNPVKTPLLDRSALLRSYRAAGKRLFMFDYDGTLTPIVREPSAAVPTERLLQTIKALAADDRNAVWVISGRDQDFLSAHLGHIQNLGFSAEHGSFMKKPGSDEWENLADKFDMGWQEEVIAVFQKFTDKVEGPFIERKRCAVTWHYRPVVDQDLAQRLARECHKELEATVARKWEVEVMPGKMNLEVRPTFINKGAIAKRLVLDYNAELVAAGKNKLEFVLCMGDDFTDEDMFRSLNTLSVTADGATEPELKTEHVFSTTVGPSTKVTIARWHLLEPEDVVECVALLASGVSTELLANQGEGVAETVKPLRVSENNLAAISEVEGRVPDIE

SEQ ID NO: 1947 - protein, 67 aa, Arabidopsis thaliana
KGMAGGEIVVTPVEKIGFVPEEATIVWNTCLYGATGGQIFNRGKAGERSAARNSSLKAEPVGTRHHL

SEQ ID NO: 1948 - protein, 496 aa, Neptuniibacter caesariensis; identical to SEQ ID NO: 895

SEQ ID NO: 1949 - protein, 539 aa, Pseudomonas fluorescens PfO-1; identical to SEQ ID NO: 897

SEQ ID NO: 1950 - protein, 2121 aa, Coccidioides immitis RS; identical to SEQ ID NO: 900

SEQ ID NO: 1951 - protein, 1493 aa, Thiomicrospira crunogena XCL-2; identical to SEQ ID NO: 901

SEQ ID NO: 1952 - protein, 266 aa, Hordeum vulgare subsp. vulgare
MSPAEPTRDESVYMAKLAEQAERYEEMVEFMERVAKATGGAGPGEELSVEERNLLSVAYKNVIGARRASWRIISSIEQKEEGRGNEAHAATIRSYRTKIEAELAKICDGILALLDSHLVPSAGAAESKVFYLKMKGDYHRYLAEFKSGAERKEAAESTMNAYKAAQDIALADLAPTHPIRLGLALNFSVFYYEILNSPDRACNLAKQAFDEAISELDSLGEESYKDSTLIMQLLRDNLTLWTSDTNEDDVDEIKEAPAPKESGDGQ

SEQ ID NO: 1953 - protein, 596 aa, Prunus persica
MSNCTLPETQEKLTLPDAWDFKGRPAERSKTGGWTAAAMILGGEACERLTTLGIAVNLVTYLTGTMHLGNATSANTVTNFLGTSFMLCLLGGFVADTFLGRYLTIAIFATFQAMGVTILTISTTIPSLRPPKCTSDTSTPCIPASGKQLMVLYIALYLTALGTGGLKSSVSGFGSDQFDESDKQERRQMTNFFNWFFFFISIGSLAAVTVLVYIQDNLGRQWGYGICVCAIVLGLIVFLSGTRRYRFKKLVGSPLTQISGVCVAAWRKRNMELPSDMSFLYNVDDIDDGLKKKKKQKLPHSKQFRFLDKAAIKEPKTTSGTAMIINKWSLSTLTDVEEVKLIIRMLPIWATTIMFWTVYAQMTTFSVSQATSMDRHIGKSFQIPPASLTAFFVGSILLTVPVYDRLIVPMARKALENPQGLTPLQRMGVGLVFSIFAMVAAALTEVKRLNIARSHGLTDNPTAEIPLSVFWLVPQFFFVGSGEAFTYIGQLDFFLRECPKGMKTMSTGLFLSTLSLGFFFSSLLVTIVHKTTGHNKPWLADNLNQGKLYDFYWLLALLSALNLVIYLFCANWYVYKDKRLAEEGIELEEPEICAHA

SEQ ID NO: 1954 - protein, 855 aa, Oryza sativa Indica Group
MKQRLLVVANRLPVSANRRGEDQWSLEISAGGLVSALLGVKDVDAKWIGWAGVNVPDEVGQRALTRALAEKRCIPVFLDEEIVHQYYNGYCNNILWPLFHYLGLPQEDRLATTRNFESQFNAYKRANQMFADVVYQHYKEGDVIWCHDYHLMFLPKCLKDHDINMKVGWFLHTPFPSSEIYRTLPSRSELLRSVLCADLVGFHTYDYARHFVSACTRILGLEGTPEGVEDQGRLTRVAAFPIGIDSERFKRALELPAVKRHITELTQRFDGRKVMLGVDRLDMIKGIPQKILAFEKFLEENHEWNDKVVLLQIAVPTRTDVPEYQKLTSQVHEIVGRINGRFGTLTAVPIHHLDRSLDFHALCALYAVTDVALVTSLRDGMNLVSYEYVACQGSKKGVLILSEFAGAAQSLGAGAILVNPWNITEVADSIKHALTMSSDEREKRHRHNYAHVTTHTAQDWAETFVCELNETVAEAQLRTRQVPPDLPSQAAIQQYLHSKNRLLILGFNSTLTEPVESSGRRGGDQIKEMELKLHPELKGPLRALCEDEHTTVIVLSGSDRSVLDENFGEFNMWLAAEHGMFLRPTNGEWMTTMPEHLNMDWVDSVKNVFEYFTERTPRSHFEHRETSFVWNYKYADVEFGRLQARDMLQHLWTGPISNAAVDVVQGSRSVEVRSVGVTKGAAIDRILGEIVHSKSMITPIDYVLCIGHFLGKDEDIYVFFDPEYPSESKVKPDSSGSVSLDRRPNGRPSNGRSNSRNSQSRTPKAQAAPERSSSSSSSSQGTPNSHHDWREGSSVLDLKGENYFSCAVGRKRSNARYLLNSSEEVVSFLKEMADATAAHNGFQSTTADYMFLDRQ

SEQ ID NO: 1955 - protein, 693 aa, Vitis vinifera
MMSRSYTNLLDLATGNFPAIGRERKRLPRVMTVPGNVYELDDDQANSVSSDNPSSVAQDRLIIVANQLPVKANRRADDRGWVFSWNEDSLLLQLKEGLPEDMEVLYVGSLRVDVDLTEQEEVSQILLETFKCVPTFLPHDVLEKFYHGFCKKLLWPLFHYMLPFSADHGGRFDRSMWEAYVWANKLFSQKVIEAINPDDDYVWIHDYHLMVLPTFLRRHFNQLRMGFFLHSPFPSSEIYRTLPVREEILKALLNSDLIGFHTFDYARHFLSCCSRMLGLEYQSKRGYIGLEYYGRTVGIKIMPVGIHMGRIASVMKLADKEKKVGELKQQFEGKTVLLGVNDMDIFKGINLKLLAMEQLLQQHSKWQGKTVLVQIANPARGKGADLEEIQAEIRESCRRINEEFGEPGYEPIVFVDRPVSISERIAYYSIAECVVVTAVRDGMNLTPYEYIVCRQGTDDSESMLSEFIGCSPSLSGAICVNPWNVEATAEAMNEAISMSQSEQLLRHEKHFRYVSTHDVAYWSRSFLQDMERTCSELFRRRCWGIGLSFGFRVVALDPNFRKLSIEAIVSAYCRAKSRAILLDYDGTVMPQNSINKAPSQEVISILNTLCWDKKNIVFIVSGRGRDNLSQWFSPCRKLGLAAEAILMEGINEENERENIDNLAESEAIDMEQNRKNQPKSSGMTDQPPQASTE

SEQ ID NO: 1956 - protein, 133 aa, Beta vulgaris
SAIKQVASGRFGVTPTFLVNADQLEIKIAQGAKPGEGGQLPGKKVSAYIARLRNSKPGVPLISPPPHHDIYSIEDLAQLIYDLHQINPKAKVSVKLVGEAGIGTVASGVAKANADIIQISGHDGGTGASPISS

SEQ ID NO: 1957 - protein, 232 aa, Salvia miltiorrhiza
MCGGSIISDEPIIKKRGKLSPQELWAQLDTISEFWGFDSSNDVPNQPKHSSIKKEKYKKSEKGNEKPRKSKYRGIRQRPWGKWAAEIRDPNKGVRVWLGTFNTPEEAARAYDGAARRIRGDKAKLNFPNHHQPRTPPEQPPPKRLCVIPEPPVEPSPDMAYSFESLEECYPTHSQAIKDGLSSLESFLGLEPTREPQTPELARFGLDEPVGSVDLWLMDEFVSLGQNNSVFF

SEQ ID NO: 1958 - protein, 61 aa, Physcomitrella patens subsp. patens
HYRGVRQRPWGKFAAEIRDSSRQGTRVWLGTFDTAEQAALAYDAAALKMRGRRALLNFPLR

SEQ ID NO: 1959 - protein, 1622 aa, Arabidopsis thaliana; identical to SEQ ID NO: 942

SEQ ID NO: 1960 - protein, 466 aa, Desulfitobacterium hafniense Y51; identical to SEQ ID NO: 947

SEQ ID NO: 1961 - protein, 261 aa, Aspergillus nidulans FGSC A4
MGHEDAVYLAKLAEQAERYEEMVENMKVVAASDVELTVEERNLLSVAYKNVIGARRASWRIVTSIEQKEESKGNESQVALIKEYRQKIEGELAKICQDILDVLDQHLIKSAQSGESKVFYHKMKGDYHRYLAEFAVGDNRKAAADASLEAYKSATEVAQTDLAPTHPIRLGLALNFSVFYYEILNSPDQACHLAKLAFDDAIAELDTLSEESYKDSTLIMQLLRDNLTLWTSSEAEPAAENAPAEKKEEAPAAEGEEKPAE

SEQ ID NO: 1962 - protein, 1530 aa, Bacillus halodurans C-125; identical to SEQ ID NO: 949

SEQ ID NO: 1963 - protein, 334 aa, Triticum aestivum
TRPFPRTGRQKIRLDALGSHTLISSATAYRVQTQPNSGRQQSTARMLLNPASEALVLDSIRQHLMEDTAAPAPEARRQRPAYCRSASFGSLVADQWSESLPFRADDSDDMVVYGALRDAFSCGWLPDGSFAAVKPEPLLPSPDSCYVGFLEPETPPATSPGGSEEEAAAAFMGEAAAAVARGKHYRGVRQRPWGKFAAEIRDPAKNGARVWLGTYDTAEDAAVAYDRAAYRMRGSRALLNFPLRIGSEIAAAHAAAAAAGDKRPSPEPATSDSSSSSSSSGSPKRRKRGEAAAASMAMALVPPSSQLSRPAHAWYPAVPAEQVAMAPCVQQLVS

SEQ ID NO: 1964 - protein, 1538 aa, Oryza sativa Japonica Group; identical to SEQ ID NO: 951

SEQ ID NO: 1965 - protein, 159 aa, Populus tremula x Populus alba
NTSPRWPLAQPMRFLGHNGEINTIQGNLNWMQSRETSLKSSVWHGRENEIRPYGNPKASDSANLDSAAELLIRSGRTPEQALMVLVPEAYKNHPTLTINYPEVVDFYDYYKGQMEAWDGPALLLFSDGKTVGACLDRNGLRPARYWRTVDNFVYVASEV

SEQ ID NO: 1966 - protein, 318 aa, Zea mays
NKFVQKSRLVPVRNSRDHTPVSAHSLLLQFRQLIIIINRTQSSRFHSRMLLNPASEASVLDTIRQHLLEEPADESFGSLVADQWSGSLPFRTDDADDMVVFGALQDAFAYGWLPDGSFVHVKPEPVRSPDSSSYPCSYDGSPCFGLLDPEPPLTPGTTTPSSRGQEEAAAAMARGKHYRGVRQRPWGKFAAEIRDPARNGARVWLGTYDTAEDAALAYDRAAYRMRGSRALLNFPLRIGSGDKRPSPAPPEPATSSDSSSSSASGSHKRRKRGEAAAANMAMALVPPPSQLNRPAQPWFPAAPVEQAAMAPRVEQIVV

SEQ ID NO: 1967 - protein, 1562 aa, Anabaena variabilis ATCC 29413; identical to SEQ ID NO: 958

SEQ ID NO: 1968 - protein, 897 aa, Ashbya gossypii ATCC 10895
MSTPIKYDIQQTCHEMSLLRVPELKAVCRSIGLPLSGRKADLQARIKEYVENSLRPNHVDPFRPKAIMALIQKSKVGDVLPTYESILQALRTGAFTHPVATGHAPPSSLFPSDSVDGAPHDESGDQHQTARAVGRKGSPSSVFYPSPFYNLKRMVSGSPKMAAKSPGRGTCNMKFRLSETESKFILDSKDTKLLLFCGPVSQGNRVHIQFPHPNEIKLNDNMIKDNVRGLKNKIGTAKPADLTPFVKHNAENYLQLVYAFTKEDFLVYLYIVTMNTPEKILEGVLARPKIVKPATLAYIKKILSEDEDDDLMTTSTIMTLQCPISYSRMKYPVKSVRCDHLQCFDAMSFILSQMQIPTWQCPVCQKQIEIKDLAVCDYVDDIIKSSNENVEQVVINSDGSWVAKEEEPENRPGKSTDTEQPAQTNIKDEDIDQVILDEEMSTKKAANDPIVISLDSDDEDDDVSLAEELAKLKNHPQSHSNSHTSPQKQSRTPDSLLNGKVSRASSVPLAVEQTSSFSPNERSISSNGGNAPLDRTISTEGSARVISLPSRSAGVLSTGSGSLSNHPVTTLNHTLQDNGISTITRLPRDMPATNLHRVLTDYNPSGHLNSQHDATLSNLSSKTGDVHRPSNSSSSFNGAQKRASIPNILGSAPLSNQSRTPDNRLTHGTSIHENPRLELNGDQSLLFGGNTGQASGNLAGVSPAENSRRSNSHDQSQYRLHSNAFHSTAPPNEPSKNTSPGTTVAPASVVGTNTRNTQRGPTGDVSQESVEQPQSASRASDESSARIMSPSHHTEPVVSVSTISSNTRPPILPPLPSIHRPLISPSPPVDDAPSGYYPTRQDHSKAYPSTNPRNKKPPVSPFIPRKYSSVVPKKRLLSTSDGAAKGDTNNACTNHGD

SEQ ID NO: 1969 - protein, 305 aa, Streptomyces coelicolor A3(2)
MRTPRQPSQHSVSGQNWSFMDARPAAQGMYDPRNEHDACGVGFVATLTGEASHTLVDQALTVLRNLEHRGATGSEPDSGDGAGILSQVPDAFFREVAGFELPEAGAYAVGIAFLPVDGTEDAVSRIETIAHEEGLTVLGWREVPVAPQMLGATARSTMPVFRQVFVGDGASRGIALDRHAFALRKRAEREAGVYFPSLSARTIVYKGMLTTGQLEPFFPDLSDRRFASAIALVHSRFSTNTFPSWPLAHPYRFVAHNGEINTVKGNRNWMRARESQLASNLFGSSADLERIFPICTPDASDSASF

SEQ ID NO: 1970 - protein, 156 aa, Triticum aestivum
SCPELGIAAEHGYFMRRTRDEQWQINNQCSEFGWMQMAEPVMNLYTEATDGSYIETKESALVWHHQDADPGFGSAQAKEMLDHLESVLANEPVSVKSGQHIVEVKPQSVSKGFVAEKILSMLTENKRQADFVLCIDVSEEVGSPEELEILSPSEEA

SEQ ID NO: 1971 - protein, 136 aa, Brassica napus
  misc_feature (27)..(28): Xaa can be any naturally occurring amino acid
KQVASGRFGVTPTFLVNADQLEIKVAXXAKPGEGGQLPGKKVSAYIARLRSSKPGVPLISPPPHHDIYSIEDLAQLIFDLHQINPNAKVSVKLVAEAGIGTVASGVAKGNADIIQISGHDGGTGASPISSIKHAGG

SEQ ID NO: 1972 - protein, 263 aa, Zea mays
MSREENVYMAKLAEQAERYEEMVEYMEKVAKTVDVEELTVEERNLLSVAYKNVIGARRASWRIVSSIEQKEESRKNEEHVNLIKEYRGKIEAELSNSGSRENTICDGILKLLDSHLVPSSTAAESKVFYLKMKGDYHRYLAEFKTGAERKESAESTMVAYKAAQDIALAELAPTHPIRLGLALNFSVFYYEILNSPDKACNLAKQAFDEAISELDSLGEESYKDSTLIMQLLRDNLTLWTSDLTEDGADEGKDAPKGDAGEGQ

SEQ ID NO: 1973 - protein, 225 aa, Arabidopsis thaliana
GQSIKPVYGRNPSFSKLYPCFTESWGDLPLKENDSEDMLVYGILNDAFHGGWEPSSSSSDEDRSSFPSVKIETPESFAAVDSVPVKKEKTSPVSAAVTAAKGKHYRGVRQRPWGKFAAEIRDPAKNGARVWLGTFETAEDAALAYDRAAFRMRGSRALLNFPLRVNSGEPDPVRIKSKRSSFSSSNENGAPKKRRTVAAGGGMDKGLTVKCEVVEVARGDRLLVL

SEQ ID NO: 1974 - protein, 502 aa, Dictyoglomus thermophilum H-6-12; identical to SEQ ID NO: 971

SEQ ID NO: 1975 - protein, 458 aa, Burkholderia mallei ATCC 23344
MSRLIIVSNRVAPISEGEPAAGGLAIGVYDALKETGGMWFGWSGEVIASGGPQIRIEEHGPVTFATIGLSRRDYDQYYRGFSNATLWPAFHYRADLIQFDRHEFEGYSRVNVWLAQQLVPLLRDDDVIWVHDYHLIPFARALRTAGVKNRIGFFLHIPFPAAQVLVNVPPHRELVEALCSFDLLGFQTDTDLRAFFEYVEYEAGGTVDRAAHPARVDAFGRTLRAAAYPIGVYPDEIAALAKAGENGRAVKSLAASLRGRQLVMSVDRLDYSKGLVERFRAFEKLLEHETSFRNRVSFLQIAPSTRADLRAYQDIRRQLEGESGRINGRFAELDWAPILYIHRQYERPVLAALYRLARVGYVTPLRDGMNLVAKEYVSAQDPDDPGVLVLSRFAGAACELTGALIVNPIDIGGMADALSRALSMPLAERRARHADMLARLRENNVSVWRDHFLRDLGR

SEQ ID NO: 1976 - protein, 230 aa, Populus tremula x Populus alba
IPEAWQNDKNMDPQRRALYEYSSALMEPWDGPALISFTDGHYLGATLDRNGLRPGRFYVTRSGRVIMASEVGVVDIPPEDVLRKGRLNPGMMLLVDFEKHTVVDDEALKQQYSLARPYGEWLKRQKIELSDIVNSVQESERVAPAISGVVAASDGDDSMVNMGIHGLLAPLKSFGYTVEALEMLMLPMAKDGTEPLGSMGNDAPLAVMSNREKLTFEYFKQMFAQVTNPP

SEQ ID NO: 1977 - protein, 1533 aa, marine gamma proteobacterium HTCC2143; identical to SEQ ID NO: 972

SEQ ID NO: 1978 - protein, 499 aa, Physcomitrella patens subsp. patens
MGLNLNGTKVYTGAGGAILEDVPHLTDWLSGLPTYPNPLKYNPAYSAARQYFVEETDTVAKDVVVNINDVGHGIHFRRAGPRDQIYFKPEEVRACIVTCGGLCPGINTVIREIVCGLWTQYGVREILGIDGGYRGFYSKNTIDLTPKTVNDIHKRGGTVLQTSRGGHDLGKIVDSIQDRDINQVYIIGGDGTQKGANAIYEECKRRGLKVAVAGIPKTIDNDIDVIDKSFGFDTAVEEAQRAINAAHVEAESVQNGLGLVKLMGRYSGYIAMHATLASRDVDCCLIPEVPFYLHGSGGLIEFVRKRLRESGHMVIVVAEGAGQELMAESTVNNNDLKDASGNKLLLDVGLWLCTILKDHFQAEFRETLNLKYIDPKYMIRAIPSNASDNVYCTLLAHGAIHGAMAGYSGFTVGPINNRHCYIPIKRVVAKSRNVNVADRMWARLMSSTNQPNFSRYEEVVQRQRKLNAQKQEEVENEKSTLSSNGASKPVSLQNVGRQS

SEQ ID NO: 1979 - protein, 863 aa, Zea mays
MASRSYSNLLDLATGAADQAPAVAALGALRRRLPRVVTTPGLIDDSPASPSTPPRPRTIIVANQLPIRSHRPESPEEPWTFEWDEDSLLRHLHHSSSPLMEFIYIGCLRDDIPQAEQDAVAQALLETHNCVPAFLPTDIAERYYHGFCKQHLWPLFHYMLPLSPDLGGRFDRALWQAYVSANKIFADKVLEVINPDDDFVWVHDYHLMVLPTFLRKRFNRIKLGFFLHSPFPSSEIYKTLPVREELLRALLNSDLIGFHTFDYARHFLSCCGRMLGLSYESKRGHICLEYYGRTVSIKILPVGVHMEQLKTVLGLPETEAKVSELMEMYSGKGRVVMLGVDDMDIFKGISLKLLAMEELLRQHPEWRGKLVLVQVANPARGRGKDVAEVQTETYAMVRRINEVYGEPGYEPVVLIDEPLQFYERVAYYVIAEVCLVTAVRDGMNLIPYEYIVSRQGNEKLDRMLRQGKPEEKKSMLVVSEFIGCSPSLSGAIRVNPWNIEAVADAMETALVLPENEKRLRHDKHFRYVSTHDVGYWANSFLLDLERTCKYHSQKRCWGIGFGLRFRVVSLDLTFRKLSLENILMAYRRAKTRAILLDYDGTLMPQAINKSPSTESVRILNSLCRDKDNVVYLCSGYDRRTLHEWFPCENLGIAAEHGYFLRCKRDAEWKTCVAATDCSWKQIAEPVMCLYRETTDGSTIEDRETVLVWNYEDADPDFGSCQAKELVDHLESVLANEPVSVKTTPHSVEVKPQGVSKGLVARRMLVSMKERGQCPDFVLCIGDDKSDEDMFQLIATAACGDSLASKAEVFACTVGRKPSKAKYYLDDAAEVVRLMQGLSYVSEELALANQRDEDEDSSLDDVWE

SEQ ID NO: 1980 - protein, 2145 aa, Saccharomyces cerevisiae YJM789; identical to SEQ ID NO: 983

SEQ ID NO: 1981 - protein, 764 aa, Xanthomonas campestris pv. campestris str. ATCC 33913
MILATDLDGTFLAGSAEHRHQLYRLVDQHPEIRLIFITGRGLEAVMPLLTDPTIPRPDYVVCDVGATVVDGHTLQPLQPLQSMIDAHWPGEQVVAQAMRAFPQLQRQDMPQERRCSYFCDPHTLAPLRAQIEQTARALGCDVLYSADRYLDILPPDTDKGRTLGALARQLELPRERILVAGDTLNDLSMYLAGFRGVCVGDSEAALTQATAQLDATYHASAPGCGGILEAIAHFGLLADDDPHVPAVQAPRKGGAELVMVYHRLPYDEVVEHGELVRRAPRSPNGIIPSLLSFFEGGQRGSWVAWSVDDPKRGPFQTHTEVDAQRYPTLTAARVPLSKSEVDIFYKRFSKEAFWPMLHVFWERARFREDDWQVFLAVNRKFAQATSAEAAHGATVWIHDYNLWMVPAYLRELRPDLKIAFFHHTYFPSADVFNVVPWRREIIGSLMCCDYVGFHIPRQVENFVDVVRGVMPVERLAQESCAPRFLTYGCAVGLDTMTTCLRVADRDVALGAHPVGTDLRRIRAALSKPDVRNDIFKLRREIGARKLVLSVERLDYTKGTLAKLEAFERLLDSQRQLLGKVTLLMVCVPAAREMTIYRTLQTQIEQAVGRINGRFSRLDWTPVRFFAQALPFEQVVAHYAAAQVMWITPLRDGLNLVAKEFVAVQGIEGGSGVLVLSEFAGAAAELKGAVLTNPHDPADLAAGLLQALAMPDDEAAGRLRQLYDSVEYYNIDHWGRDFLDAVARSRGAHARVPLAAASTVAEPVA

SEQ ID NO: 1982 - protein, 492 aa, Mycobacterium avium 104
MAPGGGRGSKTASYGNSDFVVVANRLPVDQERLPDGSTAWKRSPGGLVTALEPLLRRQRGAWVGWPGIVDEDVDHEDDPIVQDDLELRPVKLSADDVAEYYEGFSNATLWPLYHDVIVKPIYHREWWDRYVAVNRRFAEATSRAAARGATVWVQDYQLQLVPAMLRELRPDLTIGFFLHIPFPPVELFMQLPWRTEIVKGLLGADLVGFHLTGGAQNFLFLSRRLIGANTSRGAVGVRSRYGEVELESRVVRVGAFPISIDSTALDQTARHRDIRRRAREIRAELGNPRKVLLGVDRLDYTKGIDVRLKAFSELLAEGRAKRDDTVLVQLATPSRERVDSYQQLRNDIERQVGHINGEYGEVGHPVVHYLHRPVPRNELIAFFVAADVMLVTPLRDGMNLVAKEYVACRSDLGGALVLSEFTGAAAELRQAYLVNPHDLEGVKDTVEAALNQSVEEGRRRMRSLRRQVLAHDVDRWARSFLDALAESGPRDG

SEQ ID NO: 1983 - protein, 242 aa, Vibrio harveyi; identical to SEQ ID NO: 993

SEQ ID NO: 1984 - protein, 1448 aa, Salmonella enterica subsp. enterica serovar Paratyphi B str.; identical to SEQ ID NO: 997

SEQ ID NO: 1985 - protein, 534 aa, Triticum aestivum
MESVGVAPAPAAVAVAEQKMKLLEPRKEPLASAAAAAAKAPCKWAMKKKLVGGDAGYVLEDVPHLTDYMPELPTYPNPLQDNPAYSVVKQYFVNTDDTVTQKIVVRKNSARGTHFRRAGPRQRVYFQPDDVNAAIVTCGGLCPGLNTVIRELVCGLYDMYGVTSVVGIEGGYKGFYSRNTVTLTPKSVNDIHKRGGTILGTSRGGHDTAKIVDSLQDRGINQVYIIGGDGTQQGASVIYEEVRRRGLKCAVVGVPKTIDNDIAVIDKSFGFDTAVEEAQRAINAAHVEAESAENGIGVVKLMGRNSGFIAMYATLASRDVDCCLIPESPFYLEGKGGLLEFVEKRLKDSGHMVIVVAEGAGQDLIAQSMNFVDTQDASGNKLLLDVGLWLSQKIKDHFKKKTNFPITLKYIDPTYMIRAVRSNASDNVYCTLLAHSALHGAMAGYSGFTVAPVNGRHAYIPFYRITEKQNKVVITDRMWARVLCSTNQPCFLSHEDVENMKHDDDERHHLHNTQLLDGSPAKCSPNCNGSAGAE

SEQ ID NO: 1986 - protein, 314 aa, Oryza sativa Japonica Group
MLLNPASREVAALDSIRHHLLEEEEETPATAPAPTRRPVYCRSSSFGSLVADQWSESLPFRPNDAEDMVVYGALRDAFSSGWLPDGSFAAVKPESQDSYDGSSIGSFLASSSSEAGTPGEVTSTEATVTPGIREGEGEAVAVASRGKHYRGVRQRPWGKFAAEIRDPAKNGARVWLGTFDTAEDAALAYDRAAYRMRGSRALLNFPLRIGSRLQPPPAAPPRATSGHIPTPASSGSSSPSSSSSSSSSSSSGVTEAEEERRGRGRVHGHGTGSTTATTGAGTGAARPPGPAMVRRRSDPAAGELSGDVVVVVVI

SEQ ID NO: 1987 - protein, 849 aa, Medicago truncatula
MLQSSMEGTLFPNRPVLPLPTKKPTQALKFKPTFSHSPPPTPSQQSQSQTQTPPSFPIDSLLHHLKHLSSTPIITHTQTLVPNNNNNNTHFTSLQIQLDEKDENLQQGHTKRPTSSSVDYNHFDDVKFGFLSGKSKFMLNCIVGSSLNDLIEFFNSVKGELLESDITGLLKGLDLSGNWERAFLLFEWVWLNFGSENMKVDDQSVEFMVKMLGRESQYSIASKLFDIIPVEEYSLDVKACTTVLHAYARTGKYKRAIEIFEKMKETGLDPTLVTYNVMLDVYGKMGRAWSMILELLDEMRSKGLEFDEFTCTTVISACGREGILDEARRFFDDLKLNGYKPGTATYNSMLQVFGKAGVYTEALNILKEMEDNNCEPDAITYNELVAAYVRAGFHDEGAAVIDTMASKGVMPNAITYTTVINAYGKAGDADKALEVFGQMKELGCVPNVCTYNNVLVLLGKRSRSEDMIKILCDMKLNGCPPDRITWNTMLAVCGEKGKQKFVSQVLREMKNCGFEPDKETFNTLISAYGRCGSEVDVAKMYGEMVAAGFTPCITTYNALLNALARRGNWKAAESVVLDMRKKGFKPNETSYSLLLHCYSKAGNVRGLEKVEMEIYDGHVFPSWMLLRTLVLTNYKCRQLKGMERAFHQLQNNGYKLDMVVINSMLSMFVRNQKLEKAHEMLDVIHVSGLQPNLVTYNSLIDLYARVGDCWKAEEMLKDIQNSGISPDVVSYNTVIKGFCKKGLVQEAIRILSEMTANGVQPCPITFNTFMSCYAGNGLFAEADEVIRYMIEHGCMPNELTYKIVIDGYIKAKKHKEAMDFVSKIKEIDISFDDQSLKKLASCIRESLGS

SEQ ID NO: 1988 - protein, 531 aa, Synechococcus sp. WH 5701; identical to SEQ ID NO: 1006

SEQ ID NO: 1989 - protein, 239 aa, Zea mays
MLGKWFSSCPKLGIAAEHGYFLRWSSEEEWQTCTQAMDFGWMQMAKPVMNLYTEATDGSYIETKESALVWHHQDADPGFGSSQAKELLDHLESVLANEPVSVKSGQFIVEVKPQGVSKGIVAERILASVKERGKQADFVLCIGDDRSDEDMFENIADIIKRNMVAPRTSLFACTVGQKPSKAKFYLDDTFEVVAMLSALADATGAELESDSADELAASISSLDIGDEQSETSDTPIGGS

SEQ ID NO: 1990 - protein, 220 aa, Triticum aestivum
AEVQATRPFGCFLTPGMNVRLVGEANDYVGKGMAGGELVVVPVDDTGFVPEDAAIVGNTCLYGATGGQVFVRGKTGERFAVRNSLGQAVVEGTGDHCCEYMTGGCVVVLGKVGRNVAAGMTGGLAYMLDEDDTLVPKVNKEIVKMQRVNAPAGQMQLKGLIEAYVEKTGSTKGAKILSEWEAYLPLFWQLVPPSEEDSPEACAEFERVLARQKTAVQSAK

SEQ ID NO: 1991 - protein, 263 aa, Hordeum vulgare
MSAPGELSREENVYMAKLAEQAERYEEMVEFMEKVAKTVDSEELTVEERNLLSVAYKNVIGARRASWRIISSIEQKEESRGNEDRVTLIKEYRGKIETELSKICDGILKLLETHLVPSSTAPESKVFYLKMKGDYYRYLAEFKSGPERKDAAENTMVAYKAAQDIALAELAPTHPIRLGLALNFSVFYYEILNSPDRACNLAKQAFDEAISELDTLSEESYKDSTLIMQLLRDNLTLWTSDITEDTAEEEIREAPKHDSSEGQ

SEQ ID NO: 1992 - protein, 2195 aa, Ashbya gossypii ATCC 10895; identical to SEQ ID NO: 1013

SEQ ID NO: 1993 - protein, 1481 aa, Pseudomonas syringae pv. phaseolicola 1448A; identical to SEQ ID NO: 1017

SEQ ID NO: 1994 - protein, 1246 aa, Glycine max; identical to SEQ ID NO: 1019

SEQ ID NO: 1995 - protein, 442 aa, Agrobacterium tumefaciens str. C58; identical to SEQ ID NO: 1022

SEQ ID NO: 1996 - protein, 268 aa, Zea mays
MSPSEPTREESVYMAKLAEQAERYEEMVEFMERVAHYAGGAGGGDELSVEERNLLSVAYKNVIGARRASWRIISSIEQKEEGRGNEAHAASIRAYRSKIEAELARICDGILALLDSHLVPSAGGAESKVFYLKMKGDYHRYLAEFKSGAERKDAAESTMNAYKAAQDIALADLAPTHPIRLGLALNFSVFYYEILNSPDRACNLAKQAFDEAISELDSLGEESYKDSTLIMQLLRDNLTLWTSDTNEDAGDEIKEAAAAPKESAPEGQ

SEQ ID NO: 1997 - protein, 1616 aa, Zea mays; identical to SEQ ID NO: 472

SEQ ID NO: 1998 - protein, 470 aa, Burkholderia xenovorans LB400
MGRLIVVSNRVATPTETKGSAGGLAVGVFGALKDAGGVWFGWSGDVVSETVANAGPTLEQDGAVTFATVGLTRKDYDQYYRGFSNATLWPVFHYRNDLARYEREEYTGYRRVNAWLAHKLIKLLEPDDVIWIHDYHLIPFAEALRNEGVTNRIGFFLHIPFPAPQILLNIPPHEELVKSLSCYDLLGFQTATDELAFKDYVTRHARGTVSADGLVEAFGRKLRTGVYRIGVFPDEIAEQAKRYESRQHVLDLKQSLEGRKLIMSVDRLDYSKGLVERFRAFEHLLERSPEWRGNVTLVQIAPPTRSDVATYQKIRQDLEYEAGRINGRYSGLDYTPIRYLNQQYDRWKLMSLFRESQIGFVTPLHDGMNLVAKEYVAAQNPDDPGVLVLSIFAGAAAELSGALLVNPHDAIGMCEALQRALQMPLDARQRRHEINMAALRKNDLGVWRDTFLHDLRSVPVQQPGKGGGHN

SEQ ID NO: 1999 - protein, 872 aa, Oryza sativa Japonica Group
MASAAPLPPTPPPSQQQQPQPQGKEQQQQMAVAMNARRLVMIGDRLRTHFRGGGGTVLEPPDLAHLVYAFARGIDFALSSGDVPTVASEIPSILKKVYLVGKDQFLQSSVMVLMISCKNACSEKWFQPTDCTEILRMANELSGKFCTPVSQPDNDSTVIQIISTIMPRYYPQLKFERLVTSLEAKVGYDVLMADFFIHKNVPREEKINLIVVQKEDLNASSCIANPPHVSFLVNGKGVDKRTNVSMETGPQFPTDITRMLKYGANIIQAIGYFNANYIIAVAFLNKLESFDAPNLNDYAQPVAADPPDSDLLEGPSRVSLKCPISFRRIKTPIKGRLCKHYQCFDYDNYMELNLRKPTWRCPFCNTPSNFTDLRIDQKMVKILQETGEDTIDVLVFADGSWKAISTNDERSDRHSSDVIQQSRDTMDTDATADDVIDLINEDNDGDVPMSFTSASEDVKPFLNCQDLSVADYLSDLPMNTVSQAEDLYAGGASRGNNERGNATSTSGQNSSLPSTGGLGSSSFGTLESILPHNILHPVITDAVSPSLDTSNSVVLRQHVAQGTRSDIVPSQPRIDPQLRLEIARPPIPRNVAREPTGIQALPVQPQRVRPNIYNCPPPFPQSSPASAYQVHQVTNADSVITAMSTGIGSLSRAPDAAPLLQHQSTQQEIRATQNYHQGQFIGLTAPQNFMGTRPPPGVPGQAIGANAHGAPPAQQSHHVHRLVSNLMNQLGQATVAQPSTAPQVLPSQPGGTSAVNPQIRGHLFPAQQRSQAMRPQAVPRPTISQAPPRAQSPFLPATARPPSTPPPIGTSDDLQELPVDESWRPTGQMRGSLTGEAYSVAIGRYNPSVNIAGQQTSHVTSQARPAGPDARR

SEQ ID NO: 2000 - protein, 165 aa, Capsicum annuum
MASQREENVYMAKLAEQAERYEEMVEFMEKVVAALDGGDELTVEERNLLSVAYKNVIGARRASWRIISSIEQKEESRGNEDHVTSIKNYRSKIEIELTSICNGILKLLDSKLIGSAATGDSKVFYLKMKGDYYRYLAEFKTGAERKEAAENTLSLISLLRILLMP

SEQ ID NO: 2001 - protein, 138 aa, Physcomitrella patens subsp. patens
GPLPMDQNDSDDMFIYSILKDASHSAADSSILQETTFDPMKSIQVKIKQERSPRATTTSQKPAEMKPSVKSHYIGVRRRPWGKFAAEVRDSKRNGVWVWLGTFDTAEQAALAYDRAAFNMRDSRAILNFPTRITTDSS

SEQ ID NO: 2002 - protein, 263 aa, Triticum aestivum
  misc_feature (61)..(61): Xaa can be any naturally occurring amino acid
  misc_feature (167)..(167): Xaa can be any naturally occurring amino acid
MSTAEATREENVYMAKLAEQAERYEEMVEFMEKVAKTADVGELTVEERNLLSVAYKNVIGXARRASWRIISSIEQKEESRGNEAYVASIKEYRTRIETELSKICDGILKLLDSHLVPSATAAESKVFYLKMKGDYHRYLAEFKAGAERKEAAENTLVAYKSAQDIAXLADLPTTHPIRLGLALNFSVFYYEILNSPDRACNLAKQAFDEAIAELDSLGEESYKDSTLIMQLLRDNLTLWTSDNAEEGGDEIKEAASKPEGEGH

SEQ ID NO: 2003 - protein, 111 aa, Brassica napus
TIRKNHSKAQRLFLYLNRISINPMKKPASISMDHVLLALRETSEEREIRIRSLFDFFDNSSLGFLDYAQIEKGLASLQIPPEYKYARDLFRVCDANRDGRVDYHEFRRYID

SEQ ID NO: 2004 - protein, 225 aa, Oryza sativa Japonica Group
MQENVTVKIYWKLGIAAEHGYFVRWNKAAEWESSYPNHDFEWKHIAEPIMQVYTETIDGSSIEPKESALLWHYLDADHDFGSCQAKELLGHLERVLSNEPVVVKCGHYIVEVKPQGVSKGLVVDKVIHRLMNNGKTLDFVVCIGNDRSDEDMFKSIDSMTSSSAFPAVPEVFACSVGQKPSKAKYYVDNVGEVVRLLKNVAGISSHREAVSHGRVIFRDVIDYVD

SEQ ID NO: 2005 - protein, 868 aa, Zea mays
MVSKSYSNLLDMTPGDGFDFRRPFKSLPRVVTSPSIISDHDWDSISDGDSVGSAFSIERKIIVANFLPLNCTRDETGELSFSLDHDSLLMQLKDGFSNETDAVYVGSLKVHVDPREQDQVAQKLLREYRCIPTFLPSDLQQQFYHGFCKQQLWPLFHYMLPICLDKGELFDRTLFQAYVRANKLFADKVMEAINTDDDYVWVHDYHLMLLPTFLRKRLHRIKIGFFLHSPFPSSEIYRTLPVRDEILKSLLNADLIGFQTFDYARHFLSCCSRLLGLHYESKRGYIGIEYFGRTVSLKILSVGVHVGRLESVLKLPATVSKVEEIEQRYKGKILMLGVDDMDIFKGISLKLLALELLLDRNPKLREKVVLVQIINPARSTGKDVQEAITEAVSVAERVNTKYGSSSYKPVVLIDNRIPFYEKVAFYAASDCCIVNAVRDGMNLVPYEYTVCRQGNEEIDRVRGLDKDTHHTSTLIVSEFVGCSPSLSGAFRVNPWSVDDVADALCRATDLSESEKRLRHEKHYRYVSTHDVAYWAHSFAQDLERACRDHYSRRCWAIGFGLNFRVIALSPGFRKLSSEHFVSSYNRASRRAIFLDYDGTLVPQSSINKAPSEEVISILNTLCNDPKNVVFIVSGRGRDSLDEWFSPCEKLRLAAEHGYFIRWSKEAAWESSYSSPRQEWKHIAEPVMQVYTETTDGSSVESKESALVWHYLDADHDFGSFQAKELKDHLERVLSNEPVVVKCGHYIVEVKPQGVSKGRAVDKLIQALANNNGKAQDFLMCVGNDRSDEDMFECINGMASNDVSSTTVPEVFACSVGQKPSKAKYYVDDTSEVIRLLRDATRFSSSQRREDVNASRGRVTFRDALDYVD

SEQ ID NO: 2006 - protein, 1534 aa, Gloeobacter violaceus PCC 7421; identical to SEQ ID NO: 1048

SEQ ID NO: 2007 - protein, 69 aa, Picea sitchensis
MADWGPVLIGVLLFILLTPGLLFQLPGSSRTVEFSNFRTSGISIVVHSFIFFGLYAIFLIAIGVHIYFG

SEQ ID NO: 2008 - protein, 1482 aa, Shewanella sp. MR-4; identical to SEQ ID NO: 1052

SEQ ID NO: 2009 - protein, 441 aa, Thiomicrospira crunogena XCL-2; identical to SEQ ID NO: 1053

SEQ ID NO: 2010 - protein, 1535 aa, Yersinia pseudotuberculosis IP 32953; identical to SEQ ID NO: 1058

SEQ ID NO: 2011 - protein, 185 aa, Brassica napus
MAVEDDSTIVPREGTEFESEEAAKMFYDDYSRSLGFVMRVMSCRRSERDGRVLARRFGCNKEGRCVSVRGKSGSVRKPRQSTREGCKAMVHVKYDRSGKWVVTKFVKEHNHPLVVEPRQARQTLDEKDKRIQELTIELRNKKRLCAAYKEQLDAFAKIVEEYSNRMSKRVESVVENLKEFEHIEQ

SEQ ID NO: 2012 - protein, 267 aa, Arabidopsis thaliana
MAAPPASSSAREEFVYLAKLAEQAERYEEMVEFMEKVAEAVDKDELTVEERNLLSVAYKNVIGARRASWRIISSIEQKEESRGNDDHVTTIRDYRSKIESELSKICDGILKLLDTRLVPASANGDSKVFYLKMKGDYHRYLAEFKTGQERKDAAEHTLTAYKAAQDIANAELAPTHPIRLGLALNFSVFYYEILNSPDRACNLAKQAFDEAIAELDTLGEESYKDSTLIMQLLRDNLTLWTSDMQDESPEEIKEAAAPKPAEEQKEI

SEQ ID NO: 2013 - protein, 2218 aa, Physcomitrella patens subsp. patens; identical to SEQ ID NO: 1062

SEQ ID NO: 2014 - protein, 1482 aa, Pseudomonas aeruginosa; identical to SEQ ID NO: 1064

SEQ ID NO: 2015 - protein, 1529 aa, Prochlorococcus marinus str. NATL2A; identical to SEQ ID NO: 1079

SEQ ID NO: 2016 - protein, 381 aa, Triticum aestivum
EGQVPPDLPSRTAIQQYLQSKNRLLILGFNSTLTEPVESSGRRGGDQIKEMELKLHPDLKGPLRALCEDESTTVIVLSGSDRSVLDENFGEFNLWLAAEHGMFLRPTDGEWMTTMPEHLNMDWVDSVKHVFEYFTERTPRSHFEHRETSFVWNYKYADVEFGRLQARDMLQHLWTGPISNAAVDVVQGSRSVEVRSVGVTKGAAIDRILGEIVHSKSMVTPIDYVLCIGHFLGKDEDIYVFFDPEYPSEPKVKPDGASVSVDRRQNGRPSNGRSNSRNSQARTQKPQVAAPPPERSSSSSDHSTANNNSHHDWREGSSVLDLNGDNYFSCAVGRKRSNARYLLNSSEDVVSFLKEMAESTTPRAGGLPPGAAADYMFLDRQ

SEQ ID NO: 2017 - protein, 1622 aa, Arabidopsis thaliana; identical to SEQ ID NO: 942

SEQ ID NO: 2018 - protein, 414 aa, Triticum aestivum
  misc_feature (14)..(14): Xaa can be any naturally occurring amino acid
  misc_feature (22)..(22): Xaa can be any naturally occurring amino acid
AGNSARGYLGLPQXDRLATTRXFESQFDAYKRANQMFADVVYQHYQEGDVIWCHDYHLMFLPRCLKEHDINMKVGWFLHTPFPSSEIYRTLPSRSELLRSVLCADLVGFHTYDYARHFVSACTRILGLEGTPEGVEDQGKLTRVAAFPIGIDSDRFKRALDIDAAKRHVNELKQRFAGRKVMLGVDRLDMIKGIPQKILAFEKFLEENPEWIDKVRLLQIAVPTRTDVPEYQKLTSQVHEIVGRINGRFGTLSAVPIHHLDRSLDFHALCALYAVTDVALGTSLRDGMNLVSYEYVACQGSKKGVLILSEFAGAAQSLGAGAILVNPWNITEVADSIKHALTMTSDEREKRHRHNYAHVTTHTAQDWAETFVCELNDTVAEALMRTRQVPPDLPNRTAIQQYLQSKNRLLILGF

SEQ ID NO: 2019 - protein, 260 aa, Rheum australe
MSTVESREENVYLAKLAEQAERYEEMVEFMEKVVKTVDVEELTVEERNLLSVAYKNVIGARRASWRIISSIEQKEESRGNEDHVTIIKDYRSKIETELSKICDGILNLLDSHLVPSAASAESKVFYLKMKGDYHRYLAEFKTGTERKEAAENTLLAYKSAQDIALADLAPTHPIRLGLALNFSVFYYEILNSPDKACNLAKQAFDEAISELDTLGEESYKDSTLIMQLLRDNLTLWTSDATEEGADEIKEATKGETGEGQ

SEQ ID NO: 2020 - protein, 446 aa, Mycobacterium smegmatis str. MC2 155; identical to SEQ ID NO: 1090

SEQ ID NO: 2021 - protein, 1561 aa, Microcoleus chthonoplastes PCC 7420; identical to SEQ ID NO: 1089

SEQ ID NO: 2022 - protein, 61 aa, Physcomitrella patens subsp. patens
HYRGVRQRPWGKFAAEIRDSSKNGSRIWLGTFDTAELAALAYDRAALQMRGSKALLNFPLK

SEQ ID NO: 2023 - protein, 1494 aa, marine gamma proteobacterium HTCC2080; identical to SEQ ID NO: 1093

SEQ ID NO: 2024 - protein, 840 aa, Volvox carteri f. nagariensis; identical to SEQ ID NO: 1095

SEQ ID NO: 2025 - protein, 862 aa, Arabidopsis thaliana
MSPESWKDQLSLVSADDYRIMGRNRIPNAVTKLSGLETDDPNGGAWVTKPKRIVVSNQLPLRAHRDISSNKWCFEFDNDSLYLQLKDGFPPETEVVYVGSLNADVLPSEQEDVSQFLLEKFQCVPTFLPSDLLNKYYHGFCKHYLWPIFHYLLPMTQAQGSLFDRSNWRAYTTVNKIFADKIFEVLNPDDDYVWIHDYHLMILPTFLRNRFHRIKLGIFLHSPFPSSEIYRTLPVRDEILKGFLNCDLVGFHTFDYARHFLSCCSRMLGLDYESKRGYIGLEYFGRTVSIKILPVGIHMGQIESIKASEKTAEKVKRLRERFKGNIVMLGVDDLDMFKGISLKFWAMGQLLEQNEELRGKVVLVQITNPARSSGKDVQDVEKQINLIADEINSKFGRPGGYKPIVFINGPVSTLDKVAYYAISECVVVNAVRDGMNLVPYKYTVTRQGSPALDAALGFGEDDVRKSVIIVSEFIGCSPSLSGAIRVNPWNIDAVTNAMSSAMTMSDKEKNLRHQKHHKYISSHNVAYWARSYDQDLQRACKDHYNKRFWGVGFGLFFKVVALDPNFRRLCGETIVPAYRRSSSRLILLDYDGTMMDQDTLDKRPSDDLISLLNRLCDDPSNLVFIVSGRGKDPLSKWFDSCPNLGISAEHGYFTRWNSNSPWETSELPADLSWKKIAKPVMNHYMEATDGSFIEEKESAMVWHHQEADHSFGSWQAKELLDHLESVLTNEPVVVKRGQHIVEVKPQGVSKGKVVEHLIATMRNTKGKRPDFLLCIGDDRSDEDMFDSIVKHQDVSSIGLEEVFACTVGQKPSKAKYYLDDTPSVIKMLEWLASASDGSKHEQQKKQSKFTFQQPMGQCRKKA

SEQ ID NO: 2026 - protein, 1166 aa, Oryza sativa Japonica Group; identical to SEQ ID NO: 1096

SEQ ID NO: 2027 - protein, 221 aa, Oryza sativa Japonica Group
MAILSVELFRSIMNCLCSLRWNKAAEWESSYPNHDFEWKHIAEPIMQVYTETTDGSSIEPKESALLWHYLDADHDFGSCQAKELLGHLERVLSNEPVVVKCGHYIVEVKPQGVSKGLVVDKVIHRLMNNGKTLDFIVCIGNDRSDEDMFKSIDSMTSSSAFPAVPEVFACSVGQKPSKAKYYVDNAGEVVRLLKNVAGISSHREAISHGRVIFRDVIDYVD

SEQ ID NO: 2028 - protein, 1496 aa, Campylobacter coli RM2228; identical to SEQ ID NO: 1100

SEQ ID NO: 2029 - protein, 692 aa, Schizosaccharomyces pombe
GTRNGVRSRPVWLPGPEKGSETIINETRSQQSRWLAYAENVIRPLIHYKYWPSSEVDENEEQWWRDYVKMNHAFADKICEIYKPGDFIIVQDYSLFLVPQLIRNKIDDAVIGFYHHHPFPSSEIARCFPRRRAILRSVLGADFIGFEDYSYASHFISCCSRVLDLEIGHDWVNLNGNKVTVRAITVGIDVPRIIRSSGNVSVSEKLEELNKRYENMKVILGRDRLDELYGVPQKLRSFQRFLRTYPEWRKKVVLIQITISSAFKHPKLLSSIKKLVQAINQEFGTDDYTPVHHVEEQLEPADYFALLTRADALFINSIREGVSNLALEYVVCQRDRYGMVLLSEFTATSAMLHDVPLINPWDYNECAGIISYALSTPLERRKMIERASYKQVTTHTMQSWTSSLIRSLAYKLAATKTDQRIPTLTPEHALSVYSKASKRLFMMDYDGTLTPIVRDPNAAVPSKKLLDNLATLAADPKNQVWIISGRDQQFLRNWMDDIKGLGLSAEHGSFVRKPHSTTWINLAELLDMSWKKEVRRIFQYYTDRTQGSSIEEKRCAMTWHYRKADPREWSFQALECEALLEELVCSKYDVEIMRGKANLEVRPSSINKGGIVKQILSSYPEDSLPSFIFCAGDDRTDEDMFRSLHKNTRINKETSFAVTIGSDKKLSIADWCIETLQMLLISALVWRILLTE

SEQ ID NO: 2030 - protein, 477 aa, Zea mays
GAKYAAVSVAQRINDKYGSANYKPVVLIDYSIPFYEKIAFYAASDCCIVNAVRDGMNLIPYEYTVCRQGNEELDKLRGLNKSSSHTSTLIVSEFVGCSPSLSGAFRVNPWSMEDVADALYSVTDLTRYEKNLRHEKHYRYVRSHDVAYWARSFDQDLDKACIEQYSQRCWTTGFGLNFRVIALSPGFRRLSLEHLASSYKKANRRMIFLDYDGTLVPQTSHDKSPSAELISTLNSLCSDMKNTVFIVSGRGRDSLSEWFASCENLGIAAEHGYFIRWNRAAEWETSFSGIYSEWKLIADPIMHVYVETTDGSFIEPKESALVWHYQNTDHDFGSCQAKELVGHLERVLSNEPVVVRRGHQIVEVKPQGVSKGISVDKIIRTLVSKGEVPDLLMCIGNDRSDEDMFESINRATSISELPAAPEVFACSVGPKASKANYYVDGCDEVIRLLKGVTAVSLQKDTAGHSHAAFEDTLEVVS

SEQ ID NO: 2031 - protein, 408 aa, Triticum aestivum
  misc_feature (67)..(67): Xaa can be any naturally occurring amino acid
  misc_feature (92)..(92): Xaa can be any naturally occurring amino acid
  misc_feature (171)..(171): Xaa can be any naturally occurring amino acid
  misc_feature (216)..(216): Xaa can be any naturally occurring amino acid
  misc_feature (392)..(392): Xaa can be any naturally occurring amino acid
MPGAAAHAVEPRGTAAPSPPVAAAATAAAAPAAAAGGPCEPVRKAGPVTMEHVLLALHETEEEREAXRIRDMFDFFDTSGRGQLDYAQIEAXGLAALQVPAECKYARELLRACDRDRDGRVGYDDFRRYMDDKELELYRIFQAIDVEHNGCILPEELWDALVKAGIEIDDXEELARFVEHVDKDNNGIITFEEWRDFLMLYPNEATIENIYHHWEXRVCLVDIGEQAAIPEGLSKHVSASKYLIAGGIAGAASRTATAPLDRLKVIMQVQTTRTTVTHAVKDIFIRGGLLGFFRGNGLNVVKVAPESAIRFYAYETLKEYIMNSKGENKSAVGASERLVAGGLAGAIAQTAIYPIDLVKTGLQTFSCESGKVPSLGTLSRDILKHEGPRTFXRGLFHLAGGALPGAGC

SEQ ID NO: 2032 - protein, 292 aa, Thinopyrum intermedium
MLLNPASEALVLDSIRQHLMEETAAVAAPAEARRQRPAYCRSTSFGSLVADQWSESLPFRADDSDDMVVYGALRDAFSCGWLPDGSFAAVKPEPLPSPDSYACDGPSCFGFLEPETPPATPPGEGEEATAFMGEAAAAVARGKHYRGVRQRPWGKFAAEIRDPAKNGARVWLGTYDTAEDAAVAYDRAAYRMRGSRALLNFPLRIGSEIAAAKAAAAAAGDKRPSPEPATSDSSSSSSGSPKRRKRGEAAAASMAMALVPPPSQLSRPAQAWYPAAPVEQVAMAPHVQQLVS

SEQ ID NO: 2033 - protein, 444 aa, Oryza sativa Japonica Group
EKPAQKAADLNEILSERGACGVGFVANLKNEPSFNIVRDALVALGCMEHRGGCGADNDSGDGSGLMSGIPWDLFNDWANKQGLAPLDRTNTGVGMVFLPQDENSMEEAKAVVAKVFTDEGLEVLGWRTVPFNVSVVGRYAKETMPNIQQIFVKVAKEDNADDIERELYICRKLIERATKSASWADELYFCSLSSRTIVYKGMLRSEILGQFYLDLQNELYKSPFAIYHRRYSTNTSPRWPLAQPMRLLGHNGEINTIQGNLNWMRSREATLQSPVWRGREHEIRPFGDPKASDSANLDSTAELLLRSGRSPAEAMMILVPEAYKNHPTLSIKYPEVIDFYDYYKGQMEAWDGPALLLFSDGRTVGACLDRNGLRPARYWRTSDDFVYVASEVGVIPMDESKVVMKGRLGPGMMITVDLQTGQVLENTEVKKSVASANPYGSWLQ

SEQ ID NO: 2034 - protein, 874 aa, Oryza sativa
MVSRSYSNLLELAAGGGGGGGGEGPLPSLGRRRIPRVVTASGIVPDLDYSDDDAASAASSSDHSSAHSHAPRERAIIVANQLPIRASRRGGGGGGWEFSWDEDSLLLQLRDSLRAHADRADDMEFVYVGGLRDDVPAAEHDEVAHHLLEGFRCVPTFLPADLRSRFYHGFCKQQLWPLFHYMLPLSPELGGRFDRALWQAYVSVNKIFADKILEVISPDEDYVWVHDYHLMILPTFLRKRFNRVKLGFFLHSPFPSSEIYKTLPVREELLRSLLNADLIGFHTFDYARHFLSCCGRMLGLKYESQRGYIALEYYGRTVTIKILPVGVHLEQLRSVLNLPETGVKVAELLKQFCDQNRLMLLGVDDMDIFKGISLKLLAFEQLLMQHPEWRGRVVLVQIANPARGRGKDVKEVQDESYAMVRRINEAFGQPGYQPVILIDRPLQFYERMAYYVVAECCLVTAVRDGMNLIPYEYVIARQGNEKLDGILGLGPSARKKSMLVVSEFIGCSPSLSGAIRVNPWNIDAVADAMDSALEMPEGEKVLRHEKHHKYVSTHDVGYWANSFLQDLERTCLDHSRRRCWGIGFGLRFRVVALDPNFKKLAVEHLVSAYRRTTTRIILLDYDGTLMPQTSFGKSPSSKTIDMLNSLSRDQNNMVFLVSTKKRSTLEEWFSSCDNLGLAAEHGYFLRLKRDAEWETCVPVTDRSWKQIAEPVMKTYTETTDGSTIEDKETAIVWSYEDADPDFGSCQAKELHDHLESVLANEPVTVKAGLNHVEVKPQGVSKGLVAKRLLSIIRENSLLPDFVLCIGDDRSDEDMFEVITTAAQDNCLSPDAEVFACTVGRKPSKAKYYLDDLADIVRLSRAWQCFDRCRPRPNW

SEQ ID NO: 2035 - protein, 496 aa, Methanothermobacter thermautotrophicus str. Delta H
MSELQKRAMRFLEDKNPVIVSNRGPVEFFKENDETVMKRGAGGLVSTLLPLVERFSGVWISSAMTVEDARVASGYPENRVPLPEDDPRFTVSFVIVDRERYESYYSIISNPLLWFVQHYMWNTPYDPQIDDKVYRAWEDGYVHVNKKFGDKVISEIERNEKDSLIMLQDYHLYLCPFFIKKEIGDVFLSHFIHIPWPQRDYFNILPERMRADIIGGLLSNTILGFHIERYCANFFECCEDLGYEVDGDRGIVRNGDEKTLVKSYPISVDPESMERTVSSPTFMEKDEFVRKLKGNMFLIYRTDRADLSKNIIRGFRAYELFLRDHPEFHGKVKFLATGKPTRQQIREYRNYSEEVKDTVEEINEKYGTDEWKPIEYIYRADYELVAAAFKNYDCLIVNPIADGMNIVPKEAAIINREDGALILSERAGCYDELAEHVIGVNPFDIKETADAIYSAMKMSPGKRKKLSEGLKSRVLKRTIYHWINEQFDDFEDLWES

SEQ ID NO: 2036 - protein, 450 aa, Silicibacter pomeroyi DSS-3; identical to SEQ ID NO: 1117

SEQ ID NO: 2037 - protein, 224 aa, Triticum aestivum
  misc_feature (147)..(147): Xaa can be any naturally occurring amino acid
  misc_feature (155)..(155): Xaa can be any naturally occurring amino acid
  misc_feature (172)..(172): Xaa can be any naturally occurring amino acid
LLSRRLMKLSQSNKVRSAIELFDSMLASGLQPNSHACNSLLASFVRRGSSVDAMKMYEFMKGKGLATGHTYTLILKAVARSEGYISALQMFSEIEECNESRETLDVIVYNTMISACGRAKDWRQVEKLWGRLAENSLSGTLMTYDLXVSTFVQCXQSELAIAAYEEMLCNGXDPSEDIMKPSLPKKGGGVLAHELRLPEIHGLLLEGKLLLNLKWPPFFLAPLK

SEQ ID NO: 2038 - protein, 213 aa, Zea mays
SKEQLSRILPIVDATSSDSGAFDNVLELLVRGGRSLPEAVMMMIPEAWQNDVNMDPEKKALYEFLSALMEPWDGPALISFTDGRYLGATLDRNGLRPGRFYVTHSGRVIMGSEVGVVDVPPEDVLRKGRLNPGMMLLVDFENHTVVDDEALKAQYSKAHPYGEWLKRQKIYLKDIVESVPETDRVAPSISSSLSQKNENIDHVGISGFLTQLK

SEQ ID NO: 2039 - protein, 1612 aa, Oryza sativa Japonica Group; identical to SEQ ID NO: 1123

SEQ ID NO: 2040 - protein, 166 aa, Triticum aestivum
RTHGVYDTTGRNPRGSLEQVRVPLCASVSAPRGPPTVYSFPQAEACLLNPTLLFLCFPASSLLFFLLAPSFESRERCWVQLAWSKQADPGGADRSAEMADWGPVVVATVLFVLLTPGLLFQLPAQGRIVAFGSMHTGGLAILVHAVIYFALITIFLIAIGVHIYAG

SEQ ID NO: 2041 - protein, 271 aa, Triticum aestivum
MLLLNPASEAAAAALDSIRQQLLEEPMAPARPAYCRSASFGSLVADQWSESLPFRPNDADDMVVYGALRDAFSCGWLPDGSFAAVKPEPLPSPDSYDGCCLGSFLASPPGLDAPWAEEAEVAATASRGKHFRGVRQRPWGKFAAEIRDPAKNGARVWLGTFDSAEDAAVAYDRAAYRMRGSRALLNFPLRIGSEIAAAAGQKRPSPQPASPDSPPPSSSAPGSSKRRKRGEAAAESMSMALVPPPPVQAPVQLTLPVQPWLATGAVQQLVS

SEQ ID NO: 2042 - protein, 463 aa, Sinorhizobium meliloti 1021
MSRLVIVSNRVPVPDKGGIAPAGGLAVALKVALEEHGGIWMGWSGRSSGENEPEPLAQLHQGNITYALTDLTDTDVGEYYHGFANRVLWPICHYRLDLAEYGRKEMAGYFRVNRFFAHRLAPLVRPDDVIWVHDYHLIPLAAELRQMGLKNRIGFFLHIPWPPADVLFTMPVHEEIMRGLSHYDVVGFQTDHDLENFAGCLRREGIGDELGGGRFSAYGRVFKGGIYAIGIETAAFAEFAKKALTNKTVRKARESIEHRSLIIGVDRLDYSKGITQRIDAFERFILANPAQQGRVTYLQITPKSRSEVPEYEAMQRTVAEQAGRVNGALGAVDWVPIRYINRSVGRHILAGLYRLGKVGLVTPLRDGMNLVAKEYVAAQDPDDPGVLVLSRFAGAARDLKGALLVNPYDIEGTANAMARALSMPLEERKDRWKTMMDHLLEHDVSRWCRDFLNDLATSPDPSG

SEQ ID NO: 2043 - protein, 61 aa, Physcomitrella patens subsp. patens
HYRGVRHRPWGKFAAEIRDPAKNGARVWLGTFDTAELAGLAYDRAALKLRGSRALLNFPLR

SEQ ID NO: 2044 - protein, 262 aa, Oryza sativa
  misc_feature (21)..(21): Xaa can be any naturally occurring amino acid
  misc_feature (82)..(82): Xaa can be any naturally occurring amino acid
MSPAEASREENVYMAKLAEQXAERYEEMVEFMEKVAKTTDVGELTVEERNLLSVAYKNVIGARRASWRIISSIEQKEESRGXNEAYVASIKEYRSRIETELSKICDGILKLLDSHLVPSATAAESKVFYLKMKGDYHRYLAEFKSGAERKEAAENTLVAYKSAQDIALADLPTTHPIRLGLALNFSVFYYEILNSPDRACNLAKQAFDDAIAELDTLGEESYKDSTLIMQLLRDNLTLWTSDNAEDGGDEIKEAAKPEGEGH

SEQ ID NO: 2045 - protein, 2157 aa, Oryza sativa Indica Group; identical to SEQ ID NO: 1135

SEQ ID NO: 2046 - protein, 845 aa, Vitis vinifera
MAGMSYTDDGGRGRIRPASRLVATVADLLAMHIQNGHPLDSAEVADLFLSLARGIDHAVANNEIPSRARDLPFLLKQVLRRMNDSSLQAVAMVLMISVKNACKIGWFLDHDATDLLTLAKEIGKIFSTMEDINAEPHYPLPSVSKIMSRYYPRLRMGHVLASLEVKPGYGAFVIDFHITRSMVSPAQKHIDNGPQLPTNVIAMLRYGINLLQVVGQFNGNYVIIIAFMSVISTSGIPELQEYIQPVAVTSDSDLEIIEGQARISLNCPISFRRINIPVKGHLCKHHQCFDYGNFIEINSRRPSWRCPHCNQSVCNPDIRIDQNMILREVGENVVDVIISPDGSWKPVVESIDHAEQLYDATQSNWQENTKQCESVRLSSIAADAVDLTMGEDNDDDSPSNFRTEDMKPLWDDLQGFSSAEKIVSPGVNSTVEADQIISAHREDNLWTGVLLTPSSVSDGLAPPTTSSNAHSNVGFPRSTFSFMSSPVLTDAVSPSPYRETLDVHRETQVPIPLLQNQHFDPSNLQLQQSRLGSLIASNEYGRLASIPRHLTRNPIAVQALPAQDQLPRLAQHTRLMPTGATSTGSQTTSFMAPSVEGFDAVNGVTERDLQFSRSLMSSFPVSGQSVQRVGGLPNPRTTQAMNEPRNNVHPSIHVQSMQRQQRSGGSQVTGSVPNRQSPHAAAAQQTVQVSRSPPSVPVQLRPARTGTAFSVGMVAEQLRTAGEQRRNILGTAWSTPRPDASAALPTDENWRPSGRMRGSLTGEAYSAALNQFMLQPTQPTQAPLPPTSLPSNLPGGLPAFRLFPSSSNEHNAAPSQTEPQPRLRPQGGGSSRDFTRMDSKDALID

SEQ ID NO: 2047 - protein, 737 aa, Pyrobaculum aerophilum str. IM2
MRLIIVSNRLPVVLTVGERGMEIREAVGGLATAVKSFIKATENGKALGFSEVVWAGWSGIKAEQESEDLKSRLREMGLLPVSLTAEEVNFFYEGFCNSTLWPLFHGFTVYTVFESKYWEAYVKVNQKYAETVASVANTGDFVWIHDYHLMLMPAMLREMSPDVSIGFFLHIPFPPAEMYQLMPPPWRTALLDGVLASDLVGFHIHEYVNNFVRAVSKFLGYRTEAGVIYAGRRKVHVGAFPIGIDFDFFYNSSLDPEVAGQIEELRQKLRGLKIIFSIDRLDYTKGVINRVHAWERFLKEHPQWRGKASFILIVVPSRIGVPQYDAMKREIEREVGRINGELGDVNWTPIVYISRFIPTPTLLALYNIADVALITPLRDGMNLVSKEYVATKRDCKGVLILSETAGASHELLEALIVNPNDESGVVEAIAKALTMEPEEQCRRIKAMQEKLRQQNVVKWAVDFLHSLMLAYRENTESFTTSSKLLDREAIEEIVKIFHGARSRLLLLDYDGTLVPHYPYAYQAVPDGELKRLLNSLAFQPNTYVAVVSGRGRDFLEAWLGDLPIYIVAEHGAFIRDPGGNWSQLFPFDTSWKISVRKIMEEFTRLTPGSYIEEKEISLAWHYRNVEPEIGEKAANRLADALTGLLESSPANIIRGVKVVEVRAAGVNKGVAAKLLYDKLRPELVIIAGDDYTDEEMMKALPEAITIKVGKGETSAKYMAPSYRRIRELLQALLTAQR

SEQ ID NO: 2048 - protein, 1482 aa, Shewanella sp. MR-7; identical to SEQ ID NO: 1138

SEQ ID NO: 2049 - protein, 304 aa, Triticum aestivum
  misc_feature (111)..(113): Xaa can be any naturally occurring amino acid
PDRADRTSAASGPGTSPATALNEPLESAEEVAASRLPALLGPGGRILIVANRLPVTAKRLEDNQWELVTSSGGLVSALQGVKDVERMFVGWPGVSVTDEDGQTSIKKELLXXXRCVPVFLSEELRDQYYSGYCNNILWPLFHYLGLPQGYKVNKTKDFKSQLKAYTEANKMFADTLCEISKEGDIIWCHDYHLMLLPKLLKQSNLNMKVGWFLHTPFPSYEVYQALPNRKELLQAVLEADLVGFHTYEYARHFVSACTSLLGLEGRLGGIKFKGRIVKVDAFPIGIDAQHFKESLDLNAVKGEI

SEQ ID NO: 2050 - protein, 464 aa, Erythrobacter sp. SD-21; identical to SEQ ID NO: 1143

SEQ ID NO: 2051 - protein, 495 aa, Saccharomyces uvarum
MTTDNAKAQLTSSSGGNIIVVSNRLPVTITKNSSTGQYEYAMSSGGLVTALEGLKKTYTFKWFGWPALQIPDDEKDQVRKDLLEKFNAVPIFLSDEIADLHYNGFSNSILWPLFHYHPGEINFDENAWLAYNEANQTFTNEIAKTMNHNDLIWVHDYHLMLVPEMLRVKIHEKQLQNVKVGWFLHTPFPSSEIYRILPVRQEILKGVLSCDLVGFHTYDYARHFLSSVQRVLNVNTLPNGVEYQGRFVNVGAFPIGIDVDKFTDGLKKESVQKRIQQLKETFKGCKIIVGVDRLDYIKGVPQKLHAMEVFLNEHPEWRGKVVLVQVAVPSRGDVEEYQYLRSVVNELVGRINGQFGTVEFVPIHFMHKSIPFEELISLYAVSDVCLLSSTRDGMNLVSYEYIACQEEKKGSLILSEFTGAAQSLNGAIIVNPWNTDDLSDAINEALTLPDVKKEVNWEKLYKYISKYTSAFWGENFVHELYSTSSSSTSSSATKN

SEQ ID NO: 2052 - protein, 947 aa, Arabidopsis thaliana
  misc_feature (61)..(61): Xaa can be any naturally occurring amino acid
  misc_feature (89)..(89): Xaa can be any naturally occurring amino acid
  misc_feature (105)..(105): Xaa can be any naturally occurring amino acid
MPGNKYNCSSSHIPLSRTERLLRDTELTEKRKSNRARNPNDVAGSSENSENDLRLEGDSSXRQYVEQYLGKGLLLAMAPRWMPVERQQXVRPYNRQRLLVVANRXLPVSAVRRGEDSWSLEISAGGLVSALLGVKEFEARWIGWAGVNVPDEVGQKALSKALAEKRCIPVFLDEEIVHQYYNGYCNNILWPLFHYLGLPQEDRLATTRSFQSQFAAYKKANQMFADVVNEHYEEGDVVWCHDYHLMFLPKCLKEYNSKMKVGWFLHTPFPSSEIHRTLPSRSELLRSVLAADLVGFHTYDYARHFVSACTRILGLEGTPEGVEDQGRLTRVAAFPIGIDSDRFIRALEVPEVIQHMKELKERFAGRKVMLGVDRLDMIKGIPQKILAFEKFLEENANWRDKVVLLQIAVPTRTDVPEYQKLTSQVHEIVGRINGRFGTLTAVPIHHLDRSLDFHALCALYAVTDVALVTSLRDGMNLVSYEFVACQEAKKGVLILSEFAGAAQSLGAGAILVNPWNITEVAASIGQALNMTAEEREKRHRHNFHHVKTHTAQEWAETFVSELNDTVIEAQLRISKVPPELPQHDAIQRYSKSNNRLLILGFNATLTEPVDNQGRRGDQIKEMDLNLHPELKGPLKALCSDPSTTIVVLSGSSRSVLDKNFGEYDMWLAAENGMFLRLTNGEWMTTMPEHLNMEWVDSVKHVFKYFTERTPRSHFETRDTSLIWNYKYADIEFGRLQARDLLQHLWTGPISNASVDVVQGSRSVEVRAVGVTKGAAIDRILGEIVHSKSMTTPIDYVLCIGHFLGKDEDVYTFFEPELPSDMPAIARSRPSSDSGAKSSSGDRRPPSKSTHNNNKSGSKSSSSSNSNNNNKSSQRSLQSERKSGSNHSLGNSRRPSPEKISWNVLDLKGENYFSCAVGRTRTNARYLLGSPDDVVCFLEKLADTTSSP

SEQ ID NO: 2053 - protein, 547 aa, Opitutaceae bacterium TAV2
MSRLFCARTLPAQHLPPPASRLPPPPANSRQLPPPPVFHFPPTLASRRLFANITHLPDMSLAPHSDPNPTMANIIPSPLYQRDQEHDACGVGFIAKLNGERSYDVVNRAISALKALAHRGAIDADAVTGDGAGLLTQIPYPLFNDYLARKGITTLKRDSDLGVGMFFISRRDAYTEINARKLIVDSIHAEGLALLGWRDVPVNASCLGRKALETQPLIVQALVARIDESITDDEFERKLFLAQNTIENKTYAQNFTGLYICSFSSRTIVYKGLLTPAQITKFYPDLKSPLYQTAFAIFHQRFSTNTFPTWELAHPFRMMAHNGEINTIRGNRNLMRARENSTAYGVWGERFHDLKPLIQPGMSDSATFDNALQAITLGGRDPRHAIMMMMPPAWEKDKTLTPEARAFFRYHACIMEPWDGPAAIVFTDGRTIGAALDRNGLRPARYKIFDDGYVILASEAGLVHDFPGKVTESGRLGPGRMVALDLPTGTFLRDADIRQRITHDADFKDWCEQHLTNLHRSAGLPPALPPALPPASAYNAPTPPPQK

SEQ ID NO: 2054 - protein, 265 aa, Arabidopsis thaliana
MSSSREENVYLAKLAEQAERYEEMVEFMEKVAKTVDTDELTVEERNLLSVAYKNVIGARRASWRIISSIEQKEESRGNDDHVSIIKDYRGKIETELSKICDGILNLLDSHLVPTASLAESKVFYLKMKGDYHRYLAEFKTGAERKEAAESTLVAYKSAQDIALADLAPTHPIRLGLALNFSVFYYEILNSPDRACSLAKQAFDEAISELDTLGEESYKDSTLIMQLLRDNLTLWNSDINDEAGGDEIKEASKHEPEEGKPAETGQ

SEQ ID NO: 2055 - protein, 504 aa, Roseovarius nubinhibens ISM; identical to SEQ ID NO: 1153

SEQ ID NO: 2056 - protein, 693 aa, Zea mays
DRALWQAYVSANKIFADKVLEVINPDDDFVWVHDYHLMVLPTFLRKRFNRIKLGFFLHSPFPSSEIYKTLPVREELLRALLNSDLIGFHTFDYARHFLSCCGRMLGLSYESKRGHICLEYYGRTVSIKILPVGVHMEQLKTVLGLPETEAKVSELMEMYSGKGRVVMLGVDDMDIFKGISLKLLAMEELLRQHPEWRGKLVLVQVANPARGRGKDVAEVQTETYAMVRRINEAYGEPGYEPVVLIDEPLQFYERVAYYVIAEVCLVTAVRDGMNLIPYEYIVSRQGNEKLDRMLRQGKPEEKKSMLVVSEFIGCSPSLSGAIRVNPWNIEAVADAMETALVLPENEKRLRHDKHFRYVSTHDVGYWANSFLLDLERTCKYHSQKRCWGIGFGLRFRVVSLDLTFRKLSLENILMAYRRAKTRAILLDYDGTLMPQAINKSPSTESVRILNSLCRDKDNVVYLCSGYDRRTLHEWFPCENLGIAAEHGYFLRCKRDAEWKTCVAATDCSWKQIAEPVMCLYRETTDGSTIEDRETVLVWNYEDADPDFGSCQAKELVDHLESVLANEPVSVKTTPHSVEVKPQGVSKGLVARRMLVSMKERGQCPDFVLCIGDDKSDEDMFQLIATAACGDSLASKAEVFACTVGRKPSKAKYYLDDAAEVVRLMQGLSYVSEELALANQRDEDEDSSLDDVWE

SEQ ID NO: 2057 - protein, 828 aa, Vitis vinifera
MAPSKRPRQAGKRVVRLTLNSEDRMIIVGNQLPLRAHRSSDGSGEWCFSWDEDSLLLQLKDGLGEDVEVLYVGCLREQIDPSEQDDVAQTLLETFKCVPAFIPPELFSKFYHGFCKQQLWPLFHYMLPLSPDLGGRFDRSLWQAYVSVNKIFADKVMEVITPDEDFVWVHDYHLMVLPTFLRKRFNRVKLGFFLHSPFPSSEIYRTLPVRDELLRALLNSDLIGFHTFDYARHFLSCCSRMLGLAYQSKRGYIGLEYYGRTVSIKILPVGIHMGQLRSVLNLPETDSRVAELRDQFRGQTVLLGVDDMDIFKGISLKLLAMEQLLTQHPDKRGKVVLVQIANPARGRGKDVQEVQSETHATVRRINETFGRPGYHPVVLIDTPLQFYERIAYYVTAECCLVTAVRDGMNLIPYEYIICRQGNEKLDETLGLNPSTPKKSMLVVSEFIGCSPSLSGAIRVNPWNIDAVAEAMESALIVPEPEKQMRHEKHYRYVSTHDVAYWAHSFLQDLERACRDHVRRRCWGIGFGLGFRVIALDPNFRKLSVEHIVSAYKRTKNRAILLDCDGTMMLQSSISTIPNTEAIGILNNLCGDPKNVVFVVSGKDKKTLTEGFSSCEKLGIAAEHGYFLRLSHDAEWETCLPVTDFDWKQIAEPVMKLYTETTDGSTIETKESALVWNYQYADPDFGSCQAKELLDHLESVLANEPVSVKSGQHIVEVKPQGVNKGLVAERLLVTMRQKGMLPDFVLCIGDDRSDEDMFEVIIRAKGLPSLSPVAEVFACTVGRKPSKAKYYLEDTTEILRMLQGLVTASEQAARNASHVASTRAIIDRE

SEQ ID NO: 2058 - protein, 1005 aa, Chlamydomonas reinhardtii
MAFHLHTYSQAHTPVTGCQQVADLQASQARRGVDDVPGVCVRVGCGARHAKEGEDEPGPLLCHDNFGGGFVDDDDRVALNTLSLAGLDSTGATDMCVDLPESGILTSTDAEEAAGAAAAAAAAGGSRGQKQQQRSGSSTSGSSTSGSGISGSSSSGSSSSGSGGARHWWRDDVTPPSPQAAAGAAYGSYGSGSDMTDPAAPPNGITRMPARPPANPPQQPQPGGGSSGSSSGSSSTPFKVYSPSTPSHGRQPPSRPAAAAAAASRTYAEFQSAPPPPPMPEAGAAALHNVRGRGVSTLGDRLCVALPAWAVRAGPRAAIWWDPAAVNAAVINCGGICPGVNDVIQGIVHRLTDYGVPEGQILGICDGFAGFDPRHPAKPRVLTRAAVEGAHLRGGSLLGTSRGWADLGVVMSKLEMWGLNMVFVVGGDGGLRAAQVDRTFGFDTAVQEVQRPLLAAKVEASSIRGGVGLVKVVGRQSGFLAMQGSIASGVVDVCLIPEVSFTMDGPHGLLAYLAGVLAAKGHAVVCVAEGAGQDLMTQQPVTPTPAAAAAAAAGGGGLGGGGGVGKDPSGNPVLRDIGVYLRTRIKMHFRDAVEGRARGRDGYTGVIMGLCNSHYVMLPIPLVTQAPRRVDPWGKAWNRLRADNGQPSFHPPPPQEQLAAAAAVAAEREAAAQAAAAAAAVAAAASDPVMVSGYGRHLNGTLADGSSIAGGGSGGGSSPAVDSGGDAASPTAAAAGSAAAADPTAKPAAAAVSDDVDEDVDAGVDAPAASEGDVHFMTRAGAEPQQGPKLSAGAGGAGGASGLGLIVGDPQAATRAAAEAAAEAADAGHLAAAALGPAAAPEPPAATELPWPSVGPTASVPLPAAAAAAAAAAAADKGGGERPGTVAAAEAEPITPAAANGPATAPPPTATANNVVPMSGAGSSSTDGRGQQQDGGAAVTGAKAAAAASGGQQQQQQQQQQQQQQQQQQQQGRRRQGGKGGGGGGGASSHHHHHSKPRPGEGDSE

SEQ ID NO: 2059 - protein, 141 aa, Methanothermobacter thermautotrophicus
MFLREHPEFHGKVKFLATGKPTRQQIKEYRDYADSVKSTVDEINSIYGKSTWKPIEYIHRADYELVAAAFKNYDCLIVNPLADGMNIVPKEAALMNEKSGTVILSENAGCYEELAEYAIGVNPFDMKGNCRCHLQVHNNEL

SEQ ID NO: 2060 - protein, 522 aa, Bacillus anthracis str. Ames; identical to SEQ ID NO: 1167

SEQ ID NO: 2061 - protein, 1510 aa, Geobacter sulfurreducens PCA; identical to SEQ ID NO: 1172

SEQ ID NO: 2062 - protein, 862 aa, Oryza sativa Japonica Group
MVSKSYSNLLEMSCGDGVDFRQPFKSLPRVVTSPGIISDPDWDTRSDGDSVGSASSVERKIIVANFLPLNCTKDEAGQWSFSRDDDALLMQLKDGFSNETDVIYVGSLKVQVDPSEQDQVAQKLLRDYRCIPTFLPPDLQQQFYHGFCKQQLWPLFHYMLPICLDKGELFDRSLFQAYVRANKLFADKVMEAINTDDDHVWVHDYHLMLLPTFLRKRLHRIKLGFFLHSPFPSSEIYRSLPVRDEILKSLLNADLIGFQTFDYARHFLSCCSRLLGLHYESKRGYIGIDYFGRTVSLKILSVGVHVGRLESILKLPATVKKVQEIEQRYKGKMLMLGVDDMDIFKGISLKLLGLELLLDRNPKLRGKVVLVQIVNPARSTGKDVEEAITESVSVAERINLKYGSVDYKPVVLIDHRIPFYEKIAFYAASDCCIVNALRDGMNLVPYEYTVCRQGNEEIDNARGSDTNCHHTSTLIVSEFVGCSPSLSGAFRVNPWSVDDVADALHHATDLTESEKRLRHEKHYRYVRSHSVAYWAHSFAQDLERACKDHYSRRCWAIGFGLNFRVIALSPGFRKLSLEHFASSYNKATRRAIFLDYDGTLVPQSSINKAPSDELITILNSLCDDPKNDVFIVSGRARSLLDEWFAPCQKLGIAAEHGYFVRWNKAAEWESSYPNHDFEWKHIAEPVMQVYTETTDGSSIEPKESALVWHYLDADHDFGSCQAKELLGHLERVLSNEPVVVKCGHYIVEVKPQGVSKGLVVDKVIHRLMNNGKTPDFVVCIGNDRSDEDMFKSIDSMTSSSAFPAVPEVFACSVGQKPSKAKYYVDDAGEVVRLLKNVAGISSHREAVSHGRVTFRDVMDYVE

SEQ ID NO: 2063 - protein, 539 aa, Pseudomonas putida KT2440; identical to SEQ ID NO: 1179

SEQ ID NO: 2064 - protein, 1486 aa, Salmonella typhimurium LT2; identical to SEQ ID NO: 248

SEQ ID NO: 2065 - protein, 154 aa, Vitis vinifera
MNFTVTIFCSFIAMQIHSRFSTNTFPSWDRAQPMHVLGHNGEINTLRGNVNWMKAREGLLKCKELGLSKNEMKKLLPIVDASSSDSGAFDGVLELLVRAGRSLPEAVMMMIPEAWQNDKNMDPDRKALYEYFSALMEPWDGPALISCKWLSIEF

SEQ ID NO: 2066 - protein, 486 aa, Burkholderia xenovorans LB400
MGRLIIVSNRVAPISEGGPAAGGLAVGVYDALKETGGMWFGWSGDVLSSGQPQIKVEERGPVTFATIALMRRDYDQYYRGFSNATLWPAFHYRADLLQYDRHDFEGYWRVNAWLAQQLVPLLREDDVIWVHDYHLIPFAQALRAAGVKNRIGFFLHIPFPASQVLLAVPPHRELVEALCSFDLLGFQTAPDLRAFCDYIVNEANGTADPSASGPLTIHAFGRTLRAAAYPIGVYPDEIAELAKAGERGKPVRTMKATLHSRKLIMSVDRLDYSKGLVERFRAFERLLEHSTAQRNKVSFLQIAPPTRADMHAYQDIRLQLEGESGRINGRFAELDWTPILYIHKQYERSVLAALFRTAHVGYVTPLRDGMNLVAKEYVSAQDPENPGVLVLSRFAGAAQELDGALIVNPVDIDGMAEALARALDMPLAERQARHRDMMVQLRENNVSVWRDNFMRDLQGVAGAKGTRNGKARAVAGKKAARETQAG

SEQ ID NO: 2067 - protein, 269 aa, Burkholderia xenovorans LB400
MRGKMRTLFRPHKAERHNQPMQALPAVLSPGETAFFFDFDGTLVELAPTPDGVLVQPRVIDLLSELRSLTNGAVAVVSGRGIDSIDSFLGIPDLPIAGLHGAERRDANGDTQRIGFHDERLLRMEQVLAQVVNENPGMLLEIKGAAVALHYRNAPDREPVAREATSRLVADYAGAYVLQPGKMVYEIKPKDVDKGRALRAFLDEPPFVGRQPVFAGDDLTDEKGFAVVNERGGLSIKVGPGETMARTRIDSVPALLDWLASIVAAARAA

SEQ ID NO: 2068 - protein, 183 aa, Capsicum annuum
MAVAPTAREENVYMAKLAEQAERYEEMVDFMEKVSNSLGSEELTVEERNLLSVAYKNVIGARRASWRIISSIEQKEESRGNEEHVNSIKEYRSKIENELSKICDGILKLLDSKLIPSATSGDSKVFYLKMKGDYHRYLAEFKTGAERKEAAESTLTAYKAAQDIASAELAPTHPIRLGLALTS

SEQ ID NO: 2069 - protein, 2119 aa, Yarrowia lipolytica CLIB122; identical to SEQ ID NO: 256

SEQ ID NO: 2070 - protein, 493 aa, Rhodopseudomonas palustris CGA009
MNLVVVSNRVARASGNEPMTGGLAAALLPVVEKSGAIWVGSSGRVRDGVHREPFAEIEPLGAGALAMLDLPAAHYGGYYEGFANSALWPALHSRPDLIRVSHDDYRSYREVNAFMARALLRFRKPDTAFWIQDYHFLALGAELRQLGVQHPIGFFLHTPWPSRATIGCVPHHRELIEAMLTYDLIGFQTEEDRRNFLGYVESELGLKIDGSEVSTTHGTARCEVFAISIDADAFAQQAQKAMTHPEVSRLRKSLNGEKLVIGVDRLDYSKGLINRVKAFDKMLTDRPALQRVVSLLQIATPSRGTIEAYGNLQGDLAKLVSDVNGRLGEVDWTPIRYLNKGYRQSVLAGLYRSAHVGLVTPLQDGMNLVAKEYVAAQNPLDPGVLVLSKFAGAANELDTALQVNPHDIEGMSRVIATALAMPLTERRLRWEAMMAKLRDNSIRRWFADFLAALDQAHTANRSVGPIPLAPPPSIMMAGGRSRLAPRAAGAVLQ

SEQ ID NO: 2071 - protein, 238 aa, Brassica napus
RPTRPEILNTLCRDKSNLVFIVSAKSRETLSDWFSPCEKLGIAAEHGYFLRLRKDVEWENCVAAADCSWKQIAEPVMELYTETTDGSTIEDKETALVWSYEDADPDFGSCQAKELLDHLESVLANEPVTVKRGQNYVEVKPQGVSKGLIARRMLSMMQEKGTPPEFVLCIGDDRSDEDMFEVICSSTEGPSIAPRAEVFACTVGQKPSKAKYYLDDTTEIVRLMHGLASVSEQTMSAV

SEQ ID NO: 2072 - protein, 256 aa, Oryza sativa
MSREENVYMAKLAEQAERYEEMVEYMEKVAKTVDVEELTVEERNLLSVAYKNVIGARRASWRIVSSIEQKEEGRGNEEHVTLIKEYRGKIEAELSKICDGILKLLDSHLVPSSTAAESKVFYLKMKGDYHRYLAEFKTGAERKEAAESTMVAYKAAQDIALADLAPTHPIRLGLALNFSVFYYEILNSPDKACNLAKQAFDEAISELDTLGEESYKDSTLIMQLLRDNLTLWTSDLTEDGGDEVKEASKGDACEGQ

SEQ ID NO: 2073 - protein, 211 aa, Triticum aestivum
YYCNCESILCCSDVALITSLRDGMNLVSYEYVACQESNKGVLILSEFAWAAQSLGAGAIVVNPWNTAEVAGAIKHALDMLPDERERRHKHNYKIVSAHTAQEWAKNYVWQLNDAAIKAPLGTGESLLGLPIEEAAEQYAQSKSRLLILGFNATLTEQVQSSERRATDQTGNTTLKLNSGLKGALKTLCDNEHTTVIVVSGYGKDVLHEVTY

SEQ ID NO: 2074 - protein, 238 aa, Oryza sativa Japonica Group
MIVDEDKSHANFARGMLSSLNFHVIVYSSPVNALVFLENNAQDVAVVLAAVDMKQLSGFQFLEAARVKRQDLQVIMMSAETTMSTMMRCVKLGARFLVKKPLNEETVGNLWQHVDLKVLKMEKIRELLQDPGQETGITISYEEHSLEKLKQMKIMKRRKFGIDKSRSGSSSSGEEWHMPFGIRQGSGCTETRRLASHVRYGVSGSTINPLRNEDHSLLGREPQTSNQRLSTKNDYRVE

SEQ ID NO: 2075 - protein, 376 aa, Oryza sativa Japonica Group
MVIDEDKCHADSTSYMLSAELNFSVTVFTSPIKALDFLQNHAEGVDLVLADVHMEEMNGFDFLKVARELHKSIQVIMMSTETTMYTMKRCVKLGAQFLVNKPLDAGTIKNLWQYVDLKVLRMEKIKDLLQGIGDESTCANETNSLAENPKNDTKKKYYLMWTPHLQKKFLHALQILGKDASPKNIKKIMGVDNIDCRQIAAHLQKHRLRLTKDLKKASFTTDTSKDESNSRIGPAESHHVCRNASTLQPRSNTQPTETTMQILSEDAEYDDVYAAMRRALQYGIVFDESKHSSDPSGDEDEQVVVGGDQDGCANEANDIDSSGDHHQVAAVVTKPCNANASQEIINKMTNSDGMQATKGSKAAVFRLVDYSESDSD

SEQ ID NO: 2076 - protein, 154 aa, Fucus serratus
ILKIIENELIPNSTSEEGKVFYYKMKGDYHRYLAEFQSADERKTSASDALDAYQSASELANQDLPPTHPIRLGLALNFSVFYYEILNSPERACNLAKAAFDDAIAELDTLSEESYKDSTLIMQLLRDNLTLWTSDQGEAEEAPGNADGTVVEDL

SEQ ID NO: 2077 - protein, 2110 aa, Candida albicans SC5314; identical to SEQ ID NO: 266

SEQ ID NO: 2078 - protein, 591 aa, Physcomitrella patens subsp. patens
MNAVGGAPDSEYPQDGTVDLRGNPVLKANTGGWKACPYILGNECCERLAYYGIATNLVTYLSHELHQNPSTAANNVTNWSGTCYITTLIGAFLADAYLGRFWTIVVFSIIYFLGMVLLTLSAALPSLKPPSGEGVVASSTQLAVFYLALYLIALGTGGIKPCVSSFGADQFDENDVKEKKRKSSFFNWFYFTINIGALIASSALVYIQENVGWGWGFGIPAVAMGIAIVSFLIGSPLYRHQKPGGSPITRIAQVLVAATRKLSMKVQPNGKHLYEADDKESGIEGSRKLEHTEEFRFLDKAAIPRGDEELQGTRPSGWRLTSVTQVEEVKIVMRLLPIWASGIVFATVYSQMSTMFVQQGALMNVSMGKANIPSASLSIFDTISVIVCVVIYDRFLVPVVRKRTGHVRGFTQLQRMGIGLFISVLAMVVAAIVEIERLKLARRDGVAGNPQDEALPVESLTIFVQIPQYFLIGAAEVFTFVGQLEFFYDQAPDAMRSLMSALSLTTVALGNYLSSVLVTIVTEVTTKGGKPGWIPNNLNRGHLDYFFWMLAILSILNIIFYLVVAKFYTYKRVHNAADVGEDGKPSKSGYE

SEQ ID NO: 2079 - protein, 193 aa, Zea mays
  misc_feature (152)..(152): Xaa can be any naturally occurring amino acid
MPDEPTRLVRPEASEGRLLLVSNRLPITIKRSDEGKYDMSMSSGGLVSGLSGLAKTTTFQWYGWPGLEVPEDEAKGLNDQLKEKYNAVPVMLDDELADRHYNGFSNEIMWPLFHYHPGEITFDESAWDAYTEANRLFAKAVAKDVQDNDMVXVHDYHLMLMPSMLREELGDTKKNGQIGFFLHTPFPQLEIYR

SEQ ID NO: 2080 - protein, 554 aa, Arabidopsis thaliana
ENANWRDKVVLLQIAVPTRTDVPEYQKLTSQVHEIVGRINGRFGTLTAVPIHHLDRSLDFHALCALYAVTDVALVTSLRDGMNLVSYEFVACQEAKKGVLILSEFAGAAQSLGAGAILVNPWNITEVAASIGQALNMTAEEREKRHRHNFHHVKTHTAQEWAETFVSELNDTVIEAQLRISKVPPELPQHDAIQRYSKSNNRLLILGFNATLTEPVDNQGRRGDQIKEMDLNLHPELKGPLKALCSDPSTTIVVLSGSSRSVLDKNFGEYDMWLAAENGMFLRLTNGEWMTTMPEHLNMEWVDSVKHVFKYFTERTPRSHFETRDTSLIWNYKYADIEFGRLQARDLLQHLWTGPISNASVDVVQGSRSVEVRAVGVTKGAAIDRILGEIVHSKSMTTPIDYVLCIGHFLGKDEDVYTFFEPELPSDMPAIARSRPSSDSGAKSSSGDRRPPSKSTHNNNKSGSKSSSSSNSNNNNKSSQRSLQSERKSGSNHSLGNSRRPSPEKISWNVLDLKGENYFSCAVGRTRTNARYLLGSPDDVVCFLEKLADTTSSP

SEQ ID NO: 2081 - protein, 1518 aa, Clostridium saccharobutylicum; identical to SEQ ID NO: 278
  misc_feature (40)..(40): Xaa can be any naturally occurring amino acid
  misc_feature (252)..(252): Xaa can be any naturally occurring amino acid
  misc_feature (371)..(371): Xaa can be any naturally occurring amino acid
  misc_feature (417)..(417): Xaa can be any naturally occurring amino acid
  misc_feature (466)..(466): Xaa can be any naturally occurring amino acid
  misc_feature (473)..(473): Xaa can be any naturally occurring amino acid
  misc_feature (475)..(475): Xaa can be any naturally occurring amino acid
  misc_feature (479)..(479): Xaa can be any naturally occurring amino acid
  misc_feature (485)..(485): Xaa can be any naturally occurring amino acid
  misc_feature (544)..(544): Xaa can be any naturally occurring amino acid

SEQ ID NO: 2082 - protein, 135 aa, Cucumis sativus
GPGMMIAADLQTGQVYENTEVKKRVALSYPYGKWIKENMRSLKAENFLASTVFETDKLLRSQQAFGYSSEDVQMVIESMAAQGKEPTFCMGDDIPLAILSQKPHMLYDYFKQRFAQVTNPAIDPLREGLVMSLEV

SEQ ID NO: 2083 - protein, 273 aa, Saccharomyces cerevisiae
MSQTREDSVYLAKLAEQAERYEEMVENMKAVASSGQELSVEERNLLSVAYKNVIGARRASWRIVSSIEQKEESKEKSEHQVELIRSYRSKIETELTKISDDILSVLDSHLIPSATTGECKVFYYKMKGDYHRYLAEFSSGDAREKATNSSLEAYKTASEIATTELPPTHPIRLFLALNFSVFYYEIQNSPDKACHLAKQAFDDAIAELDTLSEESYKDSTLIMQLLRDNLTLWTSDISESGQEDQQQQQQQQQQQQQQQQQAPAEQTQGEPTK

SEQ ID NO: 2084 - protein, 555 aa, Pseudomonas putida KT2440; identical to SEQ ID NO: 280

SEQ ID NO: 2085 - protein, 1521 aa, Prochlorococcus marinus subsp. pastoris str. CCMP1986; identical to SEQ ID NO: 279

SEQ ID NO: 2086 - protein, 614 aa, Physcomitrella patens subsp. patens
MLAICGSVNQEEGPETVLVGDGSVDYNGRPANRLETGGWPSAPYNFLMEFAETMAFIGLQIDLVLYLINKMNFAHTKAATTVTNFAGTAFLCPLFGGFLADAYLGRVSVVVIFGCVELVGMSLMVISASLPSLRPLPCGTSPCKASSSADLAVLYLGMYLIALGSGGLKPCLSSLGADQFDETHEKERRLSAVYFNWYFFSFVVGGLLGVTVLVYIQDNIGYDVGYGICLALVAVSLVVFVAGFHRYRRKPPSQSPLTRILQVIVAAFRKLRSPHPPPEYLYEIDDKEATQLGFQKIDHTSSCRFLDRAAIVNASEKDHERNKSKWELCTVTQVEETKAMAKLMPIWTGTIIMNVVLAQLQTFTIEQGSTMDRKIGSFNFPAASIPFFPLIIMANLVPLYDRIFVPVARRFTGLDRGITFLQRIGIGLVLSVVSMIIAAVVEVKRTDKAKAYGLLEDSRATIPMSIFWLVPQYFTFGIADMFTFIGVLEFFYDQAPDSMRSTSTGFSFCTISLGYFISSAVVSIVNMATKTDSHPGWLSDDVPFNRKKLNLFYWLMAVLSFVNFAYFLVVAHFYRYKKYPSPKFMNPDAQLQKSATPPVDSACGVGTKDQSRQP

SEQ ID NO: 2087 - protein, 2135 aa, Cryptococcus neoformans var. neoformans JEC21; identical to SEQ ID NO: 284

SEQ ID NO: 2088 - protein, 528 aa, Silicibacter pomeroyi DSS-3; identical to SEQ ID NO: 288

SEQ ID NO: 2089 - protein, 309 aa, Zea mays
MDMARYESCYRHWIAGQEAGLAELEAASANAAAGRATDAELRTVVERCMLGYQDYATRRRALSREDGVAFFAPPWCTAFENSVLWLGGCRPSLTVRLLYNLSGEGLEAQVEELLGGLSNGVIPTGALGITSAQLVLINDLHSRTVHQENVLSDRLATLQEDIADRPLLPIVRQRELAAAARLGAAAAASGSCDGAARRRLRAARLGAADAEVDAALDSYKAALSRLLVEADELRMATARALATEILTPRQAVEMLAAGKHLHLSVRDWSRRREAAAGAQQQLGGQSPRNGQHRPPEHMKGLPFLALACS

SEQ ID NO: 2090 - protein, 407 aa, Arabidopsis thaliana
MAAAMGADEYGFGSLAMIATGCVMARICHTNNCPVGVASQREELRARFPGVPGDLVNYFLYVAEEVRGILAQLGYNSLDDIIGRTELLRPRDISLVKTQHLDLSYLLSSVGTPSLSSTEIRKQEVHTNGPVLDDDILADPLVIDAIENEKVVEKTVKICNVDRAACGRVAGVIAKKYGDTGFAGQVNLTFLGSAGQSFGCFLIPGMNIRLIGESNDYVGKGMAGGEIVVTPVEKIGFVPEEATIVGNTCLYGATGGQIFARGKAGERFAVRNSLAEAVVEGTGDHCCEYMTGGCVVVLGKVGRNVAAGMTGGLAYLLDEDDTLLPKINREIVKIQRVTAPAGELQLKSLIEAHVEKTGSSKGATILNEWEKYLPLFWQLVPPSEEDTPEASAAYVRTSTGEVTFQSA

SEQ ID NO: 2091 - protein, 1481 aa, Pseudomonas syringae pv. syringae B728a; identical to SEQ ID NO: 293

SEQ ID NO: 2092 - protein, 1485 aa, Photorhabdus luminescens subsp. laumondii TTO1; identical to SEQ ID NO: 292

SEQ ID NO: 2093 - protein, 265 aa, Arabidopsis thaliana; identical to SEQ ID NO: 2054

SEQ ID NO: 2094 - protein, 536 aa, Pseudomonas aeruginosa PAO1; identical to SEQ ID NO: 295

SEQ ID NO: 2095 - protein, 270 aa, Zea mays
MLLNPASEASVLDTIRQHLLEEPADESFGSLVADQWSGSLPFRTDDADDMVVFGALQDAFAYGWLPDGSFVHVKPEPVRSPDSSSYPCSYDGSPCFGLLDPEPPLTPGTTTPSSRGQEEAAAAMARGKHYRGVRQRPWGKFAAEIRDPARNGARVWLGTYDTAEDAALAYDRAAYRMRGSRALLNFPLRIGSGDKRPSPAPPEPATSSDSSSSSASGSHKRRKRGEAAAANMAMALVPPPSQLNRPAQPWFPAAPVEQAAMAPRVEQIVV

SEQ ID NO: 2096 - protein, 170 aa, Musa acuminata AAA Group
YRHKVEVELSGVCSDIMTLIDEHLIPSSSAGESSVFYYKMKGDYYRYLAEFTTGNERKEAADNSLKAYQAATSTAEADLSPTHPIRLGLALNFSVFYYEIMNSPERACHLAKQAFDEAISELDTLSEESYKDSTLIMQLLRDNLTLWTADIPEDGEEYAKSGAGEDAQRV

SEQ ID NO: 2097 - protein, 856 aa, Arabidopsis thaliana
MVSRSCANFLDLSSWDLLDFPQTPRTLPRVMTVPGIITDVDGDTTSEVTSTSGGSRERKIIVANMLPLQSKRDAETGKWCFNWDEDSLQLQLRDGFSSETEFLYVGSLNVDIETNEQEEVSQKLLEEFNCVATFLSQELQEMFYLGFCKHQLWPLFHYMLPMFPDHGDRFDRRLWQAYVSANKIFSDRVMEVINPEDDYVWIQDYHLMVLPTFLRKRFNRIKLGFFLHSPFPSSEIYRTLPVRDEILRGLLNCDLIGFHTFDYARHFLSCCSRMLGLDYESKRGHIGLDYFGRTVYIKILPVGVHMGRLESVLSLDSTAAKTKEIQEQFKGKKLVLGIDDMDIFKGISLKLIAMEHLFETYWHLKGKVVLVQIVNPARSSGKDVEEAKRETYETARRINERYGTSDYKPIVLIDRLVPRSEKTAYYAAADCCLVNAVRDGMNLVPYKYIVCRQGTRSNKAVVDSSPRTSTLVVSEFIGCSPSLSGAIRVNPWDVDAVAEAVNSALKMSETEKQLRHEKHYHYISTHDVGYWAKSFMQDLERACRDHYSKRCWGIGFGLGFRVLSLSPSFRKLSVEHIVPVYRKTQRRAIFLDYDGTLVPESSIVQDPSNEVVSVLKALCEDPNNTVFIVSGRGRESLSNWLSPCENLGIAAEHGYFIRWKSKDEWETCYSPTDTEWRSMVEPVMRSYMEATDGTSIEFKESALVWHHQDADPDFGSCQAKEMLDHLESVLANEPVVVKRGQHIVEVKPQGVSKGLAAEKVIREMVERGEPPEMVMCIGDDRSDEDMFESILSTVTNPELLVQPEVFACTVGRKPSKAKYFLDDEADVLKLLRGLGDSSSSLKPSSSHTQVAFESIV

SEQ ID NO: 2098 - protein, 1533 aa, Synechococcus sp. CC9605; identical to SEQ ID NO: 305

SEQ ID NO: 2099 - protein, 121 aa, Glycine max
TSFSGIYSEWKLIADPIMHVYMETTDGSFIEPKESALVWHYQNTDHDFGSCQAKELVSHLERVLSNEPVVVRRGHQIVEVKPQGVSKGISVDKIIRTLVSKREVPDLLMCIGNDRSDEDMF

SEQ ID NO: 2100 - protein, 673 aa, Zea mays
MAAERFCVRNSGAQAVVEGIGDHGCEYMTGGTVVILGKTGRNFAAGMSGGIAYIYDVDGMFSTRCNHELVDLYSVDEEDDITTLRVMIEQHRLNTESVLAKYILSNFEDILPKFVKVFPRDYRRVLENMKAEKVAKEAEQKRRKKGWDKKAGEMIKAPNGVSVITKEVQNKKSSSRPTQVLNAEKPRGFVKYEREGISYRHENERIKDWDEVINELVCGPLINTQSARCMGCGTPFCHQYFKAVIYADIKRTSNIVLENFGAGCPLGNKIPEFNELVYQNRWREALYRLLETNNFPEFTGRVCPAPCEGSCVLGIIENPVSIKSIECAIIDKGFKEGWMVPCPPLHRTGMTVAIIGSGPAGLAAADQLNKMGHYVVVFERDDRIGGLMMYGVPNMKADKATIVQRRVDLMDKEGVKFIVNAHVGTDPRYSIERLQAENDAVILACGATRPRDLSIPGRELSGIHYAMDFLHANTKSLLDSNLEDGTDCIGTAIRHDCSNLVNLELLPEPSKERAPDNPWPQWPRIFRIDYGHQEAASKFGKDPRTYQILTKRFIGDENGKVRALEVVRVEWSKVDGRFQSKEIEGSQEIIEADLVLLAMGFLGPETDIAKKLGLEQDSRSNFKAEFGNFATNVEEGREAAAAVDKYLTREKTNADEDVAGPSSSGCLVQPVAA

SEQ ID NO: 2101 - protein, 1496 aa, Campylobacter jejuni subsp. jejuni NCTC 11168; identical to SEQ ID NO: 307

SEQ ID NO: 2102 - protein, 1524 aa, Prochlorococcus marinus str. AS9601; identical to SEQ ID NO: 309

SEQ ID NO: 2103 - protein, 262 aa, Oryza sativa Japonica Group
MSAQAELSREENVYMAKLAEQAERYEEMVEFMEKVAKTVDSEELTVEERNLLSVAYKNVIGARRASWRIISSIEQKEESRGNEDRVTLIKDYRGKIETELTKICDGILKLLESHLVPSSTAPESKVFYLKMKGDYYRYLAEFKTGAERKDAAENTMVAYKAAQDIALAELPPTHPIRLGLALNFSVFYYEILNSPDRACNLAKQAFDEAISELDTLSEESYKDSTLIMQLLRDNLTLWTSDISEDTAEEIREAPKRDSSEGQ

SEQ ID NO: 2104 - protein, 1486 aa, Colwellia psychrerythraea 34H; identical to SEQ ID NO: 314

SEQ ID NO: 2105 - protein, 853 aa, Zea mays
PSEFCSSSSGSSRCACVLGEKEEDPVCRMDAMAPEEYASQSKLLQEFTNVPSIDSAFILKTNDEDRSRAMFSISQPDLLANTNRKYVLYSHITTRAGTGTGTTSPDFQWSPFPTETTGVSATVPSPSGSKLLVVRNGERGCPTKLEIVCQSHVEKEIHVAGSVHGPLYTDEWFHGVSWNQEETLVAYVAEAPAPPRPAFNRSGYTREEGCSDSEGDCSAWKGQGVWEEDWGETYSKKGRPSLFVLDISRGEVVAVKGVPTSLSVGQVVWAPESPGGRHKYLVFVGWSERNGFFQNTARKLGIKYCSNRPCALYAAPCPIQGPEPPGNPPATTSSDGKSGSGGAVARNLTPGFSSALFPRFSRDGRLLVFLSSKQAVDSDAHNATDSLHVINWPSDWKMDEQLDVTQVVPVVMCPEDDDGGCFPGLYCSSVLPDPWLSDGRTVILTSSWRSAEVILSVDVLSGKVARITPEDSCYSWRALALDGTNVLAVSSSPIDPPSISYGRRLAVTPAEGEARRWTWDEVTSPFMASNSKVKSLLLHHSVSILKIPVPSPSADLSDGGKLPLEAIFVSCSCKGSSRSPTVVVLHGGPHSVSVSSYSKSSAFLASLGFNLLVVNYRGTPGYGEEALQSLPGKVGSQDVEDCLAALDFAVEEELVDASRVAVVGISHGGFLTTHLIGQAPDRFAVAAARNPVCNLSLMAGTTDIPDWCYVVACGTQAKRYASEAPSPGHLGFFYQRWPIAHVSKVCCFFPACLLLSYQLVDLIVVLVVRTVDGALLSESVQVKAPLLMLLGGADLRVPASNGLQYARSLIERGGDVKIMMFPEDIHEINLPRSDFESFLNIGVWFKKHLNAVA

SEQ ID NO: 2106 - protein, 377 aa, Zea mays
  misc_feature (324)..(324): Xaa can be any naturally occurring amino acid
MEDVADALYSVTDLTRYEKNLRHEKHYRYVRSHDVAYWARSFDQDLDKACIEQYSQRCWTTGFGLNFRVIALSPGFRRLSLEHLASSYKKANRRMIFLDYDGTLVPQTSHDKSPSAELISTLNSLCSDMKNTVFIVSGRGRDSLSEWFASCENLGIAAEHGYFIRWNKAAEWETSFSGIYSEWKLIADPIMHVYMETTDGSFIEPKESALVWHYQNTDHDFGSCQAKELVSHLERVLSNEPVVVRRGHQIVEVKPQIFAEASNVRDQGVSKGISVDKIIRTLVSKGEVPDLLMCIGNDRSDEDMFESINRATSISELPAAPEVXACSVGPRASKAYYYVDGCDEVIRLLKGVTAVSLQKDTAGHSHAALEDTLEVVS

SEQ ID NO: 2107 - protein, 201 aa, Cicer arietinum
AILITLAVNDRIIMPLWKKMKGKPGFTNLQRIAIGLLLSTFGMAAASLCEVKRLSVAKSVKGNQATIPISVFLLIPQFFLVGSGEAFIYTGQLDFFITQSPKGMKTMSTGLFLTTLSLGFFISSFLVSVVKKVTGTRDGQGWLADNINKGRLDLFFALLTILSFINFVAFLVCAFWYKPKKAKPSMQMGAINNGSSVEEKC

SEQ ID NO: 2108 - protein, 503 aa, Mycobacterium smegmatis str. MC2 155
MSPESGHETISGTSDFVVVANRLPVDLERLPDGTTRWKRSPGGLVTALEPLLRKRRGSWIGWAGVADSDEEPIVQDGLQLHPVRLSADDVAKYYEGFSNATLWPLYHDLIVKPEYHREWWDRYVEVNRRFAEATARAAAEGATVWIQDYQLQLVPKMLRMLRPDVTIGFFLHIPFPPVELFMQMPWRTEIVEGLLGADLVGFHLPGGAQNFLVLSRRLVGANTSRASIGVRSRFGEVQVGFRTVKVGAFPISIDSAELDGKARNRAIRQRARQIRAELGNPRKIMLGVDRLDYTKGIDVRLRALSELLEEKRIKRDDTVLVQLATPSRERVESYIAMREDIERQVGHINGEYGEVGHPIVHYLHRPIPRDELIAFFVAADVMLVTPLRDGMNLVAKEYVACRSDLGGALVLSEFTGAAAELRQAYLVNPHDLEGVKDKIEAAVNQNPEEGKRRMRALRRQVLAHDVDRWARSFLDALAATGETGDSGVTGESTPAPESDSGSF

SEQ ID NO: 2109 - protein, 1517 aa, Shigella flexneri 2a str. 2457T; identical to SEQ ID NO: 318

SEQ ID NO: 2110 - protein, 489 aa, Mycobacterium sp. MCS
MASEGDPGVGSGDSDFVVVANRLPIDMERLPDGSTSFKRSPGGLVTALEPLLRKRHGAWIGWAGIPDSAEDPIEDDGLQLYPVSLSADDVADYYEGFSNATLWPLYHDLIVKPIYHRKWWDRYVEVNRRFAEATARAAAEGATVWVQDYQLQLVPKMLRMLRPDLTIGFFLHIPFPPVELFMQMPWRTEIIEGLLGADLVGFHLPGGAQNFLYLARRLTGANTSRATVGVRSRFGEVQVGFRTVKVGAFPISIDSDELDGKARNRAVRQRAREIRNELGNPRKILLGVDRLDYTKGINVRLEALSELLEDGRVDSHDTVFVQLATPSRERVQSYIEMREDIERQVGHINGEFGDVGHPIVHYLHRPIPRDELIAFFVAADVMLVTPLRDGMNLVAKEYVACRSDLGGALVLSEFTGAAAELRQAYLANPHHLEGVKDAIEAALNQDPEEGRRRMRALRRQVLAHDVDRWARAFLDALADTRAGAKPVRD

SEQ ID NO: 2111 - protein, 472 aa, Acidovorax sp. JS42
MSRLVVISNRLADPRKSAAGGLAVALGDALARTGGLWFGWSGTVTADGTPGEGALQTHQAGNVTLATVDLCQADHAAYYQGYANSVLWPVLHYRLDLADFSANYSEGYRRVNQMFARKLLPLLREDDVIWVHDYHLIPLAAELRALGCRQRIGFFLHVPVPPPLILAALPQHEWLMRSFFAYDLVGLQSEADVVHFTRYMVNEAHAQELDGQRLRAFNATVRVAAFPIGIDVQEFQRLGRAPDAVHTCEALRAEYSRRQLLLGIDRLDYSKGIPHRVRAFRQLLERYPENEHSATLVMIASPSRDDVHAYADLRQELEGLCGAINGDYGDLDWMPLRYIHRTVARKRVPGLCRAARVGLVTPLRDGMNLVAKEYVVAQEPEDPGVLVLSRFAGAAEQLKEALLVNPYDTQGMADAIQTALRMPLSERQWRHERLMERIQRQDVHWWRNSFLQALRDEAAPPVTAPAGAVAAT

SEQ ID NO: 2112 - protein, 290 aa, Brassica napus
HASADAWAVSIKILPVGIHMGQIEEIKVAEETAEKVKGLRERFKEKIVMLGVDDLDMFKGISLKFWAMGQLLEQNKELRGKVVLVQITNPARSSGKDVQDVETQIHLIADEVNNKFGRPGSGYKPIVFVNGPVSTLDKVAYYAISECVVVNAVRDGMNLVPYKYTVTRQGSPVLDEALGLGAGDVRKSVIIVSEFIGCSPSLSGAIRVNPWNIDAVTDAMSSAVTMSDKEKNLRHQKHHKYISSHDVAYWSRSYDQDLQRACKDHYNKRFWGVGLGLVFRVVALDPNFRK

SEQ ID NO: 2113 - protein, 698 aa, Oryza sativa Japonica Group
MEGVVTSSVGEPNQDNEPRDSSIELPRVITDMETSAMHDPEAQKLIGHEADTELTPYEGMEFESEDAARDFYSKYARHAGFRIRISRYTRSRRDNSIISRRIVCSKEGFHETRDCENLHVDQKQQARVGTRVGCKAMLMIKKFGPDKWVVTKFIKIHNHGPVPPRKPHAGEHHDCDLMENPHSIEVDPIDEPVEGMEFESEEAAKLFYINYARVNGFRARISRYCRSRRDNSIISRQIVCSKEGFREVRARKDITDGGKTTKRPRMITRVGCKAMIVVKRMNSGKWMVSKFEKEHNHSLLSSRAVPITSNDSSREVIDFAATSNDPNEVKAEGCSTGIQCNSTDSLTVLYNHLCQEAIKFAKEGSVTEEIYHVAMNALKEAAEKVSEVKRSHPTMSQSKHEVMQMETMSASQCSNDDKQKTMTPQLKFLQEPSPSLVLIPTNLLTHSSSNCADNIPLSCDLTINAGEVKHVSESSCLAANRKEDSSQKSQGKDERFHVLSKETTVAIPAIPLTLYMPIMKNPTGDSADGQYRLLAAPIEAVPISYRPAEPIQQPHGSFPNSGPLPGFLPKLYKRGKGPNSLVHATALACGARVVPPEEAASLIKAIESKIRSGGATIAKLPSSSLTPLIPEVASMSSSSEDDEENDHSEPLMASVEHNCHDQSSEEMKLEADPPSELETEAENCSAQPENENNGPTHC

SEQ ID NO: 2114 - protein, 167 aa, Brassica juncea
RLVPRNEKTAYYAMADCCLVNAVRDGMNLVPYKYIICRQGTPGIDKAMGTSRDSPRTSMLVVSEFIGCSPSLSGAIRVNPWDVDAVAEAVNLALKMSEAEKRLRHEKHYHYVSTHDVGYWAKSFLQDLERASQDHYNKRCWGIGFGLSFRVLSLSPSFRKLSIDHIV

SEQ ID NO: 2115 - protein, 367 aa, Oryza sativa
MTNQDVVVSEMGIAAGAALPGGPAGPAGGLFACRSAAASMRQTYLDLAAAAVAARSASCTSWADAMRASSPTRSSRSASDVDEFTAWVRKHPSALSKFEEIAAKSRGKKIVMFMDYDGTLSPIVADPDTAYMSDAMRAAVREVAKTFPTAIVSGRCRDKVRNFVGLSDLYYAGSHGMDIKGPSSNPESALCQPASEFLPMIDEVYKTLVEKTKSTPGAKVENNKFCLSVHFRCVDEKRWNALGEQVKAVIKEYPKLKLTQGRKVLEIRPSIKWDKGKALEFLLESLGFANCGDVLPVYIGDDRTDEDAFKVLRKRGQGLGILVSKCPKDTNASYSLQDPTEVMEFLLRLVEWKRKSSSSSLMIRPRV

SEQ ID NO: 2116 - protein, 106 aa, Glycine max
GAYPGEGGELPGHTVIGDIAVTRNSTAGVGLINSPPNHDMYSIVDLAQLSHDLKNANPAADISGKSISKAGAGIIASAVVKGHATHVLISGHDGGTGVSRWTGIKN

SEQ ID NO: 2117 - protein, 624 aa, Physcomitrella patens subsp. patens
MATEDRLTLPWSNGEKLKDAVSSMEREQLDDSQQVSPESTSSRKFGGWKTSPYILGNHALTTIAYYGVATNLVLYLTQILHEGNSSAAANYSNWLGTSYLTSLIGAFLGDAYWGRYRTAIIFSAINLSGMVILTLSVTLPYLRPPPCPAAMAAIHECPEPSVQQIGVFYFAIYSIALGAGGFQPCLSALGADQFDELDPKESKQQKVFFSVYYLCLCAAALVSGSVIVYIEANVGWDWGFGISLGALVVGNFVLVLGSRLYRQHPPAGNPLARIAQVVVASIRKWQVVAPKDDTLLYEVEDSDTSAIQGTRKIKRSHEFMFLDKAATASEAEKQAAPGSFSPWRLVTVTQVEEVKFILRILPIWFCSIIFSAIYTQMLTLFIVQGATMDTRIGRFNVPPASISLFDFISVLSWAPIYEWVLVPMARSYSGNERGFTGLQRMGIGLAVMTVAMVAAATIEIARLKTARIHGLLDAVDVPVPMSIFWQVPQYSLVGASEVFTYIGQLEFFYEQSPDGIRGLGSALALTTFGLGNFLSSILVTGVTKITSTGGSPGWIPAKNLNRGHLDYFYWFLAGLSTLNLALYIKCAQWYRITSAQLTIPSGTCMSPTGCAEHKSFHDQETANL

SEQ ID NO: 2118 - protein, 859 aa, Triticum aestivum
MKQRLLVVANRLPVSANRRGEDQWSLEISAGGLVSALLGVKDVDAKWIGWAGVNVPDEVGQQALTNALAEKRCIPVFLDEEIVHQYYNGYCNNILWPLFHYLGLPQEDRLATTRNFESQFDAYKRANQMFADVVYQHYQEGDVIWCHDYHLMFLPRCLKEHDINMKVGWFLHTPFPSSEIYRTLPSRSELLRSVLCADLVGFHTYDYARHFVSACTRILGLEGTPEGVEDQGKLTRVAAFPIGIDSDRFKRALDIDAAKRHVNELKQRFAGRKVMLGVDRLDMIKGIPQKILAFEKFLEENPEWIDKVVLLQIAVPTRTDVPEYQKLTSQVHEIVGRINGRFGTLSAVPIHHLDRSLDFHALCALYAVTDVALVTSLRDGMNLVSYEYVACQGSKKGVLILSEFAGAAQSLGAGAILVNPWNITEVADSIKHALTMTSDEREKRHRHNYAHVTTHTAQDWAETFVCELNDTVAEALMRTRQVPPDLPSRTAIQQYLQSKNRLLILGFNSTLTEPVESSGRRGGDQVKEMELKLHPDLKGPLRALCEDESTTVIVLSGSDRSVLDENFGEFNLWLAAEHGMFLRPTDGEWMTTMPEHLNMDWVDSAKHVFEYFTERTPRSHFEHRETSFVWNYKYADVEFGRLQARDMLQHLWTGPISNAAVDVVQGSRSVEVRSVGVTKGAAIDRILGEIVHSKSMVTPIDYVLCIGHFLGKDEDIYVFFDPEYPSEPKVKPDGASVSVDRRQNGRPSNGRSNSRNSQARTQKPQVAPPPPERSSSSSDHSTANNNSHHDWREGSSVLDLNGDNYFSCAVGRKRSNARYLLNSSEDVVSFLKEMAESTTPRAGGLPPGAAADYMFLDRQ

SEQ ID NO: 2119 - protein, 441 aa, Thermoplasma acidophilum DSM 1728
MKYIVVSSRCPFSHDKAAGKEIIKENVGGVATALRRAMEKYGGTWICWGDGKLDGKYLDEDVGKYRIRRVMLSVPEKHGYYDLYSNRTLWPLFHYFRERVKYTDNGYEIYRRVNEKFTNMIVQSLSPEDVIWIHDYQLSLVPKMLRDRGITNRIIFTWHIPWVSKEMFETLPESRDIIDSLSRSDFITFHTETYRKNFTDLLDENSRAKSLVIPLGIDYRYFSKTRGTDIKSYALMDRKLIFSIDRLDYTKGLVNRVLSIEELLRRHPDLVGKFVYVMIVTPSRTTVSDYVAMKRELEMHIGRINGEFGSISWMPILYMYRKISDKMLVSYYKNADIALITPLIDGLNLVSKEFVASSDKGILILSRFAGASNCLDGAVVVNPNSLGEVAEAIYSAMNMGEDEIRERLRKMKEEVSRRDTDWWIRRINAIAKRKINDRTVT

SEQ ID NO: 2120 - protein, 534 aa, Blastopirellula marina DSM 3645; identical to SEQ ID NO: 348

SEQ ID NO: 2121 - protein, 1544 aa, Dechloromonas aromatica RCB; identical to SEQ ID NO: 349

SEQ ID NO: 2122 - protein, 857 aa, Vitis vinifera
MASRSCANFLDLASGSLLDIPHTPRPLPRVMTVPGIISDLDGYGSNDGDSDVCHERKIIVANMLPLHAQRDKVTAKWCFSLDEDALLLHLKDGFSPETEVIYVGSLKVEIDASEQEEVAQKLLEDFNCVPTFLPHDLHKKFYHGFCKQQLWPLFHYMLPMCPDHGDRFDRVLWQAYVSANKIFADKVREVINPDDDYVWVQDYHLMVLPTFLRKRFHRVKLGFFLHSPFPSSEIYRTLPVRDEILRGLLNCDLIGFQTFDYARHFLSCCSRMLGLDYESKRGHIGLDYSGRTVYIKILPVGVHMGRLESVLNLHSTSAKIKEIQKQFEGKKLILGVDDMDIFKGISLKFLAVEQLLQQHPELQGKLVLVQIVNPARSTGKDVQEAKRETYLTAERINETYGSPNYEPVILIDRPVARYEKSAYYAVAECCIVNAVRDGMNLVPYKYIVCRQGTPHMDKETGMNLVSPPTSMLVVSEFIGCSPSLSGAIRVNPWDTDAVAEALNLAITMPNSEKQLRHEKHYRYVSSHDVAYWARSFMHDLDRACKDHYSKRCWGIGLGLGFRVVSLSPSFRKLSIDHIVSTYKRTTRRAIFLDYDGTVVPQSSIIKSPSPEVISVLSTLCSDPKNTVFIVSGRGRSSLSEWLAPCERLGIAAEHGYFMRWNESTKWESCNLAADLDWKKVVEPVMRLYTETTDGSNIEIKESALVWHHQDADPDFGSCQAKELMDHLENVLANEPAVVKRGQHIVEVKPQGVSKGLVAEKVLSTMVNDGKPPDFVMCIGDDRSDEDMFEGIFRTISSPSLSMSPEIFACTVGQKPSKAKYYLDDTTDVVRLLQGLATASNPKPRYIAQIQVSFESSI

SEQ ID NO: 2123 - protein, 515 aa, Coprinopsis cinerea okayama7#130
MASNSTGDLIIVSNRLPVTINKDANGEYHFKMSSGGLVSALSGFKKSLNFTWIGWPGFFIPVKDREIVDRRLKEEYSCQAVYLDDDVADRHYNGFSNSILWPLFHYHPGEMNFDEENWLAYRQANLQFAEAVRPHVKPGTMVWVQDYHLMLLPMLLRNLIDGESASFASEEFSKITQGISAEANLAPTRIPDVKIGFFLHTPFPSSEIYRILPVRREILLGVLYCDLIGFHTYDYARHFLSSCTRILNLPTMPNGVEFGGRLAHVGTFPIGIEPSSFIDNLKKQSVQDRITQLEQRFRGVKVIVGVDRLDYIKGVPQKLHALELFLTQHPEWIGKVVLVQLAVPSRQDVEEYQNLRSTVNELVGRINGRFGTVEFMPIHFMHKSLTFDELCALYAVSDVCLVSSTRDGMNLVSYEYIACQQARQGAMILSEFAGAAQSLNGSIVVNPWDSQQVADAIHEAVTMDAATRAENHRKLFKYVNKYSASFWGSSFIREMSKITPYNPPAEVNGKSEEAS

SEQ ID NO: 2124 - protein, 532 aa, Ralstonia solanacearum GMI1000; identical to SEQ ID NO: 359

SEQ ID NO: 2125 - protein, 213 aa, Arabidopsis thaliana
  misc_feature (26)..(26): Xaa can be any naturally occurring amino acid
MYGQCNIESDYALLESITRHLLGGGXDMLVYGLLKDAFHFDTSSSDLSCLFDFPAVKVEPTENFTAMEEKPKKAIPVTETAVKAKHYRGVRQRPWGKFAAEIRDPAKNGARVWLGTFETAEDAALAYDIAAFRMRGSRALLNFPLRVNSGEPDPVRITSKRSSSSSSSSSSSTSSSENGKLKRRRKAENLTSEVVQVKCEVGDETRVDELLVS

SEQ ID NO: 2126 - protein, 550 aa, Pinus sylvestris; identical to SEQ ID NO: 368

SEQ ID NO: 2127 - protein, 726 aa, Crocosphaera watsonii WH 8501
MSKTIIVSNRLPVKIERNQAGEFEYKTSEGGLATGLGSVYKEGDNIWVGWPGLAVNKTEDKEEICSRLKESNMSPVFLTKNEIEEYYEGFSNETLWPNFHYFNQYAVYSDVFWNTYKKVNKKFAKKLEEIIEDGDKIWIHDYQLLVLPAMIRETHPNSSIGFFLHIPFPSYESFRLLPWRTDLLTGMLGADFIGFHTYDYVRHFLSSVNRLVGITDNDGHMNVGNRLAMADAIPMGIDYNRYAQAAADPETLASEVKYRISLGDVKLILSIDRLDYSKGIPQRLRAFEQFIEENEEFREEVSLLILVVPSRDQVPMYANLKKEIELLVGSINGKFGTINWRPIHYFYRSYPLHSLSAFYRMSHVALVTPLRDGMNLVCKEFVASKLDKKGVLILSETAGSAKELSDAILINPNDTNQMVEAMKEALKMPEEEQIARMETMQKSLKRYDINAWVKLFMKGLEQVKEEQENLRTKPISSVVKNKLLQEYRSSKKRIIFLDYDGTLVGFYANPNDSVPDAELEELMTKLTADTNNQVVVISGRGRDFLEKWLSKFNVDFIAEHGVWHKENGKEWECFVELDTSWQEEFDRVLEMYVDRTPGSFIERKDFSMVWHYRKVEPGLGELRSRELANLLKYLSADKDLQVQEGDMVIEIKNARVNKGVAAASWLKKNDYDFSFACGDDWTDEDTFKAMPEDAFTVKVGSSSSAAKYRVENFKDIRKLLLSLANQ

SEQ ID NO: 2128 - protein, 1489 aa, Rubrobacter xylanophilus DSM 9941; identical to SEQ ID NO: 376

SEQ ID NO: 2129 - protein, 896 aa, Saccharomyces cerevisiae
MTTTAQDNSPKKRQRIINCVTQLPYKIQLGESNDDWKISATTGNSALFSSLEYLQFDSTEYEQHVVGWTGEITRTERNLFTREAKEKPQDLDDDPLYLTKEQINGLTTTLQDHMKSDKEAKTDTTQTAPVTNNVHPVWLLRKNQSRWRNYAEKVIWPTFHYILNPSNEGEQEKNWWYDYVKFNEAYAQKIGEVYRKGDIIWIHDYYLLLLPQLLRMKFNDESIIIGYFHHAPWPSNEYFRCLPRRKQILDGLVGANRICFQNESFSRHFVSSCKRLLDATAKKSKNSSNSDQYQVSVYGGDVLVDSLPIGVNTTQILKDAFTKDIDSKVLSIKQAYQNKKIIIGRDRLDSVRGVVQKLRAFETFLAMYPEWRDQVVLIQVSSPTANRNSPQTIRLEQQVNELVNSINSEYGNLNFSPVQHYYMRIPKDVYLSLLRVADLCLITSVRDGMNTTALEYVTVKSHMSNFLCYGNPLILSEFSGSSNVLKDAIVVNPWDSVAVAKSINMALKLDKEEKSNLESKLWKEVPTIQDWTNKFLSSLKEQASSNDDMERKMTPALNRPVLLENYKQAKRRLFLFDYDGTLTPIVKDPAAAIPSARLYTILQKLCADPHNQIWIISGRDQKFLNKWLGGKLPQLGLSAEHGCFMKDVSCQDWVNLTEKVDMSWQVRVNEVMEEFTTRTPGSFIERKKVALTWHYRRTVPELGEFHAKELKEKLLSFTDDFDLEVMDGKANIEVRPRFVNKGEIVKRLVWHQHGKPQDMLKGISEKLPKDEMPDFVLCLGDDFTDEDMFRQLNTIETCWKEKYPDQKNQWGNYGFYPVTVGSASKKTVAKAHLTDPQQVLETLGLLVGDVSLFQSAGTVDLDSRGHVKNSESSLKSKLASKAYVMKRSASYTGAKV

SEQ ID NO: 2130 - protein, 546 aa, Burkholderia pseudomallei K96243; identical to SEQ ID NO: 382

SEQ ID NO: 2131 - protein, 1536 aa, Synechococcus elongatus PCC 6301; identical to SEQ ID NO: 388

SEQ ID NO: 2132 - protein, 496 aa, Shewanella sp. MR-7; identical to SEQ ID NO: 389

SEQ ID NO: 2133 - protein, 861 aa, Arabidopsis thaliana
MGSKSFGNLLDLASGDLLDIPQTPRYLPRVMTVPGIISDVDGYGISDGDSDVISLPCRERKIIVANFLPLNGKKDSETGKWKFSLDNDSPLLHLKDGFSPETEVIYVGSLKTHVDVSEQDEVSHNLFEEFNCVATFLPQDVHKKFYLGFCKQQLWPLFHYMLPMCPDHGERFDRGLWQAYVSANKIFADKVMGVINLEEDYIWIHDYHLMVLPTFLRRRFHRVKLGFFLHSPFPSSEIYRTLPVREELLRGLLNCDLIGFHTFDYARHFLSCCCRMLGLEYESKRGHIALDYLGRTVFLKILPIGIHMGRLESVLNLPATAEKLKEIQEKYRGKKIILGVDDMDIFKGLSLKILAFEHLLQQYPSMLGKIVLIQIVNPARGSGKDVQEARKETYDTVKRINERYGSHDYEPEVLIDRPVPRFEKSAYYALAECCIVNAVRDGMNLVPYKYTVCRQGTPSMNKSLGVSDDLPRTSTLVLSEFIGCSPSLSGAIRVNPWDVDAVADSLYSAITMSDFEKQLRHKKHFHYISTHDVGYWARSFSQDLERASRDHYSKRCWGVGWGLGFRLVALSPNFRRLSIEQTVSAYRRSSKRAIFLDYDGTLVPETSIVKDPSAEVISALKALCSDPNNTIFIVSGRGKVSLSEWLAPCENLGIAAEHGYFTRWNKSSDWETSGLSDDLEWKKVVEPIMRLYTETTDGSNIEAKESALVWHHQDADPDFGSCQAKELLDHLETVLVNEPVIVNRGHQIVEVKPQGVSKGLVTGKILSRMLEDGIAPDFVVCIGDDRSDEEMFENISTTLSAQSSSMSTEIFACTVGRKPSKAKYFLDEVSDVVKLLQGLANTSSPKPRYPSHLRVSFESVV

SEQ ID NO: 2134 - protein, 1558 aa, Cyanothece sp. PCC 7424; identical to SEQ ID NO: 393

SEQ ID NO: 2135 - protein, 1489 aa, Xylella fastidiosa Temecula1; identical to SEQ ID NO: 398

SEQ ID NO: 2136 - protein, 1523 aa, Bifidobacterium longum DJO10A; identical to SEQ ID NO: 400

SEQ ID NO: 2137 - protein, 443 aa, Bradyrhizobium sp. BTAi1
MRDGAQMEPIAQIEQLGQGALALLDLPAAHYAGYYEGFANSALWPALHSRSDLISVSHDDYRSYREVNAFVARALLRFHKPETLFWIQDYHFLSLGVELRTLGVKSPIGFFLHTPWPARSVIDSVPNHRDLVTAMLAYDLIGFQTEDDRDNFCACIRADLGLQVRDGVVKSRHGRTRLAVFPIGIDADKFAASAAKAASHPDVSRLRRSLHGEKLAIGVDRLDYSKGLVNRITAFDRMWTMHPTLLRAASLLQIATPSRESIEAYGNLQSDVARLVSEVNGRHGEADWTPIRYLNKGYGQGVLSGLYRSAQVGVVTPLHDGMNLVAKEYVAAQSPVDPGVLVLSKFAGAANELDAALLVNPHDIDGMARTIAMALSMPLNERRMRYEIMMTKLRRHSIQQWFTDFLEALQDSDAPETAEIAPLPTAPAGLLSSRLASSSARYH

SEQ ID NO: 2138 - protein, 546 aa, Desulfotalea psychrophila LSv54; identical to SEQ ID NO: 403

SEQ ID NO: 2139 - protein, 994 aa, Selaginella lepidophylla
MPQPYPSSSSTSNAKEAGGGAAAAGGGGGGAFSLPPSLASSRVERLVRERQLRNQRQEDEPEDEQQALEAEEAAVAATEVPDAVAAATPSLSDEPSKISSGRGQRLLVVANRLPLSATRKGETEWNLEMSAGGLVSALLGVKQFEVTWIGWPGVYVQDEKGEKSLRGALEEKGFVPVLLDEATVDQYYNGYCNNVLWPLFHYIGLRQEDRLAATRSLLSQFNAYKRANRLFAEAVFNFYQEGDVVWCHDYHLMFLPSYLKEKDSQMKVGWFLHTPFPSSEIYRTLPLRAELLQGVLAADLVGFHTYDYARHFVSACTRILGLEGTPEGVEDQGKNTRVAAFPVGIDSERFIEAVETDAVKKHMQELSQRFAGRKVMLGVDRLDMIKGIPQKLLAFEKFLEENSEWRDKVVLVQIAVPTRTDVLEYQKLTSQVHEIVGRINGRFGSLTAVPIHHLDRSMKFPELCALYAITDVLLVTSLRDGMNLVSYEFVACQKDKKGALILSEFAGAAQSLGAGSILINPWNIIESSNAIADALNMPEEEREERHRHNFMHITTHSAQVWAETFISELNDSILEAELRTLHIPPQLPLDKAVAKYSESKNRLVILGFNSTLTAQVEAPRGRAPDQIREMKIRLHPSIKDILNVLCSDPKTTIVILSGSERVALDEVFGEFDLWLAAENGMFLRHTQGEWMTTMPEHLNMDWLESVQLVFDYFCERTPRSFVETRETSLVWNYKYADVEFGRVQARDMLQHLWTGPISNAAVDVVQGGKSVEVRPVGVSKGSAIDRILGEIVHSKHMTIPIDYVLCIGHFLSKDEDIYTFFEPELPLLDRDSSTSNGGKPLGGKLPIDRKSSKSSSRMKPPVSSPKSPGRGSEQQQQAEEASRWEGSSVLDLQGENYFSCAVGTMKRSLARYCLTSSEEVVTFLTSLTSTVAAAAGAGAGARATGSGAAGAGAGAGAGGDHEAPGSPIRKSDSFKTSGWHSPTPRSPKLAPAVQ

SEQ ID NO: 2140 - protein, 363 aa, Glycine max
MTQQNVVVSDTKSGVSLTVFSTTQKPPAAPGGYISIPRRRVLKNLEINGGQRINAWVESMRASSPTHHKSTPSLSQEHNSWILHHPSALDMFDQIIDASKGKQIVMFLDYDGTLSPIVDDPDRAFMSDSMRKTVRKLARCFPTAIVTGRCKDKVYNFVRLAELYYAGSHGMDIKGPTRSSKYNKDSKAEAILCQPASDFLPMIDEVYQQLVEKTKSTPGALVENNKFCLSVHFRCVDEKKWSELARQVKSVLKEYPKLRLTQGRKVLEIRPTIKWDKGKALEFLLESLGLANCSDVFPVYIGDDRSDEDAFKKLRDKGQGFGILVSKFPKDTSASYSLQEPNEVMNFLQRLVEWKHVSLRARS

SEQ ID NO: 2141 - protein, 483 aa, Amanita muscaria
MSSGGLVSALSGFKKSLNFTWIGWPGFFIPPKDRPLVNKRLMDQYSCQAVYLDDDVADKHYNGFSYSILWPLFHYHPGEMNFDEENWLAYRQANLQFAEAVLQQLTPGAMVWVQDYHLMLLPMLLRGLIEGRDLGADLSITELSEIGEGAEEGIQNAKNLHGVKMGFFLHTPFPSSEIYRILPVRREILLGILYCDLIGFHTYDYARHFLSSCTRILGLPTMPNGVEFEGRMAHVGTFPIGIEPSSFIENLKKDSVTARITQLEHRFNGVKVIVGVDRLDYIKGVPQKLHALELFLTQHPEWIGKVVLVQLAVPSRQDVEEYQNLRSTVNELVGRINGRFGTVEFMPIHFMHKSLPFDELCALYAVSDVCLVSSTRDGMNLVSYEYVACQQARQGVMILSEFAGAAQSLNGSIVVNPWDSQQVADAIHEAVTMDAPTRSENHKKLFKYVNKYSAAFWGSSFIKEMARIKAIEVNKGAKEDAAV

SEQ ID NO: 2142 - protein, 447 aa, Thermoplasma volcanium GSS1
MMRYVIASSRCPFSHDVVMGRELVKENVGGVATALKRAISKHGGTWICWGDGKADNRYVNEDVGTYKIKRIILTPQEKRGYYDMYSNRTLWPLFHYFRERVQYTDNGYETYRKVNEKFAEEILNNTSQEDIVWVHDYQLSLVPGILRQKGLKNRIIFTWHIPWVSREMFETLTESDEIKESVGSADFITFHTDLYRKNFESLFENRKHGKSIAVPLGIDYRYFEKAKSSQIKSYALKDKIMLFSIDRLDYTKGLTNRVLSIERLIRNHPETSGKFVYVMIVTPSRTSVSDYVSMKRELEMNIGRVNGEFGTISWMPILYMYRKISDHSLVSYYKSADIALITPLIDGLNLVSKEFIASTEKGILVLSKFAGASNCLRGALIVNPNSPDEVADAIYKAMNMERKEADERLLKMKAIVKARDTDWWIKRIYRLAIAKEHDRRVTNNRIE

SEQ ID NO: 2143 - protein, 793 aa, Vitis vinifera
MMSRSYTNLLDLATGNFPAIGRERKRLPRVMTVPGNVVSSDNPSSVAQDRLIIVANQLPVKANRRADDRGWVFSWNEDSLLLQLKEGLPEDMEVLYVGSLRVDVDLEEQEEVSQILLETFKCVPTFLPHDVLEKFYHGFCKKLLWPLFHYMLPFSADHGGRFDRSMWEAYVLANKLFSQKVIELRMGFFLHSPFPSSEIYRTLPVREEILKALLNSDLIGFHTFDYARHFLSCCSRMLGLEYQSKRGYIGLEYYGRTVGIKIMPVGIHMGRIASVMKLADKQKKVGELKQQFEGKTVLLGVDDMDIFKGINLKLLAMEQLLQQHSKWQGKAVLVQIANPARGKGADLEEIQAEIRESCRRINEEFGEPGYEPIVFVDRPVSISERIAYYSIAACVVVTAVRDGMNLTPYEYIVCRQGTDDSESMLSEFIGCSPSLSGAIRVNPWNVEATAEAMNEAISMSQSEQLLRHEKHFRYVSTHDVAYWSRSFLQDMERTCSEHFRRRCWGIGLSFGKLSMEAIVSAYCRAKSRAILLDYDGTVMPQNSINKAPSQEVISILNTLCWDKKNTVFIVSGRGRDNLSQWFSPCRKLGLAAEHGYFLRWSQDKEWETCGQSSDFGWKQIAEPVMKLYTETTDGSSIESKESALVWQYGDADPGFGSSQAKEMLDHLESVLANEPVAVKSGHFIVEVKPQGVSKGLAAEKIFTTMTENGKQADFLLCIGDDRSDEDMFEIIGSAMSTNILSANTSLFACTVGQKPSKAKYYLDDASEVICMLESLAEASDSGPSSEEETQVSP

SEQ ID NO: 2144 - protein, 2056 aa, Physcomitrella patens subsp. patens; identical to SEQ ID NO: 415

SEQ ID NO: 2145 - protein, 866 aa, Oryza sativa Japonica Group
MVSRSYSNLLGRRRIPRVVTASGIVPDLDYSDDDAASAASSSDHSSAHSHAPRERAIIVANQLPIRASRRGGGGGGWEFSWDEDSLLLQLRDSLRAHADRADDMEFVYVGGLRDDVPAAEHDEVAHHLLEGFRCVPTFLPADLRSRFYHGFCKQQLWPLFHYMLPLSPELGGRFDRALWQAYVSVNKIFADKILEVISPDEDYVWVHDYHLMILPTFLRKRFNRVKLGFFLHSPFPSSEIYKTLPVREELLRSLLNADLIGFHTFDYARHFLSCCGRMLGLKYESQRGYIALEYYGRTVTIKILPVGVHLEQLRSVLNLPETGVKVAELLKQFCDQNRLMLLGVDDMDIFKGISLKLLAFEQLLMQHPEWRGRVVLVQIANPARGRGKDVKEVQDESYAMVRRINEAFGQPGYQPVILIDRPLQFYERMAYYVVAECCLVTAVRDGMNLIPYEYVIARQGNEKLDGILGLGPSARKKSMLVVSEFIGCSPSLSGAIRVNPWNIDAVADAMDSALEMPEGEKVLRHEKHHKYVSTHDVGYWANSFLQDLERTCLDHSRRRCWGIGFGLRFRVVALDPNFKKLAVEHLVSAYRRTTTRIILLDYDGTLMPQTSFGKSPSSKTIDMLNSLSRDQNNMVFLVSTKKRSTLEEWFSSCDNLGLAAEHGYFLRLKRDAEWETCVPVTDRSWKQIAEPVMKTYTETTDGSTIEDKETAIVWSYEDADPDFGSCQAKELHDHLESVLANEPVTVKAGLNHVEVKPQGVSKGLVAKRLLSIIRENSLLPDFVLCIGDDRSDEDMFEVITTAAQDNCLSPDAEVFACTVGRKPSKAKYYLDDLADIVRLIQGLANVSDEMHSTMPTPVDAADTALR

SEQ ID NO: 2146 - protein, 61 aa, Physcomitrella patens subsp. patens
HYRGVRQRPWGKFAAEIRDSAKNGARVWLGTFDTAEQAALAYDRAALNMRGSRALLNFPLK

SEQ ID NO: 2147 - protein, 473 aa, Burkholderia sp. 383
MSRLIVVSNRVAAGEDTRPSAGGLAVGVMDALKETGGVWFGWNGEIVDAPDTEPAIQQDGNVTYATVGLNRRDYDQYYRGFSNATLWPVFHYRGDLARFDRQEYAGYLRVNAMLAKQLAALLRPDDLIWVHDYHLLPFAHYLRELGVKNPIGFFLHIPFPSPDMLRLVPPHEELVKFMCAYDVAGFQTETDKQAFTDYIERRGIGAASDDGMLHAHGRVVKVAAYPIGVHPDAIAQAAVQYSARKPVKMLREALDGRKLVMSVDRLDYSKGLVERFQSFERMLANAPGWQGRVSLLQIAPPTRSDVKTYQDIRETLEGEAGRINGRFSQLDWTPIQYLNRKYERNLLMAFFRMSQVGYVTPLRDGMNLVAKEYVASQDPADPGVLVLSEFAGAAAELTGALLVNPYDLSQMAEALERALSMPLAERQARHEENLARLRVNDLSVWRDTFVADLRSVAAAASVTRRAGRRVAHA

SEQ ID NO: 2148 - protein, 912 aa, Oryza sativa Japonica Group
MSRSYTNLLDLAEGNFAALGPGGGGGGRRRSGSFGLKRMSRVMTVPGTLSELDGEDDSEHAATNSVASDVPSSVAGDRVIVVSNQLPVVARRRPDGRGWSFSWDDDSLLLQLRDGIPDEMEVFFVGSLRAEIPVADQEEVSQALLDRFRCAPVFLPDPLNERFYHRFCKRHLWPLFHYMLPFSSSASPSPSSSSSSSSSPSSSSGSGHFDRGAWEAYVLANKFFFEKVVEVINPEDDYVWVHDYHLMALPTFLRRRFNRLRIGFFLHSPFPSSEIYRTLPVREEILKALLNCDLIGFHTFDYARHFLSCCSRMLGIEYQSKRGYIGLDYFGRTVGIKIMPVGVHMGQLKTVLSLPDREWRVSELQQQFEGKTVLLGVDDMDIFKGINLKLLAFENMLRTHPKWQGRAVLVQIANPARGKGKDLEAIQAEIHESCKRINGEFGQSGYSPVVFIDRDVSSVEKIAYYTIAECVVVTAVRDGMNLTPYEYIVCRQGSDSTSEVNGPKKSMLVVSEFIGCSPSLSGAIRVNPWNIEATAEALNEAISMSEQEKHLRHEKHYRYVSTHDVAYWSKSFIQDLERACKDHFRRTCWGIGLGFGFRVVALDPHFTKLNMDSIVMAYERSESRAIFLDYDGTLVPQTSISRTPSAEVLRIINTLCSDRRNKVFLVSGRRRDKLGEWFSSCPDLGIAAEHGYFLRWTRDEEWQTCTQTSDFGWMEMAKPVMNLYTEATDGSYIDPKESALVWHHQDADPGFGSSQAKELLDHLESVLANEPVSVKSGQFIVEVKPQGVSKGVVAEKILVSMKERGKQADFVLCIGDDRSDEDMFENIADTIKKGMVATNTSLFACTVGQKPSKAKFYLDDTFEVVTMLSALADATEPEPETDLTDEFDELAVSVSSVDIDDEQTPSDKLIGG

SEQ ID NO: 2149 - protein, 160 aa, Zea mays; identical to SEQ ID NO: 141
  misc_feature (80)..(80): Xaa can be any naturally occurring amino acid
  misc_feature (111)..(111): Xaa can be any naturally occurring amino acid
  misc_feature (122)..(122): Xaa can be any naturally occurring amino acid
  misc_feature (144)..(144): Xaa can be any naturally occurring amino acid

SEQ ID NO: 2150 - protein, 337 aa, Triticum aestivum
IRLGAPGSHTLIGSATAYGVQTQPNPGRQQGTARMLLNPASEALVLDSIRQHLMEDTAAAAAPVAEARRQRPAYCRSASFGSLVADQWSESLPFRADDSDDMVVYGALRDAFSCGWLPDGSFAAVKPEPLLPSPDSAYACDGPSCFGFLEPETPPATSPGEGEEEGAAFMGEAAAAVARGKHYRGVRQRPWGKFAAEIRDPAKNGARVWLGTYDTAEDAAVAYDRAAYRMRGSRALLNFPLRIGAEIAAAGAAAAHAAAAAAGDKRPSPEPATSDSSSSSSSSGSPKRRKRGEAAAASMAMALVPPPSQLSRPAHAWYPAAPVEQVAMAPRAQQLVS

SEQ ID NO: 2151 - protein, 352 aa, Gluconobacter oxydans 621H
MGRLIIVSNRTPAPGERTQPAGGLTVGLCDAVQTQETLWFGWSGHQHADAADRPVQSEQVGNVNYVTFDLTQRQYDRFYLNFSNGVLWPLCHYRTNLIRYTREDCDAYYEANEVFADRLVGLLEPDDTVWIHDYHLFPLGKMLRDRGVTGRIGFFLHIPFPPWSVARLLPRLDMLLSGLAACDLIGVQTPEDATNLKGCFEIYGLKAAVEAVPIGIDPVSFRQQAIESASSDEVVKIMDTLEGTRLIMGVDRLDYSKGLPERMKGFEALLKNYPEHRGQVTFLQVTPVSRGGVESYRLLKEELDGLVGTINGAYARRTGCRSATRPGRSGGIFLPGFTGWQMWGLSRRCGMA

SEQ ID NO: 2152 - protein, 1631 aa, Ralstonia metallidurans CH34; identical to SEQ ID NO: 452

SEQ ID NO: 2153 - protein, 170 aa, Leptospirillum ferrooxidans
YPTRDQGQKFYRNHPGKIPAGSSCYLTHEFWNERLAFQSFQIEETFDQETLSGLYKLAEGALITSTIDGMNLVSQEFLASQNGGYGILFLSRYTGTATILKNAVSIDPLDPTQSAERISAELAMPREARRLRNLSLMEQVRQNDLAHWVSSLRKNIASFSNSNTKKIMVA

SEQ ID NO: 2154 - protein, 194 aa, Saccharomyces cerevisiae
ISDDILSVLDSHLIPSATTGESKVFYYKMKGDYHRYLAEFSSGDAREKATNASLEAYKTASEIATTELPPTHPIRLGLALNFSVFYYEIQNSPDKACHLRKQAFDDAIAELDTLSEESYKDSTLIMQLLRDNLTLWTSDMSESGQAEDQQQQQQHQQQQPPAAAEVKHQSKYSDKSKEKLLKKRKKKERGCNNL

SEQ ID NO: 2155 - protein, 230 aa, Solanum lycopersicum var. cerasiforme
ENVYMAKLADRAESDEEMVEFMEKVSNSLGSEELTVEERNLLSVAYKNVIGARRASWRIISSIEQKEESRGNEEHVNSIREYRSKIENELSKICDGILKLLDSKLIPSATSGDSKVFYLKMKGDYHRYLAEFKTGAERKEAAESTLTAYKAAQDIASAELAPTHPIRLGLALNFSVFYYEILNSPDRACNLAKQAFDEAIAELDTLGEESYKDSTLIMQLLRDNLTLWTS

SEQ ID NO: 2156 - protein, 861 aa, Gossypium hirsutum
MASRSCANFLHLASGNLLDIPQTPRGLPRVMTVPGIISDMDSCSSNDGDSDVASSGCRERKIIVANMLPLHAKRDRETSKWRFSWDEDSLLLHLKDEFSPEMEVVYVGSLKVDIDVNEQEEVAQKLLEDFNCVPTFVPHDLQKKFYLGFCKQHLWPLFHYMLPMCPDHGDRFDRILWQAYVSANKIFADKVMEVINPDDDYVWIHDYHLMVLPTFLRKHLNRIKLGFFLHSPYPSSEIYRTLPVRDEILRGLLNCDLIGFHTFDYARHFLSCCSRMLGLDYESKRGHIGLDYFGRTVFIKILPVGVHMGRLESVLNLSSTAARVKEIQKQFEGKKLILGIDDMDIFKGISLKLLAVEQLLQQHPDLQGKIVLVQIVNPARGFGKDVQEAKKETYMTAKKINEVYGSPNYQPVILIDRPVPRYEKSAYYALAECCIVNAVRDGMNLVPYKYIACRQGTPGMDEALGVKPEYPRTSMLVVSELIGCSPSLSGAIRVNPWDIDAVAEALNTAITKPESEKQLRHEKHYRYVSTHDVAYWARSFVMDLDRACQDHYSKRCWGIGLGLSFRVVSLSPSFRRLAIDHICSAYRRTNRRAIFLDYDGTLVPEASIIKTPSPEVICIIKTLCDDPKNTVFIVSGRGRASLSDWLAPCEKLGIAAEHGYFIRWSKDSEWETSPVGADLEWKKIVEPVMSLYREATDGSSIETKEGGLVWHHLDADPDFGSCQAKELLDHLESVLANEPAVVHRGQHIVEVKPQGVSKGLVAEKVLSRMVNGGKPPDFVMCVGDDKSDEDMFQSILTSVSNPSLPVAPEIFACTVGRKPSKARYYLDDTADVLKLLKGLATATISKPRCLPEIKVSFESNA

SEQ ID NO: 2157 - protein, 861 aa, Gossypium hirsutum
MASRPCANFLHLASGNLLDISQTPRGLPRVMTVPGIISDMDSCSSNDGDSDVASSGCRERKIIVANMLPLHAKRDRETSKWRFSWDEDSLLLHLKGGFSPETEVVFVGSLKVDIDVNEQEEAAQKLLEDFNCVPTFLPHDLQKKFYLGFCKQHLWPLFHYMLPMCPDHGDRFDRILWQAYVSANKVFADKVMEVINPDDDYVWIHDYHLIVLPTFLRKHLNRIKLGFFLHSPFPSSEIYRTLPVRDEILRGLLNCDLIGFHTFDYARHFSSCCSRMLGLDYESKRGHIGLDYFGRTVFIKILPVGVHMGRLESVLNLSSTAARVKEIQKQFEGKKLILGIDDMDIFKGISLKLLAVEQLLQQHPDLQGKIVLVQIVNPARGFGKDVQEAKKETYMTAKKINEVYGSPNYQPVILIDRPVPCYEKSAYYALAECCIVNAVRDGMNLVPYKYIVCRQGTPGMDEALGVKPEYPRTSMLVVSEFIGCSPSLSGAIRVNPWDIDAVAEALNTAITMPESEKQLRHEKHYRYVSTHDVAYWARSLVMDLDRACQDHYSKRCWGIGLGLSFRVVSLSPNFRRLAIDHICSAYRRTSRRAIFLDYDGTLVPEASIIKTPSPEVISIIKTLCDDPKNTVFIVSGRGRASLSDWLAPCEKLGIAAEHGYFIRWSKDSEWETSPVGADLEWKKIVEPVMSLYREATDGSSIETKESGLVWHHQDADPDFGSCQAKELLDHLESVLANEPAVVHRGQHIVEVKPQGVSKGLVAEKVLSRMVNGGKPPDFVMCVGDDKSDEDMFQSILTSVSNPSLPVAPEIFACTVGRKPSKARYYLDDTADVLKLLKGLATATISKPRCLPEIKVSFESNA

SEQ ID NO: 2158 - protein, 1519 aa, Nocardioides sp. JS614; identical to SEQ ID NO: 463

SEQ ID NO: 2159 - protein, 449 aa, Roseovarius nubinhibens ISM; identical to SEQ ID NO: 462

SEQ ID NO: 2160 - protein, 1512 aa, Rhodobacter sphaeroides 2.4.1; identical to SEQ ID NO: 466

SEQ ID NO: 2161 - protein, 1499 aa, Staphylococcus aureus subsp. aureus COL; identical to SEQ ID NO: 467

SEQ ID NO: 2162 - protein, 470 aa, Vitis vinifera
MEHVLLALRETEEQREQRIRSLFNFFDAANAGYLDYAQIEAGLSALCIPAEYKYANDLLNVCDANRDGRVDYQEFRRYMDDKELELYRIFQAIDVEHNGCISPEGLFDALVRAGIKIDDEELARFVERVDKDNNGVITFEEWRDFLLLCPHEATIENIYHYLERVCLVDIGEQTVIPEGISKHVHPSRYLIAGGVAGATSRTATAPLDRLKVVLQVQTTEARILPALKDIWKEGRFLGFFRGNGLNVMKVAPESAIRFYTYEMLKTFVVNAKGGGDKAEIGIMGRLFSGGLAGAVAQTAIYPMDLVKTRLQTCALEGGKVPNLGALSKDILVHEGPRAFYRGLVPSLIGIIPYAGIDLTAYESLKDLSKTYIFHDTEPGPLLQLGCGTISGALGATCVYPLQVIRTRMQAQPTNKADAYKGMSDVFRKTFQHEGFRGFYKGLFPNLLKVVPSASITYLVYETMKKSLELD

SEQ ID NO: 2163 - protein, 272 aa, Bruguiera gymnorhiza
METLNFGPSGIQEMYGQSMAESDLALLESIRLHLLGETPSYCNPAVTATATANSINNCCRPAYCRSSSFGSLYPCLTENWGDLPLKVNDSEDMLLFGVLRHAVTLGWVPSDPKADAQVAAEDFPAVKVEPLEAPVAQTPRERIDEAAAPAVVPAKGKNHYRGVRQRPWGKFAAEIRDPAKNGARVWLGTFETAEDAALAYDRAAYRMRGSRALLNFPLKVNSGEPDPVRITSKRTSPEPSSSSESGSPKRRKKAVGSAATTANATVGWNWKW

SEQ ID NO: 2164 - protein, 556 aa, Acinetobacter sp. ADP1; identical to SEQ ID NO: 473

SEQ ID NO: 2165 - protein, 836 aa, Ustilago maydis 521
MATEVASGGFAEYALLVEALRSLTVAQAKALIKDLNNEPEAVCGYIALSGNKIDLINRLIAALTERRNQGDIRGYQKFHALILRYKGPPIPAYRNGSFPLPPIPRSATTNASAGTYGGYSATGAYAAHPQRLGVTPTNRAPSITPSYHSPPISTATTTTATASLPSRPVGPAGSTRINFRPSPFYEIKQFVSSIVQCPEAPTQSDRKNVPFFVNLTTEQADQLRTSKYQLRLFCTTVEAHAASLSGRNPATVEFPLTCEVRVNSQPLSINLRGSKKQAGRVPPPNLNKDSMLALKAGRPNRIDLTYTNAPKRHVLVAAICEITTVETLVEHLRSRQLRSKEEVLLKMRREAEDDDIEQGAATMSLKCPFSYMRITTPCRSVNCLHVQCFDAYSFFSINEQTPSWACPVCQKTIKPEDLLMDGYVDEILKKVPHDEESVIIEPDGSWRTSDGKISSSGSAQATPAADGTSLVEDRSQTQSLEDVKPGNAKPNGAGRASRDDIVVLDSPSPPPETTVPSISASTSATGPTQPPVVAASSSSCSVETRTAPSVQASTLAVGATTAPSVLTSSAAMGVNASTSNAPPSHNGVVPTPSASHSAGGLALAPRCEHTETLDSSTTMGAHNAPTVGVGEGGVIDLTLDSDDEDSEPSVPRRPAPSIDAHPNPLSNSMNSGYLGHHSISSNNNRGGGFANYASKATSMSARIDPFASAMSRVEATPEDEQIRRPGKRPRIEAIPTPNDPRLVKGVRPVERERRSSLDALPASYLDVGINGINGSQSNGRGYEAANTTSNGGGTRADGNSAAARGASGEDDGDDSWMDNANTSDHDQYINEEDWWA

SEQ ID NO: 2166 - protein, 876 aa, Kluyveromyces lactis NRRL Y-1140
MTGEKKLSNKVINCITQLPYKIEKISDDDTEANDPSCWSIEPISGNSALQSSLKYLNESPNWEHHIVAWTGEILNSDENPDRSMYLTQAEKEVIATMLQGKEAEGCTHTVHPVWLLRKDQYRWRKFAENVIWPALHYILNAPDDGTLENVWWYDYVKFNEAYAMKVAQIYQPGDIIWVHDYYLMLLPQLLRMRFNNATIAYFHDTPWPSNEYFRCLSRRKPVLDGLLGSNRICFQNDGFARHFVSSCQRLLGCTATKSSNSNANNSDEYRITSYGGDVLVDSLPIGVDTEQIQRDAFSPDVDEKVNAIKKAYEGKKIIIGRDRLDTVKGVLQKLQAYQVFLAMYPEWRGKVVLIQVSGPTAKTDANIKLESQVNELVSSINGEYGNLNYSPVQHYYLRIPQDVYYSLLRVADVCLITSVRDGMNTTALEFVTVKSQLSKYNCYASPLILSEFSGTSTILTDAIIINPWDAVAVSKAINKALKLTPEQKETLELKLRKEVPTIQDWTDKFLGKVVDLVEHKIGNQKITPALNRPLLLKTYKKAKRRLFLFDYDGTLTPIVQDPAAAIPSARLYSIITKLAQDPKNKIWLISGRDQQFLNRYFGTKIPQVGLSAEHGCFMKDVSSEEWINLTSKFDMSWQKEVGQIMEEYTKKTPGSFIERKKVALTWHYRRSDPQLGEFNADALKTSLEKITDGLGVEVMEGKANIEVRPSFVNKGEIVKRLVWTPHGAKQLIEDNFSIDENVLRDELPEFVLCLGDDVTDEDMFKQLNHIEEQWDEKYPNFESSDGFGIYPVTVGSASKKTVAKAYLTDPQQVLDTLGLLVGDVSLFQSAGTVDLDDRGHLKDSESSLRSEQASAAYAMKRSTSSNNGLKKSSKNN

SEQ ID NO: 2167 - protein, 125 aa, Brassica napus
DAWGPGAAQYCVQKQDHGLDMALDQELIALSKSALEKSLPVYIETPICNVNRAVGTMLSHEVTKRYHLAGLPKDTIHIKFSGSAGQSLGAFLCPGITLELEGDSNDYVGKGLSGGKVVVYPPKGS

SEQ ID NO: 2168 - protein, 2208 aa, Arabidopsis thaliana; identical to SEQ ID NO: 274

SEQ ID NO: 2169 - protein, 716 aa, Cypripedium parviflorum var. pubescens
LSFHYMLPLSVPPWRHELKRSLWESYVLANKIFSQKVIEVINPEEDYVWIHDYHLMALPTFLRRRFNRLRMGFFLHSPFPSSEIYRTLPVREEILKALLNCDLIGFHTFDYARHFLSCCSRMLGMEYQSKRGYIGLDYFGRTVGIKIMPVGIQMAQLQLTLSLPDKAWRVSELQQRFLVKLFCLVLMTWTFSKASISSSLHLSRCSRYIPSGRGMRFLCRLLILLGAREGTLRRFKQRFGKAAKRINEQFGNANYNPVVFIDLPISLEERVAFYTIAECVVVTAVRDGMNLTPYEYIVCRQGIISGSDSSLEADGPKKSMLVVSEFLGCSPSLSGAIRINPWNTESTAEAMNEAISMSDAEKQLRHEKHYRYVSTHDVAYWSKSFMHDLERTCKDHFKRRCWGIGLGFGFRVVALDPNFRKLNIDAIVSAHERAKSRAILLDYDGTMMPQMPINKTPSAEIISIINTLCGDKKNVVFIVVVEEWCNLEKWFSPCRKLGLAAEHGYFTRWSRDESWEICSQSSDFEWMQIAEPVMKLYTESTDGSYIDKKESALVWHHHDADPDFGSAQAKEMLDHLESVLANEPVSVKSGQFIVEVKPQGVTKGIVVEKILSSMVNYNKQADFLLCIGDDRSHEDMFECISAILSKDLVAPNTTSVCFHKWDRNRAKARYYLDDTVEVTNMLGALADSSQPSSPISDVKLESLSFSEMAAKPNMST

SEQ ID NO: 2170 - protein, 446 aa, Thermoplasma volcanium GSS1
MRYVIASSRCPFSHDVVMGRELVKENVGGVATALKRAISKHGGTWICWGDGKADNRYVNEDVGTYKIKRIILTPQEKRGYYDMYSNRTLWPLFHYFRERVQYTDNGYETYRKVNEKFAEEILNNTSQEDIVWVHDYQLSLVPGILRQKGLKNRIIFTWHIPWVSREMFETLTESDEIKESVGSADFITFHTDLYRKNFESLFENRKHGKSIAVPLGIDYRYFEKAKSSQIKSYALKDKIMLFSIDRLDYTKGLTNRVLSIERLIRNHPETSGKFVYVMIVTPSRTSVSDYVSMKRELEMNIGRVNGEFGTISWMPILYMYRKISDHSLVSYYKSADIALITPLIDGLNLVSKEFIASTEKGILVLSKFAGASNCLRGALIVNPNSPDEVADAIYKAMNMERKEADERLLKMKAIVKARDTDWWIKRIYRLAIAKEHDRRVTNNRIE

SEQ ID NO: 2171 - protein, 307 aa, Brassica oleracea
MASLYLSVNKIFADKVISADDDFVCVHVYHLMVLPTFLRKRFNRVNLGFFLDIPFPSSEIYRPLPVRNELALRASTTVALLNADLIGFRSWQWSSFSNNILRERSCCACTDRKTCKGTWERCSRGAVSLKLKPRNELCIDTFNSREASASRAIHKYVAHWARSFIQNLERACGGLSEEEVLGDRTKNRAILVDYYGIMVQPGSIRTTSSNETIQTLKSLFSDPKNIVFLVNGKDRKTLTEWFSSCDDLGLAAVAEIFACTVGQKPRKAKYYLDETAEIVKMLEGLATSTAAISDQTASTTDVPTKIL

SEQ ID NO: 2172 - protein, 261 aa, Triticum aestivum
MSTAEATREENVYMAKLAEQAERYEEMVEFMEKVAKTADVGELTVEERNLLSVAYKNVIGARRASWRIISSIEQKEESRGNEAYVASIKEYRTRIETELNKICDGILKLLDSHLVPSATAAESKVFYLKMKGDYHRYLAEFKAGAERKEAAENTLVAYKSAQDIALADLPTTHPIRLGLALNFSVFYYEILNSPDRACNLAKQAFDEAIAELDSLGEESYKDSTLIMQLLRDNLTLWTSDNAEEGGDEIKEAASKPEGEGH

SEQ ID NO: 2173 - protein, 500 aa, Dehalococcoides sp. CBDB1; identical to SEQ ID NO: 498

SEQ ID NO: 2174 - protein, 523 aa, Legionella pneumophila subsp. pneumophila str. Philadelphia 1; identical to SEQ ID NO: 497

SEQ ID NO: 2175 - protein, 525 aa, Bacillus subtilis subsp. subtilis str. 168; identical to SEQ ID NO: 126

SEQ ID NO: 2176 - protein, 237 aa, Oryza sativa
  misc_feature (27)..(27): Xaa can be any naturally occurring amino acid
  misc_feature (37)..(37): Xaa can be any naturally occurring amino acid
  misc_feature (48)..(48): Xaa can be any naturally occurring amino acid
  misc_feature (81)..(81): Xaa can be any naturally occurring amino acid
  misc_feature (88)..(88): Xaa can be any naturally occurring amino acid
  misc_feature (112)..(112): Xaa can be any naturally occurring amino acid
  misc_feature (132)..(132): Xaa can be any naturally occurring amino acid
  misc_feature (149)..(149): Xaa can be any naturally occurring amino acid
  misc_feature (169)..(169): Xaa can be any naturally occurring amino acid
  misc_feature (190)..(190): Xaa can be any naturally occurring amino acid
GSVGIPGDHASAQHYVILGNAGMSFGXCFLTPANEYXLIGEANDYVGXGMAGGELVVLPVEKSGFVPDDAAIVGNTCLYGXSGGHGIXVRGNNKVKTILAIRQLPVVNQVSXRHVADLSLVIYMTWCACVVXVLGKSWDGNVVELGMTXGCALGLYSRIRIDTLVPKVXREIVKMLRVNAPTGPTMHLNXGLIEASLCTYSGSEKGATMLIEGEAYLPLFWLRVPPSEEDSPEVCPK

SEQ ID NO: 2177 - protein, 1514 aa, Escherichia coli; identical to SEQ ID NO: 508

SEQ ID NO: 2178 - protein, 1561 aa, Nostoc punctiforme PCC 73102; identical to SEQ ID NO: 507

SEQ ID NO: 2179 - protein, 256 aa, Oryza sativa Indica Group
MSREENVYMAKLAEQAERYEEMVEYMEKVAKTVDVEELTVEERNLLSVAYKNVIGARRASWRIVSSIEQKEEGRGNEEHVTLIKEYRGKIEAELSKICDGILKLLDSHLVPSSTAAESKVFYLKMKGDYHRYLAEFKTGAERKEAAESTMVAYKAAQDIALADLAPTHPIRLGLALNFSVFYYEILNSPDKACNLAKQAFDEAISELDTLGEESYKDSTLIMQLLRDNLTLWTSDLTEDGGDEVKEASKGDAGEGQ

SEQ ID NO: 2180 - protein, 475 aa, Oryza sativa Japonica Group
MNLVSYEYVACQGSKKGVLILSEFAGAAQSLGAGAILVNPWNITEVADSIKHALTMSSDEREKRHRHNYAHVTTHTAQDWAETFVCELNETVAEAQLRTRQVPPDLPSQAAIQQYLHSKNRLLILGFNSTLTEPVESSGRRGGDQIKEMELKLHPELKGPLRALCEDEHTTVIVLSGSDRSVLDENFGEFNMWLAAEHGMFLRPTNGEWMTTMPEHLNMDWVDSVKNVFEYFTERTPRSHFEHRETSFVWNYKYADVEFGRLQARDMLQHLWTGPISNAAVDVVQGSRSVEVRSVGVTKGAAIDRILGEIVHSKSMITPIDYVLCIGHFLGKDEDIYVFFDPEYPSESKVKPDSSGSVSLDRRPNGRPSNGRSNSRNSQSRTPKAQAAPERSSSSSSSSQGTPNSHHDWREGSSVLDLKGENYFSCAVGRKRSNARYLLNSSEEVVSFLKEMADATAAHNGFQSTTADYMFLDRQ

SEQ ID NO: 2181 - protein, 1477 aa, Xylella fastidiosa Ann-1; identical to SEQ ID NO: 512

SEQ ID NO: 2182 - protein, 861 aa, Arabidopsis thaliana
MGSKSFGNLLDLASGDLLDIPQTPRYLPRVMTVPGIISDVDGYGISDGDSDVISLPCRERKIIVANFLPLNGKKDSETGKWKFSLDNDSPLLHLKDGFSPETEVIYVGSLKTHVDVSEQDEVSHNLFEEFNCVATFLPQDVHKKFYLGFCKQQLWPLFHYMLPMCPDHGERFDRGLWQAYVSANKIFADKVMGVINLEEDYIWIHDYHLMVLPTFLRRRFHRVKLGFFLHSPFPSSEIYRTLPVREELLRGLLNCDLIGFHTFDYARHFLSCCCRMLGLEYESKRGHIALDYLGRTVFLKILPIGIHMGRLESVLNLPATAEKLKEIQEKYRGKKIILGVDDMDIFKGLSLKILAFEHLLQQYPSMLGKIVLIQIVNPARGSGKDVQEARKETYDTVKRINERYGSHDYEPVVLIDRPVPRFEKSAYYALAECCIVNAVRDGMNLVPYKYTVCRQGTPSMNKSLGVSDDLPRTSTLVLSEFIGCSPSLSGAIRVNPWDVDAVADSLYSAITMSDFEKQLRHKKHFHYISTHDVGYWARSFSQDLERASRDHYSKRCWGVGWGLGFRLVALSPNFRRLSIEQTVSAYRRSSKRAIFLDYDGTLVPETSIVKDPSAEVISALKALCSDPNNTIFIVSGRGKVSLSEWLAPCENLGIAAEHGYFTRWNKSSDWETSGLSDDLEWKKVVEPIMRLYTETTDGSNIEAKESALVWHHQDADPDFGSCQAKELLDHLETVLVNEPVIVNRGHQIVEVKPQGVSKGLVTGKILSRMLEDGIAPDFVVCIGDDRSDEEMFENISTTLSAQSSSMSTEIFACTVGRKPSKAKYFLDEVSDVVKLLQGLANTSSPKPRYPSHLRVSFESVV

SEQ ID NO: 2183 - protein, 268 aa, Pneumocystis carinii
MTSRENLVYLAKLAEQAERYEEMVESMKKVASSDQELTVEERNLLSVAYKNVIGARRASWRIVSSIEQKEENKGNLSQAGLIKEYRSKIESELTSICNDILAVLDAHLIASASTGESKVFYYKMKGDYYRYLAEFAVGDKRKAPSDASLAAYKEASDIAGTDLPPTHPIRLGLALNFSVFYYEILNSPDCACHLAKQAFDDAIAELDTLSEESYKDSTLIMQLLRDNLTLWTSDMQDSNEKNDSKEAVSEVPDPGKPSETEASKTDDI

SEQ ID NO: 2184 - protein, 302 aa, Oryza sativa Japonica Group
MSAAQGLALKLRAAPAAGGVRGEKRRRAASATAAAAARPRHGAMSLEGGFLGGALPAEDRVAPRASASRQAEAGAGAGAARPPPRSMSKIPESSIGLYDPSMERDSCGVGFIAELSGEYSRKTVDDAIEMLDRMAHRGACGCEKNTGDGAGILVALPHNFFREANLLEVTKDAGFELPPPGEYAVGMFFMPTDDKRREKSKLLFREKAELLGHTVLGWRRVPTDNSGLGQSAVDTEPVIEQVFVTKSASSKADFERQMYVLRRFSVMSIREVLGVKNGGTKDFYMCSLSSRFCVTIPLKNVV

SEQ ID NO: 2185 - protein, 1477 aa, Xylella fastidiosa Dixon; identical to SEQ ID NO: 531

SEQ ID NO: 2186 - protein, 303 aa, Escherichia coli
MTRKPRRHALSVPVRSGSEVGFPQSLGEVHDMLYDKSLERDNCGFGLIAHIEGEPSHKVVRTAIHALARMQHRGAILADGKTGDGCGLLLQKPDRFFRIVAQERGWRLAKNYAVGMLFLNKDPELAAAARRIVEEELQRETLSIVGWRDVPTNEGVLGEIALSSLPRIEQIFVNAPAGWRPRDMERRLFIARRRIEKRLEADKDFYVCSLSNLVNIYKGLCMPTDLPRFYLDLADLRLESAICLFHQRFSTNTVPRWPWRNRSAIWRITVKSTPSPVTANGRARTYKFQTPLIPDLHDAAPFV

SEQ ID NO: 2187 - protein, 272 aa, Escherichia coli
MLYDKSLERDNCGFGLIAHIEGEPSHKVVRTAIHALARMQHRGAILADGKTGDGCGLLLQKPDRFFRIVAQERGWRLAKNYAVGMLFLNKDPELAAAARRIVEEELQRETLSIVGWRDVPTNEGVLGEIALSSLPRIEQIFVNAPAGWRPRDMERRLFIARRRIEKRLEADKDFYVCSLSNLVNIYKGLCMPTDLPRFYLDLADLRLESAICLFHQRFSTNTVPRWPWRNRSAIWRITVKSTPSPVTANGRARTYKFQTPLIPDLHDAAPFV

SEQ ID NO: 2188 - protein, 1499 aa, Staphylococcus aureus subsp. aureus MRSA252; identical to SEQ ID NO: 533

SEQ ID NO: 2189 - protein, 1554 aa, Synechococcus sp. PCC 7335; identical to SEQ ID NO: 538

SEQ ID NO: 2190 - protein, 1574 aa, Sinorhizobium meliloti 1021; identical to SEQ ID NO: 543

SEQ ID NO: 2191 - protein, 456 aa, Oceanicola granulosus HTCC2516
MSQQGRLIVVSNRIPTEAAPSGGLVVALHEALESRGGIWIGSSGQVVDEPGGLKTLADDKYTRLAFDLTKAEHEGFYLGYANSVLWPLFHHRADLIDVDQGDRDQYMGVNARVAQLIAEVIEPNDVLWIHDYHFLPLAAELRKLGLDNRMGYFLHIPFPNPSDIAALPDRKQLPHWIAAYDLIGLQTQRDVSACLEWLRGDTAAEFTLRGRMKLDTRHFEVRSFPIGIDVDAFRDAAERADITITDLPTNQKLILGVDRLDYSKGLPNRFEAFGKYLSMRDKNLPHATMIQVAPPSREDVEAYKDIRVQLESMAGSVNGEHAELDWTPIRYLRRPLPRDVVAGLYRRADVCLVTPLADGMNLVAKEYVAAQDGADPGVLILSHFAGAAEQLDGALMVNPYDTVSMAEAIDQALKMDLHERRARWLSMMQVIRETDIDWWTNSFLRSLQNQPQMRVA

SEQ ID NO: 2192 - protein, 467 aa, Azotobacter vinelandii
MSRLVVISNRVAPIREGKIAAGGLAVGVYDALRQNGGIWFGWNGEVGQKPETACESAGNITYVTLGLSKPDYNEYYRGFSNATLWPIFHYRIDLARYSREEYLGYRRVNAMLAEKLKPLLRPDDILWVHDYHLIPFAAACRQLGIGNRIGFFLHIPFPTTEVLTAVPPHRDLFQTLCDYDLVGFQTESDRMAFQDYVCRELDGLIGTDGSLTACGRNFRAGVYPIGVMPDDIRRLADSYRGRRPMIGRTAEGKLRKTLISVDRLDYSKGLVERFLAYEQFLEHYPEHRRNVELIQIAPTSRTDVKTYRAIRKQLETVAGHVNGRLADLDWMPLHYLNKSLERRTLMGLFRTANVGLVTPLRDGMNLVAKEYVAAQNPADPGVLVLSRFAGAAHELGAALIVNPYDCLGMAEAMDRALRMPLEERKERYEDMMRALRAADLNAWRDNFLRDLRTFGRHRVVTASRAAV

SEQ ID NO: 2193 - protein, 250 aa, Burkholderia cenocepacia J2315
MQSVPASLSLTDTAFFFDFDGTLVELAPTPDSIHVPPSLLTLLDELSRRSHGAVAIVSGRGIDNLDTFLKMPDLPIAGLHGAERRDANGDTQRIGFNDERLLRIERELADVVDRHPGMLLEIKGAAVALHFRNAPEREAVAREAAERLVADYADAYVLQPGKMVFEIKPKGVDKGRALAAFLDEPPFAGRVPLFAGDDLTDEKGFAVVNARGGLSIKVGAGETSARMRLDSVDALHEQIACWLGAGQPHA

SEQ ID NO: 2194 - protein, 482 aa, Nocardioides sp. JS614
MKNVASSGSADLVIVANRLPVDRVPLGDGTAEWRRSPGGLVTAIEPVMRANDGSWIGWPGGTESDLEPFEDEGLDLVPITLTQQEVEEFYEGFANGTLWPLYHDVAAKPEFHREWWDAYVVVNRRFAEQAAAAASEGATVWVHDYQLQLVPQMLRELRPDLRIGFYLHIPFPPTELFQQLPWRRQLLEGLLGADLVGFQLPGAAQNFVRLVRQRVGHKTHRDLVYLPDGRTVRAAAFPISIDAKGFEDLARSEEVEKRAAEIRDALGNPSRIFLGVDRLDYTKGIYARLRAYSELLAQGDLDVEDAVFVQVATPSREQVEQYRILRDDIDRLVGRINGDLGRIGRPAISYMHASYPREEMAALYRAADIMVVTPYRDGMNLVAKEYVACRFDNDGALVLSEFAGAADELRQAWLVNPYDINGMKSALLEAYRADEKERTRRMKAMRKTVSQNDVAAWADSFLAELTAVRPSHGKTVRPARRS

SEQ ID NO: 2195 - protein, 461 aa, Burkholderia cenocepacia J2315
MSRLIIVSNRVAPISEGEPAAGGLAIGVYDALKETGGMWFGWSGEVVASGAPQPQIRIEERGPVTFATVGLSRRDYDQYYRGFSNATLWPAFHYRADLIQYDRHEFDGYRRVNVWLAQQLVPLLQDDDVIWVHDYHLIPFARALRDAGVKNRIGFFLHIPFPAAQVLVNVPPHRELVESLCAFDLLGFQTEPDLRAFCDYVEFEADGDVERDGHTVHVRAFGQTLRAAAYPIGVYPDEIASLAQAGEHGKAVRTLATSLRGRQLIMSVDRLDYSKGLVERFRAFEKLLEHQASIRNRVSFLQIAPSTRADLRAYQDIRLQLEAESGRINGRYAELDWAPILYIHRQYDRQVLAALYRLARVGFVTPLRDGMNLVAKEYVSAQNPDDPGVLVLSRFAGAARELTGALIVNPIDIDGMADALSQALTMPLAERRARYADMIAQLRENNVSVWRDNFLRDLQHV

SEQ ID NO: 2196 - protein, 69 aa, Triticum aestivum
MADWGPVVVATVLFVLLTPGLLFQLPAQGRIVAFGSMHTGGLAILVHAVIYFALITIFLIAIGVHIYAG

SEQ ID NO: 2197 - protein, 603 aa, Triticum aestivum
  misc_feature (550)..(550): Xaa can be any naturally occurring amino acid
RHFLSCCGRMLGLPYESKRGHICLEYYGRTVSIKILPVGVYMEQLNAVLALPETEAKVAELMETYTGNGRVVMLGVDDMDIFKGISLKLLAMEELLGQHPEWRGKLVLVQVANPARGRGKDVAGVQEETYAMVKRINEAYGAPGYEPVVLIDQPLQFYERVAYYVIAEVCLVTAVRDGMNLIPYEYVASRQGNDKLDRILRLCKPEEKKSMLVVSEFIGCSPSLSGAIRVNPWNIEAVADAMECALVLPEKEKNLRHDKHYRYVEKHDVGYWANSFLQDLERTCKDHSNRRCWGIGFGLRFRVVSLDLSFRKLAMEHIVQAYRRSKTRAILLDYDGTLMPQAINKSPTAKSVQILNSLCQDQRNAVFLCSGFKRCTLDEWFPAENLGMAAEHGYFMRLKRDAEWETCIPPADCSWMQIAKPVMELYTETTDGSIIEERDTVLVWNYEDADPDFGSCQAKELVDHLESVLTNEPVSVKSTVHSVEAKPQGVSKGLVARRMLAALQERGMCPDFVLCIGDDRSDEDMFQFITSASCADSFASTAEVFACTVXGRKPSKAKYYLDDTAEVVRLMQGLAYVSEELALQNPALGEEDPEDLWCVGELQ

SEQ ID NO: 2198 - protein, 541 aa, Bradyrhizobium japonicum USDA 110; identical to SEQ ID NO: 564

SEQ ID NO: 2199 - protein, 202 aa, Zea mays
  misc_feature (37)..(37): Xaa can be any naturally occurring amino acid
  misc_feature (57)..(57): Xaa can be any naturally occurring amino acid
AISRHDHDYHLMVLPTFLHKQFNRIKLDFFLHSSFPXSEIYKTLPVREELLRALLNXDLIGFHTFDYARHFLSCCGRMLGLSYEFKRGHIRLEYYGRTVSIKILPVGVHMEQLKTVPEVMSGCQQYQFYCDLLAQPEADAIGVAFSDDWIFVGSVSKQLIVVFDFWFVRCQILRSGRYIVPKWSNRMTYSSSNSFPSVACHV

SEQ ID NO: 2200 - protein, 808 aa, Physcomitrella patens subsp. patens
MSEGSRMLVVARMLPLNAVPHPNGNSYLFEWDKDSLLWQLRDGLRPGMEVIYVGCLKVEVEDADQDEIAAMLLENFNCVPAFLPNELKSRFYHGFCKQMLWPLFHYLLPLSPEHGGRFKRSWWQAYVSVNKIFADKVMEVISPDDDYVWVHDYHLMVLPTFLRKRFNKVRLGFFLHSPFPSSEIYRTLPVRDEILRALLNADLIGFHTFDYARHFLSCCSRMLGLEYASKRGHIGLEYYGRTVGIKIMPVGIHMGQFDASLKLADTKWRIGEIREKYKGMSVLLGVDDMDIFKGIGLKFLAMEELLRQHPQWQGKVVMIQIANPARGSGKDIDEAREEAYTIAKKVNEEFGNERYTPIVLEERHVPLFERIAYYTIAECCVVTAVRDGLNLIPYEYIVCREGAPQMSESENYLEESSVKKSMLIVSEFIGCSPSLSGAIRVNPWNIEMVAEAMNSAITMKEQEQHLRHEKHYRYVSTHDVAYWAKTYTSDLERTCRDHNKRRCYGIGFGLGFRIVALDPSFKKLRTELIVGAYGKSATRALLLDYDGTVMPTSHEESPSPEVLDLLNTLCNDPKNTLFIVSGRPRNKLGEWFSSCELLGLAAEHGYFYRYKWDRLSVVEREAPSTSFDWKLIAGPVMQLYTESTDGSYIEAKESALVWHYRDADHDFGAWQAKELQDHLESVLANEPVTVKSGAQIVEVTPQGVSKGIMVEKLLLMMEKKNGALPDMVLCVGDDRSDEDMFESIESLMRGAPSAEVFACTVGQKPSKAKYYLDDVGEVIKMLQGLANASIRSSASSLPQLSDFSSLHI

SEQ ID NO: 2201 - protein, 1527 aa, Prochlorococcus marinus str. MIT 9313; identical to SEQ ID NO: 567

SEQ ID NO: 2202 - protein, 373 aa, Populus trichocarpa
MTNQNVVVADTNSGINLAITVHVTNSSIFTTAAQKPPAAPGGYISISRKKLLKNLEISGGARFNAWVNSMRTSSPTHVKSTPSANDDQSSWILHHPSALEMFEQIIDASKGKQIVMFLDYDGTLSPIVDDPDRAFMSKKMRATVRKLARFFPTAIVSGRCRDKVYNFVRLAELYYAGSHGMDIKGPAKGSKYKKGSEGVVFQAGSEFLPMIDEVYKELVEKTKTTPGAKVENNKFCLSVHYRCVDEKKWSGLAQVVKSVLKEYPKLRLTQGRKVLEIRPTIKWDKGKALEFLLESLGFANCTDVFPVYIGDDRTDEDAFKVLRERGQGFGILVSKFPKDTSASYSLQEPTQVMDFLQRLVQWKRLAFQGQSRV

SEQ ID NO: 2203 - protein, 278 aa, Zea mays
MLSVSASDGDRSPCPVEARRIVVTHRLPLHAEPNPDAPYGFDFSLDADALPLQLARGLPRPVVFVGALPSAAASISASEELEADLLARFGCSPVFLDPGLHKDFYDGFCKRYLWPMLHYLLPFTLTPFFGSGGLKFKANLYRAYLTANTQYAERVLEQLNPDEDLVFIHDYHLLALPTILRHKSPRARIGFFLHTPFPTSELFRTVPVREDLLRSLLNADLVGFHNYDYARHFLSACTRLLGVTSHTHRGYISIDYCGRSRVSLEGAQAYAYPAFCTK

SEQ ID NO: 2204 - protein, 188 aa, Arabidopsis thaliana
MLVYGILNDAFHGGWEPSSSSSDEDRSSFPSVKIETPESFAAVDSVPVKKEKTSPVSAAVTAAKGKHYRGVRQRPWGKFAAEIRDPAKNGARVWLGTFETAEDAALAYDRAAFRMRGSRALLNFPLRVNSGEPDPVRIKSKRSSFSSSNENGAPKKRRTVAAGGGMDKGLTVKCEVVEVARGDRLLVL

SEQ ID NO: 2205 - protein, 1579 aa, Bordetella pertussis Tohama I; identical to SEQ ID NO: 575

SEQ ID NO: 2206 - protein, 469 aa, Zea mays
LVPVRNSRDDQPLQFYERMAYYVVAECCLVTAVRDGMNLIPYEYVIARQGNERIDSILGLGPASRKKSMLVVSEFIGCSPSLSGAIRVNPWNTDRPADAMDYALEMPEGEKVLRHEKHHRYVSTHDVGYWANSFLQDLERICLDHNRRRCWGIGFGLKFRVVALDPNFKKLAVEHLVSAYRRTKKRVILLDYDGTLMPQTSLGKSPTSRTIDMLNSLCRDRNNMVFLVSAKSRMTLNEWFLPCESLGLAAEHGCFLRLRRDAEWETCVPVIDCSWKQIAEPVMKTYTETTDGSTIEEKETAIVWCYEDADPDFGSCQAKELHDHLESVLANEPVSVKAGPNLVEVKPQGVSKGLVAKRILSTTQEQRGDDDDDLPDFVLCVGDDRSDEDMFEVIAAAAAARGVSSLQAEAEVFACTVGRKPSKAKYYLDDPADIVRLVQGLASVSDDDQTHAPPPPPPSVATTTDTVPR

SEQ ID NO: 2207 - protein, 791 aa, Physcomitrella patens subsp. patens
MDQAASGKAMPLIPSEKSDPNSEVESELLQAFYAIPSLDKAWTIPSRKEEGGFDVAVAMSQANLPANAKRTFLSTVYIAETADDTITDYHWAPFPFEVSGASLIVPSPSGAKVLIIRNPKDATSPTRLQIWGPGQLLREIYVSSSVHGSIYGDGWFEGVSWSHHEEFISYVAEEPANSRPVYGPTASTSGTNHTGAPEAGNWKGQGDWYEDWGECYSGKRRPVLFVANVGSGVVQVVEGIPRDLSAGQVVWVPEVVSSDPTSPLSLVFVGWSSFADNFSTPRKLGMKHCFNRPCHLYHVEAPVPGTEPSNAAPVAVKLTGTISSAFSPRFSPNGKMLVFLSAETAVSSGAHNATNSLHCINWPADGIVCKQKQIKDVVKVVQHAEDGAFPGLYCSSLIVNPWLNGSSTLLLSSSWRSQQVILGIDIVSGDVSTVSPSDSLASWNLLGMHNSCVVAVVSSPTQPQNLKLGHIASPDSLIRSGKEWNWSNINLPSLQFSAKVESAMRAMKYEILRVPAPMTDPLKSMSEGSGQSFEAIFVSPTGSINSPTEEPRIESIPSLVVVLHGGPHTVSQTSFSRNTAFLSALGFSLLHVNYRGSLGFGEEALQSLLGNIGRQDVSDVLAALDLVIRNGMADPARVAVLGGSHGGFLATHLVGQAPDRFTTAITRNPACNLSSMVGITDIPDWCYVEAFGKDGVANYTEAPSTKDLSVLYRCSPIAYLSKVKVPILFLLGAQDRRVPVSNGFQYVQALRARGQEVKVILFPEDVHAIDRPQSDFESFLNIGVWLKRFMH

SEQ ID NO: 2208 - protein, 315 aa, Glycine max
  misc_feature (59)..(59): Xaa can be any naturally occurring amino acid
ACKDHYTKRCWGFGLGLGFRVVSLSHGFRKLSIDHIVSAYKRTNRRVIFLDYDGTVVPXSSISKTPSPEVISVLNALCNNPKNIVFIVSGRGRDSLSEWFTSCQMLGLAAEHGYFLRWNKDSEWEASHLSADLDWKKMVEPVMQLYTDGEKTTEGEVKESALVWHHQDADPDFGSCQAKELLDHLESVLANEPAAVTRGQHIVEVKPQGISKGLVAEQVLMTMVNGANPPDFVLCIGDDRSDEDMFESILRTVTCPSLPSAPEIFACTVGRKPSKAKYFLDDASDVVKLLQGLAASSNPKPRLLAHSQVSFESTV

SEQ ID NO: 2209 - protein, 316 aa, Zea mays
MIMMPSETRRFRSTGSSAPPTTVRPSVLPATPIRRPVPSHHTLPPLAAMSPSEPTREESVYMAKLAEQAERYEEMVEFMERVARSAGGAGGGDELSVEERNLLSVAYKNVIGARRASWRIISSIEQKEEGRGNEAHAASIRAYRSKIEAELARICDGILALLDSHLVPSAGGAESKVFYLKMKGDYHRYLAEFKSGAERKDAAESTMNAYKAAQDIALADLAPTHPIRLGLALNFSVFYYEILNSPDRACKLAEQAFDEAISELDSLGEESYKDSTLIMELLRDNLTLWTSDTNEDAGDEIKEAAAAPKESAPEGQ

SEQ ID NO: 2210 - protein, 133 aa, Brassica napus
SVRNPLSPDLGGRFDRSLWQAYVSVNKIFADRIMEVINPEDDFVWIHDYHLMVLPTFLRKRFNRVKLGFFLHSPFPSSDIYRTLPIIEELLRALLNADLIGFHTFDYARHFLSCCSRMLGLTYESKRGYIGLE

SEQ ID NO: 2211 - protein, 294 aa, Zea mays
MLLNPACEAAAPMDSIRHHLLDEPAAAATASAAPRPVYCRSTSFGSLVADQWSESLPFRPDDADDMVVFGALRDAFSQGWLPDGSFAAVKPEPLAFPDSPYERGSYPCLGGFLLAEGPETPTEAATTPGSEEEAAAAVSRGKHYRGVRQRPWGKFAAEIRDPAKSGARVWLGTYDSAEDAAVAYDRAVFRMRGSRALLNFPLRIGSEIAAAAAAVAATAPAAGDKRASPEPTASSDSSPSASSATPKRRKRGEAAAATMAMALVPPPPAAQAPVQLTLPARPWFAAGPVQQLVS

SEQ ID NO: 2212 - protein, 232 aa, Triticum aestivum
ARGDYHLMLLPQMLREEIGESKKNVKIGFFLHTPFPSSEIYRILPVREALLTGLLDCDLIGFHTYDYARHFLSSCSRILECPTTPNGVDWNGRFVTVGAFPIGIDPDNFVEGLKKPKVQERIAALSRKFEGVKLVVGVDRLDYIKGVPQKLHALEVFLTEHPEWIGKIVLVQVAVPSRQDVEEYQNLRAVVNELVGRINGKFGTIEFMPIHFLHQSVNFDELTALYAVSDVC

SEQ ID NO: 2213 - protein, 764 aa, Arabidopsis thaliana; identical to SEQ ID NO: 1662

SEQ ID NO: 2214 - protein, 266 aa, Arabidopsis thaliana
MTADSQSDYAFLESIRRHLLGESEPILSESTASSVTQSCVTGQSIKPVYGRNPSFSKLYPCFTESWGDLPLKENDSEDMLVYGILNDAFHGGWEPSSSSSDEDRSSFPSVKIETPESFAAVDSVPVKKEKTSPVSAAVTAAKGKHYRGVRQRPWGKFAAEIRDPAKNGARVWLGTFETAEDAALAYDRAAFRMRGSRALLNFPLRVNSGEPDPVRIKSKRSSFSSSNENGAPKKRRTVAAGGGMDKGLTVKCEVVEVARGDRLLVL

SEQ ID NO: 2215 - protein, 1154 aa, Gibberella zeae PH-1
MPQRSKQNQSLTGSVPDPLQIASSNATLNTFLGGRTHSWMTRGSSIVTNPRPAAPVAPSNSRKRNKKRKASDTAPPTQNDNDVERDNILPVQSPEQPPGTRETTRAPTVLPSPALTDAPSPNGSNQVASANPDSSAHVETVGPGWPVSNSNMRQGDLTHVATNPNQLNNAPAAFAQAESSFPQQARNAEIATSSTVANPTTATQPLQRSNVWFGAGNVQHSSAEPSRPNPRVRSRPSVDSEPSEHRDKRPRVQGRSSPELTFNQKLCRDWFKSIERRVEYVSRAGLLNDNVEKPRYRILGEACQNEDFFYVALHQALCAWTLNKEPVHHLFDGLMAPNTLDRAFEIIQTIVRRNDNMSAVHLQWFANFPTSIAEFSRVFPHTTSAAEISAFLIQMIQHWQALLQSVQARKYPLLAYEMIHVLQCRPRGLQCMLFTMSRRTLSVNDGPAAHAMNEIYEQDRLDEITYEARGERHEALRVRREAVAMRYRQVILASQPRIPPNTISSPVVGQNSPVLEQNWQQPAARSPLATTASSHAANTTAPPVSLPNFDVLAARVSTGGPGATSPMPINQALPQGSRSLQGARRPNHLHIQTETQAVPPIPAPSNQSPLAQIHPLPRSSSAGSPVMLQQTRALQSNGQVRTPVLPSSNLLPQRRASSFAFPPPTFPSPGFPSAHGTNAHSPPMHPHSPGFQQVRGQAQMTYPHHAQAVQSPRHLPIYPPTSPPRSASASENLNYAAQMTAPPAVPYQVPVTANNSRQPVPPVQHMSETEYPPSPYGQESLRVGLHQIDVRSPRRVPSHPGKDRFYQFVKQLVYEPMHLEPSIGLRSLPFTVPEDYIRRLTKKNEGTGFPFCYYAEGSYRYRLRMCMQPETQPAPTESDWVITATSWPSHIFFQLNKKHLEIRRKQHFNKDQPLELTDFLHEGDNFLRFSYPPGNQNMTPGYRYFMAIEIVETISHDAVCNVVRSIRRFPPGETMAKIQRRLRPSDSDDIIIEDETLSISLADPFSATRFLEPVRGLQCKHLECFDLETWLHTRPSKPPQKGGGPQQKGDEPSMVDVWKCPICSLDARPVSLWIDEYFSGVRQSLVSNGDMQTKSITVTANGRWAPVLDADDTDDDSTPAPRPRNTVNGNAGKQPSTSAVSVVPDVIEILDDDD

SEQ ID NO: 2216 - protein, 1567 aa, Burkholderia sp. 383; identical to SEQ ID NO: 588

SEQ ID NO: 2217 - protein, 886 aa, Gibberella zeae PH-1
MAANSENNGSEPTLRRRESLSEIRAANPDLALSGNIISATFNTPHSFVYRKGGDWDLKSRRGQSALFDSFAYLSSDATPWNHTVVAWTGEIDAPTDDVVSLPGTPAPNTLGATSLNALSAPVPIDGNTRLPTPPPVDGLWVPREDQDRLEYRLSHNKTIRTYPVWLSDESEATSEGILLKDQARWRRYAEHDLYTLLHYKQHEPTDGRRERVQWADYYRMNQKFANKIIEIYKPGDIVIVHDYFLMLLPSMLRQRVPNMYISFFLHSPFPSSEFLRCLPRRKEVLEGVLGSNLIGFQSYSYSRHFLSCCTRILGFPSDTLGIDAYGTRVQVGVFPIGIDAAKVENFAWTDAVTEKCNALRQLYRGKKIIVGRDRLDSVRGVAQKLQAFERFLEMYPEWREKVVLIQVTSPTSVEAEKEDLEDDTKVATRVNELVMRINGMYGSLGFSPVQYYPQYLSQNEYFALLRASDMGLITSVRDGMNTTSLEYIICQKVGNAPLILSEFSGTASSLGDAIHINPWDLSGVAEKINAALTMSDDKRQEMQSRLYRHVTEHNVQSWITKFIRKVYNVLGDTSSANSTPLLDRALLLTQYRSANKRLFMFDYDGTLTPIVREPSAAVPSQRLIHTLDLLAADPKNAVWIISGRDQEFLKQHLGNNTRLGFSAEHGSFMKHPGSDEWENLAETFDMGWQAEVMEVFQKYTDRVQGSFIERKRCALTWHYRLADPEQGIHMSRECHKELESTVASKWDVEVMPGKANIEVRPTFINKGEIAKRLITMYHTPGTADDNDGNGHLEFALCMGDDFTDEDMFRSLNAASGPVLDANHVFTVTIGASTKVTLAKSHLLEPEDVIECVALLAGVQDQGERLGEVNLGALSAVEGHVPEQQEM

SEQ ID NO: 2218 - protein, 1472 aa, Azospirillum brasilense; identical to SEQ ID NO: 595

SEQ ID NO: 2219 - protein, 1548 aa, Nocardia farcinica IFM 10152; identical to SEQ ID NO: 604

SEQ ID NO: 2220 - protein, 261 aa, Emericella nidulans
MGHEDAVYLAKLAEQAERYEEMVENMKVVAASDVELTVEERNLLSVAYKNVIGARRASWRIVTSIEQKEESKGNKSQVALIKEYRQKIEGELAKICQDILDVLDQHLIKSAQSGESKVFYHKMKGDYHRYLAEFAVGDNRKAAADASLEAYKSATEVAQTDLAPTHPIRLGLALNFSVFYYEILNSPDQACHLAKLAFDDAIAELDTLSEESYKDSTLIMQLLRDNLTLWTSSEAEPAAENAPAEKKEEAPAAEGEEKPAE

SEQ ID NO: 2221 - protein, 1506 aa, Leuconostoc mesenteroides subsp. mesenteroides ATCC 8293; identical to SEQ ID NO: 610

SEQ ID NO: 2222 - protein, 1477 aa, Cyanidioschyzon merolae strain 10D; identical to SEQ ID NO: 611

SEQ ID NO: 2223 - protein, 594 aa, Prunus persica
MSNCTLPETQEKLTLPDAWDFKGRPAERSKTGGWTAAAMILGGEACERLTTLGIAVNLVTYLTGTMHLGNATSANTVTNFLGTSFMLCLLGGFVADTFLGRYLTIAIFATFQAMGVTILTISTTIPSLRPPKCTSDTSTPCIPASGKQLMVLYIALYLTALGTGGLKSSVSGFGSDQFDESDKQERRQMTNFFNWFFFFISIGSLAAVTVLVYIQDNLGRQWGYGICVCAIVLGLIVFLSGTRRYRFKKLVGSPLTQISGVCVAAWRKRNMELPSDMSFLYNVDDIDDGLKKKKKQKLPHSKQFRFLDKAAIKEPKTTSGTAMIINKWSLSTLTDVEEVKLIIRMLPIWATTIMFWTVYAQMTTFSVSQATSMDRHIGKSFQIPPASLTAFFVGSILLTVPVYDRLIVPMARKALENPQGLTPLQRMGVGLVFSIFAMVAAALTEVKRLNIARSHGLTDNPTAEIPLSVFWLVPQFFFVGSGEAFTYIGQLDFFLRECPKGMKTMSTGLFLSTLSLGFFFSSLLVTIVHKTTGHNKPWLADNLNQGKLYDFYWLLALLSALNLVIYLFCANWYVYKDKRLAEEGIELEEPEICA

SEQ ID NO: 2224 - protein, 824 aa, Oryza sativa; identical to SEQ ID NO: 1316

SEQ ID NO: 2225 - protein, 260 aa, Oryza sativa Japonica Group
MSPAEASREENVYMAKLAEQAERYEEMVEFMEKVAKTTDVGELTVEERNLLSVAYKNVIGARRASWRIISSIEQKEESRGNEAYVASIKEYRSRIETELSKICDGILKLLDSHLVPSATAAESKVFYLKMKGDYHRYLAEFKSGAERKEAAENTLVAYKSAQDIALADLPTTHPIRLGLALNFSVFYYEILNSPDRACNLAKQAFDDAIAELDTLGEESYKDSTLIMQLLRDNLTLWTSDNAEDGGDEIKEAAKPEGEGH

SEQ ID NO: 2226 - protein, 202 aa, Melampsora medusae f. sp. deltoidis
LDQELTIEERNLLSVAYKNVIGARRASWRIVSSIEQKEESQAKGNESQLGQIKAYRDKIEAELAKICEDILEVLDGHLIKSAESGESKVFYHKMKGDYHRYLAEFATGDKRAVSSDASLEAYKAASSIATVELPPTHPIRLGLALNFSVFYYEILNAPDKACQLAKQAFDDAIAELDTLSEESYKDSTLIMQLLRDNLTLWT

SEQ ID NO: 2227 - protein, 83 aa, Melampsora medusae f. sp. deltoidis
EAYKAASSIATVELPPTHPIRLGLALNFSVFYYEILNAPDKACQLAKQAFDDAIAELDTLSEESYKDSTLIMQLLRDNLTLWT

SEQ ID NO: 2228 - protein, 1481 aa, Pseudomonas aeruginosa PAO1; identical to SEQ ID NO: 635

SEQ ID NO: 2229 - protein, 177 aa, Melampsora medusae f. sp. deltoidis
LDQELTIEERNLLSVAYKNVIGARRASWRIVSSIEQKEEAKGNESQLGQIKAYRDKIEAELAKICEDILEVLDGHLIKSAESGESKVFYHKMKGDYHRYLAEFATGDKRAVSSDASLEAYKAASSIATVELPPTHPIRLGLALNFSVFYYEILNAPDKACQLAKQAFDDAIAELDTL

SEQ ID NO: 2230 - protein, 187 aa, Melampsora medusae f. sp. deltoidis
LDQELTIEERNLLSVAYKNVIGARRASWRIVSSIEQKEEAKGNESQLGQIKAYRDKIEAELAKICEDILEVLDGHLIKSAESGESKVFYHKMKGDYHRYLAEFATGDKRAVSSDASLEAYKAASSIATVELPPTHPIRLGLALNFSVFYYEILNAPDKACQLAKQAFDDAIAELDTLSEESYKDSTL

SEQ ID NO: 2231 - protein, 160 aa, Melampsora medusae f. sp. deltoidis
KGNESQLGQIKAYRDKIEAELAKICEDILEVLDGHLIKSAESGESKVFYHKMKGDYHRYLAEFATGDKRAVSSDASLEAYKAASSIATVELPPTHPIRLGLALNFSVFYYEILNAPDKACQLAKQAFDDAIAELDTLSEESYKDSTLIMQLLRDNLTLWT

SEQ ID NO: 2232 - protein, 1482 aa, Shewanella oneidensis MR-1; identical to SEQ ID NO: 643

SEQ ID NO: 2233 - protein, 722 aa, Zea mays
  misc_feature (280)..(280): Xaa can be any naturally occurring amino acid
  misc_feature (612)..(612): Xaa can be any naturally occurring amino acid
MALVHSRFSTNTFPSWDRAQPMRVLGHNGEINTLRGNKNWMTAREGLLECKGLGLSRDEMSKLLPIVDVTSSDSGAFDNVLELLIRSGRSLPEAVMMMIPEAWHNDVNMDPEKKALYEYFSALMEPWDGPALVSFTDGRYLGATLDRNGLRPGRFYVTYSGRVIMASEVGVVDVPNDDVMRKGRLNPGMMLLVDFEKHCIVDDDALKKQYSGARPYGEWLERQKIQLADIIESVSETERIAPRIGMLPQKSENKEAFCIHGILAPLKAFGYTVETLQMLXLPMAKNGVEALGSMGNDTPLAVMSNREKLPFDYFKQMFAQVTNPPIDPIREKIVTSMECMIGPEGDLSETTEHQCHRLKLQGPLLHIDEMEAIKNMNFRGWRSKVLDITYPKEYGREGLEQTLDKLCDQAREAIHEGYTILVLSDTGFSPDRVAVSSLLAVGAVHQHLVLNLERTRIGLLVDSAEPREVHHFCSLLGFGADAICPYLAIEAIWRLQIDEKIPLQDDGQLYPKELIDKYFYASNNGIMKVLAKMGISTLASYKGAQIFEALGLASEVVSKCFEGTPSRVEGSTFEMLAQDALHLHELAFPSRTLPPGSAEANSLPNPGDHHWXKNGEVHLNDPFSIAKLQEAARLDSREAYKEYSRYTQELNKSCTLRGMLKFRETPVRISLDEVEPASEIVKRFCTGAMSYGSISLEAHTTMAKAQNIMGAKSNTGIFHHGR

SEQ ID NO: 2234 - protein, 720 aa, Xylella fastidiosa Ann-1; identical to SEQ ID NO: 648

SEQ ID NO: 2235 - protein, 87 aa, Brassica napus
  misc_feature (4)..(4): Xaa can be any naturally occurring amino acid
RVQXEIVKIQRVTSPVGQTQLKSLIQSHVEKTGSSKGAAIVEEWDKYLGMFWQLVPPSEEDTPEANSDHHLKTTAGEEEQVSNTFAV

SEQ ID NO: 2236 - protein, 762 aa, Xylella fastidiosa Ann-1
MLYDASDERDACGFGMVAQLDDQPSRALLEIAIAALSRMTHRGGVAADGLTGDGCGLLIRKPDAFLRALACEAGIALGPRYAVGMVFLPGERAAAAHCRQVLEAELQRVGVRLCGWREVPINRSVCGQLARDTLPHIEQVFVDIDPKHSEDAFGVALFLARRRAERQLCDYHDFYVATLSPYAISYKGMVLPDKLPVFYPDLQRSELSSSVIVFHQRFSTNTLPRWPLAHPFRLLAHNGEINTIEGNRRWAQARSKVWQSPRFDMAEFDPVISMKGSDSQSLDNMLELLIAGGMDLLQALRILVPPATRTLEFKDADLASFYEFYGLNTEPWDGPAGIVAYDGRYAACMLDRNGLRPARWMLTADRHFLVASEAGVWELPVERVIRKGKLGPGEMMAIDLKRGDLLDSDAIDRINRARAPYKQWLQQGVTYLQTELIDPSLVEEPFSDQTLCSYQKLFQLSTEEVEQVLRPLAETEQEAAGSMGDDTPMAVLSAQIRPLYDYFRQAFAQVTNPPIDPLRESIAMSLTTQLGRETNIFHAGPETVNHVILDSPVLSQRKLRQLLKMPQYLEKNRLIDLSYTVEEGLQAGLKRMCDEAEQAARDGIVMLLLSDRYPVPERPMAHALLATGAVHHHLCRVGLRCDVNLIIETGTARDPHHMACLLGFGATAVYPYLSYQMLFNLGRRGILKLQKAGEQSQIGRSYRKGIYKGLSKIISKMGICTIASYRGAQLFEIVGLDPDVVALCFPGHSGEDRRCELDAVAY

SEQ ID NO: 2237 - protein, 480 aa, Rhodococcus opacus
MKDTAPYGTSDFVVVANRLPVDMETLDDGTTRWKRSPGGLVTALEPILHDRERGSWVGWPGVPDTKVEPIVSGGIDLYPVELSSTEVSLYYEGFSNATLWPLYHDVLVAPVFDRDWWHSYLDVNRHFAEETARTAAEGATVWVQDYQLQLVPRLLREMRPDLTIGFFLHIPFPPVELFMQLPWRKEIVEGLLGADLIGFHLPGGANNFLFLARRLLGLDTTTAGVGVRSALGRVTLDDRVVQVGAFPISVDSRQLVEQATDPAIVERAAEIRRELGTPAKILLGVDRLDYTKGIDLRLSALGELLDEGRLDPSDTVMVQLATPSRERVEHYMKMRSSIEEQVSHINGDHGQIGRPVVHYLYQPVDRSELIALFLAADVMLVTPMRDGMNLVAKEYVACRADLGGALVLSEFAGAAAELRGAYLVNPHDLDGVKNTIMAALDPEREQGRRRMSRLHRQVLDHDVHRWAQSFLGALSPVAGD

SEQ ID NO: 2238 - protein, 1481 aa, Saccharophagus degradans 2-40; identical to SEQ ID NO: 653

SEQ ID NO: 2239 - protein, 495 aa, Rhodococcus opacus
  misc_feature (48)..(48): Xaa can be any naturally occurring amino acid
MAASSESSASSSRSTSDPVSGQADFVVVANRLPVDLERLPDGTTRWKXSPGGLVTALEPILRRNKGAWVGWAGVADAELDPVVEDDLELYPVPLSAAEIADYYEGFSNATLWPLYHDVIVKPEYNRDWWNAYVEVNRRFAEATSKAAAHGATVWIQDYQLQLVPKMLRMLRPDLTIGFFLHIPFPPVELFMQMPWRTEIIEGLLGADLIGFHLPGGAQNFLYLARKLAGQQTSRGNVGVRSKLGVVQVGFRTVRVGAFPISIDSGQLDEQSRSKSIRDRAKKIRKELGNPKHIMLGVDRLDYTKGIDVRLAALHELLDEQRIDPADTVMVQLATPSRERVDSYVQMRDDIERKVSRINGEYSEVGRPVVHYLHRPIPREELIAFFVAADVMLVTPLRDGMNLVAKEYVACRSDLGGALLLSEFTGAAAELRQAFLCNPHDLDSVKDAMKQALNQPQKDGRRHMRALRRQVLAHDVDRWARSFLDALAHGAPPARH

SEQ ID NO: 2240 - protein, 1487 aa, Alcanivorax sp. DG881; identical to SEQ ID NO: 660

SEQ ID NO: 2241 - protein, 1517 aa, Shigella flexneri 2a str. 301; identical to SEQ ID NO: 670

SEQ ID NO: 2242 - protein, 875 aa, Chlamydomonas reinhardtii
MWWFAGRLIIVSNHLPLRVKRATTSWEFEWDEDALVGQAKATGGIPSDLEVMYVGSLPVDVALEEQDAVAAQLKRLYNCCPVFMEKELKEKFYKGCCKQQMWPLFHYVLPMSPESSGRFDQEMWQAYVKANKAEAGDTVSCGWRGTWAVGSPHAHTLSLPRVLFQYMCAQQPLNCPSSLPLTTPSHSPPSPRPPLNTLTLLLPTGFHTFDYARHFLSCCSRMLGLEHETSRGSITIDYYGRTVGIKIMPTGVNPKRYLDGFSWDEFNGRGGWWVVATQGWVNHAAGSPWDSQKGVELKLLALERLLDTHPEWRGQLVLVQITNPPRSTGRDIAELHRCVLGLVDSINRKYGKGSYQPVQYLERHVPLHERMAFYSIADCAVVTATRDGMNLVPYEYVVCRQGPDGWDGGAAAGGAPGGGGSKRESMLVVSEFVGCSPSLSGAIRVNPWSVDRGERAGRVVYPSPTGGGRARGHVATRMVSFHPFVSTVAHRASVSPHRANGVTNNHLAMNCYRLGLGLDTFPMVALDANFKRLEELAVAAQLRKLGSHFRAFFLDYDGTLTGASPLSASAAASAASSSSGLTAGGHHGPGGLAPAEPLLAVLRALVADPRNRVFLFSSSPKADLTQWFASIPSLGLVAENGFFLRAIGSAAWETAVPHADFSWKRMAAPILQQYVESTDGSSVEAKESALVWHYRDADPDFGAWQAKELLDHLEGALSNKPVEIVGGQGYVEIKPQGVSKGRALERLLAAASAPASAPAAPAAAAAAASPPPAPSPSSSPAHGGLVGPRPAGAGSAAGGLGGPDFMLCVGDDRSDEDMYTSIENMKSLPTMTAEVFACTVGQKPSRAPFYLNDPVEVLQLLARLVNVPLTQQPVN

SEQ ID NO: 2243 - protein, 523 aa, Zea mays
MSGSLVLGGTGGGEGMQYVPLVKSAAGDKLSYDMYYYLALRGMTVGGKAVQLLAWEFATNAAGSGGAIMDSGTTFTYLDPTVFQPVADTVVTVVGGRYKRSKNTEVGLGLHPYFALPQGASQPTDKPFRTEHMRRLEFAFWFKEKLFGKTGQARTVRALAADRPRHKDDPQTEPMQKHKFPLQTVRRKSKDRPSPRADRPASGADRPVGSEACCSAMLTAQGKASRSAPLGAGRWARRGRPVAAPYRSGWQAYGGVSLEGSEFLGGMHRTEERVVPRAPHAAARDAEVVRPLSKLPNSSIGLYDSSFERDACGVGFVAELSGDYKRETVNDAIEMLERMAHRGACSCEKNTGDGAGIMVALPHDFFKEVAKDAGFELPPPGEYDVGMFFMPTDEKRREKGKAEFKKVAESLGHTISYFWARSISYFWGSIQLMGEVLTEPVIEQVFVTKSSRSEAEFEQQTVVYKGQLKPSQLKGYYYADLGHENFMSYMALSPAVVLLWPTAMPDSSGCDLRLGGGKEMCLV

SEQ ID NO: 2244 - protein, 200 aa, Melampsora medusae f. sp. deltoidis
LDQELTIEERNLLSVAYKNVIGARRASWRIVSSIEQKEEAKGNESQLGQIKAYRDKIEAELAKICEDILEVLDGHLIKSAESGESKVFYHKMKGDYHRYLAEFATGDKRAVSSDASLEAYKAASSIATVELPPTHPIRLGLALNFSVFYYEILNAPDKACQLAKQAFDDAIAELDTLSEESYKDSTLIMQLLRDNLTLWT

SEQ ID NO: 2245 - protein, 71 aa, Melampsora laricis-populina
QLAKQAFDDAIAELDTLSEESYKDSTLIMQLLRDNLTLWTSDLNDSVPEDKEDKPAEPAAAPEAAEAAPEA

SEQ ID NO: 2246 - protein, 624 aa, Zea mays
KKHSIAEEAITDHPSRFEAFPYFWREKPPRTTASEAAFMESSLVEERRQNLLVRATEPEDLARYTGDGSVDFRGFPILKHNTGNWRACSLILGTEVCERLAYYGISKSLVTYLSTRLHEGNVSAARNFTTWQGTCYLTPLIGATLADSYWGKYRTIAVFSTIYFLGMSALTLSASVPSFQPPQCVGSICPQPTLSQYLLYFVGLYMIALGAGGIKPCVSSFGADQFDDTDPVEKAKKGAFFNWFYFCINIGSLISGTVLIWVQENCGYSIGFGIPTFFIALAIGSFFIGSDIYRFQIPGGSPLTRACQVVVAATHKRKTDLPVDSSLLYELDGKTSAIEGSRKLEHSSEFSFLDKAAVILWNECDGPRNSWRLCTVTQVEELKILLRMFPIWATGIVFFTVCAQNSSMFIEQGMTLDNQIGPFKIPAATLSSLDVISVVVWVPIYERLVVPIARRFSGKERGFSELQRMGIGLFVSTVAVAVAALVEINRLQVAVAEDLVHQKVPVPMSILWQAPQYLLVGVGEVFTSIGQAEFFYNQSPDAMRSLCSAFALVTVSLGSYLSSFILSLVSYFTTRNGQLGWIPDNLNEGHLDRFFWLIAGLSSLNFLVFIYYAQQYKCKIASVA

SEQ ID NO: 2247 - protein, 127 aa, Melampsora laricis-populina
TGDKRAVSSDASLEAYKAASSIATVELPPTHPIRLGLALNFSVFYYEILNAPDKACQLAKQAFDDAIAELDTLSEESYKDSTLIMQLLRDNLTLWTSDLNDSVPEDKEDKPAEPAAAPEAAEAAPEA

SEQ ID NO: 2248 - protein, 156 aa, Melampsora laricis-populina
EVLDGHLIKSAESGESKVFYHKMKGDYHRYLAEFATGDKRAVSSDASLEAYKAASSIATVELPPTHPIRLGLALNFSVFYYEILNAPDKACQLAKQAFDDAIAELDTLSEESYKDSTLIMQLLRDNLTLWTVPEDKEDKPAEPAAAPEAAEAAPEA

SEQ ID NO: 2249 - protein, 852 aa, Zea mays
  misc_feature (804)..(804): Xaa can be any naturally occurring amino acid
MFSRSYTNLIDLANGNLSALDYGGGGDEGGGRPPRARPPQRTMTTPGTLVELDEEEAGSATSDVQSSHANNRLIIVANTLPVRGERRPDGRGWKFSWDEDSLLFHLRDGLPEDMEVLYVGSLRADVPAAEQDDVAQALLERFRCVPAFLPKDLSDRFYHGFCKQTLWPLFHYMLPFSLDHGGRFDRSHWEAYVLANKLFSQRVIEVLNPEDDYVWIHDYHLLAFPSFLRRRFNRLRIGFFLHSPFPSSELYRSLPVCDEILKSLLNCDLIGFHTFDYARHFLSCCSRMLGLEYQSKRGYIGLDYYGRTVGIKIMHVGVNMVHLHSLLQQPDLERLVTELRNKFNHKTVLLGMDDMDIFKGIDLKIRAYEHMLKSHPKWQGRAVLVQIVNPKGGGGKDLEGLQTEIEDNCKRINEQFGRSGYSPVVLVKRTLSSVERMAYYTIAECVVVTAVRDGMNLTPYEYIVCRQGITSLEGSTDDKPRGKSMLVLSEFIGCSPSLSGAIRINPWNIESTAEAMNESIALSDTEKQLRHEKHYRYICSHDVAYWSKSYIQDFERSCRDHFRRKCWGIGLGFGFRVVALDRNFKKLTVDSIVADYKKSKSRIILLDYDGTLVPQTTIDKTPSETVVNMMNTLCSDKNNVVFIVSGRARDSLEKWFYPCPKLGIAAEHGYFMRWTREEQWQIQHHISDFRWMYMVEPIMKLYTEATDGSYIETKESALVWHHQDAGPRFGPSQAKELLDHLESVLINEPVSVKSGQHIVEVKPQVVSKGFVAEKILSTLMEKGTQSDFVLCIGDDRSDEDMFDXVDCMRRSMVDPQTSMYACTVGQKPSKAIYYLDDTNEVLNMLKALADAS

SEQ ID NO: 2250 - protein, 1478 aa, Bacillus anthracis str. Ames; identical to SEQ ID NO: 687

SEQ ID NO: 2251 - protein, 499 aa, Moritella sp. PE36; identical to SEQ ID NO: 686

SEQ ID NO: 2252 - protein, 318 aa, Oryza sativa; identical to SEQ ID NO: 1793

SEQ ID NO: 2253 - protein, 422 aa, Zea mays
MVTLKDVTPSRVGQREAPNCQSVTIRATLKNNPGSSSCCSAANQTPRHHLYDGLHRQETEPSGPKSRKGQATSTAQHSTSTPSVLGRRGEGNPGPGRVVGRGSAAEEMEEREKLVCLAKLAEQAERYDVHSREIRGVFLGGTGIRCPLVGLRFGFVNLGLVGQHIDLSTNRNLLPPNNQFSCHLPLSLSNLRTFRNMVEFMKNLARMDVDMSAEERHLFSVGFKNTIGAKRASWRIICSHEQKVAADRQTGVMIDAYKKKVEEELRKVCNEVLSVIAIHCLPLASTGENIVFFYKMKGDYYRYLAEFSTGTEKKAASDQSLMAYQHAMVVASSELSPAHQIRLGLALNLSVFFYEIMNSHERACQVAKQAFDEALTEINSGEGVYKDSTLMMQLLKDNLALWTSELTGGEASKGNDDVDMEG

SEQ ID NO: 2254 - protein, 529 aa, Physcomitrella patens subsp. patens
MHDVSNIQLRAAGKWGVVRSELLNPKSEAGACGSTFEDVPHITDWLPDLETFPNPLKFNPAYSAVKKYFVDDDDFVAKDIVVNMENVGSGLHFRRAGPRDKIYFRAEEVKACIVTCGGLCPGLNTVIREIVCALWYQYGVREIYGIDGGYRGFYARNTITLNPKVVNDIHKRGGTILGTSRGGHDTMKIVDSIENRGINQVYIIGGDGTHKGAEAIHEEIIKRGLKVVVAGIPKTIDNDIDIIDKSFGFDTAVEEAQRAINAAHVEAESTHNGVGVVKLMGRYSGYIAMYATLASRDVDCCLIPEVPFFLEGEDGLYEFVYRRLRENGHMVVVVAEGSGQELIAESLSSLDKMSDASGNRLLLDVGLWLCQRLKEHFLKVHKESITLKYIDPTYMIRAVPSIASDNVYCTLLAHSAIHGAMAGFCGFTAGPVNNRHCYIPISRAVEKQRHVNTSDRMWARLLSSTHQPNFLRYEKVLEEQRVQREKDSNSHGVDLDQQLPGLTASHSLPLAPQSTLKPSTSNSSANVRI

SEQ ID NO: 2255 - protein, 514 aa, Mycobacterium marinum M; identical to SEQ ID NO: 692

SEQ ID NO: 2256 - protein, 223 aa, Cucumis melo
MAAAPSVREENVYVAKLAEQAERYEEMVEFMEKVSASLDKEELTVEERNLLSVAYKNVIGARRASWRIISSIEQKEESRGNDDHVSVIRDYRSKIETELSNICDGILKLLDSRLIPSAASGDSKVFYLKMKGDYHRYLAEFKTGAERKEAAESTLTAYKAAQDIANAELPPTHPIRLGLALNFSVFYYEILNSPDRACSLAKQAFDEAIAELDTLGEESYKDS

SEQ ID NO: 2257 - protein, 863 aa, Arabidopsis thaliana
  misc_feature (702)..(702): Xaa can be any naturally occurring amino acid
MSPESWKDQLSLVSADDYRIMGRNRIPNAVTKLSGLETDDPNGGAWVTKPKRIVVSNQLPLRAHRDISSNKWCFEFDNDSLYLQLKDGFPPETEVVYVGSLNADVLPSEQEDVSQFLLEKFQCVPTFLPSDLLNKYYHGFCKHYLWPIFHYLLPMTQAQGSLFDRSNWRAYTTVNKIFADKIFEVLNPDDDYVWIHDYHLMILPTFLRNRFHRIKLGIFLHSPFPSSEIYRTLPVRDEILKGFLNCDLVGFHTFDYARHFLSCCSRMLGLDYESKRGYIGLEYFGRTVSIKILPVGIHMGQIESIKASEKTAEKVKRLRERFKGNIVMLGVDDLDMFKGISLKFWAMGQLLEQNEELRGKVVLVQITNPARSSGKDVQDVEKQINLIADEINSKFGRPGGYKPIVFINGPVSTLDKVAYYAISECVVVNAVRDGMNLVPYKYTVTRQGSPALDAALGFGEDDVRKSVIIVSEFIGCSPSLSGAIRVNPWNIDAVTNAMSSAMTMSDKEKNLRHQKHHKYISSHNVAYWARSYDQDLQRACKDHYNKRFWGVGFGLFFKVVALDPNFRRLCGETIVPAYRRSSSRLILLDYDGTMMDQDTLDKRPSDDLISLLNRLCDDPSNLVFIVSGRGKDPLSKWFDSCPNLGISAEHGYFTRWNSNSPWETSELPADLSWKKIAKPVMNHYMEATDGSFIEEKESAMVXWHHQEADHSFGSWQAKELLDHLESVLTNEPVVVKRGQHIVEVKPQGVSKGKVVEHLIATMRNTKGKRPDFLLCIGDDRSDEDMFDSIVKHQDVSSIGLEEVFACTVGQKPSKAKYYLDDTPSVIKMLEWLASASDGSKHEQQKKQSKFTFQQPMGQCRKKA

SEQ ID NO: 2258 - protein, 236 aa, Melampsora laricis-populina
KDVAKLDQELTIEERNLLSVAYKNVIGARRASWRIVSSIEQKEEAKGNESQLGQIKAYRDKIEAELAKICEDILEVLDGHLIKSAESGESKVFYHKMKGDYHRYLAEFATGDKRAVSSDASLEAYKAASSIATVELPPTHPIRLGLALNFSVFYYEILNAPDKACQLAKQAFDDAIAELDTLSEESYKDSTLIMQLLRDNLTLWTSDLNDSVPEDKEDKPAEPAAAPEAAEAAPEA

SEQ ID NO: 2259 - protein, 104 aa, Melampsora laricis-populina
TVELPPTHPIRLGLALNFSVFYYEILNAPDKACQLAKQAFDDAIAELDTLSEESYKDSTLIMQLLRDNLTLWTSDLNDSVPEDKEDKPAEPAAAPEAAEAAPEA

SEQ ID NO: 2260 - protein, 256 aa, Zea mays
MAREENVYMAKLAEQAERYEEMVEYMEKVAKTVDVEELTVEERNLLSVAYKNVIGARRASWRIVSSIEQKEESRKNEEHVNLIKEYRAKIEAELSNICDGILKLLDSHLVPSSTAAESKVFYLKMKGDYHRYLAEFKTGPERKESAESTMMAYKAAQDIALAELAPTHPIRLGLALNFSVFYYEILNSPDKACNLAKQAFDEAISQLDTLGEESYKDSTLIMQLLRDNLTLWTSDLTEDGADEGKEAPKGEAGDGQ

SEQ ID NO: 2261 - protein, 277 aa, Zea mays
MLLNPASMLDTIRQHLLEEPPAAADESFGILVADQWSDSLPFRTDDADDMVVFGALQDAFAYGWLPDGSFAHVKPEPVRSPDSSYYSYDGSCFGGLPYPEQPLTPGSEGEAAATPSPRREEAAAAVARGKHYRGVRQRPWGKFAAEIRDPAKNGARVWLGTYDTAEDAALAYDRAAYRMRGSRALLNFPLRIASEIAAAAAGDKRPLALPEPATSSDSSSTGGSPKRRKRGEAAAANMAMALVPPPSQLSRPAQPWFPAAAPVEQAAMPPRVEQLVI

SEQ ID NO: 2262 - protein, 762 aa, Chlamydomonas reinhardtii
MERVVSGLDPDAIPSDENVSSSLPTTRVGPAADRLLRERIRRNRSHQAFDVYEDPPPEDPVLETVPEPPLAARLVVVANRLPVTCSKDVPQSSAGGLVSALKGVSNYVTLWIGWPGIWVKAGRERDELTAMLKSEHQIMLGVDRLDMVKGIPQKLLAYEKFLEEHPEWRDKVLLVQIAVPSRTDVPEYQKLRSMVHEIVGRINGQYGTLTYVPIYHLDTSLSFTELCALYAVTDVALVTSLRDGMNLVSYEYVACQSDNAGVLVLSEFAGAAQSLGAGALLVNPWNISDMATAIYDALSMSEDERRERHRQNYMHVQTHTAQHWADTFITELNDTHIEADLRMRHTPPPQVKALAKVNPRVMQSVCELCTDPNNVVVIFSGSETSKLDEVFGHLPVWLAAENGVYPRPPLPQWKCVFDQVHCEWMESVQLVFDYFCERTPRSFVEARETSLVWNYKYADVEFGRIQARDLLQHLWTGPISNAPVEIIQGGKSVEVRPVGVTKGLAMQRLVGIIATEGGIEAAAFDMVLCIGHLLGRDENLFSLFEGARIDGAAPAHNSRAAAAAAAASLQASHTRSSSTGGINLSTVLEVPPGTAAAAAAGGGSGSAQRHAALAAAAAAGGSKVRPGHQCGGGRPAGGHCAAGGAPAQLQSGGAARLRSHRHCQRGGRLPAALARARVRLHTPATTAATTAAATATTAAVPAATRPSAPRLLLQPPAALHRRRRQRRGRRRLGGVAPPPALAAVAPAPAPPPPSQPQPPEQH

SEQ ID NO: 2263 - protein, 496 aa, Shewanella sp. MR-4; identical to SEQ ID NO: 707

SEQ ID NO: 2264 - protein, 345 aa, Zea mays
  misc_feature (246)..(246): Xaa can be any naturally occurring amino acid
  misc_feature (289)..(289): Xaa can be any naturally occurring amino acid
MVLESYTNLLDMCCEDVFDFQQPLRSLRHVVNSPGIISDPDWESSNDGNSVGSMPFCFKRKIIVANFLPVICAKNEATGEWSFAMGDNQLLVQLKDGFPIDNEVIYVGSLNVQVDPIEQDRVSQKLFKEHRCVPTFLPAELQHQFYHIFCKQHLWPLFHYMLPVCHDKDELFDRSLFQAYVRANKIFAGKIVEAVNSDDDCVWVHDYHLMLIPTLLRKKLHRIKVGFFLHSPFPSSEIYRTLPVRXDEILKSLLNADLIGFQTFDYARHFLSCCSRLLGLNYESKTGAXIGIKDFRPKQVDPSRFLAGRVYMVGRALRTLECPGYNLKRGSKENWYRWKGGKLGG

SEQ ID NO: 2265 - protein, 455 aa, Hyphomonas neptunium ATCC 15444
MGRLVAISNRTAADAGAQAGGLAVAVWDALKATGGLWAGWSGDIVSDSPGSKQFESEDGVSFLLTDMTEDEHDGFYLRYSNSTLWPIFHYRVDLATFDRGAFDHYLAVNERLANLTIEHLREHDMVWVHDYHFLPMADALRRAGWKGRTGFFLHIPFPTPDMFRALPEHSWLARALCQFDLIGFQSESDRTNFERYLVDSLDADASEAPIYTVAGRRVRVGVYPIGIDAAAFEEAARSPAAGDAAARIGRFLGNRDLIIGVDRMDYSKGLPQRFEAVGAFFDNHPELHGKVSVTQIATPSRTKVEEYRQLRYELDQLVGRINGDYGDLDWIPLRYLARSYSRDELAGLFRIARVGLVTPLRDGMNLVAKEYVMAQDPEDPGVLILSEFAGAAEQLHEALIVNPHDRSTLAETIRIALTMPLEERKRRWEALRDVVRRTDIAWWRDLFLNDLRAKI

SEQ ID NO: 2266 - protein, 801 aa, Oryza sativa Japonica Group
MDALASEEYASQSKLLQEFTNAPSIDGAWVFQTNNEDRSTAMYSISQTNLLANNKRKYILFSHIMRNGTNLLDFQWSPFPIQMDGVSAVVPSPSGSKLLVVRNGEKGSPTKLEIVDQSHVEKEIHVAQSVHGPLYTDEWFHGISWNQEETLIAYIAEDSPEPKPVFDDTGYRKEGSSEKDCNNWKGQGDWEEDWGETYSKKGRPSLFVLDINSGEVRAAKGISRSLSVGQVVWAPPSSCGRQKYLIFVGWLEHNGFQNTPRKLGIKYCSNRPCSLYSTLCPFEESDVDNAPASDSKLEPASVAINLTPSISSAFFPRFRTLNHARKILHGKSLIIFNSKDGKLLVFLSANRAVDSGAHNATDSLHKINWPSDWKMDQYLEITDVSIYLTSELCQIPIVMCPQDGCFPGLYCSSMLSNPWLSDRCTMILTSAWRSTEVILSIDVLSGKATRISPENSEYSWSALAVDGHNVLAVSSSPIDPPQIKYGHQVSLKDQTCTWVWDEVNNNPLMAANNKVKALLSHHQFSILKIPVTNPSDDLSDGSKLPFEAIFVSCKDSSHKPTILVLHGGPHSVSVSSYSKTSAFLASLGFNLLIVNYRGTPGFGEEALQSLPGKVGSQDVQDCLTALDYVIEGGLIDASKVAVIGISHGGFLTTHLIGQAPDRFMVAAARNPVCNLSLMIGTTDIPDWCYAVACGSEGRQHASESPSPDHLRLFYQKSPIAHISKVKAPLLMLLGGADLRVPISNGLQYARALRERGGEIRIMMFPDDIHEINIPQSDFESFLNIGVWFKKHLSISASDASA

SEQ ID NO: 2267 - protein, 470 aa, Rhodobacter sphaeroides f. sp. denitrificans
MSRLVVVSNRVPLPDENGNPPPGGLAVAVHVALRKNGGIWMGWSGRSTGEEEPQGLTTLEQDKISYVLTDLSQADLDEYYNGFANRVLWPIFHCRLDLAEYARQEMAGYFRVNRLFADRLVPMLEPDDVIWVHDYHLIPLAQELRKRGVRNRIGFFLHIPWPPADIVTALPVYEIIMRGLAAYDLVGFQTDYDLDNFVGCLRREGWGDWSTPGWLRAFDKEVAAAAFPIGIETGDFARLAAKTDGLDLVTDMQQSLHGSALIIGVDRLDYSKGIAARIDAFERYLMRNPDQAGKVTLLQVAPHSRSDVPEYLEMQGQVESHCGRVNGAHGTIEWVPIRYVNQSLTRPVLAGLYRLAKVGLVTPLRDGMNLVAKEYVASQDPADPGVLILSRFAGAARELDGAIFINPYDTEQTAGAIGRALSMPLDERIARWRRMMDHLESHDVLWWCRTFLAALNEAPEDNGALTRESD

SEQ ID NO: 2268 - protein, 529 aa, Frankia sp. CcI3; identical to SEQ ID NO: 726

SEQ ID NO: 2269 - protein, 1543 aa, Microcoleus chthonoplastes PCC 7420; identical to SEQ ID NO: 728

SEQ ID NO: 2270 - protein, 1520 aa, Synechocystis sp.; identical to SEQ ID NO: 737

SEQ ID NO: 2271 - protein, 467 aa, Phaseolus vulgaris
MGSRTTRGFGVEDDKGAERGMPSFNSELPISNSSYAEGSTIDSFRVSDFGAFDQPYRVEDAVCLSGNPIYNSLKVSSQTISPGSVHISSLGQLPTSLDKSPLTNQTELHRLRLQKVQSSNPDTILVGNTDNQEESAMADASPRTDISTDVDTDDKNQPFDRNQSLAAVSDSSDRSKDKSDQKTLRRLAQNREAARKSRLRKKAYVQQLESSRLKLTQLEQELQRARQQGIFISSSGDQAHTLSGNGAMQFDAEYARWLEEQNRQINELRAAVNSHASDTELRMIVDGILAHYDEIFRMKGVAAKADVFHLLSGMWKTPAERCFLWLGGFRSSELLKLLANQLEPLTEQQLMGITNLQQSSQQAEDALSQGMEALQQSLAETLSTGAPASSGSSGNVANYMGQMAMAMGKLGTLEGFIRQADNLRQQTLQQMHRILTTRQSARALLAIHDYFSRLRALSSLWLARPRD

SEQ ID NO: 2272 - protein, 531 aa, Streptomyces avermitilis MA-4680; identical to SEQ ID NO: 741

SEQ ID NO: 2273 - protein, 488 aa, Kluyveromyces lactis NRRL Y-1140
MVNQDISKLSLNECPGSVIVISNRLPVTIKKDEKTGEYEYSMSSGGLVTALQGLKKSTTFQWYGWPGLEVPDEDKAKVKRELLEKFNAIPIFLSDEVADLHYNGFSNSILWPLFHYHPGEITFDDTAWLAYNEANMAFADEIEGNINDNDVVWVHDYHLMLLPEMIRQRVIAKKLKNIKIGWFLHTPFPSSEIYRILPVRQEILKGVLSCDLIGFHTYDYARHFLSAVQRILNVNTLPNGVEFDGRFVNVGAFPIGIDVETFTEGLKQDAVIKRIKELKESFKGCKIIIGVDRLDYIKGVPQKLHALEVFLGAHPEWIGKVVLVQVAVPSRGDVEEYQYLRSVVNELVGRINGQFGTAEFVPIHFMHRSIPFQELISLYAVSDVCLVSSTRDGMNLVSYEYISCQEEKKGTLILSEFTGAAQSLNGALIVNPWNTDDLAESINEALTVPEEKRAANWEKLYKYISKYTSAFWGENFVHELYRLGSSNN

SEQ ID NO: 2274 - protein, 1552 aa, Symbiobacterium thermophilum IAM 14863; identical to SEQ ID NO: 743

SEQ ID NO: 2275 - protein, 175 aa, Magnetospirillum magnetotacticum MS-1
MMVDGRRTRIRSFPIGIDVAGFKEAADKAGSNKVVRETMAGLRTRKLLIGVDRLDYSKGVPERMEAVDRFFASNPDQRGNVVYIQITPKSRSEVPEYEQLAREVNEKVGDINGMLGEPAWTPIQYVTKAYPRPVLAGLYRAARVGLVTPMRDGMNLVAKEYVVAQSEEDPGVLVL

SEQ ID NO: 2276 - protein, 1490 aa, Xanthomonas axonopodis pv. citri str. 306; identical to SEQ ID NO: 751

SEQ ID NO: 2277 - protein, 1648 aa, Arabidopsis thaliana; identical to SEQ ID NO: 750

SEQ ID NO: 2278 - protein, 188 aa, Synechococcus sp. PCC 7002
  misc_feature (166)..(166): Xaa can be any naturally occurring amino acid
TALAEPEITTQLKYKDHLVNLDAFPVGTNPTQIRAQVEKASTQERIRKIREELGSNKLILSAGRVDYVKGTKEMLVCYERLIERRPELQTKVNLVVAAAKAASGMRVYKNAQSEIERLVGRINGRFAKLNWTPILLFTSALSYEELLGFFGAADIAWITPLRDGLXLVAKEYVVAHGCDAGVLILSEF

SEQ ID NO: 2279 - protein, 542 aa, Oryza sativa Indica Group
MEAATVVAAPIPAADAAAKALQKKLLDLELPPFPAPAKKAAAKVVAAAPKKKLAGGAGGYVLEDVPHLTDYLPNLPSFPNPLQNHPAYSVVKQYFVNADDTVAKKIVVHKGSARGTHFRRAGPRQRVFFQPDEVSAAIVTCGGLCPGLNTVIRELVCGLHDMYGVTSVVGIEGGYRGFYARNTVELTPRSVNGIHKRGGTVLGTSRGGQDTGKIVDSIQDRGINQVYIIGGDGTQKGAATIHAEVQRRGLKCAVVGVPKTIDNDIAVIDRSFGFDTAVEEAQRAINAAHVEAESAENGVGVVKLMGRNSGFIAMYATLASRDVDLCLIPESPFYLEGKGGLLEFAEKRLRENGHMVIVVAEGAGQDVIARSMRLADAHDASGNKVLLDVGLWLCAKIKDHFKKKANFPITLKYIDPTYMIRAVPSNASDNVYCSLLAHSAIHGAMAGYTGFTVAPVNGRHAYIPFYRITEKQNKVVITDRMWARVLCSTNQPCFLSTEDVEKAGQDDEEPIVPLVEGENSLVKAPPLLANAGDGAALCNGAA

SEQ ID NO: 2280 - protein, 2216 aa, Arabidopsis thaliana; identical to SEQ ID NO: 762

SEQ ID NO: 2281 - protein, 529 aa, Clostridium perfringens ATCC 13124
MSTFFTDISIDKLIVNPENYRFDSVDNETSAIKIMLQNHNKAIKELLKDILENGLNPLERLLVFKKNEFYIVLEGNRRVTALKIIHNVNLLKDIEQKYFNEYSKILNNANSKINIDKISCAITDNISDSNKWIALKHTGSNGGKGTIPWDTTQKRRFLNKTNPNNSSNIITSLFSYIKSSNIYDDTITQNLTNIPITTLERILSDPYVRENIGIDIKKNTIYKLYPDSEIKKPLSKILHDLINKTIVVTDVYTKNDRLDYIETFNSNSLPNYANKLNKPVEILSNLNLINLPLQTTIDNNSNNDNSANTDNINSNNINNSATTNNTSNNTSNNTSNTNNIANIDNNNSSNINNSTNNNNNNNNNTGNSSSIKSTSPKRDNKDINKRKALIPSTFHVKITVPRIQQIYKELKKLDVSDFPNSTSVLFRVFLELVVDEYIEKLNLTGLSNNDKLNKKVQACIDDLKSKNLIDKNKVKPINVAISNHDSLFSINTFNSYVHNKHMLPDATNLKNTWNQFEYFILVLLNSITK

SEQ ID NO: 2282 - protein, 942 aa, Arabidopsis thaliana; identical to SEQ ID NO: 1471

SEQ ID NO: 2283 - protein, 550 aa, Leptospira interrogans serovar Lai str. 56601; identical to SEQ ID NO: 774

SEQ ID NO: 2284 - protein, 681 aa, Azotobacter vinelandii; identical to SEQ ID NO: 771

SEQ ID NO: 2285 - protein, 1536 aa, Bacteroides thetaiotaomicron VPI-5482; identical to SEQ ID NO: 775

SEQ ID NO: 2286 - protein, 1527 aa, Gemmata obscuriglobus UQM 2246; identical to SEQ ID NO: 778

SEQ ID NO: 2287 - protein, 1014 aa, Ostreococcus tauri
MPADGSTPESPPRRSRAFADVPDAATPFTSPRRRSVDASASPIRHVDSEIFARASRASMSSLNAMSTDGSMYDLTRRMEGLAGSAVFDAQGQQSEELESTRVDRLLRERAEQLKRTRSQTNLVSGEIAEESAVFEEEEPVRESLIIAANRLPVSVKRKADGTWDVRPSAGGLVSALLGVRKTYGMTWIGWPGIFIEPGPERDSLTATLRRQNLLPVYLTKSQVELYYNGYCNNVLWSLFHYVPLNFEARLNQETNMTAQWVAYKEANRVFADAIMSVYRDGDIVWAHDYHLMLVPEMLRQDVETMKIGWFLHTPFPSSEIYRMLPMREALLHGCLAADLVGFHTYDYARHFVSATSRILGLEATPDGVETQGGFTRVAAFPIGIDPSRFTAALRTDQVQDHIKELQERFRGRKVMLGVDRLDMIKGIPHKLLAFEKFLIENPEWKDKCCLIQIAVPTRSEVPEYQKLASTVHEIVGRINGRFGSIGSIPIQHLDCSMQFPELCALYSVTDVMLVTSQRDGMNLVSYEFVSCQNKSNAGVLVLSEFAGAAQSIGAGALLVNPHNVTEVAHAIKEALTMPEAEKIERHRSSFSHVSTHTAQAWADTFISELNDTHVEAELRQKRIPPHLSPDVVTRSFQKGKQRLIILGYNATLTDPMDSRSKNRPAIESKKNRHKIHPISQECISRLCDDPNTTVCIFSGSDRNKLAQIFAMLPKVWIAAENGVFIRPPLQGKNGTETPKWMTMIETTNLDWLESVEVVFEYFCERTPRSHVETRETSLVWSYKYADPDFGRQQARDLLQHLWTGPISNAPVDVVMGAKSVEVRPVGLSKGTAVERILHIINGGKNKELIEVDFVACFGHFLGRDEDIFSFLEQNSSQNSLSTNAHSPGSKKGNTSLSASIQNDLAAVEEHDESNLKKKHEAEIRFQDIVTCTVGRKRSSARYFVNDSDEVALCLAALTNSLNDGKGVIELLQFEDSISNVSKSASRGNLSTGRAASLPGGDNDAVYRSSSGQSI

SEQ ID NO: 2288 - protein, 106 aa, Arabidopsis thaliana
  misc_feature (52)..(52): Xaa can be any naturally occurring amino acid
  misc_feature (59)..(59): Xaa can be any naturally occurring amino acid
  misc_feature (80)..(80): Xaa can be any naturally occurring amino acid
GCGSPTLPHRQKVFITTDIATRAIKHGASGRYGVTPTFLVNAYQLQIKVTHXPRRGERXQLPIKKDNAYISRLKSSKPGXPAYHIRTANHHIYSIDDLAQMIFSLH

SEQ ID NO: 2289 - protein, 401 aa, Magnetospirillum magnetotacticum MS-1; identical to SEQ ID NO: 780

SEQ ID NO: 2290 - protein, 1521 aa, Bacillus licheniformis ATCC 14580; identical to SEQ ID NO: 787

SEQ ID NO: 2291 - protein, 259 aa, Arabidopsis thaliana
MASGREEFVYMAKLAEQAERYEEMVEFMEKVSAAVDGDELTVEERNLLSVAYKNVIGARRASWRIISSIEQKEESRGNDDHVTAIREYRSKIETELSGICDGILKLLDSRLIPAAASGDSKVFYLKMKGDYHRYLAEFKTGQERKDAAEHTLAAYKSAQDIANAELAPTHPIRLGLALNFSVFYYEILNSPDRACNLAKQAFDEAIAELDTLGEESYKDSTLIMQLLRDNLTLWTSDMQDDAADEIKEAAAPKPTEEQQ

SEQ ID NO: 2292 - protein, 862 aa, Vitis vinifera
MVSRSSYTSFLDAASGDLLNFPQTPRTLPRVMTVPGIISDGDGNGSNDEDSDIFSSKCREKKIIVANFLPLLAQKDLNTGRWCFSFDEDALLLQMKDGFSSETDVVYVGSLKVDVDTSEQEEVAERLLAEFNCVPTFLPPDLQKKFYHGFCKQYLWPLFHYMLPMSPEHCNRFDRFLWQAYVSANKIFADKVMEVINPEEDYVWIHDYHLMILPTFLRKRFYRVKLGFFLHSPFPSSEIYRTLPVRDDILKALLNADLVGFHTFDYARHFLSCCSRMLGLNYESKRGHIGLEYFGRTVYVKILPVGIHMGQLESALNLPSTSIKVKEIQEQFKGKKIILGVDDMDIFKGLSLKLLAMEHLLQHYEELRGELVLVQIVNPARSTGKDVQEAKRETYAITERINANFGFPGYEPVVLIDHPVPFYEKTAYYALAECCIVNAVRDGMNLMPYNYIVCRQGTPKIDEALGITSGSSRTSTLVVSEFIGCSPSLSGAIRVNPWDIDAVADALNIAITMPGLEKQLRHEKHYRYVSSHDVAYWACSFMQDLERACKDHYSKRCWSIGFGLSFRIVALSPNFRKLSLDHIVKAYKRANRRAIFLDYDGTVVPQSSIVKTPSPEVISILNDLCNDPKNTVFIVSGRGKNSLSDWFAQCQNLGIAAEHGYFIRWSQSSNWESRPLLMDFDWKRIADPVMQLYTEATDGSYIETKESALVWHHQDADPDFGSCQAMELLDHLENVLANEPVEVKRGHHIVEVKPQGVSKGQVTEKILSTMISDGKPPDFVMCIGDDRSDEDMFESISSTIYSPSLPAPPEIFACTVGQKPSKARYYLDDSADVLKLLQGLARASSMKPKCSTQIQFSFESVA

SEQ ID NO: 2293 - protein, 420 aa, Oryza sativa
MSSDEREKRHRHNYAHVTTHTAQDWAETFVCELNETVAEAQLRTRQVPPDLPSQAAIQQYLHSKNRLLILGFNSTLTEPVESSGRRGGDQIKEMELKLHPELKGPLRALCEDEHTTVIVLSGSDRSVLDENFGEFNMWLAAEHGMFLRPTNGEWMTTMPEHLNMDWVDSVKNVFEYFTERTPRSHFEHRETSFVWNYKYADVEFGRLQARDMLQHLWTGPISNAAVDVVQGSRSVEVRSVGVTKGAAIDRILGEIVHSKSMITPIDYVLCIGHFLGKDEDIYVFFDPEYPSESKVKPDSSGSVSLDRRPNGRPSNGRSNSRNSQSRTPKAQAAPERSSSSSSSSQGTPNSHHDWREGSSVLDLKGENYFSCAVGRKRSNARYLLNSSEEVVSFLKEMADATAAHNGFQSTTADYMFLDRQ

SEQ ID NO: 2294 - protein, 557 aa, Saccharum hybrid cultivar
RTRGLEENPDWNNKVVLLQIAVPTRTDVPEYQKLTSQVHEIVGRINGRFGTLTAVPIHHLDRSLDFHALCALYAVTDVALVTSLRDGMNLVSYEYVACQGSKKGVLILSEFAGAAQSLGAGAILVNPWNITEGADSIRHALTMPSDEREKRHRHNYAHVTTHTAQDWAETFVFELNDTVAEALLRTRQVPPGLPSQMAIQQYLRSKNRLLILGFNSTLTEPVESSGRRGGDQIKEMELKLHPDLKGPLRALCEDEHTTVIVLSGSDRSVLDENFGEFKMWLAAEHGMFLRPTYGEWMTTMPEHLNMDWVDSVKHVFEYFTERTPRSHFEHRETSFVWNYKYADVEFGRLQARDMLQHLWTGPISNAAVDVVQGSRSVEVRSVGVTKGAAIDRILGEIFHSENMVTPIDYVLCIGHFLGKDEDIYVFFDPEYPSESKIKPEGGSASLDRRPNGRSPSNGRSSSRNPQSRTQKAQQAASERSSSSSHSSASSNHDWREGSSVLDLKGENYFSCAVGRKRSNARYLLSSSEEVVSFLKELASATAGFQSSCADYMFMDRQ

SEQ ID NO: 2295 - protein, 389 aa, Saccharum hybrid cultivar
SRSRLLRNVETTAEALNEAISMSEQEKQLRHGKHYRYVSTHDVAYWSKSFVQDLERACKDHFRKPCWGIGLGFGFRVVALDPHFTKLNLDTIIMSYERAKSRVILLDYDGTLVPQTSIDKKPSSEILRIINTLCSDSNNTVFIVSGRSRDSLGSLFASCPKLGIAAEHGYFLRWTRDEGWQSSTHTSDFGWMQMAEPVMNLYTESTDGSYIETKETALVWHHQDADPGFGSTQAKEMLDHLESVLANEPVAVKSGQFIVEVKPQGVSKGLVAEKILTLMKEKGQQADFVLCIGDDRSDEDMFENIADVIKRNVVAPKTPLFACTVGQKPSKARFYLDDTLEVGNMLSLLADASEPDPVIELEDDLATSVSAIDISDEPPQLGHRREEGS

SEQ ID NO: 2296 - protein, 822 aa, Cryptococcus neoformans var. neoformans JEC21
MMLRHIGTYRAPSRKTDWSGFDEFLRSWIPSHTVPQLRSFASALVTYGRRDPFMRSGDRKADVIQKIQEAFMALKAKMDLDAYVEARYHCEVAVGGGWDPFPRTNTTIMVPPAQPIRAHPSVQPPPPPTFGGVPRWSSGVNNNSSGLNGYRSTSGFASGSVGYGNTSAHAVSSTPSHGPQHALQDWKINPMWKPLRAITSMETLPDISANESHSTYRTKRTQFVLPNDVIEKLKASRESPQTPPHYSLRLFCTSSDHYRPTSVHARHIPPSTNIPIEYPGNPEVSVDGTLLPFKEKGLRGKAGSAPPFDLDKPINNGVAAGGRVALVPGRLMGVNVGHRGPTTGKNKTQSKRFFFQIVLAEMTTKEELLAKLNKLEPTKAEHAIEQLRKKQENDDDIVAGTASMSLKDPLSYMRMTRPIRSSKCSHIQCFDATWWIESNAVHPQWLCPHCSKELRFDDLIVDGYVMDILKVVPDTVDDVILEPTGEWHTEDNKYGTASWLASHVKPSSATVEASTPVAPSVPASFSSEIETKPSVCDMNDISSGDGANRGGTGLKRKVVQVIDSDEEGDGTPAKSSVPPAGRVTALGSSSSVGGSRTGASTPIIDLTLSDSDDETDEETGPVTSSRAPPAPIQVPRTSTAASAIVSPKRPVSAAGTQFHSFRETTSNVVRSPSTSSWPGLSVAGIGGVSGRSSPLNNSSGQTSASASGSATTSHLQPPSNQYPPISPPHFSDPPPQTTVASPRITALPPPSHIFPSSSPPSASIAPAVPLDHVPPARAFSGPGWVNPLRPNSSSEISSSTYASTTSPSDNRGNERESSGSKY

SEQ ID NO: 2297 - protein, 118 aa, Zea mays
VRSMSKLPQGDTGLYDPSMDRDSCGVGFIAELSAEPSRKTIVDAVEMLERMSHRGACGCDKNTGDGAGILVALPDAFLREVTKDAGFELPPQGEYAVGMFFMPHDDDRREKTKLVFHE

SEQ ID NO: 2298 - protein, 261 aa, Populus trichocarpa
MAVTPSAREENVYMAKLAEQAERYEEMVEYMEKVSASLENEELTVEERNLLSVAYKNVIGARRASWRIISSIEQKEESRGNEDHVSVIRDYRAKIETELSSICDGILKLLDSRLIPTASAGDSKVFYLKMKGDYHRYLAEFKTGAERKEAAESTLTAYKAAQDIANAELAPTHPIRLGLALNFSVFYYEILNSPDRACSLAKQAFDEAIAELDTLGEESYKDSTLIMQLLRDNLTLWTSDMQDDGADEIKEAAPKPGDEQQ

SEQ ID NO: 2299 - protein, 1505 aa, Propionibacterium acnes KPA171202; identical to SEQ ID NO: 800

SEQ ID NO: 2300 - protein, 69 aa, Picea sitchensis
MADWGPVAVAVVLFVLLSPGLLFQFPGNSRTLEFSNLETSGRSILIHTFIFFGLFALFTVVIRVHIYTD

SEQ ID NO: 2301 - protein, 1561 aa, Azoarcus sp. EbN1; identical to SEQ ID NO: 803

SEQ ID NO: 2302 - protein, 801 aa, Oryza sativa Indica Group
MDALASEEYASQSKLLQEFTNAPSIDGAWVFQTNNEDRSTAMYSISQTNLLANNKRKYILFSHIMRNGTNLLDFQWSPFPIQMDGVSAVVPSPSGSKLLVVRNGEKGSPTKLEIVDQSHVEKEIHVAQSVHGPLYTDEWFHGISWNQEETLIAYIAEDSPEPKPVFDDTGYRKEGSSEKDCNNWKGQGDWEEDWGETYSKKGRPSLFVLDINSGEVRAAKGISRSLSVGQVVWAPPSSCGRQKYLIFVGWLEHNGFQNTPRKLGIKYCSNRPCSLYSTLRPFEESDVDNAPASDSKLEPASVAINLTPSISSAFFPRFRTLNHARKILHGKSLIIFNSKDGKLLVFLSANRAVDSGAHNATDSLHKINWPSDWKMDQYLEITDVSIYLTSELCQIPIVMCPQDGCFPGLYCSSMLSNPWLSDRCTMILTSAWRSTEVILSIDVLSGKATRISPENSEYSWSALAVDGHNVLAVSSSPIDPPQIKYGHQVSLKDQTCTWVWDEVNNNPLMAANNKVKALLSHHQFSILKIPVTNPSDDLSDGSKLPFEAIFVSCKDSSHKPTILVLHGGPHSVSVSSYSKTSAFLASLGFNLLIVNYRGTPGFGEEALQSLPGKVGSQDVQDCLTALDYVIEGGLIDASKVAVIGISHGGFLTTHLIGQAPDRFMVAAARNPVCNLSLMIGTTDIPDWCYAVACGSEGRQHASESPSPDHLRLFYQKSPIAHISKVKAPLLMLLGGADLRVPISNGLQYARALRERGGEIRIMMFPDDIHEINIPQSDFESFLNIGVWFKKHLSISASDASA

SEQ ID NO: 2303 - protein, 828 aa, Vitis vinifera
MMSRSYTNLLDLASGNFPLMGQRKRLPRVMTVPGVISELDDDQANSVTSDVPSSIVQDRVIIVANQLPVKAKRRPDNKGWSFSWDEDSLLLQLKDGLPDDMEVLYVGSLRVDVDSNEQDDVSQVLLDRFKCVPAFLPQDILSKFYHGFCKQQLWPLFHYMLPFSANHGGRFDRSLWEAYVSANKIFSQRVIEVLNPEDDYVWIHDYHLMVLPTFLRRRFNRLRMGFFLHSPFPSSEIYRTLPVREEILKALLNSDLIGFHTFDYARHFLSCCSRMLGLEYQSKRGYIGLEYYGRTVGIKIMPVGVHMGQIESVLRFADKEWRVGELKQQFEGKTVLLGVDDMDIFKGVNLKLLAMEQMLTQHPKWQGRAVLVQIANPARGSGRDLEVIQAEIQASCKRINENFGQPGYEPIVFIDRPVSLSEKAAFYTIAECVVVTAVRDGMNLIPYEYIVSRQGKSMLVVSEFIGCSPSLSGAIRVNPWNVEATAEAMNEAISMADAEKQLRHEKHYRYVSTHDVAYWSKSFFQDMERSCKDHFRRWFVALDPNFRKLSIDSIVSAYSRAKNRAILLDYDGTVMPQTSINKTPSEDVILILNTLCSDPRNTVFVVSGRGRDSLGKWFSPCNRLGIAAEHGYFLRWSVNEEWEICGQSNDFGWIQMAEPVMKLYTEATDGSYIETKESALVWHHQDADPGFGSSQAKEMLDHLESVLANEPVAVKSGQFIVEVKPQGISKGVVAEKIFTSMAERGRQADFVLCVGDDRSDEHMFEIIGNAVSSGILSSNTSVFACTVGQKPSKAKYYLDDTTEVINMLDALADASDPSPSPELEASSP

SEQ ID NO: 2304 - protein, 492 aa, marine gamma proteobacterium HTCC2080; identical to SEQ ID NO: 807

SEQ ID NO: 2305 - protein, 61 aa, Physcomitrella patens subsp. patens
HFRGVRQRPRGKFAAEIRDPAKQGARLWLGTFDTAEEAAIAYDRAAVRMRGSRALLNFPLR

SEQ ID NO: 2306 - protein, 1510 aa, Corynebacterium glutamicum ATCC 13032; identical to SEQ ID NO: 813

SEQ ID NO: 2307 - protein, 1488 aa, Yersinia pestis CO92; identical to SEQ ID NO: 816

SEQ ID NO: 2308 - protein, 447 aa, Azoarcus sp. BH72; identical to SEQ ID NO: 818

SEQ ID NO: 2309 - protein, 490 aa, Streptomyces albus
MARQSPAVLVATKPAPVVHERVDERVVPRLSVSTGSVVGDMASRLRTTVVASAASEEDRALAERSPDGVTVRAAGGQEIRVRLVRHAPETLSTERYGLTTEVLWHTMHNLWDRWSAPSFDRASRRAWESLHALNQDITEALLAQSPGAGSGYLIHDYQLGMVPARLRRADPTARVLFFHHIAWPGPEGLALLPRQFADDLLRGMLGADVVCFFARRWCRNFLRCVEDLVPGARVDHDAGTVRLGGREVRVAAEPLSYSPDALKGLPRSWPKELDAWVGERPLVVHSGRTDPIKNAHRAVAAFRIAAEHPAAADARLLLRINPHRLHIGANAAYLRMTEEAVAEANRHFGEERVRLLTGNDRGLTFGALARADAVVLNSTADGQNLTAFEAIAMGAREPVLVVSHTCGAGEVLGDGALRVHPHDLVDQADALVEALTMTPSRRTAASRVLHEAAARFALPHWTERQLGLLGIDMPESARAAVPAAGRAHDA

SEQ ID NO: 2310 - protein, 145 aa, Glycine max
  misc_feature (109)..(110): Xaa can be any naturally occurring amino acid
AARLERKDGRPFRQRLLVVANRLPVSAIRKGEDSWSLEISAGGLVSALLGVKEFEARWIGWAGVNVPDEIGQKALTKALAEKRCIPVFLDEEIVHQYYNGYCNNILWPXXHYLGLPQEDRLATTRSFQSQFEAYQKANQMFADVV

SEQ ID NO: 2311 - protein, 1514 aa, Streptomyces coelicolor A3(2); identical to SEQ ID NO: 827

SEQ ID NO: 2312 - protein, 269 aa, Oryza sativa Japonica Group
MPPPSPHPPHRNGNHVPAPSGESFAKFFECWISEQSRDLAALRSAASAATNPAAPPDDAELHRLVNRVLGHYEHYYRTKSAAASTDVLRMFSPSWTSTTENLYLWCGGWRPTAALHLLYSKSGAQLETQLPVFLAGGGLGAGDLGDLSAEQLQAADQLQRITVSKEREIENAAASAQESLATVKMVELAGGGGMDAEGMEMEMRSKADGMRRVLEMADGLRLETMREVVALLRPSQAVHFLIAAAELHLAVHEFGRRKDGDGAASPPPA

SEQ ID NO: 2313 - protein, 848 aa, Arabidopsis thaliana
MVSRSYSNLLELASGDSPTFGRMNRQIPRIMAVAGIMSNIDNDSKDTDLSPKDRIIIVANELPIRAQRRVDGNGSWNFSWDENSLLLQLKDGLGDEAIEVIYVGCLKEEIPLNEQEEVYQILLESFKCVPTFLPLDLYTRYYHGFCKQQLWPLFHYMLPLSPDLGGRFDRTLWQAYVSVNKIFADRIMEVINPEDDFVWIHDYHLMVLPTFLRKRFNRVKLGFFLHSPFPSSEIYKTLPIREELLRALLNSDLIGFHTFDYARHFLSCCSRMLGLTYESKRGYIGLEYYGRTVSIKILPVGIHMGQLQSVLSLPETERKVGELIERYGRKGRTMLLGVDDMDIFKGITLKLLAMEQLLMQHPEWQGKVVLVQIANPARGKGKDVKEMQAETYSTVKRINETFGRPGYDPIVLIDAPLKFYERVAYYVVAECCLVTAVRDGMNLIPYEYIVSRQGNEKLDKILKLEANNRNKKSMLVVSEFIGCSPSLSGAIRVNPWNVDAVADAMDSALEVAEPEKQLRHEKHYKYVSTHDVGYWARSFLQDLERSCGEHGRRRCWGIGFGLSFRVVALDQSFRKLSMEHIVSAYKRTKTRAILLDYDDTLMPQGSIDKRPSSKSIDILNTLCRDKGNLVFIVSAKSRETLSDWFSPCEKLGIAAEHGYFLRLRKAVEWENCVAAVDCSWKQIAEPVMELYTETTDGSTIEDKETALVWSYEDADPDFGSCQAKELLDHLESVLANEPVTVKRGQNYVEVKPQGVSKGLIARRMLSMMQERGTLPEFVLCIGDDRSDEDMFEVICSSTEGPSIAPRAEIFACTVGQKPSKAKYYLDDTTEIVRLMHGLASVTDQITPV

SEQ ID NO: 2314 - protein, 240 aa, Asparagus officinalis
MDQPDLSQVGPVGLTQLSPLQIQQIQAQIQLNHQHQLMVSRTLQARNYHNTLGVKPQPMKLQASVAAPQSKPTKLYRGVRQRHWGKWVAEIRLPKNRTRLWLGTFDTAEEAALAYDKAAYKLRGDYARLNFPNLKHTHLAGNPLHSSVDAKLEAICQTLESPGKKKVSTGSKPEPVVSSPTVETEEESSSSSSVTGATNSPVSEIESLDFNEVPWDETEDFVLRKYPSYEIDWDSILSSA

SEQ ID NO: 2315 - protein, 330 aa, Broussonetia papyrifera
MKALEPFMKSAHNNINNNISPISSSSSSSYLSSEPNFYPESETCSPSTTQMFSSGLFSSFNHMGSEQTGSLGLNQLTQSQILQIQAQIYFQQQQQQQQNLLMTTITPPQNSLNYLGPRAVPMKNVGANSKPNKLYRGVRQRHWGKWVAEIRLPKNRTRLWLGTFDTAEEAALAYDKAAYKLRGDFARLNFPHLRHEGAHVSGEFGEYKPLHSSVDAKLQAICQSLANSQKQGSAKEACSEPEVKPVIEPKMASDNSPKGELEVSSSSLSSSSSLSLSLSLSSPLSDESSAGSSSPESDVTLLDFSDSHWDGNENFGLGKYPSVEIDWDAL

SEQ ID NO: 2316 - protein, 525 aa, Staphylococcus aureus subsp. aureus MRSA252; identical to SEQ ID NO: 841

SEQ ID NO: 2317 - protein, 270 aa, Vitis vinifera
MEHPSALDEFEQIMSAIQHKKIVVFLDYDGTLSDIVDDPDKAFMTETMRSAVREVAECYPTAIISGRRREKVQDFVKLDDIYYAGSHGMDIISPVCSNRFGGQEHHRRVVDEKIFRLLTTRTKNIKGSRVEDNKFCVSVHFRCVHEKDTNALKEVVESVLEDYPDFRVTRGKKVLEVRPLIEWDKGHALEYLLDTLGFDSSDVVPIYLGDDRTDEDAFKMITTRGEGYPIIVSSIPKETKASYSLRDTKEVMQFLQNLARWSTNSSLGNS

SEQ ID NO: 2318 - protein, 1487 aa, Parvularcula bermudensis HTCC2503; identical to SEQ ID NO: 844

SEQ ID NO: 2319 - protein, 158 aa, Chlamydomonas reinhardtii
MVAHQTQQVQQPPPLAAAAGAAANARAAAAAAADDVSTDDEKPARGRGGKGGGRAGGGGVLTVEGPQGQVLKLKPGAAAKRSRGAVHYRGVRQRPWGKYAAEIRDPLKVSGGRMWLGTFDSAEEAARAYDEAARMLRGSAALVRGCLRVHSRCGVLAV

SEQ ID NO: 2320 - protein, 682 aa, Zea mays
  misc_feature (650)..(650): Xaa can be any naturally occurring amino acid
MEGTVIRIASESKRGNEQTDSLTEVPRAIGTLVTHNREVENLIVLEDDTELTPYEGMEFESEDAARDFYSTYARSAGFRIRISRYTRSRRDNSVISRRIVCSKEGFHETRACDGLHPEQKQQERAGTRVGCKAMILIKKFSPGKWVVTKFIKNHNHGPVPPRKLDSRLVDQDCDPMEKPHSIEVDPVEEPFEGMEFESEEAAKLFYVNYARLNGFRARISRYCRSRRDNSIISRQIVCSKEGFREVRTKKVLTDEGKTKRPRMITRVGCKAMIVVKKMNSGKWMVSKFEKEHNHSLSYSKMVPSTSNITSGEIVDLAAKGAHPSEVKNEGYSAGTQCNPADSLTILYNNLCQEAIKFAKEGSVTEEIYHVAVSALKEAAEKVAEVKRSRPTLSHCGFVRESKHDVLQEKSMSALQCSNQVELTRTSPGSRPLQDSASNLLLIPTDILTDSRLYSGVDTAPLTGGFPTNESESTHASESSFMHFKNTKKTSSEKSQHFLVFHFGPEDAYLLLEPQNTCFNQLIHGKEQGIHGSSKDTMVAIPAIPLALCMPVTQSLPGSSTGPFGGVLSELKNQGTVPKSIVHATALACGARAVPLEDAASLISAIESKIRSGGAIIAKLPSNNLAPLVPPAIAMSSSSEDDEEHDHSEPXAMIDVDRNVNHQSSNAMKLQRELSEFETEAGN

SEQ ID NO: 2321 - protein, 173 aa, Picea sitchensis
MKLYTETTDGSTIEAKESALVWHHQDADPDFGSCQAKELLDHLESVLANEPVVVKSGHHIVEVKPQGISKGLVAEQLLSTMVQRGKRPDFVLCIGDDRSDEDMFEGITRAVSGPTLSPIAEVFACTVGQKPSKAKYYLDDTVDVVRMLQGLATASDQAVKNLSAQVAELTLTT

SEQ ID NO: 2322 - protein, 64 aa, Picea sitchensis
MADWGPVLVGVILFVLLSPGLLIQFPGNCRTIDFGNLETSGRSILMHTIIFFGLFALFTVVIGV

SEQ ID NO: 2323 - protein, 928 aa, Coccidioides immitis RS
MAHSSAESPPMLSNSTILPTRSQTSDGVCFGEQMNSSSRPADTKGHEPSNSAAAMSGVEHGTLGTSPGTPSEAAKGAKSGIELLRRLSLMEGRPTLSAMARPEEHADLRLTGRIISASFCIPYKLRFRSGLNWELHHRPGTSALFDSFQYLASSENPWSHTLVGWTGEVENSTLQDSYFQSRPHTGSGLESLSLETPMTSLSKASAPIPVDGSHKPQPPADGIHVKKEDRDRLEKQLHSSKYGMILPVWLSDDSESPEETLHLKDQTRWRRYAEREIYPLFHYKQHGPTDGRAERRWWQDYQRMNQLFADRILEIYRPGDIVWIHDYHLFLLPSMLRQRIPEIYIGFFLHVPFPSSEFFRCLTRRKEVLTGVLGSNMIGFQSFTYSRHFSSCCTRILRFDSNSAGIDAYGAHVAVDVFPIGIDVDAVRKMAYGEPNIEKTIAEIKKLYAGKKIIIGRDRLDSARGVTQKLIAFEMFLERYPEWRDKVVLIQVTSPTSVEEEKEESEAKLSSQMSHLVSTINGRYGSLSFSPVQHYPQYLSRHEYFALLRAADVGLITSVRDGMNTTSLEYVVCQHENHGPLILSEFSGTAGSLHNAIHINPWDSGGVAAAINEALTMSYEQREEQHEALYKYVTTHTVSIWSDLYIGRLLNNLSSFNQSIATPVLDKAKLLYQYRKARRRLFMFDYDGTLTPIVKDPQAAIPSDRVVRTLKSLAADPKNSVWIISGRDQNFLEEWMGHISELGLSAEHGCFIRKPHNEVWENLTEKSNMGWQKEVLDIFQHYTERTQGSFIERKRVALTWHYRRVDPEYGAYQAKECRKHLENTVARKWDVEIMAGKANLEVRPTFVNKGEIASRLVNECQGRPEFVLCLGDDFTDEDMFRALRHSNLPKDRVFAVTVGASSKQTEASWHLLEPADVIATISLLNSCN

SEQ ID NO: 2324 - protein, 360 aa, Magnetospirillum magnetotacticum MS-1; identical to SEQ ID NO: 871

SEQ ID NO: 2325 - protein, 760 aa, Arabidopsis thaliana; identical to SEQ ID NO: 1612

SEQ ID NO: 2326 - protein, 544 aa, Desulfococcus oleovorans Hxd3; identical to SEQ ID NO: 873

SEQ ID NO: 2327 - protein, 524 aa, Alcanivorax sp. DG881; identical to SEQ ID NO: 879

SEQ ID NO: 2328 - protein, 254 aa, Brassica napus
  misc_feature (245)..(245): Xaa can be any naturally occurring amino acid
GKKIRHLTIQLKKRNITKKLIFSVSTHASGEVESDYALLESIRRHLLGGEAELWFAESIPSSCFTESWGDLPLKENDSEDMLVYGLLNDPYDTSSPSSDLSCITDFLDLETSSKRPSDPPVVKAEPAESFAAATVEKQKAATAKGKHYRGVRQRPWGKFAAEIRDPAKNGARVWLGTFETAEDAAFAYDRAAFRMRGSRALLNFPLRVNSGEPDPVRITSKRSYTSSSSSSSKLKQLRKTENVPXEFQVKCEVV

SEQ ID NO: 2329 - protein, 503 aa, Methanosarcina mazei Go1; identical to SEQ ID NO: 890

SEQ ID NO: 2330 - protein, 883 aa, Clostridium perfringens SM101
MKRLLAKILAAIVITTTITNIGVSSNIYANTMYRNNQESTDKNEKWNLVWEDNFNGDYLNLQDWNYETHEPGWVNNELQEYTDDIRNIYVDNGNLVIKAIKEETEDGIKYTSGKVTTQNKHDYKYGRFEARLKVPEGQGLWPAFWMMPTEEELYGSWPRCGEIDIMEVLGHEPNKAYGTIHYGNPHQESQGSYILNGETFADDYHVFAVEWEPSEMRFYIDGNLYHTVNNWYTKQEGGDEITYPAPFDQPFYLQFNLAVGGNWPGNPDETTNFDNAEYKIDYVRVYQLENYNENVPKPEKPPVDLREPDTTGNYIINSDFSEVEDLEDNVDWYTLKTLGGEGKGRIEDNKIILSSESSGKENYSLQLVQAAIPLKKNNIYRLSFDARAAENRDMVINITSPDRGYIRQLQDTTVDLKNEFQKYSYEFTMKDNDDANARVEFNYGNRNSLADIEITNVRLEKIGEYENVNEDKKTILPNGNYVYNGTFDVGEDRMKYWEVDSKIEDVQATVTNINNKREFKISIPKSTSNLSDVILRESELGIAENKEYYLSFDAYAEEDKTIKAQINNKIFEAELTTEKKNFKYKFNTQDVLENRNLEFLLGTPGVTYIDNVKIMDTSLIINGDFSNEFSKWEVFKESSISSDVSSIIDKSNGNNAAQINISNTGDADWKIQLKQSGVKLEKGKKYKLSLDAKSTIKRAIMFTIQRDGSNDNDWRPYANTQIVDLENEYNKYEIIFDMTEESDSNSIFSISMGAVNNTQITEEHSIYIDNVNLIEVVKSEDDDNTSNPNNPNDPSIKDDIDDNNNNNGSNGNNGNNNSNSANNSGNNNNANNKVPSQDKNTNSTLVETGKKSYLALFGVILVLLGIGITGLNKKYKKTDKLIH

SEQ ID NO: 2331 - protein, 813 aa, Oryza sativa Japonica Group
MALDPADDPLLADCKYKLNHFRIKELKDVLHQLGLPKQGRKQELVDKIIAVLSDQQEQDSRLNGLPNKKMVGKETVAKIVDDTFAKMNGSTNAVPASRNQTDSGHIVKPKRKSDDSAQLDVKVRCPCGYSMANDSMIKCEGPQCNTQQHVGCVIISEKPADSVPPELPPHFYCDMCRITRADPFWVTVNHPVLPVSITPCKVASDGSYAVQYFEKTFPLSRANWEMLQKDEYDLQVWCILFNDSVPFRMQWPLHSDIQINGIPIRVVNRQPTQQLGVNGRDDGPVLTAYVREGSNKIVLSRSDSRTFCLGVRIAKRRSVEQVLSLVPKEQDGENFDNALARVRRCVGGGTEADNADSDSDIEVVADSVSVNLRCPMTGSRIKIAGRFKPCVHMGCFDLEAFVELNQRSRKWQCPICLKNYSLDNIIIDPYFNRITALVQSCGDDVSEIDVKPDGSWRVKGGAELKGLAQWHLPDGTLCMPTDTRSKPNIRIVKQEIKEEPLSEETGGRLKLGIRRNNNGQWEINKRLDSNNGQNGYIEDENCVVSASNTDDENSKNGIYNPEPGQFDQLTSNIYDLDSSPMDAHFPPAPTEQDVIVLSDSDDDNVMVLSPGDVNFSSAHDNGNAFPPNPPEASGICGEQPRGAGPDVTSFLDGFDDLELPFWESSSSQDAAGTQVTDNQCEMQNFIVNHQFLHEPILGVNLGGTAASNTLECEHDGALQACQSSDQDGDQNQTCHDGHSGDLTNLSIISTQDSLTNGKNASQKRTNCEDGTAGLDGSVVRSANGLRGEMPPLGQEQDRTVRQKLILTIESDSD

SEQ ID NO: 2332 - protein, 494 aa, Methanococcus maripaludis S2; identical to SEQ ID NO: 894

SEQ ID NO: 2333 - protein, 1530 aa, Listeria innocua Clip11262; identical to SEQ ID NO: 893

SEQ ID NO: 2334 - protein, 483 aa, Mycobacterium sp. JLS
MAPEGDQRVGSGDSDFVVVANRLPIDMERLPDGSTSIKRSPGGLVTALEPLLRKRRGAWIGWAGIPDSPEDPIEEDGLQLYPVALSADDVADYYEGFSNATLWPLYHDLIVKPIYHRKWWDRYVEVNRRFAEATARAAAQGATVWVQDYQLQLVPKMLRMLRPDLTIGFFLHIPFPPVELFMQMPWRTEIIEGLLGADLVGFHLPGGAQNFLYLSRRLTGANTSRASVGVRSRFGEVQVGFRTVKVGAFPISIDSAELDSKARNRSVRQRAREIRNELGNPRKILLGVDRLDYTKGINVRLEAFSELLEDGRVDRNDTVLIQLATPSRERVESYIAMREDIERQVGHINGEFGDVGHPIVHYLHRPVPRDELIAFFVAADVMLVTPLRDGMNLVAKEYVACRSDLGGALVLSEFTGAAAELRQAYLANPHHLEGVKDAIEAALNQDPEEGRRRMRALRRQVLAHDVDRWARAFLDALADTKSA

SEQ ID NO: 2335 - protein, 1505 aa, Streptococcus mutans UA159; identical to SEQ ID NO: 903

SEQ ID NO: 2336 - protein, 500 aa, Synechococcus sp. PCC 7002
MKSSLVILYHREPYDEVRENGKTFYRDKTSPNGIMPTLKSFFANAEQSTWVAWKQISGKQQENFQAKMAFPGQENSVVHRIPLSADQVKNFYHITSKEAFWPILHSFPWQFTYDSSDWENFKQINEMFAEAACEDADDDALFWVHDYNLWLTPYFIRQKKPNAKIAFFHHTPFPSVDIFNILPWREAIVDSLLCCDLCGFHLPRYVQNFVAVARSLRKVEITRQVPVDEHAFTAVGTALAEPEITTQLKYKDHLVNLDAFPVGTNPTQIRAQVEKASTQERIRKIREELGSNKLILSAGRVDYVKGTKEMLVCYERLLERRPELQTKVNLVVAAAKAASGMRVYKNAQSEIERLVGRINGRFANLNWTPILLFTSALSYEELLGFFGAADIAWITPLRDGLNLVAKEYVVAHGCDDGVLILSEFAGSAVELPDAILTNPYAAKRMDESIDQALAMPVEEQQRRMKSMYQAIQRYDVQQWANHMFREAKATAVLGKEPTPV

SEQ ID NO: 2337 - protein, 1487 aa, Moritella sp. PE36; identical to SEQ ID NO: 917

SEQ ID NO: 2338 - protein, 1524 aa, Erythrobacter sp. NAP1; identical to SEQ ID NO: 924

SEQ ID NO: 2339 - protein, 787 aa, Oryza sativa Indica Group
MVSRSYSNLLELAAGGGGGGGGEGPLPSLGRRRIPRVVTASGIVPDLDYSDDDAASAASSSDHSSAHSHAPRERAIIVANQLPIRASRRGGGGGGWEFSWDEDSLLLQLRDSLRAHADRADDMEFVYVGGLRDDVPAAEHDEVAHHLLEGFRCVPTFLPADLRSRFYHGFCKQQLWPLFHYMLPLSPELGGRFDRALWQAYVSVNKIFADKILEVISPDEDYVWVHDYHLMILPTFLRKRFNRVKLGFFLHSPFPSSEIYKTLPVREELLRSLLNADLIGFHTFDYARHFLSCCGRMLGLKYESQRGYIALEYYGRTVTIKILPVGVHLEQLRSVLNLPETGVKVAELLKQFCDQNRLMLLGVDDMDIFKGISLKLLAFEQLLMQHPEWRGRVVLVQIANPARGRGKDVKEVQDESYAMVRRINEAFGQPGYQPVILIDRPLQFYERMAYYVVAECCLVTAVRDGMNLIPYEYVIARQGNEKLDGILGLGPSARKKSMLVVSEFIGCSPSLSGAIRVNPWNIDAVADAMDSALEMPEGEKVLRHEKHHKYVSTHDVGYWANSFLQDLERTCLDHSRRRCWGIGFGLRFRVVALDPNFKKLAVEHLVSAYRRTTTRIILLDYDGTLMPQTSFGKSPSSKTIDMLNSLSRDQNNMVFLVSTKKRSTLEEWFSSCDNLGLAAEHGYFLRSISPSQSDQAPKFGRDESATTGAGATPFAGMVQVSNGCFKRMCKACSVDYTSGYPKLCVGYNVINLYTLLLKLQPNGSKGSLALAIHEESSGDSNSQKAHQ

SEQ ID NO: 2340 - protein, 148 aa, Petrotoga miotherma
  misc_feature (10)..(10): Xaa can be any naturally occurring amino acid
  misc_feature (32)..(32): Xaa can be any naturally occurring amino acid
STAVVKVLAXHGCEYMTGGKVVILGKTGRNFXRSMSGGIAYVYDKDNSFESKCNKDTVLLEKVEDENEKNEIKELIKKHYKYTSSNVAKNILNNWGKTKERFVKVIPKDYKRMMDVVNRMHIEGITGEEALMKAFEENYKQQSLVQTH

SEQ ID NO: 2341 - protein, 1480 aa, Azotobacter vinelandii; identical to SEQ ID NO: 927

SEQ ID NO: 2342 - protein, 1625 aa, Capsicum annuum; identical to SEQ ID NO: 926

SEQ ID NO: 2343 - protein, 756 aa, Oryza sativa Japonica Group
EFIYIGCLRDDIPLADQDAVAQALLESYNCVPAFLPPDIAERYYHGFCKQHLWPLFHYMLPLSPDLGGRFDRALWQSYVSANKIFADKVLEVINPDDDFVWVHDYHLMVLPTFLRKRFNRIKLGFFLHSPFPSSEIYKTLPVREELLRALLNSDLIGFHTFDYARHFLSCCGRMLGLSYESKRGHICLEYYGRTVSIKILPVGVNMGQLKTVLALPETEAKVAELMATYSGKGRVVMLGVDDMDIFKGISLKLLAMEELLRQHPEWRGKLVLVQVANPARGRGKDVDEVKGETYAMVRRINEAYGAPGYEPVVLIDEPLQFYERVAYYVVAEVCLVTAVRDGMNLIPYEYIVSRQGNEALDRMLQPSKPEEKKSMLVVSEFIGCSPSLSGAVRVNPWNIEAVADAMESALVLPEKEKRMRHDKHYRYVDTHDVGYWATSFLQDLERTCKDHAQRRCWGIGFGLRFRVVSLDLSFRKLAMEHIVMAYRRAKTRAILLDYDGTLMPQAINKSPSANSVETLTSLCRDKSNKVFLCSGFEKGTLHDWFPCENLGLAAEHGYFLRSSRDAEWEISIPPADCSWKQIAEPVMCLYRETTDGSIIENRETVLVWNYEDADPDFGSCQAKELVDHLESVLANEPVSVKSTGHSVEVKPQGVSKGLVARRLLASMQERGMCTDFVLCIGDDRSDEEMFQMITSSTCGESLAATAEVFACTVGRKPSKAKYYLDDTAEVVRLMQGLASVSNELARAASPPEDDDE

SEQ ID NO: 2344 - protein, 839 aa, Candida glabrata CBS 138
MDYNIPLGDDRCLVCNACNRLSLLDLDGLDALIRYLSEYKALKVDLGTGNSENVGIADKRNGLCLFLLRYLKKDRSKSYEIRAVIRAIDAIYRKQKLPSMMELTMLVRKYTNKYDPYGYWDNVDEFNPMDVVTKQMIEFMNISNNPKSPNFVRSPFYEILSIIPDTTRRLPAIEVKNVAECKFKFEKNVWTKLTDEKYPLKLYLFSRKDSKDPETGDYIPNKDEDTPIAFPTPIEVWVNNEKIKANFKGLKNRDGSVNPVDLTPFLKSWRAQNVVKIIHVFNKECYSSYCALIKPIAPQEILTTILNKPVIPYTSALENVKKLFGEQTDNELITTSTIISLKCPISYTRMSYPVRSKYCEHLQCFDGLWFLHSQLQVPTWMCPVCQISLKPADLYVCEFSMRVLNSCANNVEQIELAPDSTWKPIYEKEDQSDCSDEEDTSKDTMTEVLKHEMVTDTITNKTSRNNSQLNVVSLLSDEEDDTTTTKSKDRGSKLVPTSKNYNSSSTGNVVRKSIGNEKNGAVSQSIAIAASTTLHNDTNHDDEDDDLPLSAVARKRGSPREFSYGSYEINGTLASLSNNATLPQNSHTHKKPHLQRLAPKLLAKEPLKNTNGADANPIFGINSKFKNDNQLSKKTLDPKATSQPTINPSFDSAQQYSMRISSQAGLGSRSILSSNSNLTTSDCNPFVSEQQLAYEGKNGRASSEIMQKPIRNENRQSQQRVTPDLKHVNDYKRTNKKGKIKNIVNDQKAEELTQLANGRLKTDKAPELPILPKLPQIAGQSHSTSKIASEPSLDKINRVSIKTKPPSALPIVNPFLTSKSKPNNTKGAEIVKGNSPWFV

SEQ ID NO: 2345 - protein, 450 aa, Zea mays
MAVNRVATAREEQVPHDEPRAAASSVTYDEHKHGIKQYTDVTCASDNVLEFLIRSERSLPEVVMMMIPEAWHNDVNMDPENKDFGRVLMASEVGVLDVPNDDVMRKDRLNLGMMFFVDFEKHCIVDDDALKKQYSRACPYGEWLERQKIQLVDIIESVSKTERIAPRISTLPQKNENKEDFGIHGILAMQKTFGYTVKTFKMLLLPMAKNGVEALGSMENNIPLAVMSNREKLHFDYFKQMFAQVTNPPIDPIKRKNVTSMECMIGQKGDLYETTDKRYYGKDAKGNNYDGWCWPGSSSFSDTLIPEIHEWWADTFSSENFKGSTSTMYILNDMDEPSVFNDPEITMPREAMHYGDIEHRELHQAYGYFFAGSQRSCRSCACPNWGGVVLVAPKLLAGAGISPPAAISGHLVSALRDPQIKTSRLPVRCDGLQQYPYKLFSSFIDYRSIR

SEQ ID NO: 2346 - protein, 544 aa, Zea mays
MEAVGVPPAPVAAPEKKKLLDLKDPFPAAANSGAKASSASKWATKKKLVGGDAGYVLEDVPHLTDYMPQLPSPILLVCHVGFLTTYPNPLQDNPAYSVVKQYFVNPDDTVTQKIVVHKTSARGTHFRRAGPRQRVYFQSDEVNAAIVTCGGLCPGLNTVIRELVCGLYDMYGVSRVVGIEGGYKGFYSKNTVALTPKSVNDIHKRGGTVLGTSRGGHDTAKIVDCLQDRGINQVYIIGGDGTQKGASVIYEEVRRRGLKCSVVGVPKTIDNDIAVIDKSFGFDTAVEEAQRAINAAHVEAESAENGIGVVKLMGRNSGFIAMYATLASRDVDCCLIPESPFYLEGKGGLLEFVERRLKDNGHMVIVVAEGAGQDLIARSMNFVDTQDASGNKLLLDVGLWLSQKIKDHFKKKPSFPITLKYIDPTYMIRAVRSNASDNVYCTLLAHSALHGAMAGYTGFTVAPVNGRHAYIPFYRITEKQNKVVITDRMWARVLCSTNQPCFLSHEDVENMKHDDDEHHHMHNTQLLEGGSSPVSKCNGSAAAV

SEQ ID NO: 2347 - protein, 179 aa, Gossypium hirsutum
MLVFGYLRDALTVGWAPSDHSSPTFPPIKPEPQEIPTETAVKEVPTVANAAVPTVVPAKGKHYRGVRQRPWGKFAAEIRDPAKNGARVWLGTFETAEDAALAYDKAAYRMRGSRALLNFPLRVNSGEPDPVRITSKRATPEPSTSSSSGSENGSPKRRRKVGSAAPVVAQAGLNMGFGA

SEQ ID NO: 2348 - protein, 236 aa, Nicotiana tabacum
MNQPIYTELPPANFPGEFPVYRRNSSFSRLIPCLTETWGDLPLKVDDSEDMVIYTLLKDALNVGWSPFNFSAGEVKSEQREEEIVVSPAETTAAPAAELPRGRHYRGVRRRPWGKFAAEIRDPAKNGARVWLGTYETDEEAAIAYDKAAYRMRGSKAHLNFPHRIGLNEPEPVRVTAKRRASPEPASSSENSSPKRRRKAVATEKSEAVEVESKSNVLQTGCQVELLTRRHQLLVS

SEQ ID NO: 2349 - protein, 579 aa, Hordeum vulgare subsp. vulgare
MGEVAAEMYTQDGTVDIKGNPALKKDTGNWRACPYILANECCERLAYYGMSTNLVNFMKDRMGMANAAAANNVTNWGGTCYITPLIGAFLADAYLGRFWTIASFMIIYIFGLGLLTMATSVHGLVPACASKGVCDPTPGQSAAVFIALYLIALGTGGIKPCVSSFGADQFDEHDDVERKSKSSFFNWFYFSINIGALVASSVLVYVQTHVGWSWGFGIPAVVMAIAVGSFFVGTSLYRHQRPGGSPLTRIAQVLVAATRKLGVAVDGSALYETADKESGIEGSRKLEHTRQFRFLDKAAVETHADRTAAAPSPWRLCTVTQVEELKSVVRLLPIWASGIVFATVYGQMSTMFVLQGNTLDASMGPKFKIPSASLSIFDTLSVIAWVPVYDRILVPAVRSVTGRPRGFTQLQRMGIGLVVSMFAMLAAGVLELVRLRTIAQHGLYGEKDVVPISIFWQVPQYFIIGCAEVFTFVGQLEFFYDQAPDAMRSMCSALSLTTVALGNYLSTLLVTVVAKVTTRGGKQGWIPDNLNVGHLDYFFWLLAALSLVNFAVYLLIASWYTYKKTAGDSPDAKGGAHDQ

SEQ ID NO: 2350 - protein, 324 aa, Triticum aestivum
STRRPRFTHTDQLSYSLQSTDPTQLRETTEQSTARMLLNPASEALVLDSIRQHLMEDTAAPAPEARRQRPAYCRSASFGSLVADQWSESLPFRADDSDDMVVYGALRDAFSCGWLPDGSFAAVKPEPLLPSPDSCYVGFLEPETPPATSPGESEEEAAAAFMGEAAAAAARGKHYRGVRQRPWGKFAAEIRDPAKNGARVWLGTYDTAEDAAVAYDRAAYRMRGSRALLNFPLRIGSEIAAAHAAAAAAGDKRPSPEPATSDSSSSSSSSGSPKRRKRGEAAAASMAMALVPPPSQLSRPAQAWYPAAPVEQVAMAPRAQQLVS

SEQ ID NO: 2351 - protein, 192 aa, Arabidopsis thaliana
MNTIINSSKCRLNTLLIKSMSIAIVLVKLKDITTNSKCPNLVRKASTYRRSSKRAIFLDSDGTLVPEASIVKDPSAEVISALKALGSGKVSLSEWLAPCENLGIAAEHGYFTSLLNSDWETSGLSDDLEWKKVVEPIMRLYTETTDGSSIEAKERALVWHHQDADPDCSSCQCIPRNVGQGIKVNLNHDKKT

SEQ ID NO: 2352 - protein, 61 aa, Physcomitrella patens subsp. patens
HYRGVRQRPWGKFAAEIRDSARQGARVWLGTFDTAEQAAMAYDAAAFKMRGCRALLNFPLQ

SEQ ID NO: 2353 - protein, 181 aa, Triticum aestivum
MPLSLGADHLAAPGARAPPARVGTGMGMDTSLSLGGAAAYLPLNENDSLDMLLFDVLREASAVAAASPSSSSSPPTKTATAIAAAGADAIESGGACAAGRAAERPHYRGVRRRPWGKYAAEIRDPSRPGTRLWLGTFGTAEEAAVAYDRAAFRLRGAKALLNFPPAVGAHEARRGGANEAR

SEQ ID NO: 2354 - protein, 233 aa, Nicotiana tabacum
MYQPISTELPPTSFSSLMPCLTDTWGDLPLKVDDSEDMVIYGLLSDALTAGWTPFNLTSTEIKAEPREEIEPATIPVPSVAPPAETTTAQAVVPKGRHYRGVRQRPWGKFAAEIRDPAKNGARVWLGTYETAEEAALAYDKAAYRMRGSKALLNFPHRIGLNEPEPVRLTAKRRSPEPASSSISSALENGSPKRRRKAVAAKKAELEVQSRSNAMQVGCQMEQFPVGEQLLVS

SEQ ID NO: 2355 - protein, 1528 aa, Xanthomonas oryzae pv. oryzae KACC10331; identical to SEQ ID NO: 938

SEQ ID NO: 2356 - protein, 233 aa, Ostreococcus tauri
MSGDGDDDARALSREDLVYKAKLAEQAERYEEMMDCMSEVTLKSGEEELSVEERNLLSVAFKNVIGARRASWRIVSSIETKEEAKHGKDSDKCKLIASYKANVEKELTSICTRILDLLKNHLEDRCSAGESKVFYKKMKGDYWRYLAEFKGGAERKEAAEETLLAYKSAEQTARRSCNPERAGTRVPNGEESVSMKRSDSTLIMQLLRDNLTLWTSDMNDSQATGGAEEEDDE

SEQ ID NO: 2357 - protein, 500 aa, Mycobacterium marinum M
MGPGGRQSAEPASTEVFGDSDFVVVANRLPVDQERLPDGTIAWKRSPGGLVTALEPLLRRRRGAWVGWAGVVENDVDVQDEPIVQDELQLQPVRLSADDVAQYYEGFSNATLWPLYHDVIVRPIYHREWWDRYVDVNRRFAEATARAAARGGTVWVQDYQLQLVPKMLRAMRPDLTIGFFLHIPFPPVELFMQLPWRTEIIQGLLGADLVGFHLPGGAQNFLILSRRLVGADTSRGTVGVRSRFGEVILGSRTIRVGAFPISIDSGALDQTARDRNIRRRSREIRAELGNPRKILLGVDRLDYTKGIDVRLKAFSELLAEGRVKRDDTVLVQLATPSRERVESYQTLRNDIERQVGHINGEYAEVGHPVVHYLHRPVPRNELIAFFVASDVMLVTPLRDGMNLVAKEYVACRSDLGGALVLSEFTGAAAELRHAYLVNPHDLEGVKDGIEEALNQTEEAGRRRMRSMRRQVLAHDVDRWARSFLDALADSRPNDSADAAD

SEQ ID NO: 2358 - protein, 130 aa, Pimpinella brachycarpa
GTRESKVFYLKMKGDYHRYMAEFKVGDERKNAAEDTMNSYKAAQDIALADLAPTHPIRLGLALNFSVFYYEILNSSDKACSMAKQAFEEAIAELDTLGEESYKDSTLIMQLLRDNLTLWTSDSQDQLDEP

SEQ ID NO: 2359 - protein, 1517 aa, Escherichia coli CFT073; identical to SEQ ID NO: 954

SEQ ID NO: 2360 - protein, 226 aa, Bacillus halodurans
SFGAFIPRGMTLHLEGDANDYTAKGLSGGKIIVRPPAGSTFKAEENVIIGNTSFYGATSGEAFIRGQAGERFCVRNSGVNVVIEGMGDHGLEYMTGGRVINLGKVGKNFGAGMSGGVGYIYDYDGTFEKKCNKEMILLESLSDEGDVVFIKSMLERHLAYTDSDLAKSILADWNQARKRFIKVIPKDYKRMLEAIERVKREGLSDTEAVMVAFDENKNDKSRVGGK

SEQ ID NO: 2361 - protein, 367 aa, Oryza sativa Japonica Group
MTNQDVVVSEMGIAAGAALPGGPAGPAGGLFACRSAAASMRQTYLDLAAAAVAARSASCTSWADAMRASSPTRSSRSASDVDEFTAWVRKHPSALSKFEEIAAKSRGKKIVMFMDYDGTLSPIVADPDTAYMSDAMRAAVREVAKTFPTAIVSGRCRDKVRNFVGLSDLYYAGSHGMDIKGPSSNPESALCQPASEFLPMIDEVYKTLVEKTKSTPGAKVENNKFCLSVHFRCVDEKRWNALGEQVKAVIKEYPKLKLTQGRKVLEIRPSIEWDKGKALEFLLESLGFANCGDVMPVYIGDDRTDEDAFKVLRKRGQGLGILVSKCPKDTNASYSLQDPTEVMEFLLRLVEWKRKSSSSSLMIRPRV

SEQ ID NO: 2362 - protein, 1508 aa, Roseovarius nubinhibens ISM; identical to SEQ ID NO: 959

SEQ ID NO: 2363 - protein, 303 aa, Triticum aestivum
MLLNPASEALVLDSIRQHLMEDTAAAAAPVAEARRQRPAYCRSASFGSLVADQWSESLPFRADDSDDMVVYGALRDAFSCGWLPDGSFAAVKPEPLLPSPDSAYACDGPSCFGFLEPETPPATSPGEGEEEGAAFMGEAAAAVARGKHYRGVRQRPWGKFAAEIRDPAKNGARVWLGTYDTAEGAAVAYDRAAYRMRGSRALLDFPLRIGSEIAAAHAAAAHAAAAAAGDKRPSPEPATSDSSSSSSSSGSPKRRKRGEAAAASMAMALVPPPSQLSRPAHAWYPAAPVEQVAMAPRAQQLVS

SEQ ID NO: 2364 - protein, 311 aa, Oryza sativa Indica Group
MKEREKVVRLAKLAEQAERYDDMVEFMKTLARMDVDMSAEERLLFSVGFKKTIGARRASWRILESLEQKVTAGEQPGVTINGYKKKVEDELRAVCNEVLSIIAIHCLPLANSGENVVFFYKMYVQVLPNDAKVSQNQRFKHTSHDSCVIPPGTNYANLFCPQYPKTYRKGDYYRYLAEFSTGTEKKAATDQSLMAYQHAMVVSSSELSPAHQFRLGLALNFSVFFYEIMNSPERASQVAKQALDEATAEINSAGVEGYKDSMLMMQLLKENLALWTSELTGGETSKDDDVVMEPYAQFINYECIVKLFAYG

SEQ ID NO: 2365 - protein, 508 aa, Coccidioides immitis RS
MPSLESPHKEDPRLLLVSNRLPITIKRSDDGKYDSSMSSGGLVSGLSGLSKTTRFQWYGWPGLEVPEDEIEIVTKRLKDEYNAVPVFIDDELADRHYNGFSNSILWPLFHYHPGEITFDESAWNAYRDANRLFAKAIAKDVRDGDLVWVHDYHLMLLPSMLREEIGETKSNVKIGFFLHTPFPSSEIYRILPVRNELLLGVLHCDLIGFHTYDYARHFLSSCSRILGLSTTPNGVEFQGKMVSVGAFPIGIDPDKFSEGLKKEKVQKRIAQLEQKFQGVKLMVGVDRLDYIKGVPQKLHALEVFLTDHPEWIGKVVLVQVAVPSRQDVEEYQNLRAVVNELVGRINGKFGTVEFMPIHFMHKSVNFDELIALYAVSDACIVSSTRDGMNLVSYEYIATQHKRHGVLVLSEFAGAAQSLNGSIIVNPWNTEELAAAYQEAVTMSDEQRALNYSKLEKYVHKFTSAFWGQSFVSELTRISAHGEKKLLLRRSSVAPNAAADVINNDIDGH

SEQ ID NO: 2366 - protein, 69 aa, Brassica napus
  misc_feature (57)..(57): Xaa can be any naturally occurring amino acid
MADWGPVVIATVLFVLLTPGLLFQLPAHGRIVGFGTMHTSGIAILVHAVLYFALITXFLIAIGVHIYAD

SEQ ID NO: 2367 - protein, 275 aa, Cucurbita pepo
MAGRSSPREEFVYLAKLAEQAERYEEMVEFMEKVSAAVDNEELTVEERNLLSVAYKNVIGARRASWRIISSIEQKEESRGNDDHVSIIRDYRSKIETELSNICGFRILNLLDSRLIPSAASGDSKVFYLKMKGDYHRYLAEFKTGAERKEAAESTLTAYKSAQDIANAELPPTHPIRLGLALNFSVFYYEILNSPDRACSLAKQAFDEAIAELDTLGEESYKDSTLIMQLLRDNLTLWTSDIRGSRDDIKEAAPKRDCTNSSEQIDLHVQDSTSP

SEQ ID NO: 2368 - protein, 831 aa, Triticum aestivum
  misc_feature (484)..(484): Xaa can be any naturally occurring amino acid
  misc_feature (486)..(486): Xaa can be any naturally occurring amino acid
IDLSLILKPAAEIRPGAAQYCVEKQDHGLDMALDNKLIALSRAALEKEVRVFIETPIKNTNRAVGTTLSHEVTKRYHMKGLDPGTIHVKLTGSAGQSFGAFLCPGITLELEGDSNDYVGKGLSGGKIVVYPPRNSTFSAEDNIVIGNVALYGATKGEAYFNGMAAERFCVRNSGARTVVEGIGDHGCEYMTGGTVVILGKTGRNFAAGMSGGIAYVYDVDGTFSVRCNNELVDLYHVEEEDDVTTLKMMIEHHRLRTESVLAKDILSKFDTLLPKFVKVYPRDYKRVLEEMKAEKAAARPTKEPKVANGVSVTTKKIQTEKSSSRPTRVANAKKYRGFVTYEREGVSYRDPIERVKDWNEVAIESVPGPLLNTQSARCMDCGTPFCHQESSGAGCPLGNKIPEFNELVHQNRWREALDRLLETNNFPEFTGRVCPAPCEGSCVLGIIENPVSIKSIECSIIDKGFEEGWMVPRPPLQRTGKRIXLXSWQWSLADGLAAADQLNKMGHFVTVFERSDRIGGLMMYGVPNMKTDKIGVVQRRVNLMAEEGVTFVVNANVGSDPLYSIERLRSENNAVILACGATKPRDLSIPGRELAGVHFAMEFLHANTKSLLDSNLEDGRYISAQGKKVVVIGGGDTGTDCIGTSVRHGCSSIVNLELLTKPPSKRAADNPWPQWPRVFRVDYGHQEASTKFGNDPRTYEVLTKRFIGDENGKLKALEVVRVKWEKVDGRFQFKEIEGSQEIIEADLVLLAMGFLGPEENIADKLGLEKDNRSNFKAQFGHFGTSVDGVFAAGDCRRGQSLVVWAITEGREAAAAVDKYLSRDEQNVAGLT

SEQ ID NO: 2369 - protein, 322 aa, Glycine max
SSSPVDVPQIKYGAIVKKAANNKEWSWSDVANPIFKCSDKVRSLISSLTFSIMKISVKDISASLTKGASQPYEAIFVSSKTKKSDALDPLIVVLHGGPHTVSLSSFSKPLAYLSSLGYSLLIVNYRGSLGFGEEALQSLPGKAGSQDVNDVLTAIDHVINLGLASPSKIAVLGGSHGGFLTTHLIGQAPEKFVAAAARNPVCNLALMVGTTDIPDWCYVETYGTKGRDKFTEAPSAEDLTLFYSKSPIAHLSKVKTPTIFLLGAQDLRVPISTGLQYARALREKGGQVKVIVFPNDVHGIERPQSDFESYLNIAMWFNKYCK

SEQ ID NO: 2370 - protein, 268 aa, Zea mays
MSPSEPTREESVYMAKLAEQAERYEEMVEFMERVARYAGGAGGGDELSVEERNLLSVAYKNVIGARRASWRIISSIEQKEEGRGNEAHAASIRAYRSKIEAELARICDGILALLDSHLVPSAGGAESKVFYLKMKGDYHRYLAEFKSGAERKDAAESTMNAYKAAQDIALADLAPTHPIRLGLALNFSVFYYEILNSPDRACNLAKQAFDEAISELDSLGEESYKDSTLIMQLLRDNLTLWTSDTNEDAGDEIKEAAAAPKESAPEGQ

SEQ ID NO: 2371 - protein, 854 aa, Vitis vinifera
MVSRSYSNLLELASGESPSFGRMSRRIPRIMTVAGIISDLDDDPSESVCSDPSSSSVQRDRLIIVANQLPIRAQRKSENNNGWIFSWDENSLLLQLKDGLGDDEIEVIYVGCLKEEIHPCEQDEVSQILLETFKCVPTFLPPDLFTRYYHGFCKQQLWPLFHYMLPLSPDLGGRFNRSLWQAYVSVNKIFADRIMEVINPEDDFVWIHDYHLMVLPTFLRKRFNRVKLGFFLHSPFPSSEIYRTLPIREELLRALLNSDLIGFHTFDYARHFLSCCSRMLGLSYESKRGYIGLEYYGRTVSIKILPVGIHMGQLQSVLSLPETEEKVAELIKQFCDQDRIMLLGVDDMDIFKGISLKLLAMEQLLVQHPEWQGKVVLVQIANPARGRGKDVKEVQTETFSTVKRINETFGKPGYDPVVLIDEPLKFYERIAYYVVAECCLVTAVRDGMNLIPYEYIISRQGNEKLDKVLGLESSIPKKSMLVVSEFIGCSPSLSGAIRVNPWNIDAVADAMDSALEMLEPEKQLRHEKHYRYVSTHDVGYWARSFLQDLERTCRDHVRRRCWGIGFGLSFRVVALDPNFRKLSMEHIVSAYKRTTTRAILLDYDGTLMPQASIDKGPTPKSIEMLKTLCRDENNMVLIVSARSRKKLEDWFSPCENLGIAAEHGYFLRPKGDVEWETCVPVADCSWKQIAEPVMKLYTETTDGSTIEDKETALAWCYEDADPDFGSCQAKELLDHLESVLANEPVTVKSGQSLVEVKPQGVSKGIVAKRLLSTMQERGMLPDFVLCIGDDRSDEDMFEAITSSMAGSSIAPRAEVFACTVGRKPSKAKYYLDDTGEIVRLMQGLASVSEQPVPL

SEQ ID NO: 2372 - protein, 251 aa, Avena strigosa
  misc_feature (51)..(51): Xaa can be any naturally occurring amino acid
LLDSMKASSPRHEDWIEKHPSALEWFEAVLAAAKGKQVVMFLDYDGTLSPXVEDPESAVMTEDMRDAVRAVAQHFPTAIVSGRCRDKVFNFVKLEELYYAGSHGMDIKGPVLCQPAIEFLPVIQEVYQTLTAKMQSIPGATVENNKFCLSVHFRCVAEEEWDGLGEEVRAVLDGYPDLCLTKGRKVLEIRPSIKWDKGNALEFLLESLGYAGRGDVFPIYIGDDRTDEDAFKVLRNMGQGIGILVTKFPKE

SEQ ID NO: 2373 - protein, 241 aa, Pennisetum glaucum
  misc_feature (143)..(143): Xaa can be any naturally occurring amino acid
QIVMFLDYDGTLSPIVADPDAAYMSDAMRSAVRDVAKHFPTAIVSGRCRDKVRNFVGLSELYYAGSHGMDIKGPSSNPESVLCQPASEFLPVIDEVYKLLVEKTKSTPGAKVENNKFCLSVHFRCVDEKRWNALAEQVKAVIXDYPKLKLTQGRKVLEIRPSIMWDKGKALEFLLESLGFANCSDVLPVYIGDDRTDEDAFKVLRKRGQGLGILVSKCPKETNASYSLQDPGEVMEFLRKL

SEQ ID NO: 2374 - protein, 301 aa, Zea mays
MPTSSPFVGDSGTAGSPIRAERAVGEHGRRYDVFASDAMDTDAAEAASASAGAFALDGVHSPGRASPANMEDAGGAAAGHAARPPLAGSRSGFRRLGLRGMKQRLLVVANRLPVSANRRGEDHWSLEISAGGLVSALLGVKDVDAKWIGWAGVNVPDEIGQRALTKALAEKRCIPVFLDEEIVHQYYNGYCNNILWPLFHYLGLPQEDRLATTRNFESQFDAYKRANQMFADVVYEHYQDGDVIWCHDYHLMFLPKCLKDPDINMKVGWFLHTPFPSSEIYRTLPSRLELLRSVLCADLVG

SEQ ID NO: 2375 - protein, 506 aa, Brassica napus
  misc_feature (287)..(287): Xaa can be any naturally occurring amino acid
EQMLNQHSNWRGRAVLVQIVNPARGKGIDIDEIRGEIEGSCKRINEDFGKPGYQPIVYIDTPVSVNEIIAYYHIAECVVVTAVRDGMNLTPYEYIVCRQGLLGSESDFNGPKKSMLVASEFIGCSPSLSGAIRVNPWNVEATGEALNEALSMRDPEKQLRHEKHFRYVSTHDVAFWSRSFLQDLERICVDHFKKRCWGMGISFGFRVVALDPNFRKLSIPCIVSDYKRAKSRAILLDYDGTLMPQNSINKAPSQEVLKFLNELCEDKKNSIFIVSGRGRESLGNGFXPCENIGIAAEHGYFLKWPGTKEWETCGQSCDFGWMQIVEPVMKQYTEATDGSSIEIKDSALVWQYRDADSGFGSLQAKEMLEHLESVLANEPVAVKSGHYIVEVKPQGVSKGSVAEKIFSSMDEKGKPVDFVLCIGDDRSDEDMFEAIGNAMSKRLLCDNALVFACTGGQKPSKAKYYLDDTMEVTSMLESLAEASEASNFSMRELDEALLIFETRMLK

SEQ ID NO: 2376 - protein, 555 aa, Colwellia psychrerythraea 34H; identical to SEQ ID NO: 977

SEQ ID NO: 2377 - protein, 343 aa, Glycine max
MSGTGVVSMDHVLVALGETKEEREVRIRSLFNFFDAANNGYLDYAQIEAGLSALQIPPEYKYARELCEVCDANSDGRVEYHEFRRYMDDKELELYRIFQSIDVEHDGTILPEELYEALLKAGIEMNDEELAHFVEHVDKDNNGIITFEEWRDFLLLYPHEATIENIYHHWERVCLVDIGEQAVIPEGISKHVNRSKYFLAGGIAGGISRTATAPLDRLKVVLQVQSEPASIMPAVTKIWKQDGLLGFFREPGPLVQLGCGTISGAVGATCVYPLQVIRTRLQAQPSNTSDAYKGMFDAFRRTFQLEGFIGFYKGLFPNLLKVVPAASITYVVYESLKKTLDLD

SEQ ID NO: 2378 - protein, 1491 aa, Alkalilimnicola ehrlichei MLHE-1; identical to SEQ ID NO: 987

SEQ ID NO: 2379 - protein, 490 aa, uncultured archaeon GZfos23H7; identical to SEQ ID NO: 986

SEQ ID NO: 2380 - protein, 532 aa, Oryza sativa; identical to SEQ ID NO: 1546

SEQ ID NO: 2381 - protein, 859 aa, Physcomitrella patens subsp. patens
MDNYEGSRNLNEKLHPSKQRLLVVANRLPVSAIRLEGDKWDLQLSAGGLVSALLGMHSFETRWIGWPGVSVHDEKGRASLTEALALKGCVPVFLDDDTVDQYYNGYCNNVLWPLFHYIGLPQADRLAATRSLDSQFQAYQHANSLFAKIVFSQYQEGDVVWCHDYHLMCLPQKLKELNPHMKVGWFLHTPFPSSEIYRTLPLRSELLKAVLTADLIGFHTYDYARHFVSACTRILGLEGTPEGVEDQGKLTRVAAFPIGIDPERFISALETEQVKLHVKELLRFFAGRKVMLGVDRLDMIKGIPQKLLAFEMFLEKNPQWREKVMLVQIAVPTRTDVHEYQRLTSQVHEIVGRINGRFGTVTFVPINHLDRSLAFHELCALYASTDVVLVTSLRDGMNLVSYEYVACQHMKNTEGVLVLSEFAGAAQSLGAGAILVNPWNIREMYKAIEEALTMSDEERKERHRHNFTHVMTHTAQAWAVNFLDCKDTNYTGSANASELNDTYVEAELRTLNEPPVLPVDTAKESFRRCTNRLLIFGFNSTITAAVEAPRRDQIKESKLGLHPGMKDSLKTLCSDPNTDVVILSGSRLDVLEEVFGEYGIWLAAENGMYLRDLSGNWMPTMEHLNMDWKEYVQRVFDYFCQRTPRSYVEKRETSLVWNYKYADVDFGKVQARNMLQHLWTGPISNAAVDVVQGQKSVEVRPIGVSKGAAIDRIVFEILRNKYPNGSYTSNIQFDFVMCVGHFLSKDEDVFAYFDPEIVLHRDYHGSIYSYSDRDLMGDLVNVSSDTYISCAVGKKRSSARYYLDTVNEVVSFVKSLADACPCELDSEDQSVLSVGSGSGPHVSPCSADSLPNGIPRHDL

SEQ ID NO: 2382 - protein, 1527 aa, Mycobacterium avium subsp. paratuberculosis K-10; identical to SEQ ID NO: 992

SEQ ID NO: 2383 - protein, 282 aa, Prunus armeniaca
VSVAGIPKTIDNDIPVIDRSFGFDTAVEEAQRAINAAHVEAESIENGIGVVKLMGRYSGFIAMYATLASRDVDCCLIPESPFYLEGRGGLFEYIEKRLKENGHMVIVIAEGAGQDLLSESLQSMNQQDASGNKLLKDVAYGISQKIKNHFGRQQKISINLKYIDPTYMIRAIPSNAADNVYCTLLAQSAVHGPMGGYTGFICGPVNGRHSYIPFNHITEKQNKVVITDRMWARLLSSTNQPTFLNPKDVIEVQEGEEPPTQLLEGENCKDSKFATKDIPSMT

SEQ ID NO: 2384 - protein, 1498 aa, uncultured marine bacterium 314; identical to SEQ ID NO: 994

SEQ ID NO: 2385 - protein, 1578 aa, Bradyrhizobium sp. BTAi1; identical to SEQ ID NO: 995

SEQ ID NO: 2386 - protein, 248 aa, Sorghum bicolor
QIVMFLDYDGTLSPIVKDPDSAVMSEEMRDAVRGVAEHFPTAIVSGRCRDKVFNFVKLAELYYAGSHGMDIKGPTAQSKHTKAKAEAVLCQPASAFLPVIDEVYRTLTARTAPIPGATVENNKFCLSVHFRCVHEEKWRALEEQVRSVLKEYPDLRLTKGRKVLEIRPSIEWDKGNALQFLLESLGFADSNNVFPIYIGDDRTDEDAFKVLRSMGQGIGILVSKIPKETSASYSLREPSEVKEFLRKL

SEQ ID NO: 2387 - protein, 442 aa, Nocardia farcinica IFM 10152; identical to SEQ ID NO: 998

SEQ ID NO: 2388 - protein, 436 aa, Hordeum vulgare
CGVGFVANLSNEPSFNVVRDALTALGCMEHRGGCGADNDSGDGAGLMSGIPWDLFDDWASKEGLVPFERTHTGVGMVFLPQNENSMEEAKAAVEKVFTDEGLEVLGWRPVPFNLSVAGRNAKETMPNILQIFVRIAKEDDADDIERELYICRKLIERATKSASWADELYFCSLSSRTIIYKGMLRSEVLGQFYLDLQNELYKSPFAIYHRRFSTNTSPRWPLAQPMRLLGHNGEINTIQGNLNWMRSREATIQSPVWRGRENELRPFGDPKASDSANLDNAAELLLRSGRSPAEAMMMLVPEAYKNHPTLSVKYPEVIDFYEYYKGQMEAWDGPALLLFSDGRTVGACLDRNGLRPARYWKTSDGFVYVASEVGVIPMDESKVVMKGRLGPGMMITVDLETGQVLENTEVKKNVASAKPYGTWLQESTRSIKPVNF

SEQ ID NO: 2389 - protein, 260 aa, Glomus intraradices
MERENQTSNKKVYMAKLAEQAERYDEMVSYMKDVAKLGVELTVEERNLLSVAYKNVIGARRASWRIISSIEQKEENKGNETQVQKIKAYRQKVETELSEVCSDILAVLDEHLIPSAEAGESKVFYYKMKGDYHRYLAEFASGEGRKEAATQAHEAYKHATDIAQTDLAPTHPIRLGLALNFSVFYYEILNSPDRACHLAKQAFDDAIAELDTLSEESYKDSTLIMQLLRDNLTLWTSDLQDAEGEKPEEAKQEVEAEESK

SEQ ID NO: 2390 - protein, 629 aa, Physcomitrella patens subsp. patens
MGTDAGRPSSTPIVLSSSSSKENLTQPLIPPSEAKTGAYDSENVYEGCITDVSRDGTVDYRGRPVDKSKYGGWKGVSFIMGAVLLERMAYYGIASNLISYLTIKLHEGSADAVTNVWVWGGVTWLLPLLGGFIADSFLGRYWTITYSLIIYVAGMVFLTLTVSVPGLRPPECPTNIDCQSASKLQVRVFYCALYVVAIGVGGVKPCASTLGADQFEEEDEKERFMKYSYFNYWWFVVTSGSFFALTVLVYIEDHVGFGWGYGIPTVGLALALAVFLLGTRSYRYKHPKGSPLTQVACVLVAAMRNRNVQVPTDSALLHEVGHPLKRNLHHTHHLRFLDKAAVQVREKDNETAPLVTYNWRLCTVTQVEEVKLLALVMPVWFTTLVFMVTVQQMSTFFLRQGISMDQSVGPNFKIPPASLDLATVSTALMLIPIYDSYVIPYARRFTGNERGFSLLQRLGIGLVITVLGMAVAALVEMRRLEIIRENGLEHSISPVPMSVLWLIPQYSIMGIAQVFAYMGQLEFFYDQVPDDMQTIGTALFTSNTGVAHFVCTSILQLVISVTGRDGRQPWIVDNINDSRLDNYYWMLALLSAVNFVAFFQVSRGYTYKSTMQREVKYHVEVPAEPPLID

SEQ ID NO: 2391 - protein, 1465 aa, uncultured proteobacterium RedeBAC7D11; identical to SEQ ID NO: 1007

SEQ ID NO: 2392 - protein, 1513 aa, Hyphomonas neptunium ATCC 15444; identical to SEQ ID NO: 1011

SEQ ID NO: 2393 - protein, 447 aa, Roseovarius nubinhibens ISM; identical to SEQ ID NO: 1015

SEQ ID NO: 2394 - protein, 1542 aa, Mycobacterium smegmatis str. MC2 155; identical to SEQ ID NO: 1018

SEQ ID NO: 2395 - protein, 1577 aa, Bradyrhizobium japonicum USDA 110; identical to SEQ ID NO: 1020

SEQ ID NO: 2396 - protein, 542 aa, Mycobacterium smegmatis str. MC2 155; identical to SEQ ID NO: 1025

SEQ ID NO: 2397 - protein, 1510 aa, Corynebacterium glutamicum; identical to SEQ ID NO: 1027

SEQ ID NO: 2398 - protein, 251 aa, Fucus vesiculosus
MASRDDLVYMAKLAEQAERFDEMVDHMKAVAQQPKELSVEERNLLSVAYKNVIGSRRASWRVISSIEGKDTVSDQLPLIRDYKSKIETELTDICADILKIIEAELIPNSTSEEGKVFYYKMKGDYHRYLAEFQSADERKTSASDALDAYQLASDHANQDLPPTHPIRLGLALNFSVFYYEILNSPDRACGLAKAAFDDAIAELDTLSEESYKDSTLIIMQLLRDNLTLWTSDQGEAEEAPGNADGTVVEDL

SEQ ID NO: 2399 - protein, 483 aa, Kineococcus radiotolerans SRS30216
MAGDYDLVVVANRLPVDRVEEPDGSTSWRRSPGGLVTALEPVMQREDGAWVGWAGTPGDPPEPFDAEGVRCVPVGLSEQEVEDYYEGFSNGTLWPLYHDVIVAPGYHRSWWEAYVRVNERFAEAAAEQATEGATVWVQDYQLQLVPRMLRRRRPDLSIGFFNHIPFPPFEIFAQLPWRKAVIDGLLGADLIGFQRAADANNFTRACRRASNLPARSGRIRLDAEGGREVRAASFPISIDFAALDELAEREDVKARAAEIRRDLGNPEHVLLGVDRLDYTKGILHRLKAFEELLDDGGVKVEEASLIQVATPSRERVEQYVQLRQDVEVTVGRINGTHGTIKNTAVHYLHHSYGREEMAALFLAADVMLVTALRDGMNLVAKEYVASRHDERGVLVLSEFTGAADELGQALMINPHDIDGLKDAILRALRMSPREAGRRMRSLRRRVGDHDVQRWAASFLQALADHHTTEAAVSVAAAAERGSS

SEQ ID NO: 2400 - protein, 549 aa, Pseudoalteromonas tunicata D2; identical to SEQ ID NO: 1029

SEQ ID NO: 2401 - protein, 259 aa, Solanum tuberosum
MADSREENVYMAKLAEQAERYEEMVEFMEKVAKVDVEELTVEERNLLSVAYKNVIGARRASWRIISSIEQKEESRGNEDHVSSIKEYRVKIEAELSKICDGILSLLESHLVPSASTAESKVFYLKMKGDYHRYLAEFKTGARERKEAAENTLLAYKSAQDIALAELTPTHPIRLGLALNFSVFYYEILNSPDRACNLAKQAFDDAIAELDTLGEESYKDSTLIMQLLRDNLTLWTSDTTDDAEDEIREGSKQESGDGQQ

SEQ ID NO: 2402 - protein, 469 aa, Oryza sativa
SGARRGWGGVSPRAVLDLPRRREAAEKPAQKAADLNEILSERGACGVGFVANLKNEPSFNIVRDALVALGCMEHRGGCGADNDSGDGSGLMSGIPWDLFNDWANKQGLAPLDRTNTGVGMVFLPQDENSMEEAKAVVAKVFTDEGLEVLGWRTVPFNVSVVGRYAKETMPNIQQIFVKVAKEDNADDIERELYICRKLIERATKSASWADELYFCSLSSRTIVYKGMLRSEILGQFYLDLQNELYKSPFAIYHRRYSTNTSPRWPLAQPMRLLGHNGEINTIQGNLNWMRSREATLQSPVWRGREHEIRPFGDPKASDSANLDSTAELLLRSGRSPAEAMMILVPEAYKNHPTLSIKYPEVIDFYDYYKGQMEAWDGPALLLFSDGRTVGACLDRNGLRPARYWRTSDDFVYVASEVGVIPMDESKVVMKGRLGPGMMITVDLQTGQVLENTEVKKSVASANPYGSWLQ

SEQ ID NO: 2403 - protein, 159 aa, Plantago major
MLQRIGIGLVLSLVSIVYAAIIERKRLATAMEYGLVDMPKAVVPMSALWLAPQYVLSGVADVFTMIGLQEFFYDQIPCDLKSIGLAMYLSILGIGSLLSSFLVSFIQNMTKGHGQDGWFADNLNKAHLDYFYWLLAGLSTVGLSAYIYFARSYVYRRKV

SEQ ID NO: 2404 - protein, 1518 aa, Frankia sp. CcI3; identical to SEQ ID NO: 1036

SEQ ID NO: 2405 - protein, 539 aa, Burkholderia sp. 383; identical to SEQ ID NO: 1037

SEQ ID NO: 2406 - protein, 507 aa, Desulfovibrio vulgaris subsp. vulgaris str. Hildenborough; identical to SEQ ID NO: 1043

SEQ ID NO: 2407 - protein, 268 aa, Arabidopsis thaliana
MSSDSSREENVYLAKLAEQAERYEEMVEFMEKVAKTVETEELTVEERNLLSVAYKNVIGARRASWRIISSIEQKEDSRGNSDHVSIIKDYRGKIETELSKICDGILNLLEAHLIPAASLAESKVFYLKMKGDYHRYLAEFKTGAERKEAAESTLVAYKSAQDIALADLAPTHPIRLGLALNFSVFYYEILNSSDRACSLAKQAFDEAISELDTLGEESYKDSTLIMQLLRDNLTLWTSDLNDEAGDDIKEAPKEVQKVDEQAQPPPSQ

SEQ ID NO: 2408 - protein, 319 aa, Oryza sativa Indica Group
MARSMLRNHPEASVLDTIRQHLLEEPRGGGGGGGEAAEASFGSLVADMWSDSLPFRDDDADDMVVFGAMRDAFSCGWLPDGVFAEVKPEPLLSPDSSSYDGSSCCFGFADVSEPVTPSDAASGAAEAAAAAAAATAEHGKEEEAAAAVARGKHYRGVRQRPWGKFAAEIRDPAKNGARVWLGTFDTAEDAALAYDRAAYRMRGSRALLNFPLRIGSEIAAAAAAAAAAAAGDKRPSPEPATSESSFSSSSSCTTTTTSSSTSSSGSPKRRKRGEAAAASMSMPLVPPPSQLNWPVQAWYPAAAPVEQVAITPRVEQLVI

SEQ ID NO: 2409 - protein, 152 aa, Glycine max
  misc_feature (10)..(12): Xaa can be any naturally occurring amino acid
  misc_feature (102)..(110): Xaa can be any naturally occurring amino acid
TAQLDEALGXXXDSPCTSMLVVSEFIGCSPSLSGAIRVNPWNIDAVADAMYAALTMSDSEKQLRHEKHYRYVSSHDVAYWARSFMLDLERACKDHYTKRCWXXXXXXXXXVVSLSHGFRKLSVDHIVSAYKRTNRRAIFLDYDGTVVPQSSI

SEQ ID NO: 2410 - protein, 913 aa, Oryza sativa Japonica Group; identical to SEQ ID NO: 1820

SEQ ID NO: 2411 - protein, 259 aa, Euphorbia esula
MDSSKDRETFVYLAKLAEQAERYDEMVESMKKVANLDVELTVEERNLLSVGYKNVVGSRRASWRILSSIEQKEESKGNEINAKRIKEYRNKVESELSTICSDIMTVIDEHLIPSCNAGESTVFYYKMKGDYYRYLAEFKAGNDKKEAADQSLKAYQTASTTAETDLPPTHPIRLGLALNFSVFYYEIMNSPERACHLAKQAFDEAISELDTLSEESYKDSTLIMQLLRDNLTLWTSDIPEDGDQKMETSGKASGGEDAE

SEQ ID NO: 2412 - protein, 525 aa, Mycobacterium sp. MCS; identical to SEQ ID NO: 1045

SEQ ID NO: 2413 - protein, 256 aa, Saccharum hybrid cultivar CP65-357
MSREENVYMAKLAEQAERYEEMVEYMEKVAKTVDVEELTVEERNLLSVAYKNVIGARRASWRIVSSIEQKEESRKNEEHVNLIKEYRGKIEAELSNICDGILKLLDSHLVPSSTAAESKVFYLKMKGDYHRYLAEFKTGAERKESAESTMVAYKAAQDIALAELAPTHPIRLGLALNFSVFYYEILNSPDKACNLAKQAFDEAISELDTLGEESYKDSTLIMQLLRDNLTLWTSDLTEDGADEGKEASKGDAGEGQ

SEQ ID NO: 2414 - protein, 857 aa, Brassica oleracea
MVSRSYSNLLDLASGNFHSFSREKKRFPRVATVTGVLSELDDDANSNSVCSDAPSSIAQDRIIIVGNQLPIKSHRNPSGKLTFTWDNDSLLLQLKDGMREDMEVVYIGCLKDQVDPSEQDDVSQRLLENFKCVPAYIPPEIFTKYYHGFCKQHLWPLFHYMLPLNPDLGGRFDRSLWQAYLSVNKIFADKVMEVINPDDDFVWVHDYHLMVLPTFLRKRFNRVKLGFFLHSPFPSSEIYRTLPVRNELLRALLNADLIGFHTFDYARHFLSCCSRMLGLSYQSKRGTIGLEYYGRTVSIKILPVGIHTSQLQSILNLPETQTKVADLRDQFSDQKVLLGVDDMDIFKGISLKLLAMEQLLQQHPEKRGRVVLVQIANPARGRGKDVQEVRSETLATVKRINDTFGRPGYQPVFLIDEPLQFYERIAYYVIAECCLVTAVRDGMNLIPYEYIICRQANPKLNETLGLDPCAAKKSMLVVSEFIGCSPSLSGAIRVNPWNIDAVTEAMDYALTVSEAEKQMRHEKHHKYVSTHDVAYWSRSFIQDLERACAEHVRKRCWGIGFGLGFRVVALDPSFKKLSIEHIVSAYKRTKKRAILVDYDGTMVQPGSIRTTPSIQTIETLNKLSSDPKNIVYLISGKDRKTLTEWFSSCGDLGLAAEHGYFIRPNDGTEWETSSLVSAFEWKQIAEPVMRLYTETTDGSTIETKETALVWNYEFADPDFGSCQAKELMEHLESVLTNDPVSVKTGQQLVEVKPQGVNKGLVAERLLTTMQEQGKLLDFILCVGDDRSDEDMFEVIMGAKDGPALSPVAEIFACTVGQKPSKAKYYLDDTAEIIRMLEGLATSDQTSSTVDVPTKDIF

SEQ ID NO: 2415 - protein, 896 aa, Zea mays
  misc_feature (426)..(426): Xaa can be any naturally occurring amino acid
MGEGAGDRVLSRLHSVRERIGDSLSAHPNELVAVFTRLKNLGKGMLQPHQIIAEYNNAIPEAEREKLKDGAFEDVLRAAQEAIVIPPWVALAIRPRPGVWEYVRVNVSELAVEELRVPEYLQFKEQLVEEGPNNNFVLELDFEPFNASFPRPSLSKSIGNGVQFLNRHLSSKLFHDKESMYPLLNFLRAHNWVQDYHLMFLPKCLKDHDINMKVGWFLHTPFPSSEIYRTLPSRLELLRSVLCADLVGFHTYDYARHFVSACTRILGLEGTPEGVEDQGRLTRVAAFPIGIDSDRFKRALELPAVKRHVSELTERFAGRKVMLGVDRLDMIKGIPQKILAFEKFLEENPDWNNKVVLLQIAVPTRTDVPEYQKLTSQVHEIVGRINGRFGTLTAVPIHHLDRSLDFHALCALYAVTDVALVTSLRXGMNLVSYEYVACQGSKKGVLILSEFAGAAQSLGAGAILVNPWNITEVADSIRHALTMPSDEREKRHRHNYAHVTTHTAQDWAETFVFELNDTVAEALLRTRQVPPGLPSQMAIQQYLRSKNRLLILGFNSTLTEPVESSGRRGGDQIKEMELKLHPDLKGPLRALCEDERTTVIVLSGSDRSVLDENFGEFKMWLAAEHGMFLRPTYGEWMTTMPEHLNMDCVDSVKHVFEYFTERTPRSHFEHRETSFVWNYKYADVEFGRLQARDMLQHLWTGPISNAAVDVVQGSRSVEVRSVGVTKGAAIDRILGEIVHSENMITPIDYVLCIGHFLGKDEDIYVFFDPEYPSESKVKPEGGSASLDRRPNGRPPSNGRSNSRNPQSRTQKAQQAASERSSSSSHSSTSSNHDWREGSSVLDLKGENYFSCAVGRKRSNARYLLSSSEEVVSFLKELATATAGFQATCADYMHVLG

SEQ ID NO: 2416 - protein, 444 aa, Methylobacillus flagellatus KT; identical to SEQ ID NO: 1047

SEQ ID NO: 2417 - protein, 1531 aa, Prochlorococcus marinus str. MIT 9211; identical to SEQ ID NO: 1049

SEQ ID NO: 2418 - protein, 262 aa, Hypocrea lixii
MGHEDAVYLAKLAEQAERYEEMVENMKIVASEDRDLTVEERNLLSVAYKNVIGARRASWRIVTSIEQKEESKGNSSQVTLIKEYRQKIENELAKICDDILEVLDQHLIPSAKSGESKVFYHKIKGDYHRYLAEFAIGDRRKDSADKSLEAYKAATEVAQTELPPTHPIRLGLALNFSVFYYEILNAPDQACHLAKQAFDDAIAELDTLSEESYKDSTLIMQLLRDNLTLWTSSEAETPARLMPLLRRRPLLRLPSRRRRAQG

SEQ ID NO: 2419 - protein, 529 aa, Magnaporthe grisea 70-15
MGSVEDETALPSGGRLLLISNRLPITIKRSDDGQYSFSMSSGGLVTGLSGLAKTTSFQWYGWPGLEVPDAEAGPVVQRLKNEYGAHPVFVDDELADRHYNGFANSILWPLFHYHPGEITFDESAWSAYKEVNRLFAQTVVKDVQDGDMIWVHDYHLMLLPEMLREEIGDSKKNVKIGFFLHTPFPSSEIYRILPVRQALLQGVLHCDLLGFHTYDYARHFLSSCSRILSAPTTPNGVQFAGRFVTVGAFPIGIDPEKFVEGLQKPKVQQRIAALTRKFEGVKLIVGVDRLDYIKGVPQKLHALEVFLTEHPEWIGKIVLVQVAVPSRQDVEEYQNLRAVVNELVGRINGKFGTIEFMPIHFLHQSVSFDELAALYAVSDVCLVSSTRDGMNLVSYEYIATQRDRHGVMILSEFTGAAQSLSGSLIVNPWNTEELANAIHDAVTMGPEQREANFKKLERYVFKYTSAWWGSSFVAELNRLAAGIEGADAEGSKTKIAIRGVGDAVADGAGKVADAVSSVLPGGDNKTEGN

SEQ ID NO: 2420 - protein, 1513 aa, Synechococcus sp. RS9916; identical to SEQ ID NO: 1055

SEQ ID NO: 2421 - protein, 248 aa, Vigna angularis
MAEGLNREQYVYLAKLSEQADGYEEMVEFMQKVVVGWTPATELSVEERNLLSVAYKNVIGSLRAAWRIVSSIEQKEEGRKNEEHVALVKQYRSKVETELSNVCASILNLLDSNLVASASNTESKVFYLKMKGDYHRYLAEFKVGDERKAAAEDTMLSYKAAQDVAYADLPPTHPIRLGLALNFSVFYYEILNQSDKACGMAKQAFEEAIAELDTLGEESYKDSTLIMQLLRDNLTLWTSDVQDQLDEP

SEQ ID NO: 2422 - protein, 460 aa, Zea mays
  misc_feature (39)..(39): Xaa can be any naturally occurring amino acid
QGSKKGVLILSEFAGAAQSLGAGAILVNPWNITEVADSXAIRHALTMPSDEREKRHRHNYAHVTTHTAQDWAETFVFELNDTVAEALLRTRQVPPGLPSQMAIQQYLRSKNRLLILGFNSTLTEPVESSGRRGGDQIKEMELKLHPDLKGPLRALCEDERTTVIVLSGSDRSVLDENFGEFKMWLAAEHGMFLRPTYGEWMTTMPEHLNMDWVDSVKHVFEYFTERTPRSHFEHRETSFVWNYKYADVEFGRLQARDMLQHLWTGPISNAAVDVVQGSRSVEVRSGGVTKGAAIDRILGEIVHSENMITPIDYVLCIGHFLGKDEDIYVFFDPEYPSESKVKPEGGSASLDRRPNGRPPSNGRSNSRNPQSRTQKAQQAASERSSSSSHSSTSSNHDWREGSSVLDLKGENYFSCAVGRKRSNARYLLSSSEEVVSFLKELATATAGFHATCADYMHVLG

SEQ ID NO: 2423 - protein, 878 aa, Debaryomyces hansenii
MTNALNEIENMSAFPSDGKTVSPKDYANNDKLKLSGRIINVMTSLPTQIVKKTNKSGNDNWDVEPVRGNSALYSSQFFLAQQTDWESHLVGWTGELINKSSNSKSIINENITDDPLYLNKEDKTSLEGKIRDANKSAHIHPVWLLRRDQERWRNYAENVLWPVFHYIQGEPSDGKDEASSWHDYVKFNEAYCQKIISIYKPGDVIWIHDYYLLLLPQLLRMEIPNAIIGLFMHAPFPSSEYFRCLSKRSHLLDGMLGADKIAFQSEAFQRHFSSCCTRLLGCEISKDKLMAYGSAISLETLPIGIDTKKIEYDAFSSDSGIEQKVRALGEIYADKKIIVGRDRLDTVRGVVQKLQAFEMFLQMYPEWRDKVVLIQVSSPGYSHSAKVEQKVTELVHHINSEYGDLNSTPILHYQKRINKDEYLALLRVADLALITSVRDGMNTTSLEFVLCQKENYSPLILSEFTGTASVLSEAILVNPWDSVGIAKTMNDCFYMSKDKKRALEERLYKQVTSNTIQNWTSNFITHLIDHVNNTHQTHYTPALNRPLLLNNYENSHRRLFLFDYDGTLTPIVKDPAAAIPSSRLNAVLDILSSDPKNQVWVISGRDQAFLDKWLGSKNIGLSAEHGCFLKDIGSTEWSNLSASFDMSWQTKVKEVFKEYTEKTPGSNTEQKKVALTWHYRRSDPELGKYQAEKCLKFLKETVATEYDVEVMPGKANIEVRPNFVNKGEIVKRLVLNPHGAKQIPHVVTNYNKDVPVDELPDFILCLGDDFTDEDMFKSLKDIEAEWSSKDHPTNQYGSHGVYPVAVGPASKQTIATSHLTEPSEVLETLGLLSGVVSLFESAGSVSLDDRGHLENSTSSNKSKSAIKEATKKEGSKSC

SEQ ID NO: 2424 - protein, 272 aa, Magnaporthe grisea 70-15
MGHEDAVYLAKLAEQAERYEEMVENMKIVASEDRDLTVEERNLLSVAYKNVIGARRASWRIVTSIEQKEESKGNSSQVGLIKEYRTKIEAELAKICEDILSVLDKHLIPSAKSGESKVFYHKMKGDYHRYLAEFAIGDKRKDSADKSLEAYKAATEVAQTELPPTHPIRLGLALNFSVFYYEILNAPDQACHLAKQAFDDAIAELDTLSEESYKDSTLIMQLLRDNLTLWTSSEAEPTASTGHAEAPAAAAATEEKPAEAAAAAEEAPKPAE

SEQ ID NO: 2425 - protein, 392 aa, Oryza sativa
  misc_feature (181)..(181): Xaa can be any naturally occurring amino acid
  misc_feature (206)..(206): Xaa can be any naturally occurring amino acid
MAQKEGLPAGRLSALVIDEDKCHADSTSYMLSAELNFSVTVFTSPIKALDFLQNHAEGVDLVLADVHMEEMNGFDFLKVARELHKSIQVIMMSTETTMYTMKRCVKLGAQFLVNKPLDAGTIKNLWQYVDLKVLRMEKIKDLLQGIGDESTCANETNSLAENPKNDTKKKYYLMWTPHLQXKKFLHALQILGKDASPKNIKKIMGXVDNIDCRQIAAHLQKHRLRLTKDLKKASFTTDTSKDESNSRIGPAESHHVCRNASTLQPRSNTQPTETTMQILSEDAEYDDVYAATRRALQYGIVFDESKHSSDPSGDEDEQVVVGGDQDGCANEANDIDSSGDHHQVAAVVTKPCNANASQEIINKMTNSDGMQATKGSKAAVFRLVDYSESDSD

SEQ ID NO: 2426 - protein, 1535 aa, Blastopirellula marina DSM 3645; identical to SEQ ID NO: 1060

SEQ ID NO: 2427 - protein, 774 aa, Physcomitrella patens subsp. patens
RLLVVANRLPVSATRLDGDKWDLQLSAGGLVSALLGVKQIFETRWIGWAGVSVHDERGRASLTEALALKGCVPVFLDDDTVDQYYNGYCNNVLWPLFHYIGLPQADRLAATRSLDSQYAAYQHANKLFAQVVFSQYQEGDVVWCHDYHLMCLPQELKTLNPRMKVGWFLHTPFPSSEIYRTLPLRSELLKAVLTADLIGFHTYDYARHFVSACTRILGLEGTPEGVEDQGKLTRVAAFPIGIDPERFIQALETEQVKLHVKELLRFFAGRKVMLGVDRLDMIKGIPQKLLAFEMFLEKNPEWREKVMLVQIAVPTRTDVHEYQRLTSQVHEIVGRINGRYGTVTFVPIHHLDRSLAFHELCALYASTDVALVTSLRDGMNLVSYEYVACQNFKNTEGVLVLSEFAGAAQSLGAGAILVNPWNIREMYIAIEEALKMSDEERKERHRHNFTHVTTHTAQAWAHNFVSELYDTIVEAELRTLNEPPNLPVDSAKESFLNSKNRLLVFGFNSTITATVEAPRRDQIKESKLGLHPGIKECLGTLCSDPNTDVVILSGSKRDTLEEVFGGFNIWLAAENGMYLRDLIGKWMPTMEHLNMDWKDSVQLVFDYFCARTPRSFVEKRETSLVWNYKYADLEFGRVQARNMLQHLWTGPISNAAVDVVQGQKSVEVRPIGVSKGAAIDRIVFEIIRSKHPSSSQTPNIQFDFVMCLGHFLSKDEDVYAYFDPDNAFDRDNRCNLVNVSPETYISCAVGKKHSSARYYLDTVNEVVSFVKSLA

SEQ ID NO: 2428 - protein, 886 aa, Oryza sativa Japonica Group
MPHHRHLTPSPSHEEHETPNPSLTPPPMQLAALASDEPPPPPPEQSPRRIVVAHRLPLNATPDPGSPFGFAFSLSADAHALQLSHGLGLAHVVFVGTLPAEAARALRRSDELDRHLLGCFSCLPVFLPPRAHDEFYAGFCKHYLWPRLHYLLPHAPAANGYLHFDAGLYRSYASANRSFAARVVEVLSPDDGDLVFVHDYHLWLLPSFLRRGCPRCRVGFFLHSPFPSAEVFRSIPVREDLLRALLNADLVGFHTYDYARHFLSACSRLLGLAYTSRHGRVGINYHGRTVLIKFLSVGVDMGLLRTAMASPEAAAKFREITEVEYKGRVLMVGVDDVDIFKGVRLKLLAMESLLETYPALRGRVVLVQIHNPTRCGGRDVERVRGETAKIQARINARFGGPGYQPVVVVDRAVPMAEKVAYYAAAECCVVSAVRDGLNRIPYFYTVCREEGPVDAKGAAGGQPRHSAIVLSEFVGCSPSLSGAIRVNPWNIEAMAEAMHGALTMNVAEKQARHVKHYTYLKLHDVIVWARSFAADLQLACKDRSTMRTIGMGIGPSYRVVAVDAAFKKLPPELVNLSYRAAAAAAAGGGGGRLILLDYDGTLEPTGAFDNAPSDAVIVILDELCSDPNNVVFIVSGRSKDDLERWLAPCANLGIAAEHGYFIRWSRDAPWETMASKQLAAAMEWKAAAKNVMRHYAEATDGSYIEAKETGMVWRYEDADPRLAPLQAKELLDHLATVLASEPVAVRSGYKIVEVIPQGVSKGVAAECIVSAMAARRGGALGFVLCVGDDRSDEDMFGALASLCGGGKNGGASSSTTTTTALLAAAQVFACTVGNKPSMASYYLNDKEEVVDMLHGLAFSSPSSRLRAAAAPRRPADFDIKSLLRCE

SEQ ID NO: 2429 - protein, 882 aa, Emericella nidulans
MSLQQDPSKPDGRPGEVRFDSFTDASASNGSSNFNNASKTASALSEADKGTQSGSDLLHRLSLKEILTMRAPDFQKQYQGLNLSGRIISAAFCIPHKLYFRAGRDWELKPRPGSSALFDSFAYLASEKSGWSHTLVGWTGEVEPLNEGSNPLQALNSNANTNLPAALDNTSRSLSKGSAPVVPDISLLQSNSSVAETSTVGPDDRKRLEDQLSSSRHGKVVPVCLSDESDVPEDTIILGDQSRWRRYAEKELYALLHYKQNGPTDGRFERDSWTDYVRMNQLFAERILQEYKEGDIVWIHDYHLFLLPSILRQHVPNIYIGFYLHSPFPSSEYMRCLAKRKEILTGVLGANMIGFQTFSYSRHFSSCCTRVLGFESDSAGVDAYGAHVAVDVFPIGIDAEAIQKIAFENADTEKAVEGLRQLYAGKKIIVGRDRLDSARGVAQKLQAFETFLERFPEWRDKVVLIQVTSPTSVEEEKEEQKIASRISNLVSTINGRFGSLSFSPVKYYPQYLSPHEYFALLRVADVGLITTVRDGMNTTSLEYILCQQENHSPLILSEFSGTAGALSSAIHINPWDTIGVSEAINKALTESVADKKEQHLKLYKHVTTNTVSAWSNQFISRLLANLSSFDQSMATPALDRTKLLKQYRKSRKRLFMFDYDGTLTPIVKDPQSAIPSDRVLRTLKTLAADPRNAVWIISGRDQAFLDEWMGHIPELGLSAEHGCFIRMPRSDNWQNLAETTDMGWQKEVMEIYQHFTERTQGSFIERKKVALTWHYRRADPEYGAFQARECRKQLEEHVSKTWDVEVMAGKANLEVRPRFVNKGFIATRLVQAYEDGKVPEFILCSGDDFTDEGMLFPFLATPKLRHELLLTYLRYVPCLEEI

SEQ ID NO: 2430 - protein, 692 aa, Zea mays
  misc_feature (100)..(100): Xaa can be any naturally occurring amino acid
MGEAYFNGMAAERFCVRNSGAQAVVEGIGDHGCEYMTGGTVVILGKTGRNFAAGMSGGIAYVYDVDGKFSARCNNELVDLYHVEEEDDIITLKMMIEQHXRNTESVLARDILSDFDNLLPKFVKVYPRDYKRVLENMKLQKGVANHAKEPKMANGISVTTKKVQLDQSASRPTRVANAKKYRGFITYERESISYRDPKERVKDWKEVAIESTPGPLLNTQSARCMDCGTPFCHQESSGAGCPLGNKIPEFNELVHQNRWREALDRLLETNNFPEFTGRVCPAPCEGSCVLGIIENPVSIKSIECAIIDKGFEEGWMIPRPPLQRTGRKVAIVGSGPAGLAAADQLNKMGHFVTVFERADRIGGLMMYGVPNMKTDKIGIVQRRVNLMAEEGVTFVVNANVGSDPLYSIERLRSENDAVILACGATKPRDLTIPGRELSGVHFAMEFLHANTKSLLDSNLEDGKYISARGKKVVVIGGGDTGTDCIGTSIRHGCTSLVNLELLTKPPSNRAADNPWPQWPRIFRVDYGHQEAATKFGKDPRSGEVLTKRFIGDENGKVKALELVRVKWEKVDGRFQLKEIQGSEEIIEADLVLLAMGFLGPEASIAEKLGLEKDNRSNFKAQFGDFATSVDGVFAAGDCRRGQSLVVWAITEGRQAAAAVDKYISRHDQNVAGDITPLWGQGLVQPGWSIKKT

SEQ ID NO: 2431 - protein, 170 aa, Vitis vinifera
MRVLGHNGEINTLRGKVNWMKAREGLLKCKELGLSKNEMKKLLPIVDASSSDSGAFDGVLELLVRAGRSLPEAVMMMIPEVWQNDKNMDSDRKALYEYFSALLEPWDGPALISFTDGAIFSNKVRIHSHFGHSYACFDSHMCMIVPGIHRFPHQLPCQFHFISRDPTLGT

SEQ ID NO: 2432 - protein, 134 aa, Oryza sativa
MGLKSNCCFSVIMYSSPVNALIILENNAQDIVVVLATVDVKQLSGLKFLEAARMKHQDLQVIMMSAETTRLYTMMRCVKLAARFLVKKPPNEDIVHDLWQHIALKVLMMEKIRALLQGCTIYVNGSVCVLLSAK

SEQ ID NO: 2433 - protein, 337 aa, Brassica napus
  misc_feature (168)..(168): Xaa can be any naturally occurring amino acid
  misc_feature (314)..(314): Xaa can be any naturally occurring amino acid
RLQRPGGSPLTRIFQVIVAAFRKVSVKVPEDKSLLFETADDESNITGSRKLEHTDNLMFFDKAAVESHSDSIKDGEVNPWRLCSVTQVEELKSIITLLPVWASGIVFATVYSQMNTMFVLQGNAMDQHMGKNFEVPSASLSLFDTVSVLFWTPVYDQFIVPFARKFTXRQERGFTQLQRMGIGLVISIFAMVTAGVLEVVRLDYVKSHNAYDDKKIPMSIFWQIPQYLLIGCAEVFTFIGQLEFFYDQAPDAMRSLCSALSLTTVALGNYLSTVLVTVVMKLTKKNGKPGWIPDNLNRGHLDYFFYLLAVLSFXLNFLVYLWISKRYKYKKAIGRAH

SEQ ID NO: 2434 - protein, 1836 aa, Methylobacillus flagellatus KT; identical to SEQ ID NO: 1078

SEQ ID NO: 2435 - protein, 524 aa, Bacillus cereus G9241; identical to SEQ ID NO: 1077

SEQ ID NO: 2436 - protein, 387 aa, Zea mays
RKKTSGSLTAIVVDENLCHARAASCMLANLQCKVIVYASPVDALKFLKDHQRDTDFALVEVNMKEMHGFQFLDMSRKLHKSLQVIMMSADTTWPTMKRSVELGARFLIKKPLDANTMNNLWQHLDLKFQRTDKIKALFPGIEGKTGNAFEEGTKQKGTHLMWTPFLQRKFLQAVELLGEDASPKKIQLLMNVNSVSRKQISAHLQKHRKKVEKELRNSNANNSSHGIGGASNSRPSRIFEIGHGSKFQYNRPDVQPEHRSDESVSVEQTETIEETQSNRLYEAMRRALQLGSVFEEPQLPNIDPPAGKDAREVEEVEMTMRDGNYRDAGTDAFGDKNEASGTHSSDDNNAKVKSKDDSADKLVSCHDELRPVVTLVTYSDSEDGETL

SEQ ID NO: 2437 - protein, 539 aa, Burkholderia vietnamiensis G4; identical to SEQ ID NO: 1080

SEQ ID NO: 2438 - protein, 613 aa, Lentisphaera araneosa HTCC2155
MSEENAEQAAAPKKRGRPPKAKAEATSTEAAAAPKKRGRPAKAKEENTASAAATAPEKKAGRPAKAKDDSAPANPKPATEEKAHSSDNNKSSDKAVESKDQQGESTQVNKSDSSKENSDSKQNSGQNNQNNQNNNNRHNNNNRHNNNNNRNNQNNRNKNWKNNNNNKNRNRSRKRSPYHEQDLMIEEEEAAFEGGIPGANLSEIQQKSMAELNELANALEVEGVGSIGKQQLVYEILQAQASDQGILYGGGVLEVFKEGYGFLRSSEYSYMPSPEDIYLSPKQVRRFSLRTGDTVMGAVRAAQDQERFFAMIKVDAINGEDPKEKKNKIPFESLTPDFPEYRMHMETEPTNHSMRVLDLVVPVGAGQRGLIVAPPRTGKTVLMQSIANSIATNNPDFHLIVLLIDERPEEVTDMKRNVKGEVISSTFDEPPTRHVQVAEMVIEKAKRMVEHGKNVVVLLDSITRLARAYNTVQPHSGKILSGGVDANALHKPKRFFGAARRIQEGGSLTILATALVDTGSKMDEVIFEEFKGTGNMEICLDRGMIDKRIFPAINIEKSGARKEELLLDPKEKELMWKLRRAAISMPTTEGMKIILNGVKKTKSNVEFLMTMNI

SEQ ID NO: 2439 - protein, 496 aa, Vitis vinifera
MEKRRASSDSESETGCCNPVRKGGPVGMDHVLLALQESKEERDVRIRSLFNFFDSANLGYLDYAQIEGGLSALQIPPEYKYAKDLLKVCDSNSDGRVDYQEFRRYMDDKELELYRIFQAIDVKHNGCILPEELWDALLKAGIEIDDEELARFVENVDKDNNGIITFEEWRDFLLLYPHEATIENIYQYWGRVCLVDIGEQAVIPEGISKHVHASKYLLAGGVAGAASRTATAPLDRLKVVLQVQTTHARIVPAIKNIWKEGGLLGFFRGNGLNVVKVAPESAIKFYTYEMFKNVVRDAKGEAKDDIGAAGRLFAGGMAGAVAQTAIYPLDLVKTRLQTYTCEGGKVPYLKTLARNIWFQEGPQGFYRGLVPSVLGIIPYAGIDLAAYETLKDMSKTYLLHDSEPGPLVQLGSGTISGALGATCVYPLQVIRTRMQAQRTNTDASYNGMSDVFRRTLQHEGFRGFYKGLFPNLLKVVPSASITYLVYETMKKSLDLD

SEQ ID NO: 2440 - protein, 243 aa, Arabidopsis thaliana; identical to SEQ ID NO: 1736

SEQ ID NO: 2441 - protein, 890 aa, Arabidopsis thaliana
ALSRRLRTHTLTSIAPKKHCIYFTCCRDMVSRSYSNLLDLASGNFHSFSREKKRFPRVATVTGVLSELDDDNNSNSVCSDAPSSVTQDRIIIVGNQLPIKSHRNSAGKLSFSWDNDSLLLQLKDGMREDMEVVYIGCLKEQIDTVEQDDVSQRLLENFKCVPAYIPPELFTKYYHGFCKQHLWPLFHYMLPLTPDLGGRFDRSLWQAYLSVNKIFADKVMEVISPDDDFVWVHDYHLMVLPTFLRKRFNRVKLGFFLHSPFPSSEIYRTLPVRNELLRALLNADLIGFHTFDYARHFLSCCSRMLGLSYQSKRGTIGLEYYGRTVSIKILPVGIHISQLQSILNLPETQTKVAELRDQFLDQKVLLGVDDMDIFKGISLKLLAMEQLLTQHPEKRGRVVLVQIANPARGRGKDVQEVQSETEATVKRINEMFGRPGYQPVVLIDTPLQFFERIAYYVIAECCLVTAVRDGMNLIPYEYIICRQGNPKLNETIGLDPSAAKKSMLVVSEFIGCSPSLSGAIRVNPWNIDAVTEAMDYALIVSEAEKQMRHEKHHKYVSTHDVAYWARSFIQDLERACGDHVRKRCWGIGFGLGFRVVALDPSFKKLSIEHIVSAYKRTKNRAILLDYDGTMVQPGSIRTTPTRETIEILNNLSSDPKNIVYLVSGKDRRTLTEWFSSCDDLGLGAEHGYFIRPNDGTDWETSSLVSGFEWKQIAEPVMRLYTETTDGSTIETKETALVWNYQFADPDFGSCQAKELMEHLESVLTNDPVSVKTGQQLVEVKPQGVNKGLVAERLLTTMQEKGKLLDFILCVGDDRSDEDMFEVIMSAKDGPALSPVAEIFACTVGQKPSKAKYYLDDTAEIIRMLDGLAATNTTISDQTDSTATVPTKDLF

SEQ ID NO: 2442 - protein, 861 aa, Arabidopsis thaliana; identical to SEQ ID NO: 2182

SEQ ID NO: 2443 - protein, 1486 aa, Salmonella enterica subsp. enterica serovar Typhi str. CT18; identical to SEQ ID NO: 1088

SEQ ID NO: 2444 - protein, 1531 aa, Zymomonas mobilis subsp. mobilis ZM4; identical to SEQ ID NO: 1087

SEQ ID NO: 2445 - protein, 203 aa, Datura metel
MSEEIISVSDRFLLSLIEEHLLSDNSDDSGSELTSTEENWEEIFADFLNWSGSEIQKRGSPSSESCQSNSMAESCQEDSVVGTPPEAAAGGGCSKDWNRYKGVRRRPWGKFAAEIRDPKKKGSRIWLGTYETPEDAALAYDAAAFNMRGAKARLNFPHLIGSNISGPVRVNPRKRFPAEPSTTSSSSSSSSSENSGGRKKRRY

SEQ ID NO: 2446 - protein, 479 aa, Arabidopsis thaliana
MESSKPKNRNPMKKPVSITMEHVLLALRETMDEREIRIRSLFDFFDNSNLGFLDYAQIEKGLASLQIPPEYKYARDLFRVCDANRDGRVDYQEFRRYIDAKELELYRIFQAIDVEHNGCILPEELWEALVKAGIEIDDEELARFVEHVDKDNNGTITFEEWRDFLLLYPHEATLENIYHHWERVCLIDIGEQAVIPDGISKHVKRSRLLLAGGLAGAVSRTATAPLDRLKVVLQVQRAHAGVLPTIKKIWREDKLMGFFRGNGLNVMKVAPESAIKFCAYEMLKPMIGGEDGDIGTSGRLMAGGMAGALAQTAIYPMDLVKTRLQTCVSEGGKAPKLWKLTKDIWVREGPRAFYKGLFPSLLGIVPYAGIDLAAYETLKDLSRTYILQDTEPGPLIQLSCGMTSGALGASCVYPLQVVRTRMQADSSKTTMKQEFMNTMKGEGLRGFYRGLLPNLLKVVPAASITYIVYEAMKKNMALD

SEQ ID NO: 2447 - protein, 1510 aa, Geobacter metallireducens GS-15; identical to SEQ ID NO: 1103

SEQ ID NO: 2448 - protein, 255 aa, Arabidopsis thaliana
MSTREENVYMAKLAEQAERYEEMVEFMEKVAKTVDVEELSVEERNLLSVAYKNVIGARRASWRIISSIEQKEESKGNEDHVAIIKDYRGKIESELSKICDGILNVLEAHLIPSASPAESKVFYLKMKGDYHRYLAEFKAGAERKEAAESTLVAYKSASDIATAELAPTHPIRLGLALNFSVFYYEILNSPDRACSLAKQAFDDAIAELDTLGEESYKDSTLIMQLLRDNLTLWTSDMTDEAGDEIKEASKPDGAE

SEQ ID NO: 2449 - protein, 477 aa, Escherichia coli CFT073
MMTMSRLVVVSNRIAPPDEHAASAGGLAVGILGALKAAGGLWFGWSGETGNEDQPLKKVKKGNITWASFNLSEQDLDEYYNKFSNAVLWPAFHYRLDLVQFQRPAWDGYLRVNALLADKLLPLLQDDDIIWIHDYHLLPFAHELRKRGVNNRIGFFLHIPFPTPEIFNALPTYDTLLEQLCDYDLLGFQTENDRLAFLDCLSNLTRVTTRSAKSHTACGKAFRTEVYPIGIEPKEIAKQAAGPLPPKLAQLKAELKNVQNIFSVERLDYSKGLPERFLAYEALLEKYPQHHGKIRYTQIAPTSRGDVQAYQDIRHQLENEAGRINGKYGQLGWTPLYYLNQHFDRKLLMKIFRYSDVGLVTPLRDGMNLVAKEYVAAQDPANPGVLVLSQFAGAANELTSALIVNPYDRDEVAAALDRALTMSLAERISRHAEMLDVIVKNDINHWQECFISDLKQIVPRSAESQQRDKVATFPKLA

SEQ ID NO: 2450 - protein, 583 aa, Alnus glutinosa
MEESKKSCFISDRVDYKGDPADRNTTGGWVPAALIVGIEVSERLSTMGIIVNLVTYLKGTMHQSSTTSSNSTSNVAGTSFLLCLLGGILADSFLGRYWTIAIFSVIHALGTCMLAISAALPELRPSECNLHHDFPLKCEEPSSFQMGILYTALYSMALGVGGIKSSVSGFGTEQFDQNDEKEMSEMAHFFNRFYLIISFGTLLAVTVLVYVQDQVGRSWGYGICSASMFLSIVAFLVGTKRYRYRECTGSPIIQILQVIVAAIRKRKAELPTDLSFLYDKASDKESTISHTDKYSCLDKGAIITGMDRGADGLTISNPWGLCTVTEVEEVKMLIRILPIMASTIIFWTIRAQLLSFSVQQAATMERTIENFPIPPASFNGFFVGSTIITLIMYDRLLPFLRQSSNGVQGFTNLQKIGIAIFLSILGMAAASFAEMKRLEVVRANRGSTSTSSTLPITAFYLLPQFVLVGIGDGFMYTGQLDFFITESPKGMKAISTGLFLTTNALGFFGSSILVTIITKVTGEEVGHGWLLSRINDSRLDFFYALLAVLGFINLVFYLVLASWYKPSPVEDAHQKINGKEEKV

SEQ ID NO: 2451 - protein, 473 aa, Glycine max
MGMKKATMDHVLLASQETKETREVRIRSLFDFFDRENLGFLDYSHIEAGLSALQIPSEYKYAKDLLNACDANKDGRVDFQEFRKYMDDKELELYRIFQAIDVAHNGCILPEELWEALVRAGIKIDDEELARFVERVDKDNNGVITFEEWRDFLLLYPHEATIENIYHYLERICVVDIGEQTVIPAGIGKHIHASRYLIAGGVAGAASRTATAPLDRLKVVLQIQTTQSHIMPAIKDIWKKGGLLGFFRGNGLNVLKVAPESAIRFYSYEMLKSFITRAKGDEAKAANIGAMGRLLAGGIAGAVAQTAIYPMDLVKTRLQTHACKSGRIPSLGTLSKDIWVQEGPRAFYRGLIPSLLGIIPYAGIDLAAYETLKDMSKQYILHDGEPGPLVQLGCGTVSGTLGATCVYPLQVVRTRMQAQRSYKGMADVFRKTLEHEGLRGFYKGIFPNLLKVVPSASITYMVYESMKKSLDLE

SEQ ID NO: 2452 - protein, 257 aa, Glycine max
MADSSREENVYMAKLAEQAERYEEMVEFMEKVAKTVEVEELTVEERNLLSVAYKNVIGARRASWRIISSIEQKEESRGNEDHVAIIKEYRGKIEAELSKICDGILNLLESNLIPSAASPESKVFYLKMKGDYHRYLAEFKTGAERKEAAESTLLAYKSAQDIALADLAPTHPIRLGLALNFSVFYYEILNSPDRACNLAKQAFDEAISELDTLGEESYKDSTLIMQLLRDNLTLWTSDITDDAGDEIKETSKQQPGE

SEQ ID NO: 2453 - protein, 890 aa, Candida glabrata CBS 138
MTVPATKKQRIINCVSQLPYKIQLGETNDDWKITHVTGNSALYSSLDYLNYDLQGEVEHHVVGWTGEVTREASVPNFTKEDKDKHDASEEDPMYLTKEQISGLTSTLQDQMKVEDSNSTVHPVWLLRRDQSRWRSYAEKVIWPTFHYILNPSSANIQQENNWWYDYVKFNEAYANKIAEIYQKGDIIWIHDYYLLLLPQLLRMRYDQDVAIGYFHHAPWPSHEYFRCLPRRKQILDGLLGANKICFQNESFSRHFVSSCKRLLDSSAKKTKNADGFEQYQISAYGGDLIVDSLPIGVNTKQLLKDAFTKDIDSKVLAIKQAYQNKKIIIGRDRLDPVRGVLQKMRAFETFLEMYPYWRDQVVLIQVSSPTANRNSPQTIKLEQQVNELVNSINSKYGSLNFSPVQHYYMRIPKDVYLSLLRVADLCLITSVRDGMNTTALEYVTLKSNKSSANALSYGNPLVLSEFSGSSTLLKDAILVNPWDSVAVAKSINMALNMTKDEKSALEDKLWSEVPTIQDWTDKYLKSLKEIIHDSSLGTPSADKRITPALNRPILLENYKQAKRRLFLFDYDGTLTPIVQDPAAAIPTARLYSILQKLAADPKNQIWIISGRDQKFLNKWLGSKLPQLGLSAEHGCFMKDIGNEDWVNLTEKVDMSWQARVNDVMEDFTRRTPGSFIERKKVALTWHYRRAVPELGEFHASELQKELLKFTDDSDLEVMEGKANIEVRPRFVNKGEIVKRLVWHEHGKSQDMLKGINDTLPITEMPDFILCLGDDFTDEDMFRQLNTIESVWDKKFPDDRNNFGHFGFYPVTVGSASKKTVAKAHLTDPQQVLETLGLLVGDVSLFQSAGTVELDARGHVKNSESSLKSEQATAQYVLKRTASSQNVKKDK

SEQ ID NO: 2454 - protein, 493 aa, Ostreococcus tauri
MRVARAPVTRPPAFGARAYASRARSKTASNATPRPDYDATTLFSPSVREIFLPEHIGEMYNLPKRPSPFARGGALWQFGLGQRFIDNGDSVSLNPLRTTGSSGEAASEEDVAFSDERAVRAGAREVIYYDPKKVRAAIVTCGGLCPGLNDVVRSITLTLEDYGVEDIVGIKYGFRGFFADPENALEAPMKLTSAIVDDIQITGGSMLGSSRGGADMPAIVQKIEEMELDFLFVIGGNGSHAGALAIDKLCREKNLTTSVIGVPKTIDNDILLLDRTFGFQTAVDEAVKAIRSANIEARSADNGVGLVRLMGRQSGFIAMHAALASGNTDVCLIPEIDCPLEGSGGVLAHIVRVIERQNHAVIVVAEGAGQEQLGMIGETDASGNPVLQNFAKYLQQKLKEAKPNVDIKYIDPTYMVRACRTNASDAVYCSILGQNAVHAAFAGLSAVTVGMCSGHYVYLPIPPVISAPRTVDPEGRMFERLRFAIGQPTFSKS

SEQ ID NO: 2455 - protein, 1522 aa, Escherichia coli CFT073; identical to SEQ ID NO: 1112

SEQ ID NO: 2456 - protein, 244 aa, Haematococcus pluvialis
MATERELALYSAKLSEQAERYPDMVSEMKKIAAGAQDQELSVEERNLLSVAYKNLVGARRASWRILQSVEQSELAKGNEKRVKLIQKYRTVVEKELDEVCGEILSLLDTYLVPSASSVEASVFYLKMKADYHRYLAEFKVDEDRRSAAEKTLEAYKAAQNKATSELPSTNPIRLGLALNFSVFYYEVLNQPDQACSLAKQAFDEAISDLDTLGEDSYKDSALIMQLLRDNLTLWTSEMQDSKPE

SEQ ID NO: 2457 - protein, 259 aa, Picea glauca
MVESSREENVYMAKLAEQAERYEEMVEFMEKVTKGVEVEELTVEERNLLSVAYKNVIGARRASWRIISSIEQKEESRGNDEHVVTIREYRSKVESELSKICEGILRLLDSHLIPSSTAAESKVFYLKMKGDYHRYLAEFKTGAERKEAAENTLLAYKSAQDIAAAELAPTHPIRLGLALNFSVFYYEILNSPDRACNLAKQAFGEAIAELDTLGEDSYKDSTLIMQLLRDNLTLWTSDMQEDAGDEIKETSKRDEGEEQ

SEQ ID NO: 2458 - protein, 2113 aa, Gibberella zeae PH-1; identical to SEQ ID NO: 1116

SEQ ID NO: 2459 - protein, 260 aa, Solanum lycopersicum
MAVVAPTAREENVYMAKLADRAESDEEMVEFMEKVSNSLGSEELTVEERNLLSVAYKNVIGARRASWRIISSIEQKEESRGNEEHVNSIREYRSKIENELSKICDGILKLLDSKLIPSATSGDSKVFYLKMKGDYHRYLAEFKTGAERKEAAESTLTAYKAAQDIASAELAPTHPIRLGLALNFSVFYYEILNSPDRACNLAKQAFDEAIAELDTLGEESYKDSTLIMQLLRDNLTLWTSDMQDDGADEIKEDPKPEEKN

SEQ ID NO: 2460 - protein, 1485 aa, Yersinia pseudotuberculosis IP 32953; identical to SEQ ID NO: 1131

SEQ ID NO: 2461 - protein, 955 aa, Zea mays
MFESIVCRPSNSGVYRTSLYKKAGWYRSGIRLDLPCPRPTSAFLSPETSAKVIDPSPTPTPTDRPPNEPDTPRRVAALLFSSCAIAAVSTSATPTDRQEEDEEAMPSLSCHNLLDLAAADEVPLPSPTPLRLPRVMSVASPASPTSPSPPAPPRRVIVSHRLPLRASPDPSAPFGFRFSVDAGTVAYQLRSGLPTNAPVLHIGTLPASAAEAASDELSNYLLANFSCLPVYLPTDLHHRFYHGFCKHYLWPLLHYLLPLTPSSLGGLPFQRTLYHSFLSANRAFADRLTEVLSPDEDLVWIHDYHLLALPTFLRKRFPRAKVGFFLHSPFPSSEIFRTIPVRDDLVRALLNADLVGFHTFDYARHFLSACSRLLGLDYQSKRGYIGIEYYGRTVTVKILPVGIDMGQLRSVVSAPETEDAVRRVTEAYKGRRLMVGVDDVDLFKGIGLKFLAMEQLLVEHRELRGHAVLVQIANPARSEGRDVQGVQDEARAISARVNARFGTPGYTPIVLIDAPVTPQEKAAYYAAAECCVVSAVRDGLNRIPYIYTVCRQESTALGDDSPKRSVIVLSEFVGCSPSLSGAIRVNPWSVESVAEAMNAALRMPEAEQRLRHEKHYKYVSTHDVAYWARSFDSDLQRACKDHFSRRHWGIGFGMSFKVVALGPNFRRLSVEHIVPSYRRTDNRLILLDYDGTVMPENSIDRTPSSEVISVLNRLCEDPKNRVFIVSGRGKDELSRWFAPCEKLGIAAEHGYLTRWSRDAPWDTSGLAADLDWKNTAEPVMRLYTEATDGSYIEHKESGMVWHHDEADPDFGSCQAKELLDHLENVLANEPVVVKRGQHIVEVNPQGISKGVVVDSLLSSMVRTGKPPDFVLCIGDDRSDEDMFESIVCPASNSGVKLPASSEVFACTVGKKPSMARYYLDDTVDVVKMLDGLASAPSQQRPRPAVQLRVSFEGSL

SEQ ID NO: 2462 - protein, 518 aa, Thiobacillus denitrificans ATCC 25259
MAASLVIVYHRQPYEEHVEGGKTVFRENASPNGIVPALKGFIGQTERASWIAWKKSPAGKPVRFERRITVEDSYGSYEVVRLPLSAEQISQFYHVTSKEALWPILNSFPSLYSTENCDWAAFREVNRLFAEAACEEAAPGAVVWVHDYNLWLVPKFVRALRPDVRIAFFHHTPFPAADVFNILPWRDEIVDSLLDCDLVGFHVPRYARNFVSVVQSLRPVDALVERDVPPDLRATGTALSEPVTPVVLHSGKRRVQIDAFPIGTHASLIRETVQQPERLAQVAQIRHDIPQEKIIVSIGRVDYAKGTREMLLAYERLLQRRPELHGRIKLLVTAVAAADGMRVYKRAQQSIEQLAGRINGRIGTLAWQPILLSTTPMPFAETLCYYRAADICWITPLRDGLNLVAKEFIAAHVNESGVLVLSEFAGAAVELQDAVLVNPYSLVQMDAAIDRALDMPAAEQRARMQRMDALMDRYDIGHWTRHVLELFAQLPARAQADADPAPQRARRAGRAPAAVPVH

SEQ ID NO: 2463 - protein, 653 aa, Physcomitrella patens subsp. patens
MASSDAELAILKDLSIVAYDPKTDHSREHVKDDIVDDITVADGAVDVRGRPSIKSRTGNWKACWPIFGCEVCERVAFYAISSNLVIYLTTVLHEDISVSARNVNNWSGTTFMTPLIGAFIADAYLGRYLTLGTFLCGYFLALTFVTMSVTLPALKPPECNGLTADLTKFCRPATKLQRGFFYFALYLMAMGAGGIKSCVTAFAGDQFDITDPVEAKRKMSFPNWWFVSISFGTMLSVSLLVYVQDTIGWTWGYGIPTGIAGLATLIFFIGTPLYRTHHIRGGSPFTRVAQVLVSAARNWRVSVPTNPELLCELDDKEALTQAPGKLLRHTPGLVFLDKAATVPVMTHERVYRFEELMKPDPWRLCTVTQVEEVKLLVRMLPIWVTNLMFSAVFAQVGTLFLNQGTTLNRQMGPNFQIPAASMPLFVTLTICVFLPLYDKFFVPAVRRITGDKRGLTMLQRIGVGQVISTISITVAAFVEMKRLRLAHSLGKDIVGPLPMTIFWLLPQYMLTGICEVFISVGQMEFFLDQAPASMRSLGNALYLSTVAVGSFLSSLLVSIVTNITYDSNGGWIGNNLNESHMDYFYWLLTGLSLLNLFFYVLFAKWYTYKDSNKTDVSRRSSESPSSDSSGALQSGHCLTVPNGVAPLGYKELK

SEQ ID NO: 2464 - protein, 264 aa, Manihot esculenta
MLPTESSREENVYMAKLAEQAERYEEMVEFMEKVAKTVDVEELTVEERNLLSVAYKNVIGARRASWRIISSIEQKEESRGNEDHVSIIKEYRGKIEAELSKICDGILSLLESHLIPSASSAESKVFYLKMKGDYHRYLAEFKTAAERKEAAESTLLAYKSAQDIALADLAPTHPIRLGLALNFSVFYYEILNSPDRACNLAKQAFDEAISELDTLGEESYKDSTLIMQLLRDNLTLWTSDITDEAGDEIKDASKRESGEGQPQQ

SEQ ID NO: 2465 - protein, 575 aa, Zea mays
MLGVDRLDMIKGIPQKILAFEKFLEENPDWNNKVVLLQIAVPTRTDVPEYQKLTSQVHEIVGRINGRFGTLTAVPIHHLDRSLDFHALCALYAVTDVALVTSLRDGMNLVSYEYVACQGSKKGVLILSEFAGAAQSLGAGAILVNPWNITEVADSIRHALTMPSDEREKRHRHNYAHVTTHTAQDWAETFVFELNDTVAEALLRTRQVPPGLPSQMAIQQYLRSKNRLLILGFNSTLTEPVESSGRRGGDQIKEMELKLHPDLKGPLRALCEDERTTVIVLSGSDRSVLDENFGEFKMWLAAEHGMFLRPTYGEWMTTMPEHLNMDWVDSVKHVFEYFTERTPRSHFEHRETSFVWNYKYADVEFGRLQARDMLQHLWTGPISNAAVDVVQGSRSVEVRSVGVTKGAAIDRILGEIVHSENMITPIDYVLCIGHFLGKDEDIYVFFDPEYPSESKVKPEGGSASLDRRPNGRPPSNGRSNSRNPQSRTQKAQQAASERSSSSSHSSTSSNHDWREGSSVLDLKGENYFSCAVGRKRSNARYLLSSSEEVVSFLKELATATAGFQATCADYMHVLG

SEQ ID NO: 2466 - protein, 259 aa, Arabidopsis thaliana
MASGREELVYMAKLAEQAERYEEMVEFMEKVSAAVDGDELTVEERNLLSVAYKNVIGARRASWRIISSIEQKEESRGNDDHVTAIREYRSKIETELSGICDGILKLLDSRLIPAAASGDSKVFYLKMKGDYHRYLAEFKTGQERKDAAEHTLAAYKSAQDIANAELAPTHPIRLGLALNFSVFYYEILNSPDRACNLAKQAFDEAIAELDTLGEESYKDSTLIMQLLRDNLTLWTSDMQDDAADEIKEAAAPKPTEEQQ

SEQ ID NO: 2467 - protein, 496 aa, Methanococcoides burtonii DSM 6242; identical to SEQ ID NO: 1142

SEQ ID NO: 2468 - protein, 176 aa, Magnetospirillum magnetotacticum MS-1
MHDRRSHTIVEQGLKILENIDHRGAVGADPTMGDGCGILTQIPHGFFAEECSRLGFELPPAGEYAIGQFFLPKDPEARGIIKDIVEKTLADEGLPLLGWRDVPVDSTDLGKAVKETEPHHQQLFIGRPASVSDQDAFERRVYIARKVISTKVYGSGDQRLMEFYPVSVSSRTVVYK

SEQ ID NO: 2469 - protein, 471 aa, Rhizobium leguminosarum bv. trifolii
MSRLVVVSNRVPMPAKDGSAAAGGLAVALQAALQERGGIWMGWSGESSGDREPGPLSQLQKGNITYALTDLTDTDVEEYYRGFANRVLWPICHYRLDLAEYGRKEMAGYFRVNRFFAHRLAPMIEPDDIIWVHDYHLIPLAAELRQMGLKNRIGFFLHIPWPPADILVTMPVHEEIMRGLSHYDLVGFQTDYDLQNFAGYLRREGIGDDLGNGLFDSHGRIFKAGAYPIGIETAGFAEFAERAANHIMVQKTRRSVEGRDMIIGVDRLDYSKGIIQRLEAFETFLTSNPAYQNKVTYLQVTPKSRSEVPEYEHMQKMVAEQAGRVNGAIGTVDWVPIRYVNRSISRNVLAGLYRLATIGLVTPLRDGMNLVAKEYVAAQDPDRPGVLVLSRFAGAARELKGALLVNPYDVEGTANAIAKGLAMSLEERRNRWSMMMEHLLTHDVSLWCENFLGDLVLAPEPRLERDSRTGS

SEQ ID NO: 2470 - protein, 485 aa, Oryza sativa
  misc_feature (408)..(408): Xaa can be any naturally occurring amino acid
  misc_feature (435)..(435): Xaa can be any naturally occurring amino acid
MPGSSGRAPLFACRGAAAVSASSMLGGGGAAYQAAVVAHVAPVPAIRPCASWVVEAMRASSPTRPAAAAVDAEYDAWTQRKHPSALGSFEQVAAAASGKRVVVFLDYDGTLSPIVADPDMAFMSDEMRAAVRDVAEHFPAAIVTGRCVDKVQSFVGLPELYYAGSHGMDIKGPSSNEEEDTKILLQPAREFLPVINKAYKALMEKTKSTPGARVENNKFCLSVHFRCVDEKRWNPLAEQVKAVLRDYPELKLTQGRKVLEIRPSIMWDKGKAVEFLLKSLGFDDDRRDVLPVYIGDDRTDEDAFKVLRKRGQGLGILVSKCAKETDASYSLQDPAEKYTNAGAHVFVTMLLTVVFTAAVALALVNAVNSHDFAAHLAGVDCRMGLAGPVRCPASGFVELLVLALHVVXMRARHLRSPACLPNVALATAFDCISMXHGVPCSIGAVEASAIIVSDAPEGLISTLTTDHIYYMTVFPAKLALTSEEV

SEQ ID NO: 2471 - protein, 177 aa, Brassica napus
FIVPLARRFTGVDKGFTEIQRMGVGLFVSVLCMAAAAVVEIIRLHLANELGLVESGAPVPISVLWQIPQYFILGAAEVFYFIGQLEFFYDQSPDAMRSLCSALALLTNALGNYLSSLILTLVTYFTTRNGGEGWISDNLNSGHLDYYFWLLAGLSLVNMAVYFFSAARYKQKKASKL

SEQ ID NO: 2472 - protein, 522 aa, Bacillus cereus ATCC 10987; identical to SEQ ID NO: 1152

SEQ ID NO: 2473 - protein, 213 aa, Oryza sativa Japonica Group
MSLSLGFSAGAGVGADRLAAAPALQAAGALPPRVDVSLSLARAANGQPSSYLPLNENDSLDMVLFDVLREASAVAALSSSSSSSPELGARTTAPVVAGHPAGRKGGGGGGGGRGAAARGGAAGGRHYRGVRRRPWGKYAAEIRDPTRHGARLWLGTFGTAEEAAAAYDRAAFRMRGAKALLNFPPAVAGDGARRGAAAAAKQVGMSDESETKN

SEQ ID NO: 2474 - protein, 1574 aa, Mesorhizobium sp. BNC1; identical to SEQ ID NO: 1160

SEQ ID NO: 2475 - protein, 2201 aa, Chlamydomonas reinhardtii; identical to SEQ ID NO: 1165

SEQ ID NO: 2476 - protein, 901 aa, Vitis vinifera
  misc_feature (36)..(36): Xaa can be any naturally occurring amino acid
MTGATISLPTSVSNIAGVETTSTSYSASLANSFRLXAVLERLAMHVRSGHRILDGQRSTEEFHNLCLSLARGIDYSLANGEVPARVQDLPLLLKQICQRRNDLFLLGGIMVLMVSVKRDSSSTFYLYPGYLSNTSGKNACKVGWFTEKDTEELLTLVNEIGSNFCNLGDNNTEPISFHPTISKIMTRFYPRMEMGQILASREVKPGYGTFLVDFHISKSTKFSSQEKIDSGPQIPTNVTPMLKYGTNLLQAVGQFNGHYILAIAFMAVISSPDNPVLQDYVQPAVSMLHSDNEIVEGPSRISLNCPISRTRIKVPVKGHSCKHLQCFDFGNFVEINSRRPSWRCPHCNQYVCYTDIRIDQNMVLKEVGENVADVIISADGSWKAILESNDHVDQPRVGTLNSQQKGPDLQGSTSFSNASPNVWDLTEGDDEMNAFDACEIEDRKPFQSNIQGHSITTKQTMAPELNNATEVNQNAISRVQDGFCSGILLSTYGSSTHSARSDAQFIGGTSQPSPANFLLPPVLTDAISPALNRGTEDIRGNTHLTTSTLHDQLPIPDSLQLQQAQFGHSIVSNEYGRFPTIPRHITRTPIAVQALPAQTQTSGPHHRSRTTLISMVPNGPNTVGSDMERPQQFSRSIFNPVQISDISASALQHHSMSQNWNQQVAGHPTTSQRPGPGAYRTSSGLPTEPQTLQQQQSPQARTHSNLLRSSAHHHSRSQVQQGGAQGRATHAVGTGISQNAQPMVAAQRAAQMTRMPLPVQNQTSRTGSAFPVNANGGRSTAGEQRGNIEGMVQAVSRPESLVDLASEQNWRPTGLMRGSLVGRAYNSALNQLVIQPTQPTQSTRPPTPITSPPPGFPPHLQALLTNIRTPLVPQAPNYPMTQPASTTGGSGILPERSLGLH

SEQ ID NO: 2477 - protein, 270 aa, Schizosaccharomyces pombe
MSTTSREDAVYLAKLAEQAERYEGMVENMKSVASTDQELTVEERNLLSVAYKNVIGARRASWRIVSSIEQKEESKGNTAQVELIKEYRQKIEQELDTICQDILTVLEKHLIPNAASAESKVFYYKMKGDYYRYLAEFAVGEKRQHSADQSLEGYKAASEIATAELAPTHPIRLGLALNFSVFYYEILNSPDRACYLAKQAFDEAISELDSLSEESYKDFTLIMQLLRDNLTLWTSDAEYSAAAAGGNTEGAQENAPSNAPEGEAEPKADA

SEQ ID NO: 2478 - protein, 512 aa, Chlamydomonas reinhardtii
MLLQRHAPGFTKVPSRQCKPSVPIARQPRSSVCARATPGADLTTNYVIEPVSFGEDAVLECPEMRSKLVVRPSPFVTHNNFGGGFVSDQDRVALNSMRFASPDSAGASRSNFFPHGGKGGINVLEASMDQLNMTLPPWAIRAGARREIYFDPSQTTAAIVTCGGLCPGLNDVVQGLVNKLTDYGVPEGKILGIKYGFRGFYDPQVKPIVLSKRVVDGIQLQGGTILGTSRGGANIREIVKRIDMWGIDMLFVVGGNGGNAGANAINAMCRQHDVPCSVVGVPKSIDNDILLIDKCFGFDTAVEESQRALMAAKVEASSARKGIGLVKLMGRQSGFIAMQASMASGVVDACLIPEVNFKLDGDNGLLKYLDGVIKAKGHAVVCVAEGAGQDILEDGGQIGTDASGNPILKDIGAFLKDKFKAYFKDADIKYIDPSYMIRSVSTTTNDRIYCKILAHNAVHAAFAGFTGITVGLVNTHYVYLPIPVIIQAPRKVDPRGKAWNRLRAAIGQPSFQ

SEQ ID NO: 2479 - protein, 1523 aa, Bacillus pumilus SAFR-032; identical to SEQ ID NO: 1174

SEQ ID NO: 2480 - protein, 218 aa, Pisum sativum
MGRGGATTAAAAVEPVFFKEPRYRGVRKRPWGRFAAEIRDPLKKARVWLGTFDTAEEAARAYDTAARNLRGPKAKTNFPLAQPFYQNPEAGNPFGELRFYAGGAGEGFQDHRRPTSSGMSSTVESFGGPRPVRPPMPPSAVTGRRYPRTPPVAPGDCRSDCDSSSSVVDDADNDNAASSTMLSFKRQPLPFDLNAPPLEEGDVANGLGEDLHCTLLCL

SEQ ID NO: 2481 - protein, 653 aa, Oryza sativa Japonica Group
MVSKSYSNLLEMSCGDGVDFRQPFKSLPRVVTSPGIISDPDWDTRSDGDSVGSASSVERKIIVANFLPLNCTKDEAGQWSFSRDDDALLMQLKDGFSNETDVIYVGSLKVQVDPSEQDQVAQKLLRDYRCIPTFLPPDLQQQFYHGFCKQQLWPLFHYMLPICLDKGELFDRSLFQAYVRANKLFADKVMEAINTDDDHVWVHDYHLMLLPTFLRKRLHRIKLGFFLHSPFPSSEIYRSLPVRDEILKSLLNADLIGFQTFDYARHFLSCCSRLLGLHYESKRGYIGIDYFGRTVSLKILSVGVHVGRLESILKLPATVKKVQEIEQRYKGKMLMLGVDDMDIFKGISLKLLGLELLLDRNPKLRGKVVLVQIVNPARSTGKDVEEAITESVSVAERINLKYGSVDYKPVVLIDHRIPFYEKIAFYAASDCCIVNALRDGMNLVPYEYTVCRQGNEEIDNARGSDTNCHHTSTLIVSEFVGCSPSLSGAFRVNPWSVDDVADALHHATDLTESEKRLRHEKHYRYVRSHSVAYWAHSFAQDLERACKDHYSRRCWAIGFGLNFRVIALSPGFRKLSLEHFASSYNKATRRAIFLDYDGTLVPQSSINKAPSDELITILNSLCDDPKNDVFIAILIVDEVLAGELHCERKAPWL

SEQ ID NO: 2482 - protein, 2194 aa, Medicago sativa; identical to SEQ ID NO: 1175

SEQ ID NO: 2483 - protein, 498 aa, Arabidopsis thaliana
MSTTHVGLPTKMEATKSSKQNCCNPVKKPGPVSIDHVLLALRETREERDLRIRSLFSFFDSENVGYLDCAQIEKGLCALQIPSGYKYAKELFRVCDANRDGRVDYHEFRRYMDDKELELYRIFQAIDVEHNGCISPEGLWDSLVKAGIEIKDEELARFVEHVDKDNDGIIMFEEWRDFLLLYPHEATIENIYHHWERVCLVDIGEQAVIPEGISKHIKRSNYFIAGGIAGAASRTATAPLDRLKVLLQIQKTDARIREAIKLIWKQGGVRGFFRGNGLNIVKVAPESAIKFYAYELFKNAIGENMGEDKADIGTTVRLFAGGMAGAVAQASIYPLDLVKTRLQTYTSQAGVAVPRLGTLTKDILVHEGPRAFYKGLFPSLLGIIPYAGIDLAAYETLKDLSRTYILQDAEPGPLVQLGCGTISGALGATCVYPLQVVRTRMQAERARTSMSGVFRRTISEEGYRALYKGLLPNLLKVVPAASITYMVYEAMKKSLELD

SEQ ID NO: 2484 - protein, 307 aa, Clostridium beijerinckii
MERNNPNAQGLYNPCFEHDACGIGTIVNIDGEKSHEILSDCLTILEKLEHRGGTGADEHTGDGAGILFNIPHKFFQEELKSKGMTLGNEGDYAVAMVFLPQEEKARKEAMSLFEDISKEEGLELIGWREVQTKPSILGKASLEAMPAIMQAFVRRPNGIKPGKDFERNLYIVRRIIEKRAGWISKFLNETFYIASFSSKTIVYKGMLLSTQLREFYKDLEDERVETSLALVHSRYSTNTFPSWERAHPNRFMIHNGEINTLRGNVNKVYSRETNVKSRALGKDLNRVLPIINKEGSDSAIFDNNLEF

SEQ ID NO: 2485 - protein, 1556 aa, Synechocystis sp. PCC 6803; identical to SEQ ID NO: 247

SEQ ID NO: 2486 - protein, 1523 aa, Clavibacter michiganensis subsp. sepedonicus; identical to SEQ ID NO: 253

SEQ ID NO: 2487 - protein, 273 aa, Triticum aestivum
  misc_feature (92)..(92): Xaa can be any naturally occurring amino acid
  misc_feature (165)..(165): Xaa can be any naturally occurring amino acid
  misc_feature (211)..(211): Xaa can be any naturally occurring amino acid
MLLLNPASEAAAAAALDSIRQQLLEEPARPAYCRSASFGSLVADQWSESLPFRPNDAGDMVVYGALRDAFSCGWLPDGSFAAVKPEPLPSPXSYDGSCLGSFLASPPELDAPWTEEEAEVAATASRGKHFRGVRQRPWGKFAAEIRDPAKNGARVWLGTFDSAEXAAVAYDRAAYRMRGSRALLNFPLRIGSEIPAASPSPRPEASVSAAXSPDSPPPSSSAPGSSKRRKRGEAAAASMSMALVPPPPVQAPVQLTLPAQPWLATGAVQQLVS

SEQ ID NO: 2488 - protein, 378 aa, uncultured bacterium
MDERIEIYSLSDIALILPLRDGMNLVSKEFVASRHDGTGVLILSELAGAAKELHEALLVNPNNLDEIAEAIREAVEMPNEEQVQRNKMMMQRLQRYNIHRWASEFMKSLEGVKEIQQVRLTRKVNTTRMHQIIDTYRVSKKRILFLDYDGTLSWFQENPEDARPDDQLYTILQHLTKDDKNTVVIISGRDKETLGLWFDNTWNIHFIAEHGVWIRDPGGEWHMLEQIDNDWKDPVQPLLEYYVDRTPRTFIEHKNFSLVWHYRNADPDLGLQRAWELKDELRTLTANLNLEIMDGDKVLEIKHAGINKGRAALQKMGNDRYDFIFAVGDDWTDEYTFESMPEESYTIKVGTKTTSAAYYIESVELVREMLCRFSQEEC

SEQ ID NO: 2489 - protein, 1481 aa, Pseudomonas putida KT2440; identical to SEQ ID NO: 261

SEQ ID NO: 2490 - protein, 273 aa, Saccharomyces cerevisiae
MSQTREDSVYLAKLAEQAERYEEMVENMKAVASSGQELSVEERNLLSVAYKNVIGARRASWRIVSSIEQKEESKEKSEHQVELIRSYRSKIETELTKISDDILSVLDSHLIPSATTGESKVFYYKMKGDYHRYLAEFSSGDAREKATNSSLEAYKTASEIATTELPPTHPIRLGLALNFSVFYYEIQNSPDKACHLAKQAFDDAIAELDTLSEESYKDSTLIMQLLRDNLTLWTSDISESGQEDQQQQQQQQQQQQQQQQQAPAEQTQGEPTK

SEQ ID NO: 2491 - protein, 249 aa, Zea mays
MEHIVPSYRRTDNRLILLDYDGTVMPENSIDRTPSSEVISVLNRLCEDPKNRVFIVSGRGKDELSRWFAPCEKLGIAAEHGYLTRWSRDAPWDTSGLAADFDWKKTAEPVMQLYTEATDGSYIEHKESAIVWHHHEADPDFGSCQAKELLDHLENVLANEPVVVKRGQHIVEVNPQGISKGVVVDSLLSSMVRTGKPPDFVLCIGDDRSDEDMFESIVCPASNSGVKLPASSEVFACTVGKKPSMARYY

SEQ ID NO: 2492 - protein, 458 aa, Burkholderia thailandensis E264
MSRLIIVSNRVAPISEGEPAAGGLAIGVYDALKETGGTWFGWSGEVVASGAPQIRVEEHGPVTFATIGLSRRDYDQYYRGFSNATLWPAFHYRADLIQFDRHEFEGYSRVNVWLARQLVPLLRDDDVIWVHDYHLIPFAQALRAAGVKNRIGFFLHIPFPAAQVLVNVPPHRELVEALCSFDLLGFQTDTDLRAFFEYVECEAGGAVDRAAHPARVEAFGRTLRAAAYPIGVYPDEIAALAKAGENGRAVKALAASLRGRQLVMSVDRLDYSKGLVERFRAFEKLLEHETSFRNHVSFLQIAPSTRADLRAYQDIRRQLEGESGRINGRFAELDWAPILYIHRQYERPVLAALYRLARVGYVTPLRDGMNLVAKEYVSAQDPDDPGVLVLSRFAGAACELTGALIVNPIDIAGMADALSRALSMPLAERRARHADMLARLRENNVSVWRDNFLRDLGR

SEQ ID NO: 2493 - protein, 1524 aa, Rhodospirillum rubrum ATCC 11170; identical to SEQ ID NO: 290

SEQ ID NO: 2494 - protein, 84 aa, Solanum lycopersicum
MNAVVSFVPQLGEQELREPYIGMEFQSLDTGFKFYLDYAHRNGFSVRKNRISRSRKDKSIIGQEFVCSKEGFRLKKCNQACNCD

SEQ ID NO: 2495 - protein, 1550 aa, Synechococcus sp. PCC 7335; identical to SEQ ID NO: 296

SEQ ID NO: 2496 - protein, 585 aa, Zea mays
FGRTVGIKIMPVGVHMGQLESGLRLPDREWRLSELQQQFQGKTVLLGVDDMDIFKGINLKLLAFENMLRTHPKWQGRAVLVQIANPARGRGKDLEAIQAEIEQSCQRINVDFGQSGYSPVVFINRDVSSVEKVAYYTIAECVVVTAVRDGMNLTPYEYIVCRQGAPGSESVSEVSGPKKSMLVVSEFIGCSPSLSGAIRVNPWNIEATAEAMNEAISMPEQEKQLRHEKHYRYVSSHDVAYWSKSFILDLERACRDHFKRTCWGIGLGFGFRVVALDPHFRKLNMDSIVNAYEISESRAILLDYDGTLVPQTSINKEPSPEVLNIINTLCSDSRNIVFLVSGRDKDTLGKWFSSCPKLGIAAEHGYILRWSSKEEWQTCTQAMDFGWMQMAKPVMNLYTEATDGSYIERKESALVWHHQDADPGFGSSQAKELLDHLESVLANEPVSVKSGQFIVEVKPQGVSKGIVAERILASVKERGKQADFVLCIGDDRSDEDMFENIADIIKRNMVAPRTSLFACTVGQKPSKAKFYLDDTFEVVAMLSALADATGAELKSDSADELAASISSLDIGDEQSESSDTPIGGS

SEQ ID NO: 2497 - protein, 2167 aa, Oryza sativa Japonica Group; identical to SEQ ID NO: 297

SEQ ID NO: 2498 - protein, 212 aa, Prototheca wickerhamii
LIRADGGMRTGRDVLVAAALGADEYGFGTVAMIATGCIMARVCHTNNCPVGVASQREELRKRFPGTPEDLVNYFMFIGEEVRASLASLGLRSLDDLIGRGNYLRQRSDVTLAKTASLDLSILTRYAGDCARSSTRRTASPHDNGSDWDDVILADPEVQAAIAGQGTVARSYTIVNTDRAALGRLGGAIARLHGDDRFEGRIDLDLRGSAGQS

SEQ ID NO: 2499 - protein, 767 aa, Zea mays
PRVRLPAGTIHVKFTGSAGQSFGAFLCPGITLELEGDSNDYVGKGLSGGKIVVYPPRNSSFSPEDNIVIGNVALYGATMGEAYFNGMAAERFCVRNSGAQAVVEGIGDHGCEYMTGGTVVILGKTGRNFAAGMSGGIAYVYDVDGKFSARCNNELVDLYHVEEEDDIITLKMMIEQHRRNTESVLARDILSDFDNLLPKFVKVYPRDYKRVLESMKVEKAVAKHAKEPKMANGISVTTKKVQPDQSASRPTHVANAKKYRGFITYERESISYRDPKERVRDWKEVAIESTPGPLLNTQSARCMDCGTPFCHQESSGAGCPLGNKIPEFNELVHQNRWREALDRLLETNNFPEFTGRVCPAPCEGSCVLGIIENPVSIKSIECAIIDKGFEEGWMIPRPPLQRTGRKVAIVGSGPSGLAAADQLNKMGHFVTVFERADRIGGLMMYGVPNMKTDKIGVVQRRVNLMAEEGVTFVVNANVGSDPLYSIERLRSENDAVILACGATKPRDLTIPGRELSGVHFAMEFLHANTKSLLDSNLEDGKYISARGKKVVVIGGGDTGTDCIGTSIRHGCTSLVNLELLSKPPSTRAADNPWPQWPRIFRVDYGHQEAATKFGKDPRTYGVLTKRFIGDGNGKVKALEVVRVKWEKVDRRFQLKEMEGSEEIIEADLVLLAMGFLGPEATIAEKLGLEKDNRSNFKAQFGDFATSVDGVFAAGDCRRGQSLVVWAITEGRQAAAAVDKYLSRYDQNAAATGDSTPSGTGLVQPVAA

SEQ ID NO: 2500 - protein, 170 aa, Glycine max
VSYVGPPPEATDGSFIEHKESAMVWHHQEADPYFGSCQAKELLDHLESVLANEPVGVIRGQHIVEVKPQGVSKGKVVEDLISIMRSKGKSPDFLLCIGDDRSDEDMFESIALSVSNPALSTIISKVFACTVGQKPSMAEYYLDDTSEVIKLLEGLATAAGPSASIIYQDL

SEQ ID NO: 2501 - protein, 860 aa, Arabidopsis thaliana; identical to SEQ ID NO: 1190

SEQ ID NO: 2502 - protein, 214 aa, Brassica napus
AEHGYFTRRNSDSPWETTVLPTDLGWKKIAEPVMSHYTEATDGSFIEEKESAMVWHHQEADPSLGSWQAKELLDHLESVLTNEPVVVKRGQHIVEVKPQGVSKGKVVEHLIATMRNSKGKRPDFLLCIGDDRSDEDMFDGIVKHQDVSPIAFAEVFACTVGQKPSKAKYYLDATPMVINMLEWLASASDKSKDGEQQSKFTFQQGHCRNEIIDL

SEQ ID NO: 2503 - protein, 534 aa, Mycobacterium sp. MCS; identical to SEQ ID NO: 301

SEQ ID NO: 2504 - protein, 1492 aa, Thermus thermophilus HB27; identical to SEQ ID NO: 304

SEQ ID NO: 2505 - protein, 280 aa, Cucumis melo
NFGDYNMWLAAENGMFLRPTKGEWMTTMPENLHMDWVESVKHVFEYFTERTPRSHFELRETSLVWNYKYADVEFGRLQARDLLQHLWTGPISNASVDVVQGSRSVEVRAVGVTKGAAIDRILGEIVRDKGINKPIDYVLCVGHFLTKDEDVYTFFEPDLPTEVPAAVARTTVTNPFGGVPVPKIPNTVVSPSRSARLKKQRSLSILERKANSHGSAVFWRPVVQDRLSLHEGSSVLDLKGDNYFSCAVGRKRSNARYLIGSSDDVVTLVKELSECSECQI

SEQ ID NO: 2506 - protein, 258 aa, Glycine max
  misc_feature (49)..(49): Xaa can be any naturally occurring amino acid
  misc_feature (221)..(221): Xaa can be any naturally occurring amino acid
  misc_feature (245)..(245): Xaa can be any naturally occurring amino acid
  misc_feature (248)..(248): Xaa can be any naturally occurring amino acid
  misc_feature (253)..(253): Xaa can be any naturally occurring amino acid
GYGASAVCPYLALETCRQWRLSNKTVNLMRNGKMPTVSIEQAQKNYCKXYCGAQIFEVYGLGKEVVDLAFRGSVSKIGGLTFDEVARETLSFWVKAFSEDTAKRLENFGFIQFRPGGEYHANNPEMSKLLHKAVRQKSQSAFSVYQQYLANRPVNVLRDLLEFKSDRAPIPVGKVEPASSIVQRFCTGGMSLGAISRETHEAIAIAMNRIGGKSNSGEGGXEDPIRWKPLTDVVDGYSPTLPHLXGLXHGDTXTSAIK

SEQ ID NO: 2507 - protein, 497 aa, Silicibacter sp. TM1040; identical to SEQ ID NO: 308

SEQ ID NO: 2508 - protein, 512 aa, Candidatus Pelagibacter ubique HTCC1002; identical to SEQ ID NO: 311

SEQ ID NO: 2509 - protein, 866 aa, Oryza sativa
MVSRSYSNLLGRRRIPRVVTASGIVPDLDYSDDDAASAASSSDHSSAHSHAPRERAIIVANQLPIRASRRGGGGGGWEFSWDEDSLLLQLRDSLRAHADRADDMEFVYVGGLRDDVPAAEHDEVAHHLLEGFRCVPTFLPADLRSRFYHGFCKQQLWPLFHYMLPLSPELGGRFDRALWQAYVSVNKIFADKILEVISPDEDYVWVHDYHLMILPTFLRKRFNRVKLGFFLHSPFPSSEIYKTLPVREELLRSLLNAGLIGFHTFDYARHFLSCCGRMLGLKYESQRGYIALEYYGRTVTIKILPVGVHLEQLRSVLNLPETGVKVAELLKQFCDQNRLMLLGVDDMDIFKGISLKLLAFEQLLMQHPEWRGRVVLVQIANPARGRGKDVKEVQDESYAMVRRINEAFGQPGYQPVILIDRPLQFYERMAYYVVAECCLVTAVRDGMNLIPYEYVIARQGNEKLDGILGLGPSARKKSMLVVSEFIGCSPSLSGAIRVNPWNIDAVADAMDSALEMPEGEKVLRHEKHHKYVSTHDVGYWANSFLQDLERTCLDHSRRRCWGIGFGLRFRVVALDPNFKKLAVEHLVSAYRRTTTRIILLDYDGTLMPQTSFGKSPSSKTIDMLNSLSRDQNNMVFLVSTKKRSTLEEWFSSCDNLGLAAEHGYFLRLKRDAEWETCVPVTDRSWKQIAEPVMKTYTETTDGSTIEDKETAIVWSYEDADPDFGSCQAKELHDHLESVLANEPVTVKAGLNHVEVKPQGVSKGLVAKRLLSIIRENSLLPDFVLCIGDDRSDEDMFEVITTAAQDNCLSPDAEVFACTVGRKPSKAKYYLDDLADIVRLIQGLANVSDEMHSTMPTPVDAADTALR

SEQ ID NO: 2510 - protein, 1487 aa, Vibrio sp. Ex25; identical to SEQ ID NO: 319

SEQ ID NO: 2511 - protein, 269 aa, Arabidopsis thaliana
IFLYLSPFEVAHPRISFFFFFFDNKRIFLLTFFFFEESYNHPTKKNQNYKTNKQSPRATSTTSHFTESWGDLPLKENDSEDMLVYGILNDAFHGGWEPSSSSSDEDRSSFPSVKIETPESFAAVDSVPVKKEKTSPVSAAVTAAKGKHYRGVRQRPWGKFAAEIRDPAKNGARVWLGTFETAEDAALAYDRAAFRMRGSRALLNFPLRVNSGEPDPVRIKSKRSSFPSSNENGAPKKRRTVAAGGGMDKGLTVKCEVVEVARGDHLLVL

SEQ ID NO: 2512 - protein, 482 aa, Escherichia coli
MSRLVVVSNRIAPPDEHAASAGGLAVGILGALKAAGGLWFGWSGETGNEDQPLKKVKKGNITWASFNLSEQDLDEYYNQFSNAVLWPAFHYRLDLVQFQRPAWDGYLRVNALLADKLLPLLQDDDIIWIHDYHLLPFAHELRKRGVNNRIGFFLHIPFPTPEIFNALPTYDTLLEQLCDYDLLGFQTENDRLAFLDCLSNLTRVTTRSAKSHTAWGKAFRTEVYPIGIEPKEIAKQAAGPLPPKLAQLKAELKNVQNIFSVERLDYSKGLPERFLAYEALLEKYPQHHGKIRYTQIAPTSRGDVQAYQDIRHQLENEAGRINGKYGQLGWTPLYYLNQHFDRKLLMKIFRYSDVGLVTPLRDGMNLVAKEYVAAQDPANPGVLVLSQFAGAANELTSALIVNPYDRDEVAAALDRALTMSLAERISRHAEMLDVIVKNDINHWQECFISDLKQIVPRSAESQQRDKVATFPKLALEHHHHHH

SEQ ID NO: 2513 - protein, 261 aa, Triticum aestivum
  misc_feature (134)..(134): Xaa can be any naturally occurring amino acid
MSTAEATREENVYMAKLAEQAERYEEMVEFMDKVAKTADVGELTVEERNLLSVAYKNVIGARRASWRIISSIEQKEESRGNEAYVASIKEYRTRIETELSKICDGILKLLDSHLVPSATAAESKVFYLKMKGDXHRYLAEFKAGAERKEAAENTLVAYKSAQDIALADLPTTHPIRLGLALNFSVFYYEILNSPDRACNLAKQAFDEAIAELDSLGEESYKDSTLIMQLLRDNLTLWTSDNAEEGGDEIKEAASKPEGEGH

SEQ ID NO: 2514 - protein, 2194 aa, Medicago sativa; identical to SEQ ID NO: 326

SEQ ID NO: 2515 - protein, 754 aa, Triticum aestivum
AYLGDLQNKFVQKSRLVPVRNSRDIVDPRVRLPADLHGKFYHGTSKHYMWPLLHYLLPLTPSTLGGLPFDRALYHSFLSANRAFADRLTEVLAPDDDFVWIQDYHLLALPTFLRKRFPRARVGFFLHSPFPSSEIFRTIPVRDDLLRALLNADLVGFHTFDYARHFLSACSRLLGLDYQSKRGYIGIEYYGRTVTVKILPVGIDMGQLRSVVSAPETADVVRQVADAYKGRRLMLGVDDVDLFKGIGLKFLGMEQLLVENPELRGKAVLVQITNPARSEGRDVQEVQDEARAISARVNERFGTPGYTPIVMISRPVSEHEKAAYYAAAECCVVSAVRDGLNRIPYIYTVCRQESTALGDAPKRSVIVLSEFVGCSPSLSGAIRVNPWSVESVAEAMSSALRMSDGEQRLRHEKHYKYVSTHDVAYWARSFDQDLQRACKDHFSRRHWGIGFGMSFKVVALGPNFRRLSVEHIVPSFRKTENRLILLDYDGTVMPESSIDKAPSSEVISVLNRLCEDPKNRVFIVSGRGKDELSKWFAPCEKLGIAAEHGYFTRWSKESPWETCGLVADFDWKKTAEPVMRLYTEATDGSYIEHKESALVWHHDEADPDFGSCQAKELLDHLESVLANEPVVVKRGQHIVEVNPQGISKGVVVESLLSSMVRGGKAPDFVLCIGDDRSDEDMFESIVCPANGSVKLPATSEVFACTVGKKPSMAKYYLDDTVDVIKMLQGLASAPSQHRPWPVQLRVTFEEGNGV

SEQ ID NO: 2516 - protein, 256 aa, Oryza sativa Japonica Group; identical to SEQ ID NO: 2072

SEQ ID NO: 2517 - protein, 828 aa, Vicia faba var. minor
MESNTSSSMPPDLAATNGTTNPVSPSLVNLYRITKVLDRLAFHFQPGNRSDSFEFFNLCLSLSRGIDYALANGEPPPKANELPTLMKQMYQRKTDELSLAAVMVLMISVKNACKIGWFQKKESEELLTIADEIGKIYCTLGNIINGPSSSHSAVLTIMERFYPRMKLGPIIVTIEAQPGYGASAVDFHITKNNVHSDKKIWLLVAQTDNIETSACLISPQEVNFLLNGKGIDTRTNFRMDPGPQMPTNVTSVLKFGTNLLQAVGQFNGHYIILVAYMSVASLPEHPVLPPDYVQPAVTSVDSDSDIIEGASRFSLNCPISFTRIKTPVKGRSCKHFQCFDFDNFIKINSKRPSWRCPHCNQNVSYTEIRLDRNMIEILEKVGENIVEVTVHADGSWQPVLENDHDVGKIQNKVHNCDKEQTEQQESARSPDTFPHVVDLTNKDNDMDVIMDTCETADRKPSQGSAPTSVQIEDDFWAGLYIANTGSDTPTVGVTDLAVLADAVSPALIQESEGHDSISANHNQFLALNNLQMMNNYMSSFVSEYGRSSSSPRHIQRTPVAVQALPVPSQPLGPQQNSVTNLDSLITSSPSATHVSLSNPASADPYNAILSDAERQQLFSRSPLNMPQVSAATQNRMPSVNMPAPTHNRVPPVSMSATTLNRAPSHLQNQQYRAGMLNDFRNSHLQQTLNPRAHTPMQPLNAQRSHTQQGVSQTNAAGGAANSQQARVMASSHVARQGEQRGPPVQAVSRTDELFNSQPDQNWRPTSRMRGSLSGQQLTDDVRQRLIMPSSQEAQNSRPQGPQPQPGRTTSQLNVLIANSRNAHNPPRQ

SEQ ID NO: 2518 - protein, 622 aa, Methanothermobacter thermautotrophicus str. Delta H; identical to SEQ ID NO: 332

SEQ ID NO: 2519 - protein, 783 aa, Oryza sativa
  misc_feature (210)..(210): Xaa can be any naturally occurring amino acid
IFFEKDNPLGMDALASEEYASQSKLLQEFTNAPSIDGAWVFQTNNEDRSTAMYSISQTNLLANNKRKYILFSHIMRNGTNLLDFQWSPFPIQMDGVSAVVPSPSGSKLLVVRNGEKGSPTKLEIVDQSHVEKEIHVAQSVHGPLYTDEWFHGISWNQEETLIAYIAEDSPEPKPVFDDTGYRKEGSSEKDCNNWKGQGDWEEDWGETYSXKKGRPSLFVLDINSGEVRAAKGISRSLSVGQVVWAPPSSCGRQKYLIFVGWLEHNGFQNTPRKLGIKYCSNRPCSLYSTLCPFEESDVDNAPASDSKLEPASVAINLTPSISSAFFPRFSKDGKLLVFLSANRAVDSGAHNATDSLHKINWPSDWKMDQYLEITDVIPIVMCPQDGCFPGLYCSSMLSNPWLSDRCTMILTSAWRSTEVILSIDVLSGKATRISPENSEYSWSALAVDGHNVLVVSSSPIDPPQIKYGHQVSLKDQTCTWVWDEVNNNPLMAANNKVKALLSHHQFSILKIPVTNPSDDLSDGSKLPFEAIFVSCKDSSHKPTILVLHGGPHSVSVSSYSKTSAFLASLGFNLLIVNYRGTPGFGEEALQSLPGKVGSQDVQDCLTALDYVIEGGLIDASKVAVIGISHGGFLTTHLIGQAPDRFMVAAARNPVCNLSLMIGTTDIPDWCYAVACGSEGRQHASESPSPDHLRLFYQKSPIAHISKVKAPLLMLLGGADLRVPISNGLQYARALRERGGEIRIMMFPDDIHEINIPQSDFESFLNIGVWFKKHLSISASDASA

SEQ ID NO: 2520 - protein, 103 aa, Acidithiobacillus ferrooxidans
DLILGPVGVNFGAGMTGGLAFVRDQARQFPDQVNGELVNYHGIETESMRGYEALLRRHIEAHVAATGSDYAAGLLKDWTHFIRDVWLVVPKAAKLDVLLEEAS

SEQ ID NO: 2521 - protein, 561 aa, Bradyrhizobium sp. ORS278; identical to SEQ ID NO: 343

SEQ ID NO: 2522 - protein, 429 aa, Neocallimastix sp. W-1
MKNLLLASVLSLGLAGLANAACGGAWAQCGGENFHGDKCCVSGHTCVSINQWYSQCQPGGAPSNNASNNNNNNNNNNNNNNNNNNNHNNNNNNNNNNNNNGGSGNTKNFFDNQIYANPKFIEEVNSSNPRLSYDLQQKAQKVKDVPTAVWLAWDGATGEVAQHLKAAGSKTVVFIMYMIPTRDCNANASAGGAGNLNTYKGYVDNIARTIRSYPNSKVVMILEPDTLGNLVTANSANCQNVRNLHKNALSYGVNVFGSMSNVSVYLDAAHGAWLGSSTDKVASVVKEILNNAPNGKIPGLSTNISNYQSISSEYQYHQKLASALAAVGVPNMHFIVDTGRNGVTINSGTWCNLVGTGLGERPRGSPNAGMPLLDAYMWLKTPGESDGSSSGSRADPNCSSNDSLRGAPDAGQWFHDYFAQLVRNARPSF

SEQ ID NO: 2523 - protein, 868 aa, Ginkgo biloba
MMSRSYTNLMDLATGNFPAFGRATKRLPRVMTVPGIISELDDDNSNSVSSDVPSSICQERMIIVANQLPLRAQRRPDNRGWAFSWDEDSLLLQLKDGLAEDMEVVYVGSLKVEVDLSEQDDVAQILLENFKCVPAFLPPELLTKFYHGFCKQQLWPLFHYMLPLSPDHGGRFDRSLWQAYVSANKIFADKVMEVISPDDDYVWVHDYHLMVLPTFLRKRSNRVKLGFFLHSPFPSSEIYRTLPVRDEILRALLNSDLIGFHTFDYARHFLSCCSRMLGLEYESKRGYIGLEYYGRTVGIKILPVGIHMGQLESVLNLADTEWRVGELRDQFKGKILLLGVDDMDIFKGISLKFLAMEQLLKLHPEWRGKVVLVQIANPARGRGKDVEDVQAETHSTAKRINETFGRPGYEPVVLIDRPVPFYERIAFYTIAECYVITAVRDGMNLTPYEYIVCRQGSPRLNETLGVSPNVSKKSMLVVSEFIGCSPSLSGAIRVNPWNIDAVAEAMSTAITMPETEKQLRHEKHYRYVSTHDVGYWAHSFMQDLERACKDHFRRRCWGIGFGLGFRVVALDPNFRKLSTEHIVSAYKRTKSRAILLDYDGTMMPQTSINKTPGSEVLFILNSLCSDPKNVVFIVSGRGRQTLSQWLSPCEMLGIAAEHGYFIRWTRDAEWETCVQGVDFGWKQITEPVMKLYTETTDGSVIETKESALVWHHQDADPDFGSCQAKELLDHLESVLANEPVVVKSGQHIVEVKPQGVSKGLVAERLLSIMVQNDKRPDFVMCIGDDRSDEDMFEGITSAMAGPSLSPIAEVFACTVGQKPSKAKYYLDDTVEVLRMLQGLAAASDQTAKTSSDQAAKNPSAQVALECSL

SEQ ID NO: 2524 - protein, 499 aa, Spinacia oleracea
MEPKIVTGEGGYALDDVPHFSDYLTNLPTYPNPLQTNPSYSVTKQYFVDFDDTVVQKAVQHKDGPRGIHFRRQGPRQKVYFKPDEVTACIVTCGGLCPGLNTVIRELVCGLDYMYGVKNILGIECGYKGFYARNTLPLTPKTVDSIHKRGGTILGTSRGGYVTSKIVDSIQDRGINQVYIIGGDGTQKGASVIYQEVRKRGLKVAVVGIPKTIDNDIPIIDKSFGFDTAVEEAQRVGNAAHTEAESVENGIGLVKLMGRDSGFIAMFATLASRDVDCCLIPESPFYLEGEGGLYEFIGRRLRENGHMVIVIAEGAGEKVEERDPSGNKAFKDVGLWLSFMIKEHFAKTKLNITLKYIDPTYMIRAVPANASDNVYCTILAQSAIHGAMAGYTGCTVGPVNGRQCYIPFYRVIEKPNKVVITDRMWARLLSSTNQPSFMHPPKGAIIEGKQDEVVLSESAAEESNENEKCTPTSTSLSIHDNHVDDQYSMSNGSSELLLK

SEQ ID NO: 2525 - protein, 132 aa, Glycine max
  misc_feature (115)..(115): Xaa can be any naturally occurring amino acid
  misc_feature (127)..(127): Xaa can be any naturally occurring amino acid
QNDNNMDPQRKAFYEYFSALMEPWDGPALIAFTDGHYLGATLDRNGLRPGRFYVTHSGRVVMASEVGVVDIPLEDVSQKGGLNPGMMLLVDFEKHIVVNDDALKEQYSLARPYGXWLKSRSRTQNIXDSVMN

SEQ ID NO: 2526 - protein, 268 aa, Zea mays
MSPSEPTREESVYMAKLAEQAERYEEMVEFMERVARYAGGAGGGEELSVEERNLLSVAYKNVIGARRASWRIISSIEQKEEGRGNEAHAASIRAYRSKIEAELARICDGILALLDSHLVPSAGGAESKVFYLKMKGDYHRYLAEFKSGAERKDAAESTMNAYKAAQDIALADLAPTHPIRLGLALNFSVFYYEILNSPDRACNLAKQAFDEAISELDSLGEESYKDSTLIMQLLRDNLTLWTSDTNEDGGDEIKEAAAAPKESAPEGQ

SEQ ID NO: 2527 - protein, 1525 aa, Leifsonia xyli subsp. xyli str. CTCB07; identical to SEQ ID NO: 354

SEQ ID NO: 2528 - protein, 203 aa, Catharanthus roseus
MSEEIISVSDRFLLSLIEEHLLSDNSDDSSSELTSTEENWEEIFADFLNWSGSEIQKRGSPSSESCQSNSMAESCQEDSVVGTPPEAAAGGGCSKDWNRYKGVRRRPWGKFAAEIRDPKKKGSRIWLGTYETPEDAALAYDAAAFNMRGAKARLNFPHLIGSNISGPVRVNPRKRFPAEPSTTSSSSSSSSSENSGGRKKRRY

SEQ ID NO: 2529 - protein, 357 aa, Oryza sativa Indica Group
MGIAAGAALPGGPAGPAGGLFACRSAAASMRQTYLDLAAAAVAARSASCTSWADAMRASSPTRSSRSASDVDEFTAWVRKHPSALSKFEEIAAKSRGKKIVMFMDYDGTLSPIVADPDTAYMSDAMRAAVREVAKTFPTAIVSGRCRDKVRNFVGLSDLYYAGSHGMDIKGPSSNPESALCQPASEFLPMIDEVYKTLVEKTKSTPGAKVENNKFCLSVHFRCVDEKRWNALGEQVKAVIKEYPKLKLTQGRKVLEIRPSIKWDKGKALEFLLESLGFANCGDVLPVYIGDDRTDEDAFKVLRKRGQGLGILVSKCPKDTNASYSLQDPTEVMEFLLRLVEWKRKSSSSSLMIRPRV

SEQ ID NO: 2530 - protein, 2207 aa, Physcomitrella patens subsp. patens; identical to SEQ ID NO: 355

SEQ ID NO: 2531 - protein, 817 aa, Schizosaccharomyces pombe
MSVYGKIPSTSFEHENTFELSGDLLDPEELKSLGVSGRIIYVLRHLPFKSSINEETREWDLSGRRGATTMYSSMNWLANSTYWQTTLVGWTGVIPTVSEKEENKDAVTRLDSQDVKRFEETYSQWNSGERSTEYVPVWLPGPEKGSETIINETRSQQSRWLAYAENVIRPLIHYKYWPSSEVDENEEQWWRDYVKMNHAFADKICEIYKPGDFIIVQDYSLFLVPQLIRNKIDDAVIGFYHHHPFPSSEIARCFPRRRAILRSVLGADFIGFEDYSYARHFISCCSRVLDLEIGHDWVNLNGNKVTVRAITVGIDVPRIIRSSGNVSVSEKLEELNKRYENMKVILGRDRLDELYGVPQKLRSFQRFLRTYPEWRKKVVLIQITISSAFKHPKLLSSIKKLVQAINQEFGTDDYTPVHHVEEQLEPADYFALLTRADALFINSIREGVSNLALEYVVCQRDRYGMVLLSEFTATSAMLHDVPLINPWDYNECAEIISNALSTPLERRKMIERESYKQVTTHTMQSWTSSLIRSLANKLAATKTDQRIPTLTPEHALSVYSKASKRLFMMDYDGTLTPIVRDPNAAVPSKKLLDNLATLAADPKNQVWIISGRDQQFLRNWMDDIKGLGLSAEHGSFVRKPHSTTWINLAELLDMSWKKEVRRIFQYYTDRTQGSSIEEKRCAMTWHYRKADPENGAFQALECEALLEELVCSKYDVEIMRGKANLEVRPSSINKGGIVKQILSSYPEDSLPSFIFCAGDDRTDEDMFRSLHKNTRINKETSFAVTIGSDKKLSIADWCIADPANVIDILADLANFTN

SEQ ID NO: 2532 - protein, 267 aa, Saccharomyces cerevisiae
MSTSREDSVYLAKLAEQAERYEEMVENMKTVASSGQELSVEERNLLSVAYKNVIGARRASWRIVSSIEQKEESKEKSEHQVELICSYRSKIETELTKISDDILSVLDSHLIPSATTGESKVFYYKMKGDYHRYLAEFSSGDAREKATNASLEAYKTASEIATTELPPTHPIRLGLALNFSVFYYEIQNSPDKACHLRKQAFDDAIAELDTLSEESYKDSTLIMQLLRDNLTLWTSDMSESGQAEDQQQQQQHQQQQPPAAAEGEAPK

SEQ ID NO: 2533 - protein, 268 aa, Zea mays
  misc_feature (37)..(37): Xaa can be any naturally occurring amino acid
MSPSEPTREESVYMAKLAEQAERYEEMVEFMERVARXPGGAGGGEELSVEERNLLSVAYKNVIGARRASWRIISSIEQKEEGRGNEAHAASIRAYRSKIEAELARICDGILALLDSHLVPSAGGAESKVFYLKMKGDYHRYLAEFKSGAERKDAAESTMNAYKAAQDIALADLAPTHPIRLGLALNFSVFYYEILNSPDRACNLAKQAFDEAISELDSLGEESYKDSTLIMQLLRDNLTLWTSDTNEDGGDEIKEAAAAPKESAPEGQ

SEQ ID NO: 2534 - protein, 803 aa, Arabidopsis thaliana; identical to SEQ ID NO: 365

SEQ ID NO: 2535 - protein, 464 aa, Ralstonia metallidurans CH34
MGRLVAVSNRVADPRNHAAGGLAVALSDTLNKTGGLWFGWSGKVVDASRGGTPGEGELHQIQAGNVTLATVDLSREDFESYYLGYSNGVLWPVFHYRVDLADFDSGGNLNAYRRVNQLFARKLAPLLKPDDVIWIHDYHLIPLAAELRAIGCGQRIGFFLHIPLPPRLILATIPQHEWLMRALFAYDLLGFQSHDDVEHFSRYVQGEAGAEPMGEYRFRAFHRTVRAQAFPIGIDVDEFIELGRADEARETYEMMRGQYARRRLLLGIDRLDYSKGLPQRLKAFQTLLAEYPENRSSATLIQIAAPSRESVDAYADLRRDMEGITGAINGEYGELDWMPVRYIHRSTARRRLPGLCRACNVALVTPLRDGMNLVAKEYIAAQDPEDPGVLVLSRFAGAAEQLKEALLVNPYDTRATAQAIQQALHMSLSERQARHQKLLERIRQQDVHWWSGEYLRALMETEGG

SEQ ID NO: 2536 - protein, 1496 aa, Campylobacter jejuni RM1221; identical to SEQ ID NO: 374

SEQ ID NO: 2537 - protein, 875 aa, Oryza sativa Japonica Group
MADLVSSCKDKLAYFRIKELKDILNQLGLPKQGKKQDLIDRVLALLTDEQGQRHHGWGRKNSLTKEAVAKIVDDTYRKMQIQCAPDLATRSHSGSDFSFRPIEEAYDSFQPEAKVRCICSSTMVNDSMIQCEDQRCQVWQHLNCVLIPDKPGESAEVPPVFYCELCRLSRADPFWVTAGNPLLPVKFVSSGVTNDGTSVPQSVEKSFQLSRSDRETVQRQEYDLQVWCMLLNDKVQFRMQWPQYAELHVNGISVRVVTRPGSQLLGINGRDDGPLITTCSREGINKICLSRVDARTFCFGVRIAKRRTVAQVLNLVPKEAEGESFEHALARVRRCLGGGDTAENADSDSDLEVVAESVTVNLRCPNSGSRMRIAGRFKPCIHMGCFDLETFVELNQRSRKWQCPICLKNYSLESLMIDPYFNRITSLLRNCNEDVNEVDVKPDGSWRVKGDAASRELSQWHMPDGTLCNPKEDVKPAMQNGNEQMMEGTSDGQKSLKIGIKRNPNGIWEVSSKADDKKPSVVGNRMQNNSGFRALNNIMHMSNSPTSSYRDGEDPSVNQESNRHVDLSLNNGNNEFDSFSLNFGQACNTDDRPQQQHNATDVIVLSDSDEENDAMVCPPAVYDNTTTANGSGFPFTTNGIGYTERYQEDAGVGTSGLGLLSNNVDDFEMNNWQMHSSYQQPEQGFQFFGNDTDVHNTFVGSHNSFGLAPNDYSLDCNVGVEEASVTPALSVCRNSNEMHGSLVDNPLALVGDDPSLQIFLPSQPSSVPLQEELSERANAPNGVQSDDWISLTLAAGGGGNEEPAPADVNSQPQIPSTETGIEPLTDAASAFLSTNIERRSGADLNPRRIENIFSHPRQPRSVRPRLCLSIDTDSE

SEQ ID NO: 2538 - protein, 253 aa, Gossypium hirsutum
MTSPVGERFSEFFDKWICQLDGYLQQLVRVSREGLSESEHQTLVSKLTAHYKEYYTVKWAAAHEDVLVFYCPVWLSKLENACSWLTGWKPSMIFGVVESMRRKSVAELTEEQVRKIEQLRVKIKLEEEKVEREMERQQVAMADRKMVELVRTARRIRNEELVVVVGNHQVEGLVEVALKGVLAGLERVMKAADCVRLKALKGVLDVLNPSQSLDFLAGICMLQIQIRKWGQNRDNQKGSNPIILGELHNNVIF

SEQ ID NO: 2539 - protein, 520 aa, Glycine max
LGVDDMDLFKGISLKFLALGKLLEVDESLRGRVVLVQILNAARSKGKDIQDVKNESEAIAREINEKYSQPGYQPIVYINGPISTQEKAAYYAVSECCVVNAVRDGMNLVPYEYTVCRQGSVALDKALGVEGEDKKAPKQSVIIVSEFIGCSPSLSGAIRVNPWNIDDVAEAMNSAVTMSEAEKHLRHEKHYKYISSHDVAYWARSFDQDLDRACREHYSKRYWGVGLGLGFRIVALDPTFRKLSVDHIASAYRDTHSRLILLDYDGTMMPQATINKTPSREVIAVLNYLCSDPENMVFIVSGRDKDCLGKWFSPCEKLGLSAEHGYFTRWSKDSPWETCGLATDFEWKMIAEPVMSLYTEATDGSFIEHKESAMVWHHQEADPYFGSCQAKELLDHLESVLANEPVVVIRGQHIVEVKPQGVSKGKVVEDLISIMRSKGKSPDFLLCIGDDRSDEDMFESIARSASNPALPTIPKVFACTVGQKPSMAEYYLDDTSEVMKLLEGLATASAPSASIASQEL

SEQ ID NO: 2540 - protein, 1286 aa, Ustilago maydis 521
MIAITGTSGSSHSQRSPNSTSLAAPLSSSALDHRGSLTPGVYSEEPPNFKASAAATNPATMTATNAVSRSSSSDHLSQHNNVDYFKGAAPSPSAPTADAPSTLTQPPGHSNHSQLQQDSQKAEERIITASLSTSSAPSASDKVSQSASPDAAQQLLSSSGNQLAASPSSLAPQNRISMRPDGIGGMGLGTAATGDLGAQAEFETLDDMRKVVKDLEDDFNAKHPEIPLSGRIIHVSHYIPFEIRPLAEVDFERQREERLAATASVAAMAAAARARKAAKLAAEAEKREIEAQRELQRQAGGMQDFSSRKNSFRISSRRSSFATGFGMTGLEGQDFEARLRENQDRARRRAGRRAWMMTEVVDDTSECSEEDRFTPVGSRRGSTWSAASRGSFSSFNQEPWRQWGSLSDANSPFVDSPPTAPPQPQWVLTARRGHTALNSGIRSLCSTHRQTFIGWPGDIRYATQARDDHRSDPSETTDAEKREIEGVLASLDQASAWVSQEAPVAGAPVDPESNQPSIGKVPVPVMNGAEPIGSGDPSTRANGSAKDKAAANAATTSHNIRSVTAKNEGDSEHGIKYVPVWLDYNVAHGHYEGYCKATLWPLFHYLLWQDVNSERRAWEEYSWDAYYAANEAFAKRVAQEYKPGDLVWIHDYHLLLVPLMLRKLVPDAVIGLFVHAPFPSSEVFRCLPKRKEILEGMLGADLACFQAFSYSRHFLSSCIRVCGYEASSNAVESASGHVTNITYNPIGIDSVKIAKDSSSEGVLPKIEAIREMYKGKKILVGRDKLDVVRGVVQKLQAFYKFLAEYPEWRNKVVLIQVTAPALNDSPKLERQVSELVSHINGEFGSLSFTPVHHYHQIIDRDEYFALLSVADLALITSVRDGMNTTSMEYIICQNRFNKSPLILSEFTGTAGRMRSAIQVNPWNIFGVAKAIDYALRLTDEEKRARHDQLYHQVVMHTSHTWAAGLVKQLLTRLHNEHSAHLTPPLDRKEMVEKYRNAKKRLLLLDYDGTLTPIVKQPEMALPSQRLLTALDVLSQDEKNIFYIISGRDGGFLGKHLGHFRGIGFSAEHGGFVKEPGQDEYRNLTEDLDMTWMKDIRSVFEYYTERTAGSFIEQKKSAITWHYRGADPDFGSFQAKECQAHLENLSSQNKLAIEVLVGKKNLEVRPLAINKGEIVKRILYDHPDAEFVFCAGDDKTDEDMFRTLFNLAPSTPEMEAASDHDRFEAPSDLGGQVARDQALIISPPTPLKPNTPVGSPKKLNLTRSGIYTTMIGPNNRKTLAEWHSNRR

SEQ ID NO: 2541 - protein, 1612 aa, Medicago truncatula; identical to SEQ ID NO: 381

SEQ ID NO: 2542 - protein, 1498 aa, Pectobacterium atrosepticum SCRI1043; identical to SEQ ID NO: 383

SEQ ID NO: 2543 - protein, 492 aa, Mycobacterium avium subsp. paratuberculosis K-10
MAPGGGRGSKTAGYGNSDFVVVANRLPVDQERLPDGSTAWKRSPGGLVTALEPLLRRQRGAWVGWPGIVDEDVDHEDDPIVQDDLELRPVKLSADDVAEYYEGFSNATLWPLYHDVIVKPIYHREWWDRYVAVNRRFAEATSRAAARGATVWVQDYQLQLVPAMLRELRPDLTIGFFLHIPFPPVELFMQLPWRTEIVKGLLGADLVGFHLTGGAQNFLFLSRRLIGANTSRGAVGMRSRYGEVELESRVVRVGAFPISIDSTALDQTARHRDIRRRAREIRAELGNPRKVLLGVDRLDYTKGIDVRLKAFSELLAEGRAKRDDTVLVQLATPSRERVDSYQQLRNDIERQVGHINGEYGEVGHPVVHYLHRPVPRNELIAFFVAADVMLVTPLRDGMNLVAKEYVACRSDLGGALVLSEFTGAAAELRQAYLVNPHDLEGVKDTVEAALNQSVEEGRRRMRSLRRQVLAHDVDRWARSFLDALAESGPRDG

SEQ ID NO: 2544 - protein, 782 aa, Oryza sativa Japonica Group
IFFEKDNPLGMDALASEEYASQSKLLQEFTNAPSIDGAWVFQTNNEDRSTAMYSISQTNLLANNKRKYILFSHIMRNGTNLLDFQWSPFPIQMDGVSAVVPSPSGSKLLVVRNGEKGSPTKLEIVDQSHVEKEIHVAQSVHGPLYTDEWFHGISWNQEETLIAYIAEDSPEPKPVFDDTGYRKEGSSEKDCNNWKGQGDWEEDWGETYSKKGRPSLFVLDINSGEVRAAKGISRSLSVGQVVWAPPSSCGRQKYLIFVGWLEHNGFQNTPRKLGIKYCSNRPCSLYSTLCPFEESDVDNAPASDSKLEPASVAINLTPSISSAFFPRFSKDGKLLVFLSANRAVDSGAHNATDSLHKINWPSDWKMDQYLEITDVIPIVMCPQDGCFPGLYCSSMLSNPWLSDRCTMILTSAWRSTEVILSIDVLSGKATRISPENSEYSWSALAVDGHNVLAVSSSPIDPPQIKYGHQVSLKDQTCTWVWDEVNNNPLMAANNKVKALLSHHQFSILKIPVTNPSDDLSDGSKLPFEAIFVSCKDSSHKPTILVLHGGPHSVSVSSYSKTSAFLASLGFNLLIVNYRGTPGFGEEALQSLPGKVGSQDVQDCLTALDYVIEGGLIDASKVAVIGISHGGFLTTHLIGQAPDRFMVAAARNPVCNLSLMIGTTDIPDWCYAVACGSEGRQHASESPSPDHLRLFYQKSPIAHISKVKAPLLMLLGGADLRVPISNGLQYARALRERGGEIRIMMFPDDIHEINIPQSDFESFLNIGVWFKKHLSISASDASA

SEQ ID NO: 2545 - protein, 1497 aa, Alkaliphilus metalliredigens QYMF; identical to SEQ ID NO: 394

SEQ ID NO: 2546 - protein, 543 aa, Rhodopseudomonas palustris CGA009; identical to SEQ ID NO: 396

SEQ ID NO: 2547 - protein, 279 aa, Coccidioides immitis RS
MTSERENKTFLARLCEQAERYDEMVTYMKEVASLGGELTVDERNLLSVAYKNVVGTRRASWRIISSIEQKEESKGSDKHVATIREYREKIEEELERVCQDVLEVLDNNLIPKAETGESKVFYYKMKGDYYRYLAEFASGNKRKVAATNAHEAYKNATDVAQSELTPTHPIRLGLALNLSVFYYEIVNSPDRACHLAKQAFDDAIAELDSLSEESYRDSTLIMQLLRDNLTLWTSSDGGEAEPTTTDAASEEKPAETSATTDEPAAPASTEDKKETAAES

SEQ ID NO: 2548 - protein, 179 aa, Glomus intraradices
SLEYIMCQQENHGPLILSEFTGMAGSLGAAIMVNPWDYSGVAKAINDALNLPAEEKKFKHMQLYKQVTNHTAQSWADSFVKELIVSLNNKDQSNVTPYLDFKYLQRKYKAAKKRLLLFDYDGTLTPIVKIPSAAVPPSNLLEALGALTSDPNNSVWIVSGRDLTALETWLGSVKGLGFS

SEQ ID NO: 2549 - protein, 522 aa, Bacillus thuringiensis serovar konkukian str. 97-27; identical to SEQ ID NO: 409

SEQ ID NO: 2550 - protein, 624 aa, Glycine max
  misc_feature (532)..(532): Xaa can be any naturally occurring amino acid
SESSPFPSSEIYKTLPVREEILRALLNSDLIGFHTFDYARHFLSCCSRMLGLTYESKRGYIGIEYYGRTVSIKILPVGIHLGQLQSVLRMPQTEEKVCELIRQFSDKGRTLLLGVDDMDIFKGISLKLLAMEQLLIQHPEYREKVVLVQIANPARGRGKDVKEVQAETKATVKRINETFGKPGYDPVILIEEPLKFYERVAYYVVAECCLVTAVRDGMNLIPYEYIISRQGNETLDKVLGLASSPKKKSMLVVSEFIGCSPSLSGAIRVNPWNIDAVADAMDSALEMADLEKELRHEKHYRYVSTHDVGYWARSFLQDLERTCSDHVRRRWWGIGFGLSFRVVALDPNFKKLSMEHIISAYKRTATRAILLDYDGTLMPQSSTIDKSPSSKSIEILSSLCRDKNNMVFLVSARSRKMLSEWFCPCENLGVAAEHGYFLRMKRDEEWETHVAATDTSWKQIAEPVMKLYTETTDGSTIEDKETALVWCYEDADPDFGSCQAKELLDHLESVLANEPVTVKSGQSNVEVKPQGXVSKGLVATRLLSAMEEKGMCPDFVLCIGDDRSDEDMFEVITSSMGSPIAAKAEVFACTVCRKPSKAKYYLDDTTEIVRLLQGLACVSEQIDK

SEQ ID NO: 2551 - protein, 185 aa, Oryza sativa
GLQARLSFPTLVRSYPPPRPSRLRPSRPSASSEIFRTIPVREDLLRALLNADLVGFHTFDYARHFLSACSRLLGLDYQSKRGYIGIEYYGRTVTVKILPVGIDMGQLRSVVSAPETGDLVRRLTESYKGRRLMVGVDDVDLFKGIGLKFLAMEQLLVEHPELRGRAVLVQIANPARIEGRDIQEV

SEQ ID NO: 2552 - protein, 496 aa, Physcomitrella patens subsp. patens
MVVADLQNPKTVKGGCGSVFEDVPHLTDWLPDLPIFGNPLKFNPAYSAVKQYFVDDDDVVAKDIVVTMENAGAGLHFRRAGPRDKIYFRSEEVKACIVTCGGLCPGLNTVIREIVSGLWYQYGVREIYGIDGGYRGFYARNTIALNPKVVSDIHKKGGTILGTSRGGHDTMRIVDSIENRGINQVYIIGGDGTHKGAKAIHEEIIKRGLKVVVAGIPKTIDNDIDIIDKSFGFDTAVEEAQRAINAAHVEAESTHNGVGVVKLMGRYSGYIAMYATLASRDVDCCLIPEVPFFLEGEDGLYEFVYRRLRDNGHMVLVVAEGSGQELIAESLGPLDKLSDASGNRLLLDVGLWLCQKLKEHFPKVYNDPITLKYIDPTYMIRAVPSIASDNVYCTLLAHSAIHGAMAGFCGFTVGPVNNRHCYIPISRAVEKQRHVNTSDRMWARLLSSTHQPNFLRYKTVLKEKRDHQLKNAKVDDVKLDQNLSGLTASHSLPIDS

SEQ ID NO: 2553 - protein, 513 aa, Solanum demissum
MAGLSLAAGGWTSNLIVFLINEFNMKSIAAAKVFNVVNGLTTIFPIVGGIIADSYLGCFSVIWISSLISALGILLLLLTVVIDALRPLACGDGSSLCTSPSTNQYVFLYVSLALASIGVGGTRFTVAPMGAYQFDKPKHQTMFFDWYIFIFYLCWALSTAFIVYVEDNISWAWGFGISMACNILGLAIFLAGKRFYRHVKEQGGSPFVNLARVVVAATQKWRAPLSDQTQHYYHDPSDKTTLVPTKFFKFLNCAAIITEGDTKPDGSICNPWRLCTVQQVEDLKSLIKLFPLWASGLLISTQLVMQLSLLTLQALKMDRHMGPHFEIPAAISIIDRILNPFLAKYTTFSLTPLQRVGIGHALTISCMAVSALVESRRLRVARSHHLQGQKDAIVPMSVFWLLPQLALNGIGEGFHFPGHIAFYYQEFPTSLKNTSTAMVSLFIGIAFYLGNVLIDVVQRETGWLPDNINDGRMDNVFWLCCTLGSVNFIYFLLVASFYKYKNMESKPNNVPSK

SEQ ID NO: 2554 - protein, 1510 aa, Sulfitobacter sp. EE-36; identical to SEQ ID NO: 418

SEQ ID NO: 2555 - protein, 1539 aa, Prosthecochloris aestuarii DSM 271; identical to SEQ ID NO: 419

SEQ ID NO: 2556 - protein, 531 aa, Solanum demissum
MAGLSLASGGWTSNLIVYLIDEFNMKSIKTAKVYNVINGCTTLFPIVGGILADSYLGSFSVIWFSSLISALGILLLLFTSAIDVLRPPPCDDGSSLCTSPSTHQYAVLYVALALASLGVAGTRFIIAPMGANQFDKPKHQAIFFNWYIFAFYMSFAISTTVIVYVEDNVSWSWGYGISMAFNILGLAMFLIGKRFYCDVKEQGGSPFVNLARVIVVAIQKWRVPLSEQTQHYYHDPSDTTTTLTITQIPTKSFKFLNCAAFITEGDTKPDGSISNPWRLCTVQQVEDLKSLIKLFPLWASGFLISTQLVIQASLLILQALKMDRHMGPHFEIPAGSMLVFILLFTCIAIFIIDRFLYPFLAKYTTFSLTPLQRIGIGHVITIISMAVSALVESRRLRIVRTHKLQGQNNDIVPMSVFWLVPQLALNGIGEGFHFPGHIAFYYQEFPTSLKSTSTAMVALFIGIAHYLGNTLIDLVQRLSGWLPDNINKGRTDNVFWLCCILGSANFMYYVVCASLYKYKNVDNKSNIAPSK

SEQ ID NO: 2557 - protein, 1522 aa, Shigella flexneri 2a str. 2457T; identical to SEQ ID NO: 421

SEQ ID NO: 2558 - protein, 531 aa, Solanum demissum
MAGLSLASGGWTSNLIVYLIDEFNMKSIKAAKVYNVINGCTTLFPIVGGILADSYLGSFSVIWFSSLISALGILLLLLTSAIDVLRPPPCDDGSSLCTSPSTHQYAVLYVALALASLGVAGTRFTIAPMGANQFDKPKHQAIFFDWYIFAFYTSFAISTTAIVYVEDNVSWSWGYGISMAFNILGLAMFLIGKRFYRDVKEQGGSPFVNLARVIVIAIQKWRVPLSEQTQHYYHDPSDTTTTLTKTQIPTKSFKFLNCAAFITEGDTKPDGSISNPWRLCTVQQVEDLKSLIKLFPLWASGFLISTQLVIQTSLLILQALKMDRHMGPHFEIPAGSMSVFILLFTCIAIFIIDRFLYPFLAKHTTFSLTPLQRIGIGHVITIISMAVSALVESRRLRIVRTHKLQGQNNDIVPMSVFWLVPQLALNGIGEGFHFPGHIAFYYQEFPTSLKSTSTAMVALFIGIAYYLGNTLIDLVQRLSGWLPDNINKGRTDNVFWLCCILGSANFMYYVVCASLYKYKNVDNKSNIAPSK

SEQ ID NO: 2559 - protein, 455 aa, Xanthomonas oryzae pv. oryzae KACC10331
MSRLVVVSNRVAVPGENRAGGLAVGLLAALKERGGMWFGWSGKTVRGDSGGMHEQTEGDITFVTMDLNKRDIDSYYNGFANRTLWPLLHFRLDLVDYDRATREGYMRVNRLFAEKLAPLLKDSDTLWIHDYHMIPLCAMLRELGVGCKMGFFLHVPMPSADLVQAMPDHARLFNTFYAYDLVGFQTQRDAERFKAYVRLFGGGRILQGDLVEGPGGRRFTASSFPIGINTDLIANQAKASVGKQAVRDLRESLRGRQLAIGVDRLDYSKGLPERFQGFERYLERYPDQSGSLTYLQIAPVSRGDVTEYRQLRSQLEQIAGHINGGHAEPDWTPLRYVNQNFSHATLTGFYRAASVCLVTPLRDGMNLVAKEFVAAQDPENPGVLVLSLFAGAADEMKEALLVNPHDLDGVADAIATAASMPLVSRIERWHAMMDHLRKNNINHWRQRYLEALSEV

SEQ ID NO: 2560 - protein, 248 aa, Zea mays
MEEREKLVCLAKLAEQAERYDDMVEFMKNLARMDVDMSAEERHLFSVGFKNTIGAKRASWRIICSHEQKVAADRQTGVMIDAYKKKVEEELRKVCNEVLSVIAIHCLPLASTGENIVFFYKMKGDYYRYLAEFSTGTEKKAASDQSLMAYQHAMVVASSELSPAHQIRLGLALNLSVFFYEIMNSHERACQVAKQAFDEALTEINSGEGVYKDSTLMMQLLKDNLALWTSELTGGEASKGNGDVDMEG

SEQ ID NO: 2561 - protein, 913 aa, Oryza sativa Indica Group
MSRSYTNLLDLAEGNFAALGPGGGGGGRRRSGSFGLKRMSRVMTVPGTLSELDGEDDSEHAATNSVASDVPSSVAGDRVIVVSNQLPVVARRRPDGRGWSFSWDDDSLLLQLRDGIPDEMEVFFVGSLRAEIPVADQEEVSQALLDRFRCAPVFLPDPLNERFYHRFCKRHLWPLFHYMLPFSSSASPSPSSSSSSSSSSPSSSSGSGRFDRGAWEAYVLANKFFFEKVVEVINPEDDYVWVHDYHLMALPTFLRRRFNRLRIGFFLHSPFPSSEIYRTLPVREEILKALLNCDLIGFHTFDYARHFLSCCSRMLGIEYQSKRGYIGLDYFGRTVGIKIMPVGVHMGQLKTVLSLPDREWRVSELQQQFEGKTVLLGVDDMDIFKGINLKLLAFENMLRTHPKWQGRAVLVQIANPARGKGKDLEAIQAEIHESCKRINGEFGQSGYSPVVFIDRDVSSVEKIAYYTIAECVVVTAVRDGMNLTPYEYIVCRQGSDSTSEVNGPKKSMLVVSEFIGCSPSLSGAIRVNPWNIEATAEALNEAISMSEQEKHLRHEKHYRYVSTHDVAYWSKSFIQDLERACKDHFRRTCWGIGLGFGFRVVALDPHFTKLNMDSIVMAYERSESRAIFLDYDGTLVPQTSISRTPSAEVLRIINTLCSDRRNKVFLVSGRRRDKLGEWFSSCPDLGIAAEHGYFLRWTRDEEWQTCTQTSDFGWMEMAKPVMNLYTEATDGSYIDPKESALVWHHQDADPGFGSSQAKELLDHLESVLANEPVSVKSGQFIVEVKPQGVSKGVVAEKILVSMKERGKQADFVLCIGDDRSDEDMFENIADTIKKGMVATNTSLFACTVGQKPSKAKFYLDDTFEVVTMLSALADATEPEPETDLTDEFDELAVSVSSVDIDDEQTPSDKLIGG

SEQ ID NO: 2562 - protein, 727 aa, uncultured archaeon GZfos37D1
MRRLLIISNRLPVSVERRKNEFRFSSSVGGLATGLNALHQRYESVWVGWPGIAINREETDYVESKLSEFNCYPVFLSQGEVEKYYYGFSNKTLWPLFHYFPQYAKYEHSEWSTYEHVNRKFCERVAEIAKPEDVIWIHDYHLMLLPGLIRERFPDATIGFFLHIPFPSADLFRLIPWRRRILEGVLGADLIGFHTYDYAHNFLSSVLRLLGYEHELGKFAIGDRIVQVDVHPMGIEVQKFVRATSRRGIKREVARLRSRFKNCKIIFSMDRLDYTKGIPERLYAFEHFLETHPEWHEKVVFILKIAPSRTKVGQYRVLKQEIDELVGRINGKYGTPEWVPISYFYRSLPFQTIVAFYLAADVALLTSMRDGMNLIAKEFVASRVDGKGVLILSEMAGAARELGEALVVNPNNKEEVAEALNEALRMPEEEQKSRNEEMQKRLRHYDVFHWGSGFIRRVLETKRLQEELNMKKLSEKIREELKNAYKAADKCLLLLDYDGTLVPFADKPERAKPDKELLDIFRALSKSPENTVVIISGRDKETLERWFGDTGVCLVAEHGVRLKEEEGEWKEIELLKEDWKEKIIHILDLFVDRAPGSFIEEKSFSLVWHYRKVDPELGELRAKELTDQLIDLTACTELQVMKGNKVVEVKDGRLNKGIAASHWLTKGFGFILAVGDDLTDEDMFKVLPEGAYSVKIGFTPSKARFYLGSPKEVRALLDEMELVEVYK

SEQ ID NO: 2563 - protein, 248 aa, Zea mays; identical to SEQ ID NO: 2560

SEQ ID NO: 2564 - protein, 320 aa, Arabidopsis thaliana; identical to SEQ ID NO: 1568

SEQ ID NO: 2565 - protein, 487 aa, Arabidopsis thaliana
MEATKSSKQNCCNPVKKPGPVSIDHVLLALRETREERDLRIRSLFSFFDSENVGYLDCAQIEKGLCALQIPSGYKYAKELFRVCDANRDGRVDYHEFRRYMDDKELELYRIFQAIDVEHNGCISPEGLWDSLVKAGIEIKDEELARFVEHVDKDNDGIIMFEEWRDFLLLYPHEATIENIYHHWERVCLVDIGEQAVIPEGISKHIKRSNYFIAGGIAGAASRTATAPLDRLKVLLQIQKTDARIREAIKLIWKQGGVRGFFRGNGLNIVKVAPESAIKFYAYELFKNAIGENMGEDKADIGTTVRLFAGGMAGAVAQASIYPLDLVKTRLQTYTSQAGVAVPRLGTLTKDILVHEGPRAFYKGLFPSLLGIIPYAGIDLAAYETLKDLSRTYILQDAEPGPLVQLGCGTISGALGATCVYPLQVVRTRMQAERARTSMSGVFRRTISEEGYRALYKGLLPNLLKVVPAASITYMVYEAMKKSLELD

SEQ ID NO: 2566 - protein, 172 aa, Brassica rapa subsp. pekinensis
MAPTAKTTAFKTNGADGGNKENRYRGVRKRPWGRYAAEIRDPTEKTRVWLGTFDTPEAAARAYDKAAFQFRGAKAKTNFPLPFFVADNESPSQSSTVESPSSIPDLNLGSISSVDSRFPSPKIQAKSGMIVFDEESGRSESDSSSVVVDLSSEKRPRVFLDLDLNLPPKPEN

SEQ ID NO: 2567 - protein, 473 aa, Salmonella enterica subsp. enterica serovar Typhi str. CT18
MSRLVVVSNRIAPPDNKGGAGGLAVGVLGALKAAGGLWFGWSGETGNEDEPLKKVTKGNITWASFNLSEQDYEDYYCQFSNAVLWPAFHYRLDLVQFQRPAWEGYMRVNALLADKLLPLIKENDIIWVHDYHLLPFASELRKRGVNNRIGFFLHIPFPTPEIFNALPPHDELLEQLCDFDLLGFQTENDRLAFLDSLSSQTRVTTRSGKQHIAWGKDFQTEVYPIGIEPDEIALQAAGPLPPKLAQLKAELKNVKNIFSVERLDYSKGLPERFLAYEALLENYPQHRGKIRYTQIAPTSRGEVQAYQDIRHQLETEAGRINGKYGQLGWTPLYYLNQHFDRKLLMKIFRYSDVGLVTPLRDGMNLVAKEFVAAQDPANPGVLVLSQFAGAANELTSALIVNPYDRDDVAAALNRALTMPLAERISRHAEMLDVIVKNDINRWQERFIHDLKEVTPRSPERQQQNNVATFPKLA

SEQ ID NO: 2568 - protein, 169 aa, Zea mays; identical to SEQ ID NO: 435
  misc_feature (13)..(13): Xaa can be any naturally occurring amino acid

SEQ ID NO: 2569 - protein, 495 aa, Synechococcus sp. WH 8102
MGQSSFVILYHRTPFDEAKDAQGNQVWVDQKSPNGIIPTLRNLFRSRNDGTWIAWRHVDHPEEMDVERLEMTNPSPFALCRIPLADEQISSFYHITSKECFWPILHTFPTHFNVNNANWGIFEEVNKRFADAACNEAAEGATVWVHDYNLWLAPGYIRQQRPDLKIAFFHHTPFPGNDVFAILPWREQILESLLCCDVVGFHIPRYTENFARAASTLVGAKRGPKISVDQKFISVGTALSEGTVTSHLDHNGRRIQLLSSPVGTSPDVIQELSWSASVESYGEMIVQDTKKGRKLILSASRVDYTKGNEELLLAFERLLERREDLHGEVVLMLACVAAASGMKIYEETQRSIEEMAGRINGRFSQVDWIPVRFSTRRIPYEEMVAWFCHADVCWITPLRDGLNLVAKEYAAARRHRGGVLVLSEFTGASVVLEGAVLTNPYSNRRMDEAIEAALAMPEHEQRQRMETMSAAVEAYTVQDWAEEQLAGFPEVATIG

SEQ ID NO: 2570 - protein, 262 aa, Hordeum vulgare
MSTAEATREENVYMAKLAEQAERYEEMVEFMEKVAKTADVGELTVEERNLLSVAYKNVIGARRASWRIISSIEQKEESRGNEAYVASIKEYRTRIETELSKICDGILKLLDSHLVPSATAAESKVFYLKMKGDYHRYLAEFKAGAERKEAAENTLVAYKSAQDIALADLPTTHPIRLGLALNFSVFYYEILNSPDRACNLAKQAFDEAIAELDSLGEESYKDSTLIMQLLRDNLTLWTSDNAEEGGDEIKEAASKPEGEGHS

SEQ ID NO: 2571 - protein, 446 aa, Vitis vinifera
MPGNRYSFNSSTPRTRLERLLRERELRKFNQSFNLTNEVKDGNREGDPFGNDSANEGDNGGVPNEEEFLEGFTAGRTVGDAFERQDARPSKQRLLVVANRLPVSAVRKGEDSWQLEISVGGLVSALLGVKEFEARWIGWAGVNVPDEIGQKSLAKALAEKRCIPVFLDEEIVHQYYNGYCNNMLWPLFHYLGLPQEDRLATTRSFQSQFDAYKKANQMFADVVNEHYQNGDVVWCHDYHLMFLPKCLKEYNIEMKVGWFLHTPFPSSEIHRTLPSRSELLRSVLAADLVGFHTYDYARHFVSACTRILGLEGTPEGVEDQGKLTRVAAFPIGIDSDRFIRALELPQVQNHIKELKERFAGRKVMLGVDRLDMIKGIPQKILAFEKFLEENPNWRDKVVLLQIAVPTRTDVPEYQKLTSQVHEIVGRINGRFGTLTTVPIHHLDRSS

SEQ ID NO: 2572 - protein, 496 aa, Synechococcus sp. CC9605
MGAGQSSFVILYHRTPFDESKDKNGKRIWVDQKSPNGIIPTLRNLFRSCEKGTWIAWRRVNDQSNEGTERFEMDNPSPFTLCRIPLEDEQISSFYHITSKECFWPILHTFPTYFNVNNANWKIFEEVNKRFAMAACAEAAEGATVWVHDYNLWLAPGYIRAERPDLKIAFFHHTPFPGNDVFAILPWREQILESLLCCDVVGFHIPRYTENFARAATTLVGAKRGPKVPVDEKFIEVGTALSEGTVTSHLEHNGRTIQLLSSPVGTSPDLIQELCWSPSVESHGELIVQDTKKGRKLILSASRVDYTKGNEELLLAFERLLERRKDLHGQVVLMLACVAAASGMKIYEDTQRSIEEMAGRINGRFSQIDWVPIRFSTRRIPYDEMIAWFCHADVCWITPLRDGLNLVAKEYAAARRNRGGVLVLSEFTGASVVLDGAVLTNPYSNRRMDEAIESALEMDEDEQRDRMSRMTDAVESYTVSDWADEQMSGLSPSTPQ

SEQ ID NO: 2573 - protein, 220 aa, Spinacia oleracea
RNLLSVAYKNVVGARRASWRIISSIEQKEESRGNEDHVSVIRDYRSRIEKELSDNCDGILKLLDTKLVPAASSGDSKVFYLKMKGDYHRYLAEFKTGAQRKEAAESTLTAYKAAQDIANAELAPTHPIRLGLALNFSVFYYEILNSPDRACNLAKQAFVEAIAELDTLGEDSYKDSTLIMQLLRDNLTLWTSDMQDEAADEITEEAAKQQKAVNNNKIAY

SEQ ID NO: 2574 - protein, 461 aa, Vitis vinifera
MNLVSYEFVACQASKKGVLILSEFAGAAQSLGAGAILVNPWNITEVAASIGYALNMPADEREKRHWHNFMHVTTHTSQEWALTFVSELNDTIFEAQLRTRQVPPLLPTKDAIERYLQSNNRLLILGFNSTLTEPVDIPGRRGGQIKEMELKLHPDLKEPLKKLCDDPKTTVIILSGSDRGVLDDNFSEYNMWLAAENGMFLRLTTGEWMTTMPDNLNMDWVDSVKHVFEYFTERTPRSHFELRETSLVWNYKYADIEFGRLQARDMLQHLWTGPISNASVDVVQGGRSVEVRAVGVTKGAAIDRILGEIVHNRGMKAPIDYVLCIGHFLGKDEDIYTFFEPELPSEPAAAARTKVVEPVKTSATKVSTSKSGSKPSRCKKQQASSTLEKTCNYGSGSGSGWRPTMHQKPSLHEGSSVLDLKGDNYFSCAVGRKRSKARYLLGSLDDVVTLIKDLAEFSRPC

SEQ ID NO: 2575 - protein, 218 aa, Zea mays
MPQTSLGKSPTSRTIDMLNSLCRDRNNMVFLVSAKSRMTLNEWFLPCESLGLAAEHGCFLRLRRDAEWETCVPVIDCSWKQIAEPVMKTYTETTDGSTIEEKETAIVWCYEDADPDFGSCQAKELHDHLESVLANEPVSVKAGPNLVEVKPQGVSKGLVAKRILSTTQEQRGDDDDDLPDFVLCVGDDRSDEDMFEVIAAAAAALEYPSRGPSLRVPS

SEQ ID NO: 2576 - protein, 504 aa, Idiomarina baltica OS145; identical to SEQ ID NO: 446

SEQ ID NO: 2577 - protein, 302 aa, Paracoccidioides brasiliensis
MTSERESKTFLARLCEQAERYDEMVTYMKEVANLGGELTVDERNLLSVAYKNVVGTRRASWRIISSIEQKEDSKGSEKHVAIISEYRQKIETELERVCQDVLDVLDQSLIPKAESGESKVFYHKMKGDYHRYLAEFASGNKRKVAATAAHEAYKNATDVAQTELTPTHPIRLGLALNFSVFYYEILNSPDRACHLAKQAFDDAIAELDSLSEESYRDSTLIMQLLRDNLTLWTSSDGAEPEPVAAGDGKDDKTAEGEEGPATATTTDAPAPEEVAAPAAADEEPKKEGTNGVLKYGFKKNLF

SEQ ID NO: 2578 - protein, 760 aa, Arabidopsis thaliana
MSTAAAARPVAGTGLREKTAASLVNSFRLASVTQRLRYHIQDGAKVDPKEFQICCISFAKGIDFAIANNDIPKKVEEFPWLLKQLCRHGTDVYTKTALMVLMISVKHACHLGWFSDSESQELIALADEIRTCFGSSGSTSPGIKSPGSTFSQIMERFYPFVKLGHVLVSFEVKAGYTMLAHDFYISKNMPHSLQEKIRLFVAQTDNIDTSACISNPPEVSFLLNGKGVEKRVNIAMDTGPQLPTNVTAQLKYGTNLLQVMGNFKGNYIIIIAFTGLVVPPEKPVLKDYLQSGVIEASPDSDIIEGPSRVSLSCPISRKRIKLPVKGQLCKHLQCFDFSNYVHINMRNPTWRCPHCNQPVCYPDIRLDQNMAKILKDVEHNAADVIIDAGGTWKVTKNTGETPEPVREIIHDLEDPMSLLNSGPVVFDLTGDDDAELEVFGGNKVEDRKPCMSDAQGQSNNNNTNKHPSNDDYSSIFDISDVIALDPEILSALGNTAPQPHQASNTGTGQQYSNLPQIPMSIDPMPVPVPFSQTPSPRDRPATTSTVFTIPNPSPQYSQVHASPVTPTGTYLGRTTSPRWNQTYQSQAPPMTTPYTSRKVSVPVTSQSPANVSSFVQSQHVPRVLSQPNNYGVRGLTSSHASTSRQHPSGPTVQSVSRLSDLVDVDLTVPDTSNWRPRMRGSLVPGSHSTALDHMIIRPSQQSQTSTRLNSSQPVQTPSVQTSQAQSPFTTAAYRTETVLGNRNHPVPAPPGIVRPTGPTS

SEQ ID NO: 2579 - protein, 987 aa, Cryptococcus neoformans var. grubii H99
MDSMHPDPTPEVPPSLPDLKAQVARLEASHKEKGLPLSGRIIHVMHHLPVEIVRIVPADALESAGTGFLSPPMTPEFKPEDAETTVESADAKWRIHARTAHPALVSGIKSLSETHDQLLVAWTGEVLIQPDNTQSPQQPSQATFSSIASNLLAPFSAGDATPQPQPPPQQGSLMVFGGEFNEADQKEIASELDRFAEAEAKFDPTDRLKYIPVFLPPDVSKGHYEGFCKKTLWPLFHYLLWLDSTATVPSPDPSWLAYQKTNQMFAQRVAQIYKPGDLIICHDYHLLLAPKMIRESLGQVFHPNAGWGTAHPSPSLHHAQRKGFDWESNQQTPTPEKAKGEKIGAFMNHVGTALGNHLGTMEHGLQNEIMIGMFMHTPWPSSEIFRCLPKRREILDGMLGANLVSFQTYSYSRHFVSTCIRVCGYESTPGGVDANGQVTAVGYCPIGIDIKRVVHDRDQPGVLPKMQALRDLYKDKKIIVGREKLDVAKGVYNKLQAFEKFLQVYPEWRGKVVLIQVTTPALSESPKLERMTAELVSHINGTYGSLDFTPVHHYHQALEKDEYFGLLSCADLALITSLRDGMNTTSMEFILCQDKTSKSPLVLSEFMGTAPSFASALQINPHDLLGVAQAINKGLTMRKEEKAERHANLLEGVLAHTSHTWAATILKQLLENVGGEHTAHHTPALDTAQFTDAYKKANKRLLLFDYDGTLTPIVKVPSHAVPTERTRNAIAALCKDPKNVVYLISGRDGDFLEEHWGHLDRLGLSAEHGSFVKQPGEEDFINMTEALDMSWMSEVEEIFKYYTERTTGSTIEVKKASITWHYRNSDPDFGEFQCKQALDLLESSLAPRRPIEVLVGKKNLEVRPLAVNKGEIVRRLMYENPDVDLIFCAGDDKTDEDMFRALRTIFPPGGVVDNNPVVMKPPVAVTSALEPEEVAELPDVELTIRSKGVFATTVGPPAKRTLAGWHVTCPEEVVEAFESLLEEIQVV

SEQ ID NO: 2580 - protein, 854 aa, Glycine max
MVSKSYSNLLELASGEAPSFGYMNRRIPRIMTVAGLISDVDDDPVESVCSDPSSSTAHRDRIIMVANQLPIRAQRRPNGNNRSCWSFEWDENALLQLKDGLGDDDIEVIYVGCLKEEVHPSEQDEVSQTLLETFKCIPTFLPADQFTKYYHGFCKQQLWPLFHYMLPLSPELGGRFNRSLWQAYVSVNKIFADRIMEVINPEDDYVWIHDYHLMVLPTFLRKRFNRVKLGFFLHSPFPSSEIYKTLPVREEILRALLNSDLIGFHTFDYARHFLSCCSRMLGLTYESKRGYIGIEYYGRTVSIKILPVGIHLGQLQSVLRMPQTEEKVCELIRQFSDKGRTLLLGVDDMDIFKGISLKLLAMEQLLIQHPEYREKVVLVQIANPARGRGKDVKEVQAETKATVKRINETFGKPGYDPVILIEEPLKFYERVAYYVVAECCLVTAVRDGMNLIPYEYIISRQGNETLDKVLGLASSPKKKSMLVVSEFIGCSPSLSGAIRVNPWNIDAVADAMDSALEMADLEKELRHEKHYRYVSTHDVGYWARSFLQDLERTCSDHVRRRWWGIGFGLSFRVVALDPNFKKLSMEHIISAYKRTATRAILLDYDGTLMPQSSTIDKSPSSKSIEILSSLCRDKNNMVFLVSARSRKMLSEWFCPCENLGVAAEHGYFLRMKRDEEWETHVAATDTSWKQIAEPVMKLYTETTDGSTIEDKETALVWCYEDADPDFGSCQAKELLDHLESVLANEPVTVKSGQSNVEVKPQGVSKGLVATRLLSAMEEKGMCPDFVLCIGDDRSDEDMFEVITSSMGSPIAAKAEVFACTVCRKPSKAKYYLDDTTEIVRLLQGLACVSEQIDK

SEQ ID NO: 2581 - protein, 1536 aa, Synechococcus elongatus PCC 7942; identical to SEQ ID NO: 469

SEQ ID NO: 2582 - protein, 1524 aa, Prochlorococcus marinus str. MIT 9215; identical to SEQ ID NO: 471

SEQ ID NO: 2583 - protein, 1616 aa, Zea mays; identical to SEQ ID NO: 472

SEQ ID NO: 2584 - protein, 257 aa, Brassica napus
MSSSREENVYMAKLAEQAERYEEMVEFMEKVAKSVDVEELSVEERNLLSVAYKNVIGARRASWRIISSIEQKEESKGNEDHVAIIKDYRGKIEAELSKICDGILNVLEAHLIPSASPAEFKVFLLKMKGDYHRYLAEFKAGNERKDAAESTLVAYKSAQDIATAELAPTHPIRLGLALNFSVFYYEILNSPDRACSLAKQAFDEAIAELDTLGEESYKDSTLIMQLLRDNLTLWTSDMTDEAGDEIKETSKPEGAAE

SEQ ID NO: 2585 - protein, 1481 aa, Pseudomonas putida GB-1; identical to SEQ ID NO: 479

SEQ ID NO: 2586 - protein, 496 aa, Synechococcus sp. WH 7803
MLINEGKSDFIILYHRTPFDESTDELGNRIWRDQKSPNGIIPTLRNLFRSRENGTWIAWRRVDDVKNERDERIVMNNPATFSLRRIPLEQEQISSFYHVTSKESFWPILHTFPTYFDVNNANWQIFEEVNQRFANAACAEAAEGATVWIHDYNLWLVSGFIREKRPDLKIAFFHHTPFPGNDVFAILPWRKQIIESLLACDVVGFHIPRYTENFARAASCLLGVEKGPKESVATKFLKFGSALTEPTETPWLKYKNRKVKLVSSPVGTSPDVIQTLAVRNDVAELSKKIDEDTKKGRKLILSASRVDYTKGNEELLLAFERLLERRPDLHGKVVLMLACVAAASGMKIYEETQRLIEETAGRINGRFSLIDWVPIRFSTNRIPYEEMIAWFSKSDICWITPLRDGLNLVAKEYVAARKGRDGVLVLSEFTGASVVLDGALLTNPYSHKQMDDAIETALALPQEEQVSRMKKMVDAVDEFTVTDWANEQMQSLETVD

SEQ ID NO: 2587 - protein, 327 aa, Zea mays
  misc_feature (318)..(318): Xaa can be any naturally occurring amino acid
SSNSVAVAALKGPLVSIDEMEAIKKMNYRGWRSKVLDITYPKKSGRKGLEETLNRICAVARKAIREGYTILVLSDRGFSSDRVAASSLLAVGAVHQHLVANLERTRIGLLAESAEPREVHHFCTLGGFGADAICPYLAIEAIWRLQNDGKITPNGDGQPYSKEELVAKYFYASNYGMMKVLAKMGISTLASYKGAQIFEALGLSSEVVGKCFEGTPSRIEGATFEMLARDALRLHELAFPSRALPAGSADAKALPNPGDYHWRKNGEIHLNDPLAMGKLQEAARVNSRAAYKEYSKRIQELNKACNLRGMLKFKHVSXKISLDEVEP

SEQ ID NO: 2588 - protein, 466 aa, Desulfitobacterium hafniense DCB-2; identical to SEQ ID NO: 484

SEQ ID NO: 2589 - protein, 237 aa, Oryza sativa Indica Group
MSLSLGFSAGAGAGADRLAAAPALQAAGAQPPRVDVSLSLARAANGQPSSYLPLNENDSLDMVLFDVLREASAVAALSSSSSSSPELGARTTAPVVAGHPAGRKGGGGGGGGRGAAARGGAAGGRHYRGVRRRPWGKYAAEIRDPTRHGARLWLGTFGTAEEAAAAYDRAAFRMRGAKALLNFPPAVPGDGARRGAAAAAKQVGMSDVVPRACHVVCYSVLSAHIFYDIFRGVIPIP

SEQ ID NO: 2590 - protein, 528 aa, Nitrosococcus oceani C-27; identical to SEQ ID NO: 486

SEQ ID NO: 2591 - protein, 1581 aa, Mesorhizobium loti MAFF303099; identical to SEQ ID NO: 487

SEQ ID NO: 2592 - protein, 582 aa, Oryza sativa
MAAVWSGCSTSFSQELPPHPRGRRGGDGARIHPWSGGAGRDATTRHAEAARTVVVFARGRVRVCRAAAPCVLEPDVAGKEEVGVAVWGMDDEPPVADGHRRHGLRRRPVRPAAVEEGPVAAARSAASASASAAGSKSEVGGSRLHFLEERDEEMLSRRLIKLSQSNKVRSATELFDSMRASGLQPSAHACNSLLACFVRRGSFADAMKVFEFMKGKGMATGHSYTLILKAVATTEGYFAALKMFDEIEESDKKNVDVIVYNTVISVCGRAKDWRQVERLWRRLGENSLSGTLMTYDLLVSTFVQCGQSELAVDAYQEMFKSGIDPSEDILKAIIASCTKEGKWEFALTTFRRMLSAGMKPSIIVFNSIINSLGKAGEDELAFRMYHLLTSSGLKPDQYTWSALLSALYRSGRCWDVLDLFQGIKTKHSALVNNHRCNIALMSCERLGQWEHGLQLLWMMERGGLQISPVSYNHLIGACEVARMPKVALKVYRRMTHRGCSPDTFTHLSVIRACIWGSLWNEVEDILEEVAPDSSVYNTVIHGLCLRGKIRLARKVYTKMRSIGLKPDGKTRSFMLQNLATDY

SEQ ID NO: 2593 - protein, 1481 aa, Pseudomonas fluorescens PfO-1; identical to SEQ ID NO: 495

SEQ ID NO: 2594 - protein, 391 aa, Antithamnion sp.; identical to SEQ ID NO: 504

SEQ ID NO: 2595 - protein, 1509 aa, Cyanobium sp. PCC 7001; identical to SEQ ID NO: 505

SEQ ID NO: 2596 - protein, 442 aa, Rhizobium leguminosarum bv. viciae 3841; identical to SEQ ID NO: 509

SEQ ID NO: 2597 - protein, 298 aa, Arabidopsis thaliana
MMDQDTLDKRPSDDLISLLNRLCDDPSNLVFIVSGRGKDPLSKWFDSCPNLGISAEHGYFTRYFAKTLPFHHLPSHFCKVNTFLLLICNHRWNSNSPWETSELPADLSWKKIAKPVMNHYMEATDGSFIEEKESAMVWHHQEADHSFGSWQAKELLDHLESVLTNEPVVVKRGQHIVEVKPQGVSKGKVVEHLIATMRNTKGKRPDFLLCIGDDRSDEDMFDSIVKHQDVSSIGLEEVFACTVGQKPSKAKYYLDDTPSVIKMLEWLASASDGSKHEQQKKQSKFTFQQPMGQCRKKA

SEQ ID NO: 2598 - protein, 149 aa, Pseudomonas putida
MLVPPAWQNVETMDADLRAFYEYNSMHMEPWDGPAGIVMTEGRHAVCLLDRNGLRPARWVTTTNGYITIASEIGVWGYQPEEVLAKGRVGPGQILAVDTETGQILDTDAIDNRLKSRHPYKRWLRQHATRIQATLTDDQGVASYDADQL

SEQ ID NO: 2599 - protein, 123 aa, Pseudomonas putida
KFKEYTTLVDQRPVSMIRDLLKVKVADQPLALEQVEPLEAILKRFDSAGISLGALSPEAHEALAEAMNRLGARSNSGEGGEDPSRYGTIKSSKIKQVATGRFGVTPEYLVNAEVLQIKVAQGA

SEQ ID NO: 2600 - protein, 251 aa, Ashbya gossypii ATCC 10895
MSLSREDSVYLAKLAEQAERYEEMVENMKAVASSGQELSVEERNLLSVAYKNVIGARRASWRIVSSIEQKEEAKEKSEYQVKLIRTYRSKIESELTKICDDILSVLDTHLIPSATTGESKVFYYKMKGDYHRYLAEFSSGDVREKATTSSLEAYKSASDIATTELPPTHPIRLGLALNFSVFYYEIQNSPDKACHLAKQAFDDAIAELDTLSEESYKDSTLIMQLLRDNLTLWTSDMSEAGQEEQPADAHE

SEQ ID NO: 2601 - protein, 1524 aa, Prochlorococcus marinus subsp. marinus str. CCMP1375; identical to SEQ ID NO: 513

SEQ ID NO: 2602 - protein, 507 aa, Thermotoga maritima MSB8; identical to SEQ ID NO: 516

SEQ ID NO: 2603 - protein, 716 aa, Triticum aestivum
  misc_feature (169)..(169): Xaa can be any naturally occurring amino acid
  misc_feature (196)..(196): Xaa can be any naturally occurring amino acid
  misc_feature (210)..(210): Xaa can be any naturally occurring amino acid
  misc_feature (352)..(352): Xaa can be any naturally occurring amino acid
  misc_feature (370)..(370): Xaa can be any naturally occurring amino acid
  misc_feature (375)..(375): Xaa can be any naturally occurring amino acid
SEQFESKRDNEQNDDLTGLPRAFTVMEISSHEPSEAEILIGHEDDTELTPCEGMEFESEDAARDFYSLYARHAGFRIRISRYTRSRRDNSIISRRIVCSKEGFHETRNCEGLHPDQKQQERTGTSAASTPMIMIKKTAPPKWVVTKFVKTHNHGSVPPRKLDIRSAHQXPLIQLESHISTRGRLLLTSRAEGNGNXFLKEARRNLFYINXYAEGFNGFPAPRSRYCRSRRDNSIISRQIVCSKEGFREVRAKKEITDEGKTKRPRMITRVGCKAMIVVKKMNSGKWMVSKFEKEHNHSLLSSKQAPSTSNITSGENAESAAKSSDPDEAKVEEYSAGIQCNSTDSLTVLYNXLCQEAIKFAKEGSVTEEXIYHVXAMSALKEAAEKGCSKSKGGHPIMPHRGVSGSESKHKVVQMKTMSASQCSDVAKQKTTPSQLTMFQESTSKLMFIPTNLLTDSGLANSDNNHPSSCAFTSSGRQCRHGSECSYLHAENRKEDCPEKYQNSTSSRATQGNHSTYHGHSEETTVAIPAIPLTLYMPLSRNSPGASADGQYKLLAAPIEAVPISYRPAEPIRQPKRSFCNLGPLPGVMSELTRREKGPHPLVHATALACGARVVPVEEAASLIKAIESKIRSGGAKIARLPSSRLTRLVPEAVSMSSSSEDGEDNDHSEPPAVNVAGYCHDDQISEEMKLQGEASELETDSENCSGHENHDTADC

SEQ ID NO: 2604 - protein, 254 aa, Arabidopsis thaliana
MSTREENVYMAKLAEQAERYEEMVEFMEKVAKTVDVEELSVEERNLLSVAYKNVIGARRASWRIISSIEQKEESKGNEDHVAIIKDYRGKIESELSKICDGILNVLEAHLIPSASPAESKVFYLKMKGDYHRYLAEFKAGAERKEAAESTLVAYKSASDIATAELAPTHPIRLGLALNFSVFYYEILNSPDRACSLAKQAFDDAIAELDTLGEESYKDSTLIMQLLRDNLTLWTSDMTVTGDEIKEASKPDGAE

SEQ ID NO: 2605 - protein, 515 aa, Rhodococcus sp. RHA1
MAASSESSASSSRSTSDPVSGQADFVVVANRLPVDLERLPDGTTRWKRSPGGLVTALEPILRRNKGAWVGWAGVADAELDPVVEDDLELYPVPLSAAEIADYYEGFSNATLWPLYHDVIVKPEYNRDWWNAYVEVNRRFAEATSKAAAHGATVWIQDYQLQLVPKMLRMLRPDLTIGFFLHIPFPPVELFMQMPWRTEIIEGLLGADLIGFHLPGGAQNFLYLARKLAGQQTSRGNVGVRSKLGVVQVGFRTVRVGAFPISIDSGQLDEQSRSKSIRDRAKKIRNELGNPKHIMLGVDRLDYTKGIDVRLAALHELLDEQRIDPADTVMVQLATPSRERVDSYVQMRDDIERKVSRINGEYSEVGRPVVHYLHRPIPREELIAFFVAADVMLVTPLRDGMNLVAKEYVACRSDLGGALLLSEFTGAAAELRQAFLCNPHDLDSVKDAMEQALGQPKEDGRRHMRALRRQVLAHDVDRWARSFLDALAHGGAAGPALIAPAEASEADYNEDATGEN

SEQ ID NO: 2606 - protein, 1530 aa, Listeria monocytogenes str. 4b F2365; identical to SEQ ID NO: 523

SEQ ID NO: 2607 - protein, 583 aa, Physcomitrella patens subsp. patens
MQVDEGRVSDGSVDIRGHPCVKSKSGNWKACSLIFGCEVCERVAFYAISSNLVIYLTTVLHEDVSTSAKNVNNWGGTTFMTPLLGAFVGDAFLGRYWTITVSSVCYIVSLVCVTMSVSLPALKPPVCNVAMLSSVTGCQKASTSQICFFYFSLYLMALGAGGIKSCVTAFAGDQFDNNDPKEARRRMSFPNWWFVSISFGTMLSVSILVYVQDNVGWAWGYGVPTAITGLATLAFLMGTPLYRHQIPSGSPLTRVAQVLCAAVRKWNIPVPTNPEFLYEVDDASSFRRRLPHTSSLHFLDKAAVKPSDEGSMHKVDGRQSPWEVCTVTQVEEVKLLVRMLPIWWTNLMFSAVFAQVGTLFLNQGSTMDRHMGPNFEIPAASMPLFITATICIFLPLYDKYFVPFVRGFTGDIRGLTLLQRIGVGQILSSLSIAVAAAVEMRRLKVVADSGSMDFGQVPISIFWLLPQYVLTGICEVFISVGQMEFFLDQAPDSMRSLGNALYLSTVAVGSFVSSVLVSIVTRITYDSNGGWIGNNLNRSHMDYFYWLLAILSFANTLAFVWCARLYTYKSMHVRPRMVERSHS

SEQ ID NO: 2608 - protein, 527 aa, Streptomyces avermitilis MA-4680; identical to SEQ ID NO: 527

SEQ ID NO: 2609 - protein, 157 aa, Glycine max
  misc_feature (39)..(46): Xaa can be any naturally occurring amino acid
  misc_feature (59)..(60): Xaa can be any naturally occurring amino acid
  misc_feature (70)..(71): Xaa can be any naturally occurring amino acid
  misc_feature (137)..(143): Xaa can be any naturally occurring amino acid
ILGLEYESKRGYIRLKYFGRTIFIKILPVGIHMDRLQSXXXXXXXXVNVREMSEKFKEXXLILGVDDMDXXKGISLKLLAIEQLLQQYPELLGELILVQIVNPPRSTGKDVEEARNEMHIIANRINERFGLLDYEPXXXXXXXVPLYEKASYYALAE

SEQ ID NO: 2610 - protein, 90 aa, Physcomitrella patens subsp. patens
MSIDSVPSNNSESSPSVPRSTTLKLPRSLNYRGVRRRPWGKFAAEIRDSAQNGARIWLGTYDTAYDAACAYDQAAFEMRGCKALLNFPLK

SEQ ID NO: 2611 - protein, 503 aa, Idiomarina loihiensis L2TR; identical to SEQ ID NO: 539

SEQ ID NO: 2612 - protein, 235 aa, Oryza sativa Japonica Group
MALNLLNQAVLQRSLIRVNLLLTVAIGRLGQICKWNKAAEWESSYPNHDFEWKHIAEPIMQVYTETIDGSSIEPKESALLWHYLDADHDFGSCQAKELLGHLERVLSNEPVVVKCGHYIVEVKPQGVSKGLVVDKVIHRLMNNGKTLDFVVCIGNDRSDEDMFKSIDSMTSSSAFPAVPEVFACSVGQKPSKAKYYVDNVGEVVRLLKNVAGISSHREAVSHGRVIFRDVIDYVD

SEQ ID NO: 2613 - protein, 256 aa, Zea mays
MSREENVYMAKLAEQAERYEEMVEYMEKVAKTVDVEELTVEERNLLSVAYKNVIGARRASWRIVSSIEQKEESRKNEEHVNLIKEYRGKIEAELSNICDGILKLLDSHLVPSSTAAESKVFYLKMKGDYHRYLAEFKTGAERKESAESTMVAYKAAQDIALAELAPTHPIRLGLALNFSVFYYEILNSPDKACNLAKQAFDEAISQLDTLGEESYKDSTLIMQLLRDNLTLWTSDLTEDGADEGKEAPKGEAGDGQ

SEQ ID NO: 2614 - protein, 1512 aa, Magnetococcus sp. MC-1; identical to SEQ ID NO: 544

SEQ ID NO: 2615 - protein, 870 aa, Zostera marina
MMSRSYTNLLDLASGNFPVISGGGRDGRSGGMRRMPRVMTVPSNIAELEDEQASSVASDVQSSIIQDRLIIVGNQLPVVAKRRSDNAGWDFSWDDESLLLQLKDGLPDDMEVLYVGCLRVIVDPEEQDDVSQTLLEKFKCVPAFLTEEILEKYYHGFCKKLLWPLFHYMLPLTKDHGGRFDRSLWEAYVAVNKIFSQKVVEIISPEDDYVWIHDYHLMVLPTLLRRRFIRLRMGFFLHSPFPSSEIYRTLPVREEILNSLLCSDLIGFHTFDYARHFLSCCSRMMGLEYQSKRGYISLDYFGRTVGIKIMPASIHLGQLESMLKTVYKESKIEELERQFQGKTVILGVDDMDIFKGINLKLLAFEQMLKLRPNWQGRAVLVQIANPARGRGKGLESVEVEIRDICERINQQFGRVGYKPVVYINRSVSLKERIAYYTIAECVVVSAVRDGMNLIPYEYTVCKQGIAEPESDSLFADPKKSMLVVSEFIGCSPSLSGAIKINPWNSEATAEAMSDAISMPDGEKQLRHGKHYRYVRTHGVSYWSKSFMQDMERTCKDHFKRRCWGIGFGFGFRVVALDPNFKKLNVDSIVFSYERAKSRAILLDYDGTMINPLSINKTPSTEVISILNALSKDKKNVVFMVSGRGRESLGSWFSSCEKLGIAAEHGFFMRWGRDDEWTTWDKNKDFGWMLMADPVMKLYTEATDGSYIEAKESALVWHHRDADQTFGTSQAKEMLDHLENVLANEPVIAKRGQFIVEVKPQGVSKGLVADNILSTMAKRNCPADFVLCIGDDRSDEDMFENFGSKNLVSFNAHIYSCTVGQKPSKATYYLDDTNDVLEMLRALADASEEDDDDEEEIEDDYVDDESEEGSS

SEQ ID NO: 2616 - protein, 870 aa, Zostera marina
MMSRSYTNLLDLASGNFPVISGGGRDGRSGGMRRMPRVMTVPSNIAELEDEQASSVASDVQSSIIQDRLIIVGNQLPVVAKRRSDNAGRDFSWDDESLLLQLKDGLPDDMEVLYVGCLRVIVDPEEQDDVSQTLLEKFKCVPAFLTEEILEKYYHGFCKKLLWPLFHYMLPLTKDHGGRFDRSLWEAYVAVNKIFSQKVVEIISPEDDYVWIHDYHLMVLPTLLRRRFIRLRMGFFLHSPFPSSEIYRTLPVREEILNSLLCSDLIGFHTFDYARHFLSCCSRMMGLEYQSKRGYISLDYFGRTVGIKIMPASIHLGQLESMLKTVYKESKIEELERQFQGKTVILGVDDMDIFKGINLKLLAFEQMLKLRPNWQGRAVLVQIANPARGRGKGLESVEVEIRDICERINQQFGRVGYKPVVYINRSVSLKERIAYYTIAECVVVSAVRDGMNLIPYEYTVCKQGIAEPESDSLFADPKKSMLVVSEFIGCSPSLSGAIKINPWNSEATAEAMSDAISMPDGEKQLRHGKHYRYVRTHGVSYWSKSFMQDMERTCKDHFKRRCWGIGFGFGFRVVALDPNFKKLNVDSIVFSYERAKSRAILLDYDGTMINPLSINKTPSTEVISILNALSKDKKNVVFMVSGRGRESLGSWFSSCEKLGIAAEHGFFMRWGRDDEWTTWGKNKDFGWMLMADPVMKLYTEATDGSYIEAKESALVWHHRDADQTFGTSQAKEMLDHLENVLANEPVIAKRGQFIVEVKPQGVSKGLVADNILSTMAKRNCPADFVLCIGDDRSDEDMFENFGSKNLVSSNAHIYSCTVGQKPSKATYYLDDTNDVLEMLRALADASEEDDDDEEEIEDDYVDDESEEGSS

SEQ ID NO: 2617 - protein, 1518 aa, Mycobacterium sp. JLS; identical to SEQ ID NO: 550

SEQ ID NO: 2618 - protein, 69 aa, Brassica napus
  misc_feature (21)..(21): Xaa can be any naturally occurring amino acid
MADGGPVLIAVILFVVLTPGXLFQIPAGGRVVEFGNMQTSGASILVHAIIFFGLITIFTIAINVHIYSG

SEQ ID NO: 2619 - protein, 249 aa, Candida glabrata CBS 138
MSLSREDSVFLTKLAEQAERYEEMVENMKDVASAGQELSVEERNLLSVAYKNVIGARRASWRIVSSIEQKEESKENSEHQIKLIKDYRAKIEAELTKISDDILSVLDKHLIPSASSGESKVFYYKMKGDYHRYLAEFSQGDVRENATKASLDAYQKASEIATTELPPTHPIRLGLALNFSVFYYEIQNSPDKACHLAKQAFDDAIAELDTLSEESYKDSTLIMQLLRDNLTLWTSDMSEADDQKNEESK

SEQ ID NO: 2620 - protein, 553 aa, Bordetella pertussis Tohama I; identical to SEQ ID NO: 556

SEQ ID NO: 2621 - protein, 469 aa, Coccidioides immitis RS
MRGESEHEREQRINDLWEILDDRRRGQVDLKDFKRGLKKMDHHSLLKDIIEAVDTSGDGRIQFNEFRDFVERAERELWQLFETVDRDHDGHVDKEELQSAFARAGLTVRKSKLDQFFSEMDTNNDGVISFEEWRDFLLFLPANPTHLSNMRAILSYYSATGNLNPEGDVHINEPLQGLGYFLAGGMAGVVSRTSTAPLDRLRVYLIAQTKPQSVAASVKSGAAVEVAGWRAWPLVHALKDLWRAGGIRSLFAGSRMFAGLEGHHDPKQLLPVSQFLAGGIGGMVSQCFVYPLDTLKFRMQCETVEGGLRGNRLIIATARKMWSTNGVFAYYRGLQLGLIGMFPYAAIDLMTFEYLKSTLISRKAHLLRCHEEDAPLSNFTTGAIGAFSGALSASMVYPLNVLRTRLQAQGTTQHKATYTGIVDVARKTFESEGVRGLYRGLTPNLLKVVPSVSISYIVYENSKRLLGLS

SEQ ID NO: 2622 - protein, 485 aa, Corynebacterium glutamicum ATCC 13032
MDDSNSFVVVANRLPVDMTVHPDGSYSISPSPGGLVTGLSPVLEQHRGCWVGWPGTVDVAPEPFRTDTGVLLHPVVLTASDYEGFYEGFSNATLWPLFHDLIVTPVYNTDWWHAFREVNLKFAEAVSQVAAHGATVWVQDYQLLLVPGILRQMRPDLKIGFFLHIPFPSPDLFRQLPWREEIVRGMLGADLVGFHLVQNAENFLALTQQVAGTAGSHVGQPDTLQVSGEALVREIGAHVETADGRRVSVGAFPISIDVEMFGEASKSAVLDLLKTLDEPETVFLGVDRLDYTKGILQRLLAFEELLESGALEADKAVLLQVATPSRERIDHYRVSRSQVEEAVGRINGRFGRMGRPVVHYLHRSLSKNDLQVLYTAADVMLVTPFKDGMNLVAKEFVANHRDGTGALVLSEFAGAATELTGAYLCNPFDVESIKRQMVAAVHDLKHNPESAATRMKTNSEQVYTHDVNVWANSFLDCLAQSGENS

SEQ ID NO: 2623 - protein, 825 aa, Vitis vinifera
MVSRSYSNLLELASGESPSFGRMSRRIPRIMTVAGIISDLDDDPSESVCSDPSSSSVQRDRLIIVANQLPIRAQRKSENNNGWIFSWDENSLLLQLKDGLGDDEIEVIYVGCLKEEIHPCEQDEVSQILLETFKCVPTFLPPDLFTRYYHGFCKQQLWPLFHYMLPLSPDLGGRFNRSLWQAYVSVNKIFADRIMEVINPEDDFVWIHDYHLMVLPTFLRKRFNRVKLGFFLHSPFPSSEIYRTLPIREELLRALLNSDLIGFHTFDYARHFLSCCSRMLGLSYESKRGYIGLEYYGRTVSIKILPVGIHMGQLQSVLSLPETEEKVAELIKQFCDQDRIMLLGVDDMDIFKGISLKLLAMEQLLVQHPEWQGKVVLVQIANPARGRGKDVKEVQTETFSTVKRINETFGKPGYDPVVLIDEPLKFYERIAYYVVAECCLVTAVRDGMNLIPYEYIISRQGNEKLDKKSMLVVSEFIGCSPSLSGAIRVNPWNIDAVADAMDSALEMLEPEKQLRHEKHYRYVSTHDVGYWARSFLQDLERTFVALDPNFRKLSMEHIVSAYKRTTTRAILLDYDGTLMPQASIDKGPTPKSIEMLKTLCRDENNMVLIVSARSRKKLEDWFSPCENLGIAAEHGYFLRPKGDVEWETCVPVADCSWKQIAEPVMKLYTETTDGSTIEDKETALAWCYEDADPDFGSCQAKELLDHLESVLANEPVTVKSGQSLVEVKPQGVSKGIVAKRLLSTMQERGMLPDFVLCIGDDRSDEDMFEAITSSMAGSSIAPRAEVFACTVGRKPSKAKYYLDDTGEIVRLMQGLASVSEQPVPL

SEQ ID NO: 2624 - protein, 117 aa, Zea mays
  misc_feature (63)..(63): Xaa can be any naturally occurring amino acid
FFFYLFPQVTFGYTVEALEMLLLPMAKDGVEALGSMGNDTPLAVMSNREKLTFEYFKQMFAHXSYPPIDPIREKIVTSMECMIGPEGDLLETTEKQCNRLALKGPLVSIDEMEAIKK

SEQ ID NO: 2625 - protein, 255 aa, Vitis vinifera
MAATSAREENVYMAKLAEQAERYEEMVQFMEKVTAEAEELTVEERNLLSVAYKNVIGARRASWRIISSIEQKEESRGNEDHVATIRGYRSKIESELSSICDGILRLLDSRLIPSATSGDSKVFYLKMKGDYHRYLAEFKTGAERKEAAESTLAAYKSAQDIATVELAPTHPIRLGLALNFSVFYYEILNSPDRACNLAKQAFDEAIAELDTLGEESYKDSTLIMQLLRDNLTLWTSDMQDDGGDEIKEAPKHDEE

SEQ ID NO: 2626 - protein, 505 aa, Ostreococcus tauri
MDFEFGRALNKTTTTTARASAESAIDARLEGDDDESEDDAFYSWRVGGANDLKITHLRDVYRGDVPLVAQPSPFCTTTACPLSGPRTSVEFNSNFVSNSDRVLLNSVAFGSSADPTQTCSLWAETFDPNGCDYVPQWVVRAGPRSEVYFDSDEVHAAIVTCGGLCPGINDVIRSLVNTLEVGYGVKKISGIRYGFKGFFSGVEFMKLNKKTVRNIHTLGGSMLGSGRGGGDVQKIVESIIHHGINMVFVIGGNGTHAGANAISDECAKRGVKVSVVGVPKTIDNDILLLDKTFGFDTAVEEAQKAILAAATEAQSAYRGVGVVKLMGRQSGFITMFATLANGQVDCCLIPETTWAAHGPNGVINYVRNLLDTQGHAVVVLAEGAGQEFVTSTGVDAGGNPKLGDIGQWFCKQLKSELKCDIKYIDPTYMVRGCQANAHDSIMCTVLGQNAVHGAFAGFTGISVGTVSAHTAYLPIPRMIEHERLVDPDGRMWHRTLESTGQPDFF

SEQ ID NO: 2627 - protein, 824 aa, Oryza sativa Indica Group
MPSLPNSGDEGGAPPPTPPPPGARRVVVAHRLPLRADPNPGAPHGFDFSLDPHALPLQLSHGVPRPVVFVGVLPSAVAEAVQASDELAADLLARFSCYPVFLPAKLHADFYDGFCKHYMWPHLHYLLPLAPSYGSGGGLPFNGDLYRAFLTVNTHFAERVFELLNPDEDLVFVHDYHLWAFPTFLRHKSPRARIGFFLHSPFPSSELFRAIPVREDLLRALLNADLVGFHTFDYARHFLSACSRVLGLSNRSRRGYIGIEYFGRTVVVKILSVGIDMGQLRAVLPLPETVAKANEIADKYRGRQLMLGVDDMDLFKGIGLKLLAMERLLESRADLRGQVVLVQINNPARSLGRDVDEVRAEVLAIRDRINARFGWAGYEPVVVIDGAMPMHDKVAFYTSADICIVNAVRDGLNRIPYFYTVCRQEGPVPTAPAGKPRQSAIIVSEFVGCSPSLSGAIRVNPWNVDDVADAMNTALRMSDGEKQLRQEKHYRYVSTHDVVYWAQSFDQDLQKACKDNSSMVILNFGLGMGFRVVALGPSFKKLSPELIDQAYRQTGNRLILLDYDGTVMPQGLINKAPSEEVIRTLNELCSDPMNTVFVVSGRGKDELAEWFAPCDEKLGISAEHGYFTRWSRDSPWESCKLVTHFNWKNIAGPVMKHYSDATDGSYIEVKETSLVWHYEEADPDFGSCQAKELQDHLQNVLANEPVFVKSGHQIVEVNPQGVGKGVAVRNLISTMGNRGSLPDFILCVGDDRSDEDMFEAMISPSPAFPETAQIFPCTVGNKPSLAKYYLDDPADVVKMLQGLTDSPTQQQPRPPVSFENSLDD

SEQ ID NO: 2628 - protein, 474 aa, Burkholderia cenocepacia J2315
MSRLIVVSNRVAAGEDTRPSAGGLAVGVMDALRETGGVWFGWNGEIVGAPDAEPAIQRDGNVTYATVGLTRRDYDQYYRGFSNATLWPVFHYRGDLARFDRQEYAGYLRVNAMLAKQLAALLRPDDLIWVHDYHLLPFAHCLRELGVKNPIGFFLHIPFPSPDMLRLVPPHEELVKFMCAYDVAGFQTEADKQAFTDYIERRGIGAASDDDGMLHAHGRVVKVAAYPIGVHPDAIAQAAVQYGTRKPVKMLREALGDRKLVMSVDRLDYSKGLVERFQSFERMLANAPGWQGRVSLLQIAPPTRSDVQTYQHIRETLEGEAGRINGRFSQLDWTPIQYLNRKYERNLLMAFFRMSQVGYVTPLRDGMNLVAKEYVASQDPADPGVLVLSEFAGAAAELTGALLVNPYDLSQMAEALERALSMPLAERQARHEENLARLRENDLSVWRDTFVADLRSVAAAASVTRRAGRRVAHA

SEQ ID NO: 2629 - protein, 862 aa, Arabidopsis thaliana
MVSRSYSNLLDLASGNFHSFSREKKRFPRVATVTGVLSELDDDNNSNSVCSDAPSSVTQDRIIIVGNQLPIKSHRNSAGKLSFSWDNDSLLLQLKDGMREDMEVVYIGCLKEQIDTVEQDDVSQRLLENFKCVPAYIPPELFTKYYHGFCKQHLWPLFHYMLPLTPDLGGRFDRSLWQAYLSVNKIFADKVMEVISPDDDFVWVHDYHLMVLPTFLRKRFNRVKLGFFLHSPFPSSEIYRTLPVRNELLRALLNADLIGFHTFDYARHFLSCCSRMLGLSYQSKRGTIGLEYYGRTVSIKILPVGIHISQLQSILNLPETQTKVAELRDQFLDQKVLLGVDDMDIFKGISLKLLAMEQLLTQHPEKRGRVVLVQIANPARGRGKDVQEVQSETEATVKRINEMFGRPGYQPVVLIDTPLQFFERIAYYVIAECCLVTAVRDGMNLIPYEYIICRQGNPKLNETIGLDPSAAKKSMLVVSEFIGCSPSLSGAIRVNPWNIDAVTEAMDYALIVSEAEKQMRHEKHHKYVSTHDVAYWARSFIQDLERACGDHVRKRCWGIGFGLGFRVVALDPSFKKLSIEHIVSAYKRTKNRAILLDYDGTMVQPGSIRTTPTRETIEILNNLSSDPKNIVYLVSGKDRRTLTEWFSSCDDLGLGAEHGYFIRPNDGTDWETSSLVSGFEWKQIAEPVMRLYTETTDGSTIETKETALVWNYQFADPDFGSCQAKELMEHLESVLTNDPVSVKTGQQLVEVKPQGVNKGLVAERLLTTMQEKGKLLDFILCVGDDRSDEDMFEVIMSAKDGPALSPVAEIFACTVGQKPSKAKYYLDDTAEIIRMLDGLAATNTTISDQTDSTATVPTKDLF

SEQ ID NO: 2630 - protein, 1486 aa, Lactococcus lactis subsp. lactis Il1403; identical to SEQ ID NO: 568

SEQ ID NO: 2631 - protein, 520 aa, Oryza sativa Japonica Group
MEGVVTSSVGEPNQDNEPRDSSIELPRVITDMETSAMHDPEAQKLIGHEADTELTPYEGMEFESEDAARDFYSKYARHAGFRIRISRYTRSRRDNSIISRRIVCSKEGFHETRDCENLHVDQKQQARVGTRVGCKAMLMIKKFGPDKWVVTKFIKIHNHGPVPPRKPHAGEHHDCDLMENPHSIEVDPIDEPVEGMEFESEEAAKLFYINYARVNGFRARISRYCRSRRDNSIISRQIVCSKEGFREVRARKDITDGGKTTKRPRMITRVGCKAMIVVKRMNSGKWMVSKFEKEHNHSLLSSRAVPITSNDSSREVIDFAATSNDPNEVKAEGCSTGIQCNSTDSLTVLYNHLCQEAIKFAKEGSVTEEIYHVAMNALKEAAEKVSEVKRSHPTMSQSKHEVMQMETMSASQCSNDDKQKTMTPQLKFLQEPSPSLVLIPTNLLTHSSSNCADNIPLSCDLTINAGEVKHVSESSCLAANRKEDSSQKSQPYRERMKGFMYFLKKLRLLFLRYLSRCTCL

SEQ ID NO: 2632 - protein, 499 aa, Synechocystis sp. PCC 6803
MNSSLVILYHREPYDEVRENGKTVYREKKSPNGILPTLKSFFADAEQSTWVAWKQVSPKQKDDFQADMSIEGLGDRCTVRRVPLTAEQVKNFYHITSKEAFWPILHSFPWQFTYDSSDWDNFQHINRLFAEAACADADDNALFWVHDYNLWLAPLYIRQLKPNAKIAFFHHTPFPSVDIFNILPWREAIVESLLACDLCGFHIPRYVENFVAVARSLKPVEITRRVVVDQAFTPYGTALAEPELTTQLRYGDRLINLDAFPVGTNPANIRAIVAKESVQQKVAEIKQDLGGKRLIVSAGRVDYVKGTKEMLMCYERLLERRPELQGEISLVVPVAKAAEGMRIYRNAQNEIERLAGKINGRFAKLSWTPVMLFTSPLAYEELIALFCAADIAWITPLRDGLNLVAKEYVVAKNGEEGVLILSEFAGCAVELPDAVLTNPYASSRMDESIDQALAMDKDEQKKRMGRMYAAIKRYDVQQWANHLLREAYADVVLGEPPQM

SEQ ID NO: 2633 - protein, 1552 aa, Chlamydomonas reinhardtii; identical to SEQ ID NO: 580

SEQ ID NO: 2634 - protein, 857 aa, Ashbya gossypii ATCC 10895
MTKDTCTGARRVINCVAQLPFRTQARGADWQVEPTAGNSALHASLTRLGDGWEQHVVGWTGEVGSADGEAPQYLTAEERAAAAGRLQERAGGLRLHPVWLLRKDQARWRAYAENVLWPALHYILNPPSDGQQENTWWYDYVRFNEAYAMKVAQVYRPGDVVWVHDYQLMLLPQLLRMRFGDALIGYFHHSPWPSNEYFRCLPKRKELLDGLLGADRVCFQNEGFARHFVSSCMRLLGAEASGETGADGTVYRISAYGGDVLVDCLPLGVDTEQLLEEAFTEDVDAKVQEIRRAYEGKHIILGRDRLDAVRGVVQKLQAFEMFLTMYPEWKDKVVLIQVSSPTGMERDHRVEVQANELVNSINAQFGDLNFNPVQHYHMRIPKNVYYSLLRAADLCVVTSVRDGMSTTALEYVTVKSRSSSLGCYASPLVLSEFSGSSTVLQDAMIVNPWDSVAVAKAIKKALSLSEEQKGKLERALWQHVPTVQDWTSKFLEGMLTLQDQKDASEHKPSTKVTPALNRPLLLQNYEKAQRRLFLFDYDGTLTPIVQDPAAAIPSARLLSILRKLALDPKNQIWIISGRDQKFLSRWLGDRLPQLGLSAEHGCFMKDVSNSEWINLASKFNMSWQIKVAEIMEKYTKKTPGSFIERKKVALTWHYRRADPELAEYSAAQLKEELEAIASGLELEVMEGKANLEVRPKFVNKGEIVKRLVWHPHGSNQTTEDEFKIDENVSKDKLPDFLLCLGDDFTDEDMFRQLIDIEDKWAEKFPNDRNEWGHYGIYPCTVGPASKKTVAKNHLTEPQQVLDTLGLLVGDVSLFQSAGTVDLDDRGHLKNSESSMKSERAGVAYAMKRSSSYKTDRN

SEQ ID NO: 2635 - protein, 693 aa, Arabidopsis thaliana
MSSSREENVYLAKLAEQAERYEEMVEFMEKVAKTVDTDELTVEERNLLSVAYKNVIGARRASWRIISSIEQKEESRGNDDHVSIIKDYRGKIETELSKICDGILNLLDSHLVPTASLAESKVFYLKMKGDYHRYLAEFKTGAERKEAAESTLVAYKSAQDIALADLAPTHPIRLGLALNFSVFYYEILNSPDRACSLAKQAFDEAISELDTLGEESYKDSTLIMQLLRDNLTLWNSDINRDRSIRSGGLKPYSFEAATDARETPTKETGFRPRINPTGAPTHHKTPRKLVSPTSTSTAPDSEEAIRYTGRGSGEDGQLGIGTNEEKEWACVVEALEPYSVRSVVSGSRNSLAICDDGTMFTWGWNQRGTLGHQPETKTENIPSRVKALANVKITQAAIGGWHCLAVDDQGRAYAWGGNEYGQCGEEPLKDEMGRPVRRDIVIPKRCAPKLTVRQVAAGGTHSVVLTREGHVWTWGQPWPPGDIKQISVPVRVQGLENVRLIAVGAFHNLALEEDGRLLAWGNNEYGQLGTGDTQPTSHPVPVQGLDDLTLVDIAAGGWHSTALTDKGEVYGWGRGEHGRLGLGDNDKSSKMVPQKVNLLAEEDIIQVSCGGTHSVALTRDGRIFSFGRGDHGRLGYGRKVTTGQPLELPIKIPPPEGSFNHTDEEEEGKWSAKSIACGGRHTLAIVEWKSDDI

SEQ ID NO: 2636 - protein, 1550 aa, Synechocystis sp. PCC 6803; identical to SEQ ID NO: 582

SEQ ID NO: 2637 - protein, 257 aa, Brassica napus
MSSREVNVYMAKLAEQAERYEEMVEFMEKVAKTVDSEELTVEERNLLSVAYKNVIGARRASWRIISSIEQKEESKGNEEHVAIIKEYRGKIETELSKICDGILNVLEAHLIPSASPAESKVFYLKMKGDYHRYLAEFKAGDERKDAAESTLVAYKSAQDIATAELAPTHPIRLGLALNFSVFYYEILNSPDRACTLAKQAFDEAIAELDTLGEESYKDSTLIMQLLRDNLTLWTSDMTDEAGDEIKEASKPEGGAAE

SEQ ID NO: 2638 - protein, 1482 aa, Shewanella sp. ANA-3; identical to SEQ ID NO: 583

SEQ ID NO: 2639 - protein, 122 aa, Glycine max
PRVRKGAQIFEALGLSSEVIERCFAGTPSRVEGATFEMLARDALKLHELAFPSRVFSAGSAEANALPNPGDYHWRKGGEIHLNDPLAISKLQEAARTNSIDAYEQYSKLIHELNKACNLRGL

SEQ ID NO: 2640 - protein, 822 aa, Arabidopsis thaliana
MMDYDDARGERPRLLVVANRLPVSAKRTGENSWSLEMSPGGLVSGLLGITSQFDTKWVGWPGVDVHDEIEKNALTESLAEMKCIPVFLNGVFDQYYNGYCNGILWPILHHMGLPQEDQHDTNQTFETQYDAYKKANRMFLDVIIDNYEEGDIVWCHDYHLMFLPQYLKEYNNKIKVGWFLHSPFPSSEVYKTLPSRSELLRAILAADLLGFHTYDFARHFLSTCTRILGVEGTHEGVVYQGRVTRVAVFPIGIDPDRFIRTCKLPEVTQQMNELQEKFAGKKVILGVDRLDMIKGIPQKYLAFEKFLEENPYWRDKVVLVQIAVPTRNDVPEYRKLKSQVHGLVGRINGRFGSVSSLPIHHLDCSVDFNYLCAIYAIADVMLVTSLRDGMNLVSYEFVACQEAKKGVLVLSEFAGAGQSLGVGALIVNPWDVTEVSSAIKEALNMPAEERETRHRSNFQYVCTHSAEKWGLDFMSELNGIIPESEMQMRKIPLQLPEQDVIQQYSQSNNRLIILGFFGTLAEPMNSGTKEMDLKLNPELKGTLKALCNDPKTTVVVLSRSGKNILNKNFGESNIWLAAENGMFEKQTTGEWVTNMPQNVNLDWVDGVKNVFKYFTDRTPRSYFEASETSLVWNYEYADVEFGRAQARDLLQYLWAGPISNASVDVVRGNHSVEVHAIGETKGAAIGRILGEIVHRKSMTTPIDFVFCSGYFLEKDEDIYTFFESKILSSKSPNGLDLKKENYFSAAIGQARTKARYVIDSAHGVVDLLHKLAVVADTTMTDSFSDSEIYEPRDANANENSKRWINSVRRRKVEIGDTGQIGM

SEQ ID NO: 2641 - protein, 746 aa, Oryza sativa Japonica Group; identical to SEQ ID NO: 584

SEQ ID NO: 2642 - protein, 1169 aa, Oryza sativa Japonica Group; identical to SEQ ID NO: 587

SEQ ID NO: 2643 - protein, 1382 aa, Ostreococcus tauri; identical to SEQ ID NO: 592
  misc_feature (818)..(824): Xaa can be any naturally occurring amino acid

SEQ ID NO: 2644 - protein, 795 aa, Arabidopsis thaliana
MARPRLLVVSMSLPVTAKRTGEESWSFTMSPGGLVSALLGLKEFETKWIGWPGVDVHDAIGKKTLSITLAEKGCIPVFLEEVCDQYYNGYCNNILWPIFHYLGTPPEYRNDATITYQSQYEAYKKANQIFFDVVKEHYEEGDVVWCHDYHVMLLPQYLKEYNSKMKVGWFLHTPFPSSEMYKTLPSRSDLLRSVLTADLVGFHTYDFARHFLNACMCILGVEATSEGIVDQGKVTRVAVFPIGIEPERFINTSELSEVVQYMKKFKNDFGGRKLILGVDRLDTIKGIPQKYQAFEKFLEENAEWRGKVMLLQIAVPTRNGIGEYQKIKDQCHYHVGRINGRFGSISSVPIIHLDCSIDFNQLCALYAITDVLLVTSLRDGMNLVSSEFIACQKAEKGVLILSEFAGAGQSLGAGAILVNPWNIKEVSSAIGEALNMSHEEKERKHKINFQYVKTHSTQQWADDFMKLTLTNILCSKLIEITTSAELGAGLAATLELPEHDVIQQYSKSNNRLLILGFYGTLTQPMKNQERRGDGMNLELHPQLKERLKELCSDPKTTVVVLSRSEKCILDKNFGEYNMWLAAENGMFLRHTSGEWVTRIPEHMNLEWIDGVKHVFKYFTERTPGSYLETSEASLVWNYENADAEFGRAQARDMLQHLWAGPISNASVDVVRGGQSVEVHAVGVTKGSAMERILGEIVHNKSMATPIDYVLCIGCFLGKDEDVYTFFEPELTKKAKSLSSSGSDSPKKVSSTIVDLKGENYFSVAIGQTHTKARYFLDSSDDVVKLIGKLCTHNNA

SEQ ID NO: 2645 - protein, 479 aa, Arabidopsis thaliana; identical to SEQ ID NO: 2446

SEQ ID NO: 2646 - protein, 1499 aa, Staphylococcus aureus subsp. aureus Mu50; identical to SEQ ID NO: 596

SEQ ID NO: 2647 - protein, 826 aa, Arabidopsis thaliana
MTVPGIITDVDGDTTSEVTSTSGGSRERKIIVANMLPLQSKRDAETGKWCFNWDEDSLQLQLRDGFSSETEFLYVGSLNVDIETNEQEEVSQKLLEEFNCVATFLSQELQEMFYLGFCKHQLWPLFHYMLPMFPDHGDRFDRRLWQAYVSANKIFSDRVMEVINPEDDYVWIQDYHLMVLPTFLRKRFNRIKLGFFLHSPFPSSEIYRTLPVRDEILRGLLNCDLIGFHTFDYARHFLSCCSRMLGLDYESKRGHIGLDYFGRTVYIKILPVGVHMGRLESVLSLDSTAAKTKEIQEQFKGKKLVLGIDDMDIFKGISLKLIAMEHLFETYWHLKGKVVLVQIVNPARSSGKDVEEAKRETYETARRINERYGTSDYKPIVLIDRLVPRSEKTAYYAAADCCLVNAVRDGMNLVPYKYIVCRQGTRSNKAVVDSSPRTSTLVVSEFIGCSPSLSGAIRVNPWDVDAVAEAVNSALKMSETEKQLRHEKHYHYISTHDVGYWAKSFMQDLERACRDHYSKRCWGIGFGLGFRVLSLSPSFRKLSVEHIVPVYRKTQRRAIFLDYDGTLVPESSIVQDPSNEVVSVLKALCEDPNNTVFIVSGRGRESLSNWLSPCENLGIAAEHGYFIRWKSKDEWETCYSPTDTEWRSMVEPVMRSYMEATDGTSIEFKESALVWHHQDADPDFGSCQAKEMLDHLESVLANEPVVVKRGQHIVEVKPQGVSKGLAAEKVIREMVERGEPPEMVMCIGDDRSDEDMFESILSTVTNPELLVQPEVFACTVGRKPSKAKYFLDDEADVLKLLRGLGDSSSSLKPSSSHTQVAFESIV

SEQ ID NO: 2648 - protein, 463 aa, Mesorhizobium sp. BNC1
MKRLVVVSNRVADLTRTSQAGGLAVGLADSLRQRGGVWMGWDGQTLKYEEEPEPRIRKIGEVTQATIPLTEQDYAEYYLGFANSVLWPLFHYRLDLVEYKTAFLEGYRRVNAKFANALVSILRDDDLIWIHDYHLIPLAAELRERGCKQRIGFFLHIPFPPPEILAAVPRHRWLVECLLKHDVIGFQTHTDLNNLLRYVEDHLGCEILADGRIRTREREVIAGFYPIGIDVDAFVGMAEKPNDEVQIETKRREILGRRQIIGVDRLDYTKGLPDRLRAFARLLELYPEMRKSVALMQIATPTREEVEAYVDIRKELEALSGAINGRFADFNWTPVRYIHGTVPRDALAALYRASQVGFVTPLRDGMNLVAKEYVAAQSMDDPGVLVLSKFAGAAEDLHEALIVNPYDVDDMARNLCRALTMPLDERQERQRALMERIRKHDSAHWLNSFMDALEKGETKEDEE

SEQ ID NO: 2649 - protein, 540 aa, Arabidopsis thaliana; identical to SEQ ID NO: 1490

SEQ ID NO: 2650 - protein, 303 aa, Oryza sativa; identical to SEQ ID NO: 1897

SEQ ID NO: 2651 - protein, 441 aa, Bradyrhizobium sp. ORS278; identical to SEQ ID NO: 602

SEQ ID NO: 2652 - protein, 248 aa, Zea mays
MAITMPGVEKQIRHEKHYRYVSSHDVAYWSQSFMQDLERACKEHYNRHCWGFGFGLSFRILSISPSFRKLSIDHILSVHRRTCRRAIFLDYDGTVVPHSSIIKSPGPEVILFMNSICSDPKNTVFIVSGRGKNSLSDWFAQCENLGIAAEHGYFIRWNRRSEWETFPIAIDFGWKRIAEPVMQLYTEATDGSFIESKESALVWHHQDADPDFGSSQAKELLDHLENVLANEPVVVKRGHQIVEVKPQA

SEQ ID NO: 2653 - protein, 252 aa, Oryza sativa Japonica Group; identical to SEQ ID NO: 1484

SEQ ID NO: 2654 - protein, 66 aa, Physcomitrella patens subsp. patens
QHYRGVRRRTWGRYAAEIRDSSRPGSHLWLGTFDTAEEAALAYDDAALRLRGSRALLNFPLRAASG

SEQ ID NO: 2655 - protein, 134 aa, Oryza sativa Japonica Group
MGLKSNCCFSVIMYSSPVNALIILENNAQDIVVVLATVDVKQLSGLKFLEAARMKHQDLQVIMMSAETTRLYTMMRCVKLAARFLVKKPPNEDIVHDLWQHIALKVLMMEKIRELLQGCTIYVNGSVCVLLSAK

SEQ ID NO: 2656 - protein, 865 aa, Arabidopsis thaliana
MISDYLRHCIYFTCCRDMVSRSYSNLLDLASGNFHSFSREKKRFPRVATVTGVLSELDDDNNSNSVCSDAPSSVTQDRIIIVGNQLPIKSHRNSAGKLSFSWDNDSLLLQLKDGMREDMEVVYIGCLKEQIDTVEQDDVSQRLLENFKCVPAYIPPELFTKYYHGFCKQHLWPLFHYMLPLTPDLGGRFDRSLWQAYLSVNKIFADKVMEVISPDDDFVWVHDYHLMVLPTFLRKRFNRVKLGFFLHSPFPSSEIYRTLPVRNELLRALLNADLIGFHTFDYARHFLSCCSRMLGLSYQSKRGTIGLEYYGRTLQSILNLPETQTKVAELRDQFLDQKVLLGVDDMDIFKGISLKLLAMEQLLTQHPEKRGRVVLVQIANPARGRGKDVQEVQSETEATVKRINEMFGRPGYQPVVLIDTPLQFFERIAYYVIAECCLVTAVRDGMNLIPYEYIICRQGNPKLNETIGLDPSAAKKSMLVVSEFIGCSPSLSGAIRVNPWNIDAVTEAMDYALIVSEAEKQMRHEKHHKYVSTHDVAYWARSFIQDLERACGDHVRKRCWGIGFGLGFRVVALDPSFKKLSIEHIVSAYKRTKNRAILLDYDGTMVQPGSIRTTPTRETIEILNNLSSDPKNIVYLVSGKDRRTLTEWFSSCDDLGLGAEHGYFIRPNDGTDWETSSLVSGFEWKQIAEPVMRLYTETTDGSTIETKETALVWNYQFADPDFGSCQAKELMEHLESVLTNDPVSVKTGQQLVEVKPQGVNKGLVAERLLTTMQEKGKLLDFILCVGDDRSDEDMFEVIMSAKDGPALSPVAEIFACTVGQKPSKAKYYLDDTAEIIRMLDGLAATNTTISDQTDSTATVPTKDLF

SEQ ID NO: 2657 - protein, 1629 aa, Arabidopsis thaliana; identical to SEQ ID NO: 607

SEQ ID NO: 2658 - protein, 911 aa, Physcomitrella patens subsp. patens
MADVASRCQSQLGSFRIRELKDVLARLGLPKQGKKQILIDKIMDLINPAEKESLAKGIGLFILELELAIYVALAGSKSSKKAISGDEAIAIVDEQYSVFRRFVMKVYIQQLFLRESRVVTLSGNILELFQGNIVTNTSQRSTKLRSIGTDLSRHKSAKSASSSGYPSPGLDESRCPCGSSVEAGRMIQCDSHGCRIWQHRSCVDFPKKPKDGVPVETPPNFYCELCRISQGDPFCEALFHPLLPVKFPSSTAKSERAITLQSIDEQFTLSLAHQELLQSPNYDLQVWCVLLSDKVSFRMHWPLSAVLRVNDANVRVTNRPAEQPLGANSRDEGHSITSYTREGLNRLNMSCDDARPFCLGVRIIRRRSLEEVMDMIPNEKDGEPFDEAVARVRRCINGGGGQGLGSDDDGADSDLEIVAESLTVNLRCPMSGSQIKVAGRFKPCPHMGCFDLDTYVEMNQRTRKWQCPICLKNYSIEHLIIDPFFNRITNALRTLDEDVTEVELKADGSWRPKLEGNVKNGEPWSPSPAAAVAIVSNGNKSAPVLFSSHHVKIEAGRSSHDHGSLQLKWTPEVQRVVNGRNYRNGGPSLQVMPLPRLSRSSSATGSNLKVGEDENSVNQDASEKNTVSMDDTDVEFLSILQEAARGTWQASGDDPANGGDIIVLSDSDDGEDEVTVVGSSHVSMYSDVIGNGGVRFSEGRVPNDINGDPSRFALGLGQYEYYGSQTEAVALQHPPLQPTPVEVVGSSDFLCTSLIGNDPSQLDWESFGQSHTPTLYEVIDSESIDINKDGSPLQNLLPSQPARSEVQENLRDLTLPAEVMDNSWFSLSLGGIGNVVKPTPERSLFTTSIEWCSPISQPGVNEYDPHGLGSNGSSQHLMDSRHPLRGHFTADGYPFPVRPCSGHIHARRVSR

SEQ ID NO: 2659 - protein, 596 aa, Bacillus cereus G9241; identical to SEQ ID NO: 613

SEQ ID NO: 2660 - protein, 1500 aa, Robiginitalea biformata HTCC2501; identical to SEQ ID NO: 615

SEQ ID NO: 2661 - protein, 268 aa, Arabidopsis thaliana
MSMTADSQSDYAFLESIRRHLLGESEPILSESTASSVTQSCVTGQSIKPVYGRNPSFSKLYPCFTESWGDLPLKENDSEDMLVYGILNDAFHGGWEPSSSSSDEDRSSFPSVKIETPESFAAVDSVPVKKEKTSPVSAAVTAAKGKHYRGVRQRPWGKFAAEIRDPAKNGARVWLGTFETAEDAALAYDRAAFRMRGSRALLNFPLRVNSGEPDPVRIKSKRSSFSSSNENGAPKKRRTVAAGGGMDKGLTVKCEVVEVARGDRLLVL

SEQ ID NO: 2662 - protein, 750 aa, Azotobacter vinelandii
MLLATDLDGTFLAGDPQDRLSLYQTITAHPDIQLAYVTGRSLEAVLPLLADPTLPQPDYIVADVGASLYHGETLQPIQPLQHDIDARWPGESQIAGALAGLPDLQRQDVPQARRCSYFCTPERAADPALEVIAERLGCDLLYSAGRYLDFLPRGVNKGSSLLRLVEHLGLDPEQVLVAGDTLNDLSMLTCGLKGVCVGQAEESLLEHTRHCTRVLHADSPGCGGIIQAFAHFGFLGVHGFAAETRKATEPGHAELVIVYHRLPYEEYREHGQVQRRRPSSPNGIIPTLLSFFADGRKGSWVAWAEHEEGQGLFESHTTVDAERYPRLTAARVPLCKEDIDTFYKRFSKEAFWPTLHTFWERAVFNEDDWQVFLRVNRAFAERTALEAAEGATVWLHDYNLWMVPAYLRELRPDLKLAFFHHTHFPSADVFNVVPWRRQIVGSLLQCDYIGFHIPRQVENFVDVARGVAPLKVLGRQNCAPRFVTYGCAVGLERVTTAIDTGMRQVRLGAHPVGLDLDRVRNALASPSVQNQMEQLRRELNGVRLVLAVERLDYTKGVLEKLKAFERLLADNPELQGRITLATICVPAAREMTVYDELQGQIEQAVGRINGRFARVGWTPVQFFFRSLPFEEVVAWYAMADVMWITPLRDGLNLVAKEFVATQGLLDGSGVLVLSEFAGAAAELKGALLTNPHDIADLVQNCHLALNLPKSEARARLRELFDIVAFNDIRRWGDEFLGALEEPRTDIRAIA

SEQ ID NO: 2663 - protein, 468 aa, Burkholderia sp. 383
MSRLVVVSNRIADPRKAAAGGLAVAVKDSLQESGGVWFGWSGRLRGGDDQPTHGDEVQIQNVGGIQLATIDLDPQDYDAYYLGYSNNVLWPVFHYRLDLAQFDRRFADGYRRVNQLFARKLRTLLRPDDTIWVHDYQLIPLAAELRAMGCTNPIGFFLHIPMPPPPIMAAIPEHEWLMRSLFAYDLVGFQTESDLLHFEHYVEAEAGAARLPDGRLRAFGRTLSAGAFPIGINVDEFESLARDRDGIDMFERMRDEYSRRQLLVGVDRLDYTKGLPQRVHAFRQLLEQYPENRNRATLIQIAAPSREDLGAYDDLRREMDSLCGAINGDYGELEWMPMRYIHRTVARKRLPGLYRASRVALVTPLRDGMNLVAKEFLAAQDAADPGVLVLSRFAGAAEQLKSALLVNPYDTQGTAQAIQRALAMPLEERRQRHAALMAIVRKTDVHWWRTRFLDALAEAAEVAAATES

SEQ ID NO: 2664 - protein, 513 aa, Flavobacteria bacterium BBFL7; identical to SEQ ID NO: 625

SEQ ID NO: 2665 - protein, 259 aa, Lilium longiflorum
MSPAEPSREENVYMAKLAEQAERYEEMVEFMEKVARTVDTEELTVEERNLLSVAYKNVIGARRASWRIISSIEQKEESRGNEDHVALIKDYRGKIEAELSKICDGILKLLDSHLVPSSTAPESKVFYLKMKGDYHRYLAEFKSGAERKEAAESTLLAYKSAQDIALAELAPTHPIRLGLALNFSVFYYEILNSPDRACNLAKQAFDEAISELDTLGEESYKDSTLIMQLLRDNLTLWTSDINEEAGDEIKEASKAVEGQ

SEQ ID NO: 2666 - protein, 735 aa, Thermoproteus tenax
MGGQVRLIVVSNRLPVTISPSGEIRESVGGLATAMKSFLGAVNGGRELGLEEVVWVGWSGVPSERESNDLRERLRGMGLEPVPLSSEEVEGFYEGFSNSTLWPLFHGFSEYATYEEKHWRAYRGVNEKYAKAVVALARPGDLVWIHDYHLMLAPAIVREAAEVGVGFFLHIPFPPAELLQLLPSEWRREILEGLLGSDLVGFHTYEYSANFSRSVVRFLGYKVEMGAIAVGHRRVRVGVFPIGIDFDRFYNSSQDPSVVEEMAKLREMLGRAKVVFSIDRLDYTKGVLRRVAAWERFLREHPEWRGRAVFVLVVVPSRTGVPMYEEMKRQIDREVGRINGELGELNWVPIVYLYRFIPSPTLMALYNIADVALITPLRDGMNLVAKEFVASKRDCRGVLILSELAGASKELAEALVINPNDVGGTAEAIAEALSMSEDEQCRRIRAMQERLRMRDVVRWGTDFIYSLISAKSAREEVEKALRYMEELSVDKLKSDFAKAKRRLLLLDYDGTLVPHYPYPHMAVPDGDLLELLSRLAALPETAVYVVSGRGRDFLDGWLGRLPVGLVAEHGFFLKHPGGEWKSLGKVDPSWRQYAKGIMEDFASNVPGSFVEVKEAGIAWHYRNADETIAEKAVVELIDALSNALAGSGLSILRGKKVVEVRPAGYTKGTAAKMLLDELSPDFVFVAGDDETDEGMFEVAPQSAYTVKVGPGPTLAKFRVGDYRGLRSLLEQLRPP

SEQ ID NO: 2667 - protein, 260 aa, Vitis vinifera
MAAAPSAREENVYMAKLAEQAERYEEMVEFMEKVSAAVDSEELTVEERNLLSVAYKNVIGARRASWRIISSIEQKEESRGNEDHVAMIRDYRSKIESELSSICDGILKLLDSRLIPSASSGDSKVFYLKMKGDYHRYLAEFKTGAERKEAAESTLTAYKSAQDIANAELAPTHPIRLGLALNFSVFYYEILNSPDRACNLAKQAFDEAIAELDTLGEESYKDSTLIMQLLRDNLTLWTSDMQDDGADEIKEAPKRDDEQQ

SEQ ID NO: 2668 - protein, 464 aa, Novosphingobium aromaticivorans DSM 12444
MSRLIVISNRVSAGGGAQGGLAVALSAALREHGGIWFGWSGNETSEFTGHINMERVDGVTTATVDLEEQDIEEYYDGYANRTLWPLFHYRIDLAEYERSFADGYKRANERFAETALPLIEPDDLVWVQDYHMFPLGKELRARGVENRIGFFLHIPWPPRRLLATLPEARALTESLLAYDLIGFHTEEWLQSFCDYVSHELGGTIGDDGWLSVGERRVRLIACPVGIDAKEFAALAASEKAKETYERVRVSAVGRTMIVGVDRLDYSKGLEERFLGYERFLVEHPEERKEVTLLQIAPPSRGTVDSYQRIRSTLEGLAGRINGAHAGLDWVPIRYVNQGYTRDMLAGVYRASKVGLVTPLRDGMNLVAKEYVAAQDPGDPGVLILSRFAGAAEQMPEALLVNPHSAEEISDALSRAITMPGEERIRRWRTLMNGVEQHDVTWWSKHFTDALKDCHEHACGSVHRN

SEQ ID NO: 2669 - protein, 926 aa, Solanum lycopersicum
MPGNKYTGNQAVASTRLERLLRERELRKSSKVSHFPNESTDNNRGNELSDHDFRQGEADNGGVSYVEQYLEGAALAYNEGWERPDGKPTRQRLLVVANRLPVSAVRRGEESWSLEISGGGLVSALLGVKEFEARWIGWAGVNVPDEAGQRALTKALAEKRCIPVFLDEEIVHQYYNGYCNNILWPLFHYLGLPQEDRLATTRSFQSQFAAYKKANQMFADVVNEHYEEGDVVWCHDYHLMFLPKCLKDYNSQMKVGWFLHTPFPSSEIHRTLPSRSELLRAVLAADLVGFHTYDYARHFVSACTRILGLEGTPEGVEDQGRLTRVAAFPIGIDSERFIRALEVTQVQEHIKELKERFAGRKVMLGVDRLDMIKGIPQKILAFEKFLEENPYWRDKVVLLQIAVPTRTDVPEYQKLTSQVHEIVGRINGRFGTLTAVPIHHLDRSLDFHALCALYAVTDVALVTSLRDGMNLVSYEFVACQELKKGVLILSEFAGAAQSLGAGAILVNPWNITEVAASIGQALNMSAEEREKRHRHNFLHVTTHTAQEWAETFVSELNDTVIEAQQRIRKVPPRLNISDAIERYSFSNNRLLILGFNSTLTESVDTPGRRGGDQIKEMELKLHPELKESLLAICNDPKTTVVVLSGSDRNVLDDNFSEYNMWLAAENGMFLRSTNGVWMTTMPEHLNMDWVDSVKHVFEYFTERTPRSHFEQRETSLVWNYKYADVEFGRLQARDMLQHLWTGPISNASVDVVQGLRSVEVRAVGVTKGAAIDRILGEIVHSKAIATPIDYVLCIGHFLGKDEDVYTFFEPELPSDCIGMPRSKVSDAPKVPGERRSVPKLPSSRTSSKSSQNRNRPVSNSDKKTSNGRRPSPENVSWNVLDLKKENYFSCAVGRTRTNARYLLSTPDDVVAFLRELAEAPISNGTS

SEQ ID NO: 2670 - protein, 294 aa, Physcomitrella patens subsp. patens
MVGGGGNRMGEWWAATEPQSSHSKAGAHMDNYEGSRNLNEKLHPSKQRLLVVANRLPVSAIRLEGDKWDLQLSAGGLVSALLGVKHSFETRWIGWPGVSVHDEKGRASLTEALALKGCVPVFLDDDTVDQYYNGYCNNVLWPLFHYIGLPQADRLAATRSLDSQFQAYQHANSLFAKIVFSQYQEGDVVWCHDYHLMCLPQKLKELNPHMKVGWFLHTPFPSSEIYRTLPLRSELLKAVLTADLIGFHTYDYARHFVSACTRILGLEGTPEGVEDQGKLTRVAAVSILRGSFQL

SEQ ID NO: 2671 - protein, 1579 aa, Fulvimarina pelagi HTCC2506; identical to SEQ ID NO: 634

SEQ ID NO: 2672 - protein, 853 aa, Physcomitrella patens subsp. patens
MAEGESREYPRGPVARGSREDFVEASTAASDDNDYRMLIVGHMLPLTASRGPDEQGWTFTWDEDSLALQLKAGLPKDMEVIYIGCLKVEVDDSGQDEVAATLLENFNCVPAFLPLEVRSRFYHGFCKQMLWPLFHYMLPLSPEHGGRFNRSFWQAYVSVNKVFADKVMEVISPDDDYVWIHDYHLMVLPTFLRKRFNKVRLGFFLHSPFPSSEIYRTLPVRDEILRALLNADLIGFHTFDYARHFLSCCSRMLGLEYESKRGYIGLEYYGRTVGIKILPVGIHMEQLNAGLRLADTEWRIAELRAEFKDRTVLLGVDDMDIFKGIGLKLLALEQLLRQHPKTRNRVVLVQIANPARGRGRDIEDLQNEAYTIAQRINDEFGNDDYQPVVLLERPVALYERIAYYTIAECCVVTAVRDGMNLIPYEYIACREGSPELDAGVDRGPCPAPLKKSMLIVSEFIGCSPSLSGAIRVNPWNIEALAEAMNMSITLPDIEQQMRHEKHFRYVNTHDVAYWARSFMTDLVRTCKGHARRRCYGIGFGLGFRVVALDPDFRRLRTDLIVSAYKKSTSRAILLDYDGTMIPQASINNPMPTPEVLSILNTLCSDRKNFVVIVSGRPRQILNECFSTCKRLGLAAEHGYFYRWHQDIDWVTCRYQRDDFDEYENDRMEWKEIVEPVMQQYTESTDGSYIEEKESAMVWHHRDADPDFGSWQAKELQDHLDSVLANQPVSVKSGAHIVEVKPQGVSKGVVVEELLAMMALKSAAPDFVLCIGDDRSDEDMFESIATVTARSGLAEVFACTVGQKPSKAKYYLDDIAEVIKLLQGIAAASDPGATPASLPTATSSQVSLETSLHI

SEQ ID NO: 2673 - protein, 604 aa, Physcomitrella patens subsp. patens
MDADSNQVVPICNTNYPTTIKTHPPLERTVSLARDGSVDFRGNTADKRASGRLKANAFIIGIEIGERLAFYGISANLVTYLTHVLHEGTEKSAANVNNWIGTTFIAPLLGAFLADAFWGRFWTILICGVIYFVGLVMLTLSVTVSAFKPPGCFISPSDGIQQCPSATAGQVGFFYFALYLMSLGGGCMKPCIAAFGADQFDEEDKRENEMKKSFFNWWVFGISLGALVSATVLVYVQSYISWGWGFGTPTVLMGIYLVLYILGSKSYRHKTPVGSSFTQIGQVIVAAVRNFRIQVPADPALLYEVDDKESLQAGARHITHSNSMRFLDKAAVLPNPSEGSSSDIQKHSPWKLATVTEVEEVKLVLRLLPIWVAALIFQTPSAQISTFYTRQGSTLNVNFGPNFKIPAASLQSIIPITIVCLIPIYDRVFVPITRRFTGNVRGITMLQRIGIGIILSFLSMVCAAVTEVYRVKVAREHGLLDHPFQTLPLSVFILLPQYVLLGAAEVFTSTGALEFFYDQAPDSMRSLGTAVFLSTIGIGNFLSSILLSGIVKVTSLSGQSWIVDNLNRCRLDYFYWLLAGLMVANLCFFSGLARCYKYKQVASL

SEQ ID NO: 2674 - protein, 888 aa, Medicago truncatula
MDDLVSSCKEKLQYFRVKDLKDVLTQIGISKQGKKQDLIDRILSIISDEQVAKVRAKKNAVEKEQVVKLVEDTYRKLQVSGATDIASKGQVASDSSNVKIKGEVEDSVQSATKVRCLCGSSLETDLLIKCEDRKCPVSQHLNCVIIPDTPTEGLPPIPDTFYCEICRLSRADPFSVSMMHPLHPVKLSTTLVPTEGSNPMQSVEKTFQLARAHKDIVLKSEFDIQAWCMLLNDKVPFRMQWPQYADLVVNGYSVRAINRPGSQLLGANGRDDGPIITPYIKEGVNKISLTGCDTRIFCLGVRIVRRRTLQQILNMIPKESDGERFEVALARVCCRVGGGNSADDAGSDSDLEVVSDTFSISLRCPMSGSRMKIAGRFKPCVHMGCFDLEVFVEMNQRSRKWQCPICLKNYALENIIIDPYFNRITSMMKNCGEEFTDVEVKPDGYWRVKAKSESECRELGNLAKWHCPDGSLPVSTSGEDKRVETLNVKQEGVSDSPNGLRLGIRKNCNGDWEVSKPKDTNISSDNRLNADLGNHEVVVIQMSSSGSESRLDGDDPSVNQSGGGHTDYSPTNGIETNSVCHTNVDSTYGYTIPNTSAPMANAEVIVLSDSEDDEILISPTVGYGNNQTGDAVDAYSVPPPGIMDPYAGDHSIGGNPCLGVFDNPNESIFGIPSVWPLHSGTQASSGFQLFSSDVDVSDALAHGDINCSSSLNSYTLAPDTALGSSALIPNSSTDRSDTDLNGGLVDNPLAFGGQDPSLQIFLPTRPAESSVQHELRNHTDVSNGVCTEDWISLSLGGGAGGSIGDASTTNGLNSRPQIQSREDAPDSLTDSLNEADLLLAETASLLRSVDDAESDKASRKRSDGPFSFPRQKRSVRPRLNLSIGSDSE

SEQ ID NO: 2675 - protein, 262 aa, Oryza sativa; identical to SEQ ID NO: 2103

SEQ ID NO: 2676 - protein, 509 aa, Geobacter sulfurreducens PCA; identical to SEQ ID NO: 637

SEQ ID NO: 2677 - protein, 506 aa, Glycine max
MSGAGQAIDMEHVGFSKAKADHGRGKKTGPVSMDHVLVALGETKEEREVRIRSLFNFFDAANNGYLDYAQIEAGLSALQIPPEYKYARELCEVCDANSDGRVEYHEFRRYMDDKELELYRIFQAIDVEHDGTILPEELYEALLKAGIEMNDEELAHFVEHVDKDNNGIISYVGPPPLEEWRDFLLLYPHEATIENIYHHWERVCLVDIGEQAVIPEGISKHVNRSKYFLAGGIAGGISRTATAPLDRLKVVLQVQSEPASIMPAVTKIWKQDGLLGFFRGNGLNVVKVSPESAIKFYAFEMLKKVIGEAHSNKSDIGTAGRLVAGGTAGAIAQAAIYPMDLIKTRLQTCPSEGGKVPKLGTLTMNIWVQEGPRAFYRGLVPSLLGMIPYAAIDLTAYDTMKDISKRYILQDSEPGPLVQLGCGTISGAVGATCVYPLQVIRTRLQAQPANSTSAYKGMSDVFWKTLKDEGFRGFYKGLIPNLLKVVPAASITYMVYESMKKSLDLE

SEQ ID NO: 2678 - protein, 847 aa, Oryza sativa Indica Group
MPSLSCHNLLDLVAAADDAAPSPASLRLPRVMSAASPASPTSPSTPAPARRVVVSHRLPLRAAADAASPFGFSFTVDSDAVAYQLRSGLPPGAPVLHIGTLPPPATEAASDELCNYLLANFSCLPVYLPADLHRRFYHGFCKHYLWPLLHYLLPLTPSSLGGLPFDRALYHSFLSANRAFADRLTEVLSPDDDLVWIHDYHLLALPTFLRKRFPRAKVGFFLHSPFPSSEIFRTIPVREDLLRALLNADLVGFHTFDYARHFLSACSRLLGLDYQSKRGYIGIEYYGRTVTVKILPVGIDMGQLRSVVSAPETGDLVRRLTESYKGRRLMVGVDDVDLFKGIGLKFLAMEQLLVEHPELRGRAVLVQIANPARSEGRDIQEVQGEARAISARVNARFGTPGYTPIVLIDRGVSVHEKAAYYAAAECCVVSAVRDGLNRIPYIYTVCRQESTGLDDAAKRSVIVLSEFVGCSPSLSGAIRVNPWSVESMAEAMNAALRMPEPEQRLRHEKHYKYVSTHDVAYWAKSFDQDLQRACKDHFSRRHWGIGFGMSFKVVALGPNFRRLSVDHIVPSYRKSDNRLILLDYDGTVMPEGSIDKAPSNEVISVLNRLCEDPKNRVFIVSGRGKDELGRWFAPCEKLGIAAEHGYFTRWSRDSAWETCGLAVDFDWKKTAEPVMRLYKEATDGSTIEDKESALVWHHDEADPDFGSCQAKELLDHLENVLANEPVVVKRGQHIVEVNPQGISKGVVVDNLLSSMVSRGKAPDFVLCIGDDRSDEDMFESIVCPSNSSVKLPASSEVFACTVGKKPSMAKYYLDDTVDVIKMLQGLANAPSQRPRQVQLRVSFEGSL

SEQ ID NO: 2679 - protein, 470 aa, Physcomitrella patens subsp. patens
MKKAAKSRGFDLESEEERELRVRKLFNSLDSRKCGYLESKQIESGLQSLSFPFQRKYALELLEACDSNHDGHIDFAEFQRYMNDKEVELFKLFQAIDVSHDGALQPEELQLALRNSGVQLEDHELDAFVQYIDRDKNGKITFNEWRDFLLLYPRETTLPNIYQYWEKICLVDIGEQAVIPEGIGEHHRLRYLAAGAMAGAVSRTATAPLDRLKVLLAIQTHSSTSSIMNGLVQIHKHNGAIGFFRGNALNVFKVAPESAIKFYAYEIMKRVVVGDGKDGEIGTLGRLVSGGTAGAIAQTIIYPVDLLKTRLQCHNEPGRAPQLVKFTRDILVQEGPRAFYRGLLPSLLGIIPYAGIDLATYETLKLKSRHLLPPETEPGPILHLCCGTFSGALGATCVYPLQLIRTRLQAQTLKSAVRYTGMADAFRRTYRNEGIRGFYKGWLPNMLKAVPSASITYLVYEDMKIRLSIK

SEQ ID NO: 2680 - protein, 577 aa, Xanthobacter autotrophicus Py2; identical to SEQ ID NO: 649

SEQ ID NO: 2681 - protein, 514 aa, Bdellovibrio bacteriovorus HD100; identical to SEQ ID NO: 652

SEQ ID NO: 2682 - protein, 1620 aa, Oryza sativa Indica Group; identical to SEQ ID NO: 658

SEQ ID NO: 2683 - protein, 678 aa, Aspergillus nidulans FGSC A4
MASGQTSELQSVIALVKTLTNAQLKDILRDEGLAVSGLKAALQVRIINALEGHFQAGRLGRYDSLRKFIYATAHRSMPPSPSIPPPVPGNYYQQIPTTHSVQSHHRQSPLGMPVASHGSVPECKELKIHLDADVASRLLAEPKLRVMIFCAADSGLNQFTKSDIAFPHQVELKANLDEVKANLRGLKNKPGTTRPADITNYIRKKAGYTNHVVMTYALTQKRFFIVANLVECTAIEELVDKLKRRKTITREQVLQEMKSKAEDADIVATSTVMSLKCPLSTRRIEVPCRSVLCTHNQCFDASSFLQLQEQAPTWSCPVCAKATSYESLNVDQYVDDILRSTPLDVEQVIIEPNGQWSTPKDEAVATGPGTFTPATDDDELVEIREPGVTPVKQENLSSLDLWRQTPATSREQSSAWSSSKRPAPVIDLTGSDDDDDSPIRPPKRQAVHLHRPLPKQDPRSSYTGGYVLKPPSFLISSIINKSVPIPETPAIMSFDAAGIHPIPSNSQDRLLSASCLDFLLIELVPMAERIAKDLAADERLLDDEETKETAFSRLESLGYRVGQGLAERFSRDRPRFTDNLDVIKFLCKDLWMTLFKKQIDNLKTNHRGVYVLTDNSFRPFAKMSMSSRNEALSRAQAYLWFPCGVIRGALSNLGIHTTVQAETTELPGATFQVKTINK

SEQ ID NO: 2684 - protein, 308 aa, Thermotoga neapolitana; identical to SEQ ID NO: 664

SEQ ID NO: 2685 - protein, 203 aa, Nicotiana tabacum
HEETWGELPLKVDDSEDMVIYTLLKDALNVGWSPFNFTAGEVKSELMEEEIVVSPADTTAAPAAELPRGRHYRGVRRRPWGEFAAEIRDPAKNGARVWHRTYETDEEAAIAYDKAAYRMRGSKAHLNFPHRIGLNEPEPVRVTAKRRASPEPASSSENSSAKRRRKAVAAEKSGAVEVESKSNVLQVGCQVELLTRGHQLLVS

SEQ ID NO: 2686 - protein, 822 aa, Zea mays
  misc_feature (561)..(561): Xaa can be any naturally occurring amino acid
MLSVSASDGDRSPCPVEARRIVVTHRLPLHAEPNPDAPYGFDFSLDADALPLQLARGLPRPVVFVGALPSAAASISASEELEADLLARFGCSPVFLDPGLHKDFYDGFCKRYLWPMLHYLLPFTLTPFFGSGGLKFKANLYRAYLTANTQYAERVLEQLNPDEDLVFIHDYHLLALPTILRHKSPRARIGFFLHTPFPTSELFRTVPVREDLLRSLLNADLVGFHNYDYARHFLSACTRLLGVTSHTHRGYISIDYCGRAVSVKILAGGVDIGQLREVLSSPETEAKAKEVATKFAGRQLLLGVDDVDLFKGIGLKLLAMERLLESQPELHGQVVLVQINNPVRSPGYDTDEICAELQAMRKRINARFATPAGYEPIVIIEDPMTMHEKLAFYTSADICLVTAVRDGLNRTPYIYTVCRQEGPISSGVVGAPKEGAIVLSEFVGCATSLGGAVHINPWNVDAVAEGMHMALRFNGREKQVRQEKHYRFVSTHDIAYWGRSLDQDLQRASKDHASMKFMSVGLAMSYHIVVLGPNFQKLSPEHINPSYQRAGNRLILLDYDXTVMFHPGLLARHPSQRLIGILNELCSDPKNTVFVVSGRSKDELARWLEPCERLGISAEHGYFTRWSRYSPWESPDLKVDYGWKKMVEPVMDLYVAVTDGSSVETKETALVWHYEGTDPVFGPSQAKELRDHLSDVLAKEPVSVRSGYNIVEVNPQEVDKGTAVQRIIAAMRDRGRMPDFILCVGDDASDEDMFKAVTAPSNKSAFPEDAEVFACTIGTKPSLAKYYLDDPVEVLSMLKGLIKSSVEERPGDGEGPSRVSFD

SEQ ID NO: 2687 - protein, 308 aa, Thermotoga sp. RQ7; identical to SEQ ID NO: 666

SEQ ID NO: 2688 - protein, 727 aa, uncultured archaeon GZfos12E2
MRRLLIISNRLPVSVERRKNELRFSSSVGGLATGLNALHQRYESVWVGWPGIAINREETDYVESKLSEFNCYPVFLSQGEVEKYYYGFSNKTLWPLFHYFPQYAKYEHSEWSAYEHVNRKFCERVAEIAKPEDIIWIHDYHLMLLPGLIRERFPDATIGFFLHIPFPSADLFRLIPWRRRILEGVLGADLIGFHTYDYAHNFLCSVLRLLGYEHEFGKLAIGDRIVQVDVHPMGVEVQKFVRATSGRGIKREVARLRSRFKNCKIIFSMDRLDYTKGIPERLYAFEHFLETHPEWHEKVVFILKIAPSRTKVGQYRVLKQEIDELVGRINGKYGTPEWVPISYFYRSLPFQTIVAFYLAADVALLTSMRDGMNLIAKEFVASRVDGKGVLILSEMAGAARELGEALVVNPNNKEEVAEALNEALRMPEEEQKSRNEEMQKRLSHYDVFHWGSGFIRSVLETKRLQEELNMKKLSEKIREELKNAYKAADKCLLLLDYDGTLVPFADKPERAKPDKELLYLFRALSEPPENTVVIISGRDKETLERWFGDTGVCLVAEHGVRLKEEEGEWKEIELLKEDWKEKIIPILDLFVDRAPGSFIEEKSFSLVWHYRKVDPELGELRAKELTDQLIDLTACTELQVMKGNKVVEVKDGRVNKGIAASHWLTKGFGFILAVGDDLTDEDMFKVLPEGAYSVKIGFTPSKARFYLGSPKEVRALLDEMELVEVYK

SEQ ID NO: 2689 - protein, 308 aa, Thermotoga maritima; identical to SEQ ID NO: 669

SEQ ID NO: 2690 - protein, 265 aa, Oryza sativa Japonica Group; identical to SEQ ID NO: 1695

SEQ ID NO: 2691 - protein, 230 aa, Oryza sativa Japonica Group; identical to SEQ ID NO: 131

SEQ ID NO: 2692 - protein, 429 aa, Methanopyrus kandleri AV19; identical to SEQ ID NO: 671

SEQ ID NO: 2693 - protein, 433 aa, Vicia faba
MGSRIRVSFEDEKGAETGMPSFNSDDACYTEGNTVDAFHVSDFGAFGQPYRIEDAVALSGNSNSVFNSLKVSGQTISPGPAHISTLGKFPTSLDKSPLENQTEPHRLQLTKLQSSNLSSSSILSVHIENQEEFTMADASPRTDISTDVDTDDKNQRFDTNQSLVPVGSDSSDRSKDKSDQKTLRRLAQNREAARKSRLRKKAYVQQLESSRLKLTQLEQELQRARQQGVFISSSGEQTHSLSGNGAMQFDAEYARWLEEQNRQINELRAAVNSHASDTELRMIVDGILAHYDEIFRLKGVAAKADVFHLLSGMWKTPAERCFLWLGGFRSSELLKLLVSQLEPLTEQQLMGITNLQQSSQQAEDALSQGMEALQQSLAETLSTGAPSSSGSSGNVANYMGQMAMAMGKLGHSRASFDRLTICASRLYNKCTEY

SEQ ID NO: 2694 - protein, 1538 aa, Chlorobium tepidum TLS; identical to SEQ ID NO: 678

SEQ ID NO: 2695 - protein, 1830 aa, Rhodococcus sp. RHA1; identical to SEQ ID NO: 681

SEQ ID NO: 2696 - protein, 1487 aa, Psychrobacter arcticus 273-4; identical to SEQ ID NO: 689

SEQ ID NO: 2697 - protein, 1481 aa, Pseudomonas aeruginosa UCBPP-PA14; identical to SEQ ID NO: 693

SEQ ID NO: 2698 - protein, 1482 aa, Oceanobacter sp. RED65; identical to SEQ ID NO: 694

SEQ ID NO: 2699 - protein, 272 aa, Gibberella zeae PH-1
MGHEDAVYLAKLAEQAERYEEMVENMKIVAGEDRDLTVEERNLLSVAYKNVIGARRASWRIVTSIEQKEESKGNSSQVTLIKEYRQKIEAELAKICEDILEVLDQHLIPSAKSGESKVFYHKMKGDYHRYLAEFAIGDRRKDSADKSLEAYKAATEVAQTELPPTHPIRLGLALNFSVFYYEILNAPDQACHLAKQAFDDAIAELDTLSEESYKDSTLIMQLLRDNLTLWTSSEAETSAAGQAEAPKEDAPAAATAEDAPAAPAAAEEPKAE

SEQ ID NO: 2700 - protein, 308 aa, Thermotoga sp. SG1; identical to SEQ ID NO: 695

SEQ ID NO: 2701 - protein, 304 aa, Thermotoga thermarum; identical to SEQ ID NO: 696

SEQ ID NO: 2702 - protein, 479 aa, Schizosaccharomyces pombe
MSDAHDTIKSLTGDASNSRRLIVVSNRLPITIKRKDNGTYDFSMSSGGLVSALSGLKKLMTFQWLGWCGQEIPEDEKPMIIQRLQDECSAIPVFLDDETADRHYNGFSNSILWPLFHYHPGEINFDEENWEAYRAANYAFAEAIVKNLQDGDLIWVQDYHLMVLPQMLRELIGDKFKDIKIGFFLHTPFPSSEIYRVLPVRNEILEGVLNCDLVGFHTYDYARHFLSACSRILNLSTLPNGVEYNGQMVSVGTFPIGIDPEKFSDALKSDVVKDRIRSIERRLQGVKVIVGVDRLDYIKGVPQKFHAFEVFLEQYPEWVGKVVLVQVAVPSRQDVEEYQNLRAVVNELVGRINGRFGTVEYTPIHFLHKSVRFEELVALYNVSDVCLITSTRDGMNLVSYEYICTQQERHGALILSEFAGAAQSLNGSIVINPWNTEELANSIHDALTMPEKQREANENKLFRYVNKYTSQFWGPKLCR

SEQ ID NO: 2703 - protein, 308 aa, Thermotoga sp. RQ2; identical to SEQ ID NO: 700

SEQ ID NO: 2704 - protein, 485 aa, Zygosaccharomyces rouxii
MTVSKKDSGKTSPGNIVVVSNRLPVTISKNAMGKYEYKFSSGGLVTALQGLKKTSTFQWYGWPSLEIPDDEKPVVKKDLLEKFNAIPIFLSDEIADLHYNGFSNSILWPLFHYHPGEINFDENAWLAYNEANATFASEICGNLQDNDLVWVHDYHLMLLPEMLSAHIQRKGLKNIKLGWFLHTPFPSSEIYRILPVRQEILNGVLSCDLIGFHTYDYARHFLSSIQRCLNVNTLPNGVEYQGRFVNVGAFPIGIDVDTFKEGLQKENVKQRIRTLQERFKGCKIMVGVDRLDYIKGVPQKLHAMEVFLNEHPEWIGKVVLVQLAIPSRGDVEEYQYLRSVVNELVGRINGQFGTIEFVPIHFMHKSIPFEELISLYAVSDACIVSSTRDGMNLVSYEYIACRKKGSLILSEFTGAAQSLNGALIVNPWNTDELSDSINEALTLPDEKKDSNWEKLYKYISKYTSAYWGENFVHELNATGTIKTGQ

SEQ ID NO: 2705 - protein, 261 aa, Zea mays
MASAELSREENVYMAKLAEQAERYEEMVEFMEKVAKTVDSEELTVEERNLLSVAYKNVIGARRASWRIISSIEQKEEGRGNEDRVTLIKDYRGKIETELTKICDGILKLLESHLVPSSTAPESKVFYLKMKGDYYRYLAEFKTGAERKDAAENTMVAYKAAQDIALAELAPTHPIRLGLALNFSVFYYEILNSPDRACSLAKQAFDEAISELDTLSEESYKDSTLIMQLLRDNLTLWTSDISEDPAEEIREAPKHDSSEGQ

SEQ ID NO: 2706 - protein, 933 aa, Oryza sativa Indica Group
MVTPSDFESDGLLNTWKICTVTQVEELKILIRMFPVWATMILFAAVLDNMFSTFIEQGMVMEKHIGSFEIPAASFQSIDVIAVLILVPVYERVLVPVFRKFTGRANGITPLQRMGIGLFFSMLSMVSAALVESNRLRIAQDEGLVHRKVAVPMSILWQGPQYFLIGVGEVFSNIGLTEFFYQESPDAMRSLCLAFSLANVSAGSYLSSFIVSLVPVFTAREGSPGWIPDNLNEGHLDRFFWMMAGLCFLNMLAFVFCAMSAYHCIEIRKLVSLRYKLCTKDKKRSLNTYRYESPFDMTISRNTFLNDRAHHPDREYFLQQELPKKQFKAEHLSSWRVQQPFRAAKGAFMGSSLEAEQQSLIVRTTEPEDVDDYTGDGSVGFSGQPILKHETGNWRACSLILGTEVCERLAYYGISKSLVTYLSTRLHEGNVSAARNFTTWQGTCYLTPLIGATLADSYWGKYKTIAVFSTIYFLGMAALTFSALVPSLQPPQCFGSFCPQPTVPQYLIYFVGLYMIALGSGGIKPCVSSFGADQFDDTDPVERTKKGAFFNWFYFAINIGSLISGTVLIWVQQNCGYGIGFGIPTIFIALAIGSFFIGSQRYRYQIPGGSPLIRVCQVVVAAIHKRNVDLPVDSSVLYELHGKTSAIEGSRKLEHSSEFSFLDKAAVILSNERGGSHDPWRLCTITQVEELKILMRMFPIWATGIVFFTVCAQNSSMFIEQGMALNNQIESFKIPPATLSSLDVISIVVWVPIYETFVVPIASRLTGKERGFSELQRMGIGLFVATTAVATAALVEIKRLEIARSEDLIHSKVPVPMSILWQAPQYLLVGIGEVFTAIGQAEFFYNQSPDSMRSLCSAFALVTVSLGSYLSSFILTLVSYFTTRDDNPGWIPDNLNEGHLDRFFWLIAGLSFLNLLLFVYYAQQYKCKKAAAI

SEQ ID NO: 2707 - protein, 260 aa, Melampsora medusae f. sp. deltoidis
KLAEQAERYDEMVTFMKDVAKLGVELSVEERNLLSVAYKNVIGARRASWRIISSIEQKEDTKGNELHVGKIKEYRSKVEAELAEVCNDILAVLDQHLIPSAEAGESKVFYHKMKGDYHRYLAEFASGDGRKTASEAAHESYKQATEIAQSDLAPTHPIRLGLALNFSVFYYEILNSPDRACHLAKQAFDDAIAELDTLSEESYKDSTLIMQLLRDNLTLWTSDLHDAEDKPAEAAAAQPEAAAEAAPEAEAAAPEAATEA

SEQ ID NO: 2708 - protein, 585 aa, Arabidopsis thaliana; identical to SEQ ID NO: 1670

SEQ ID NO: 2709 - protein, 215 aa, Melampsora medusae f. sp. deltoidis
RASWRIISSIEQKEDTKGNELHVGKIKEYRSKVEAELAEVCNDILAVLDQHLIPSAEAGESKVFYHKMKGDYHRYLAEFASGDGRKTASEAAHESYKQATEIAQSDLAPTHPIRLGLALNFSVFYYEILNSPDRACHLAKQAFDDAIAELDTLSEESYKDSTLIMQLLRDNLTLWTSDLHDAEDKPAEAAAAQPEAAAEAAPEAEAAAPEAATEA

SEQ ID NO: 2710 - protein, 853 aa, Glycine max
MVSRSYSNLLDLTSCGSPTFSREKKRLPRVATVAGVLSELDDETSNSVCSDTPSSVSQERMIIVGNQLPLKAHRKDNGTWEFTWDEDSLLLQLKDGLGDDVETIYIGCLKEEIEPSEQDDVALYLLDTFKCVPTFLPPELFSKFYHGFCKQHLWPLFHYMLPLSPDLGGRFDRSLWQAYLSVNKIFADKVMEVISPDDDFVWVHDYHLMVLPTFLRKRFNRVRLGFFLHSPFPSSEIYRTLPVRDELLRALLNSDLIGFHTFDYARHFLSCCSRMLGISYQSKRGYIGLEYYGRTVSIKILPVGIHIGQLQSVMSHPETESKVAELKKQFRDQTVLLGVDDMDIFKGISLKLLAMEQLLLQHPDKRGRVVLVQIANPARGRGKDVQEVQSETYATMKRINNAFGRPGYTPVVLIDTPLQSYERIAYYVIAECCLVTAVRDGMNLIPYEYIICRQGNEKIDEILGTDLLTQKKSMLVVSEFIGCSPSLSGAIRVNPWNIDSVAEAMDSALMVPEAEKQMRHEKHYRYVSTHDVAYWARSFLQDLERACRDHLRRRCWGIGFGLGFRVIALDPNFRKLSVEHIVSAYKRTKHRAILLDYDGTMVQPGSMSLTPNAEAVSILNILCRDTKNCVFIVSGRERKTLTEWFSSCERMGIAAEHGYFVRTNRNAEWDTCIPVPDFEWKQIAEPVMQLYMETTDGSNIEAKESALVWNYEYADRDFGSCQAKELFDHLESVLANEPVSVKSSPNIVEVKPQGVSKGIVAERLLLTMQQKGVFPDFVLCIGDDRSDEDMFGVIMNAKATLSPVAEVFPCTVGQKPSKAKYYLEDTSEILRMLQGLANASEHSTRTSLQPASH

SEQ ID NO: 2711 - protein, 215 aa, Melampsora medusae f. sp. deltoidis
  misc_feature (50)..(50): Xaa can be any naturally occurring amino acid
RASWRIISSIEQKEDTKGNELHVGKIKEYRSKVEAELAEVCNDILAVLDXHLIPSAEAGESKVFYHKMKGDYHRYLAEFASGDGRKTASEAAHESYKQATEIAQSDLAPTHPIRLGLALNFSVFYYEILNSPDRACHLAKQAFDDAIAELDTLSEESYKDSTLIMQLLRDNLTLWTSDLHDAEDKPAEAAAAQPEAAAEAAPEAEAAAPEAATEA

SEQ ID NO: 2712 - protein, 245 aa, Melampsora medusae f. sp. deltoidis
KLAEQAERYDEMVTFMKDVAKLGVELSVEERNLLSVAYKNVIGARRASWRIISSIEQKEDTKGNELHVGKIKEYRSKVEAELAEVCNDILAVLDQHLIPSAEAGESKVFYHKMKGDYHRYLAEFASGDGRKTASEAAHESYKQATEIAQSDLAPTHPIRLGLALNFSVFYYEILNSPDRACHLAKQAFDDAIAELDTLSEESYKDSTLIMQLLRDNLTLWTSDLHDAEDKPAELLLPSLRPLLKL

SEQ ID NO: 2713 - protein, 859 aa, Vitis vinifera
  misc_feature (634)..(634): Xaa can be any naturally occurring amino acid
  misc_feature (768)..(768): Xaa can be any naturally occurring amino acid
MVSRSYSNLLDLVSGDSPTFGRGGKKISRVATVAGVLSELDDETSNSVTSDAPSSVSQDRMIIVGNQLPLRAHRSSDGSGEWCFSWDEDSLLLQLKDGLGEDVEVLYVGCLREQIDPSEQDDVAQTLLETFKCVPAFIPPELFSKFYHGFCKQQLWPLFHYMLPLSPDLGGRFDRSLWQAYVSVNKIFADKVMEVITPDEDFVWVHDYHLMVLPTFLRKRFNRVKLGFFLHSPFPSSEIYRTLPVRDELLRALLNSDLIGFHTFDYARHFLSCCSRMLGLAYQSKRGYIGLEYYGRTVSIKILPVGIHMGQLRSVLNLPETDSRVAELRDQFRGQTVLLGVDDMDIFKGISLKLLAMEQLLTQHPDKRGKVVLVQIANPARGRGKDVQEVQSETHATVRRINETFGRPGYHPVVLIDTPLQFYERIAYYVTAECCLVTAVRDGMNLIPYEYIICRQGNEKLDETLGLNPSTPKKSMLVVSEFIGCSPSLSGAIRVNPWNIDAVAEAMESALIVPEPEKQMRHEKHYRYVSTHDVAYWAHSFLQDLERACRDHVRRRCWGIGFGLGFRVIALDPNFRKLSVEHIVSAYKRTKNRAILLDCDGTMMLQSSISTIPNTEAIGILNNLCGDPKNVVFXVSGKDKKTLTEGFSSCEKLGIAAEHGYFLRLSHDAEWETCLPVTDFDWKQIAEPVMKLYTETTDGSTIETKESALVWNYQYADPDFGSCQAKELLDHLESVLANEPVSVKSGQHIVEVKPQGVNKGLVAERLLXTMRQKGMLPDFVLCIGDDRSDEDMFEVIIRAKGLPSLSPVAEVFACTVGRKPSKAKYYLEDTTEILRMLQGLLKFLLYLELGSTFGDSTFP

SEQ ID NO: 2714 - protein, 1510 aa, Silicibacter pomeroyi DSS-3; identical to SEQ ID NO: 711

SEQ ID NO: 2715 - protein, 2144 aa, Saccharomyces cerevisiae; identical to SEQ ID NO: 713

SEQ ID NO: 2716 - protein, 261 aa, Zea mays
  misc_feature (81)..(81): Xaa can be any naturally occurring amino acid
MASAELSREENVYMAKLAEQAERYEEMVEFMEKVAKTVDSEELTVEERNLLSVAYKNVIGARRASWRIISSIEHKEEGRGXKTVFHSFKDYRGKIETELTKICDGILKLLESHLVPSSTAPESKVFYLKMKGDYYRYLAEFKTGAERKDAAENTMVAYKAAQDIALAELAPTHPIRLGLALNFSVFYYEILNSPDRACSLAKQAFDEAISELDTLSEESYKDSTLIMQLLRDNLTLWTSDISEDPAEEIREAPKRDSSEGQ

SEQ ID NO: 2717 - protein, 468 aa, Burkholderia cenocepacia J2315
MSRLVVVSNRIADPRKAAAGGLAVAVKDSLQETGGVWFGWSGRLRGGDDQAARGDDVQIQNVGGIQLATIDLDPQDYDAYYLGYSNNVLWPVFHYRLDLAQFDRRFADGYRRVNQLFARKLSTLLRPDDVIWVHDYQLIPLAAELRAMGCTNPIGFFLHIPMPPPPIMAAIPEHEWLMRSLFAYDLVGFQTESDLLHFEHYVEAEAGAARLPDGRLRAFGRTLSAGAFPIGINVDEFESLARDRDGLDMFERMRDEYSRRQLLVGVDRLDYTKGLPQRVHAFRQLLEQYPENRDRATLIQIAAPSREDLGAYDDLRREMDSLCGAINGDYGELEWMPMRYIHRTVARKRLPGLYRASRVALVTPLRDGMNLVAKEFLAAQDAADPGVLVLSRFAGAAEQLKSALLVNPYDTQGTAQAIQRALTMPLEERRQRHAALMAIMRKTDVHWWRTRFLEALTEAAEVAAAAES

SEQ ID NO: 2718 - protein, 229 aa, Zea mays
MSTYISLSLERSSSVVRDAAKSAPPGSGVSAPYPRAGAGAGTSLSLSGAAAAHGHGQYLPLNEDDSLDMVLFDVLREASGSAPAATYQPPSSSLPTLKALASGASRKGGGNSGNGSRAAHAPKAATGRHYRGVRRRPWGKYAAEIRDPARHGARLWLGTFATAEEAAAAYDRAAFGMRGAKALLNFPPPAAGCGNAATATAKQAAGSQVNNGECDLLEENGSSHDSECF

SEQ ID NO: 2719 - protein, 509 aa, Cyanobium sp. PCC 7001
MTPPTTMLASQESVSTTSGFGSSSFVLVYHRSPYDLKTAADGSVEFVDQKSPNGIIPTLRNLFQEERSGTWISWREDADAANAPDERLTVPSASPFTLRRLPLTKEQISSFYHVTSKESFWPILHSFPGLFSVDNSDWDTFVEVNQSFARAACEEAAQGATIWVHDYNLWLVPAQIRELRPDVRIAFFHHTPFPSNDVFSILPWRDEILDSLLCCDLVGFHIPRYADNFSRTAINLRGARCGDPVPVAEKFRHFGSALAQPTVMPWLEHNGRRVHIQASPVGTSPDVIREIVASEEVRTMAAQIAEQHAGRKLIISASRVDYTKGNEDMLLSYERVLENNPKWHGKVELFLACVAAASGMRIYEDIQRSVEEITGRINGRFGRIDWTPVRLSTRRTPYNELVAWFTQSDVCWITPLRDGLNLVAKEYVAARQGRDGVLVLSEFSGASVELEDAVVTNPYSHHSMDNAILKALTMPKDEQVRRMASMSEAVEEFTVQHWAEQELGALRAI

SEQ ID NO: 2720 - protein, 701 aa, Oryza sativa
  misc_feature (493)..(493): Xaa can be any naturally occurring amino acid
MEGVVTSSVGEPNQDNEPRDSSIELPRVITDMETSAMHDPEAQKLIGHEADTELTPYEGMEFESEDAARDFYSKYARHAGFRIRISRYTRSRRDNSIISRRIVCSKEGFHETRDCENLHVDQKQQARVGTRVGCKAMLMIKKFGPDKWVVTKFIKIHNHGPVPPRKPHAGEHHDCDLMENPHSIEVDPIDEPVEGMEFESEEAAKLFYINYARVNGFRARISRYCRSRRDNSIISRQIVCSKEGFREVRARKDITDGGKTTKRPRMITRVGCKAMIVVKRMNSGKWMVSKFEKEHNHSLLSSRAVPITSNDSSREVIDFAATSNDPNEVKAEGCSTGIQCNSTDSLTVLYNHLCQEAIKFAKEGSVTEEIYHVAMNALKEAAEKVSEVKRSHPTMSQSKHEVMQMETMSASQCSNDDKQKTMTPQLKFLQEPSPSLVLIPTNLLTHSSSNCADNIPLSCDLTINAGEVKHVSESSCLAANRKEDSSQKSQPYXGKDERFHVLSKETTVAIPAIPLTLYMPIMKNPTGDSADGQYRLLAAPIEAVPISYRPAEPIQQPHGSFPNSGPLPGFLPKLYKRGKGPNSLVHATALACGARVVPPEEAASLIKAIESKIRSGGATIAKLPSSSLTPLIPEVASMSSSSEDDEENDHSEPLMASVEHNCHDQSSEEMKLEADPPSELETEAENCSAQPENENNGPTHC

SEQ ID NO: 2721 - protein, 348 aa, Glycine max
  misc_feature (95)..(95): Xaa can be any naturally occurring amino acid
MSALCLTNVIYGFSGTLTEPVEKTGDQIKEMELKVHPKLRQPLTALCSDPNTTVVVLSGSGRQVLDDNFKEYDMWLAAENGMFLHPSKGEWMTTXPELLNMEWVDSVKHVFEYFTERTPRSHFVFEERETSLVWNYKYSDVEFGKLQARDMLQHLWTGPISNASVEVVQGSRSVEVRAVGVTKGAAIDRILGEIVHSKSMTSPIDYVLCIGHFLGKDEDLYSFFEPDLPSIGVGLPRSKVTTDGVKFPVERKPSLNVPATKSGPKSFPNKAQRPVSNSEKKTNNHICSTPRRPAPEKESWNVLDLKKENYFSCAIGRTRTNARYILDSSDDVVSFLKELAVASSRLYH

SEQ ID NO: 2722 - protein, 193 aa, Melampsora medusae f. sp. deltoidis
KLAEQAERYDEMVTFMKDVAKLGVELSVEERNLLSVAYKNVIGARRASWRIISSIEQKEDTKGNELHVGKIKEYRSKVEAELAEVCNDILAVLDQHLIPSAEAGESKVFYHKMKGDYHRYLAEFASGDGRKTASEAAHESYKQATEIAQSDLAPTHPIRLGLALNFSVFYYEILNSPDRACHLAKQAFDDAIA

SEQ ID NO: 2723 - protein, 239 aa, Brassica napus
MRNRVEEKFLEFYESWIFQLEQYLHQLLIAHNNINTMSEIELRGLISKLTAHHKAYYTAKWAAIGEDILAFFGPVWLNPLEKSCFWLTGWKPSTAFRMLDRLRKSWRPTVVLVEAQVRRLEELRVKTRFDEERIETEMERYQVAMADRKMVELARLGCRVGGVEGESTVLVEAAVKGLATRLEKMVKAADCVRLKTLKGILDVLAPPQCVEFLAAAAAFQVQLRRWGNERHNVTHSYGS

SEQ ID NO: 2724 - protein, 248 aa, Melampsora medusae f. sp. deltoidis
  misc_feature (246)..(246): Xaa can be any naturally occurring amino acid
KLAEQAERYDEMVTFMKDVAKLGVELSVEERNLLSVAYKNVIGARRASWRIISSIEQKEDTKGNELHVGKIKEYRSKVEAELAEVCNDILAVLDQHLIPSAEAGESKVFYHKMKGDYHRYLAEFASGDGRKTASEAAHESYKQATEIAQSDLAPTHPIRLGLALNFSVFYYEILNSPDRACHLAKQAFDDAIAELDTLSEESYKDSTLIMQLLRDNLTLWTSDLHDAEDKPAELLLPSLRPLLKLXRS

SEQ ID NO: 2725 - protein, 237 aa, Melampsora medusae f. sp. deltoidis
  misc_feature (221)..(221): Xaa can be any naturally occurring amino acid
KLAEQAERYDEMVTFMKDVAKLGVELSVEERNLLSVAYKNVIGARRASWRIISSIEQKEDTKGNELHVGKIKEYRSKVEAELAEVCNDILAVLDQHLIPSAEAGESKVFYHKMKGDYHRYLAEFASGDGRKTASEAAHESYKQATEIAQSDLAPTHPIRLGLALNFSVFYYEILNSPDRACHLAKQAFDDAIAELDTLSEESYKDSTLIMQLLRDNLTLWXSDLHDAEDKPAEAAAA

SEQ ID NO: 2726 - protein, 266 aa, Zea mays; identical to SEQ ID NO: 1443

SEQ ID NO: 2727 - protein, 257 aa, Melampsora medusae f. sp. deltoidis
KLAEQAERYDEMVTFMKDVAKLGVELSVEERNLLSVAYKNVIGARRASWRIISSIEQKEDTKGNELHVGKIKEYRSKVEAELAEVCNDILAVLDQHLIPSAEAGESKVFYHKMKGDYHRYLAEFASGDGRKTASEAAHESYKQATEIAQSDLAPTHPIRLGLALNFSVFYYEILNSPDRACHLAKQAFDDAIAELDTLSEESYKDSTLIMQLLRDNLTLWTSDLHDAEDKPAEAAAAQPEAAAEAAPEAEAAAPEAA

SEQ ID NO: 2728 - protein, 237 aa, Melampsora medusae f. sp. deltoidis
KLAEQAERYDEMVTFMKDVAKLGVELSVEERNLLSVAYKNVIGARRASWRIISSIEQKEDTKGNELHVGKIKEYRSKVEAELAEVCNDILAVLDQHLIPSAEAGESKVFYHKMKGDYHRYLAEFASGDGRKTASEAAHESYKQATEIAQSDLAPTHPIRLGLALNFSVFYYEILNSPDRACHLAKQAFDDAIAELDTLSEESYKDSTLIMQLLRDNLTLWTSDLHDAEDNQLRLLLP

SEQ ID NO: 2729 - protein, 268 aa, Arabidopsis thaliana; identical to SEQ ID NO: 2407

SEQ ID NO: 2730 - protein, 1629 aa, Arabidopsis thaliana; identical to SEQ ID NO: 607

SEQ ID NO: 2731 - protein, 783 aa, Triticum aestivum
MQDSQSAFKKEDPLGMDAMSSEEFASQSKLLQEFTNVPSIESAWLFKTNNEDRSTAMFSISQPDLLANKKRKYILHSHIVTHGTMPLECHWSPFPIEMTGVSAVVPSPSGSKLLVVRNGEKGSRTTLQIVNQSHVEKEIHVDQSIHGPLYTDEWFHGISWNHEETFIAYIAEQSPQPKPTFDNAGYRKGGSSEEDCNSWRGQGDWEEDWGETYSRKGRPSLFVLDIASGEVRAARDVTKSMSVGQVVWAPPSSSGHQKLLVFVGWLEHNGFQSTARKLGIKYCSNRPCSLYAIHSPFEEEPNADNASNSGSESVPASVATNLTPSISSALFPRFSKDGKLLVFLSSKCAVDSGAHNATDSLHRINWPSDWKADEQLSVTDVVPVVMCPQDGCFPGLYCSAMLSDPWLSDHCTMVLTSAWRSTEVILSIDVLSGEVTRISPQDSDYSWSTLAISGNNVLSVSSSPIDPPQIRYGRRASTEDHDGRCAWVWDEVTSPLTAASNKVKALLSHHKLSILRIPVPDPSDELSDGGQLPFEAIFVSCEDSSQKPTVLILHGGPHSASVSSYSKSSAFLASLGFNLLIVNYRGTLGYGEEALQSLPGKVGSQDVQDCLAALDHVIEEGLVDASRVAVVGISHGGFLTTHLIGQAPERFAVAAARNPVCNLSLMIGTTDIPDWCYAVACGTEARRLASESPSLDHLRIFHQKSPIAHISKVKAPLLMLLGGADLRVPMSNGLQYARALRERGGEVKTIMFPEDTHEIDIPRSDFESFLNMGVWFKKYLKQI

SEQ ID NO: 2732 - protein, 517 aa, Aspergillus niger
MPSLENPTFQNEARLLLVSNRLPITIKRSDDGRYDFSMSSGGLVSGLSGLSKSTTFQWYGWPGLEVPEEEIPVVKERLKQEYNAVPVFIDDELADRHYNGFSNSILWPLFHYHPGEITFDESAWEAYKEANRLFAKAVAKEVQDGDLIWVHDYHLMLLPEMLREEIGDSKENVKIGFFLHTPFPSSEIYRILPVRNELLLGVLHCDLIGFHTYDYTRHFLSACSRLLGLTTTPNGIEFQGKIIACGAFPIGIDPEKFEEGLKKEKVQKRIAMLEQKFQGVKLMVGVDRLDYIKGVPQKLHALEVFLSDHPEWVGKVVLVQVAVPSRQDVEEYQNLRAVVNELVGRINGKFGTVEFMPIHFLHKSVNFDELIALYAVSDACIVSSTRDGMNLVAYEYIATQKKRHGVLVLSEFAGAAQSLNGSIIINPWNTEELAGAYQEAVTMSDEQRALNFSKLDKYVNKYTSAFWGQSFVTELTRISEHSAEKFHAKKASFSDNNSENGEPSNGVETPAQEQVAQ

SEQ ID NO: 2733 - protein, 472 aa, Burkholderia pseudomallei K96243
MSRLIVVSNRVAAGQDARPTAGGLAVGVLDALKETGGVWFGWNGEIAGAPEEPVIERDGNVTYATVGLTRRDYDQYYRGFSNATLWPVFHYRGDLARFDRQEYAGYLRVNCALAKQLCALVQPDDIIWVHDYHLLPFAHCLRELGVKNPIGFFLHIPFPSPEVLRTVPPHEELMKFMCAYDVIGLQTESDKQAFVDYIERRGLGTSSEDGILHAHGRVVKVAAYPIGIYPDAIGKAAIEYGSRKAVKALRDTMRERKLVISVDRLDYSKGLVERFQAFERMLANAPGWQGRVSLVQIAPPTRSDVQTYQRIRQTLEGEAGRINGRFAQLDWTPIQYLNRKYERNLLMALFRLSQVGYVTPLRDGMNLVAKEYVASQDPNDPGVLVLSEFAGAAAELPGALLVNPFDLSQMAESLERALAMPLEERQARHAENIARLRKNDLSVWRDSFLTDLRSVATAASVTQRAGRRVANA

SEQ ID NO: 2734 - protein, 412 aa, Zea mays
  misc_feature (124)..(124): Xaa can be any naturally occurring amino acid
  misc_feature (158)..(158): Xaa can be any naturally occurring amino acid
  misc_feature (186)..(186): Xaa can be any naturally occurring amino acid
MESFGVPPAPVAAPEKRKKPLDLKDPVPAAAAAAANGGGATKASPAAKWAEKKKLVGGDARYVLEDVPHLTDYLPQLPTYPNPLQDNPAYSVVKQYFVNPDDTVTQKIVVHKTSARGTHFRRAXPRQRVYFQPDEVNAAIVTCGGLCPGLNTVIRELXGGYKGFYSKNTVALTPKSVNDIHKRGGXTVLGTSRGGHDTAKIVDCLQDRGINQVYIIGGDGTQKGASVIYEEVRRRGLKCSVVGVPKTIDNDIAVIDKSFGFDTAVEEAQRAINAAHVEAESAENGIGVVKLMGRNSGFIAMYATLASRDVDCCLIPESPFYLEGKGGLLEFVERRLKDNGHMVIVVAEGAGQDLIARSMNFVDTQDASGNKLLLDVGLWLSQKIKVRLVVQTFCLIVNVGTETSFPIQLAML

SEQ ID NO: 2735 - protein, 867 aa, Arabidopsis thaliana
MVSRSCANFLDLASWDLLDFPQTQRALPRVMTVPGIISELDGGYSDGSSDVNSSNSSRERKIIVANMLPLQAKRDTETGQWCFSWDEDSLLLQLRDGFSSDTEFVYIGSLNADIGISEQEEVSHKLLLDFNCVPTFLPKEMQEKFYLGFCKHHLWPLFHYMLPMFPDHGDRFDRRLWQAYVSANKIFSDRVMEVINPEEDYVWIHDYHLMVLPTFLRKRFNRIKLGFFLHSPFPSSEIYRTLPVRDDLLRGLLNCDLIGFHTFDYARHFLSCCSRMLGLDYESKRGHIGLDYFGRTVFIKILPVGIHMGRLESVLNLPSTAAKMKEIQEQFKGKKLILGVDDMDIFKGISLKLIAMERLFETYWHMRGKLVLIQIVNPARATGKDVEEAKKETYSTAKRINERYGSAGYQPVILIDRLVPRYEKTAYYAMADCCLVNAVRDGMNLVPYKYIICRQGTPGMDKAMGISHDSARTSMLVVSEFIGCSPSLSGAIRVNPWDVDAVAEAVNLALTMGETEKRLRHEKHYHYVSTHDVGYWAKSFMQDLERACREHYNKRCWGIGFGLSFRVLSLSPSFRKLSIDHIVSTYRNTQRRAIFLDYDGTLVPESSIIKTPNAEVLSVLKSLCGDPKNTVFVVSGRGWESLSDWLSPCENLGIAAEHGYFIRWSSKKEWETCYSSAEAEWKTMVEPVMRSYMDATDGSTIEYKESALVWHHQDADPDFGACQAKELLDHLESVLANEPVVVKRGQHIVEVKPQGVSKGLAVEKVIHQMVEDGNPPDMVMCIGDDRSDEDMFESILSTVTNPDLPMPPEIFACTVGRKPSKAKYFLDDVSDVLKLLGGLAAATSSSKPEYQQQSSSLHTQVAFESII

SEQ ID NO: 2736 - protein, 908 aa, Monostroma angicava
MTPGPITTDAAAGVGVDTTDGTMKWELFEENRTLTTRSGQMIVNDGEFGKWNDTDEGRVKCFLTPDEGFGDAIESLVIVLYRLPIIAKRDATTGAWSFKWDDDALYLTSTGLRKGLEQLKVAPLWVGILNSDDEVPRQEREGVADRLLEEFNCVPVFIPHDTLKQFYQGFCKGTLWPLFHMVSSATDHTEHTTRFDDRLWRVYMNVNRMFRDKVVEVYDGDRALIWVHDYHLMLLPQASRSRLSGVKIGFFLHIPWPSSEVYRVLPWRNELLKGMLSATLLGFHLFDYARHFLSACVRLLNLEHEANRGSLGLEYDGRHVMLRVSHIGVDPERFSEGLSAPSLTDRVAEFKERFADCTVLGAVDDLDLIKGIALKLMGFQRYLDSAPKMRGKVVLVQVAIPKAARVKESVRNEIRELVAAINNKHGDGSGRRPVWYLEESISFESRLALYSIMDALVVTPIRDGLNLIPYEYIVSTSEGKGQLILSEFTGCSRALSSAERVNPWDLEKLSNVLDMVVQKAIAAAPEVELKRRADKAYVSAHSSQQWAQSFLHDLKEASEPAQVVVKVGPLAGLPGVLAYDEFTLLNRSAVLRAYKAAKRRLFLFDYDGTLTSITDQSSQMAHAWARPSEAVAANLDTLSKDPLNDVYIMSGRKTEVLEAGLNNSPTIGIAAEHGFFYRKKNSKEWNRLLEDADLSWMELALRIMLMYTDRTDGSYVEQKKAGLVWHYLDADREFGSWQAKEMRDHLESLLSPFSVQVVTGYGWLQVRMAAMNKGVMVETILRDMPEPPDFVLCCGDDRTDEDMFAYLDTHLDPSVKQFTCTVGVKPSHARYYLHSSNEVGALLETLVTGSYPRGVRPRPRGGSVSLADLVPDDEGSSSTPAVPQRTNGPRTSASGQKRRGLASSLPSQ

SEQ ID NO: 2737 - protein, 218 aa, Sisymbrium irio
MAAFEESTDLDAIQGHLFEDFMVSDGFMGDFDFNASFVSGLWCIEPVMNQVPKQEPDSPVLDPDSFVKEFLQVEAESSTSTGTTELNSSSQETDQSISTRKKSKRFEEQEEEEPRHYRGVRRRPWGKFAAEIRDPAKKGSRIWLGTFESDVDAARAYDCAAFKLRGRKAVLNFPLDAGKYEAPANSGRKRKRSDVQGELQRSQSNSSSSSSDGETTCE

SEQ ID NO: 2738 - protein, 856 aa, Arabidopsis thaliana; identical to SEQ ID NO: 2097

SEQ ID NO: 2739 - protein, 908 aa, Porphyra haitanensis
MTPGPITTDAAAGVGVDTTDGTMKWELFEENRTLTTRSGQMIVNDGEFGKWNDTDEGRVKCFLTPDEGFGDAIESLVIVLYRLPIIAKRDATTGAWSFKWDDDALYLTSTGLRKGLEQLKVAPLWVGILNSDDEVPRQEREGVADRLLEEFNCVPVFIPHDTLKQFYQGFCKGTLWPLFHMVSSATDHTEHTTRFDDRLWRVYMNVNRMFRDKVVEVYDGDRALIWVHDYHLMLLPQASRSRLSGVKIGFFLHIPWPSSEVYRVLPWRNELLKGMLSATLLGFHLFDYARHFLSACVRLLNLEHEANRGSLGLEYDGRHVMLRVSHIGVDPERFSEGLSAPSLTDRVAEFKERFADCTVLGAVDDLDLIKGIALKLMGFQRYLDSAPKMRGKVVLVQVAIPKAARVKESVRNEIRELVAAINDKHGDGSGRRPVWYLEESISFESRLALYSIMDALVVTPIRDGLNLIPYEYIVSTSEGKGQLVLSEFTGCSRALSSAVRVNPWDLEKLCGVLDMVVQKAIAASPEVELKRRADKAYVSAHSSQQWAQSFLHDLKEASEPAQVVVKVGPLAGLPGVLTYDEFTLLNRSAVLRAYKAAKRRLFLFDYDGTLTSITEQSSQMAHAWARPSEAVAANLDTLSKDPINDVYIMSGRKTEVLEAGLNNSPTIGIAAEHGFFYRKKNSKEWQRLLEDADLSWMELTLRIMLMYTDRTDGSYVEQKTAGIVWHYLDADREFGSWQAKELRDHLESLLTPFSVQVVSGYGWLQVRMAAMNKGVMVETILQDMPEPPDFVLCCGDDRTDEDMFTYLDTHLDPSVKQFTCTVGVKPSNARYYLHSSNEVGALLETLVTGSYPRGVRPRGRGASISLADLVPDDEGSSSTPPMPQRTNGPRTSASGQKRRGLASSLPSQ

SEQ ID NO: 2740 - protein, 908 aa, Gracilaria lemaneiformis
MTPGPITTDAAAGVGVDTTDGTMKWELFEENRTLTTRSGQMIVNDGEFGKWNDTDEGRVKCFLTPDEGFGDAIESLVIVLYRLPIIAKRDATTGAWSFKWDDDALYLTSTGLRKGLEQLKVAPLWVGILNSDDEVPRQEREGVADRLLEEFNCVPVFIPHDTLKQFYQGFCKGTLWPLFHMVSSATDHTEHTTRFDDRLWRVYMNVNRMFRDKVVEVYDGDRALIWVHDYHLMLLPQASRSRLSGVKIGFFLHIPWPSSEVYRVLPWRNELLKGMLSATLLGFHLFDYARHFLSACVRLLNLEHEANRGSLGLEYDGRHVMLRVSHIGVDPERFSEGLSAPSLTDRVAEFKERFADCTVLGAVDDLDLIKGIALKLMGFQRYLDSAPKMRGKVVLVQVAIPKAARVKESVRNEIRELVAAINNKHGDGSGRRPVWYLEESISFESRLALYSIMDALVVTPIRDGLNLIPYEYIVSTSEGKGQLILSEFTGCSRALSSAERVNPWDLEKLSNVLDMVVQKAIAAAPEVELKRRADKAYVSAHSSQQWAQSFLHDLKEASEPAQVVVKVGPLAGLPGVLAYDEFTLLNRSAVLRAYKAAKRRLFLFDYDGTLTSITDQSSQMAHAWARPSEAVAANLDTLSKDPLNDVYIMSGRKTEVPEAGLNNSPTIGIAAEHGFFYRKKNSKEWNRLLEDADLSWMELALRIMLMYTDRTDGSYVEQKKAGLVWHYLDADREFGSWQAKEMRDHLESLLSPFSVQVVTGYGRLQVRMAAMNKGVMVETILRDMPEPPDFVLCCGDDRTDEDMFAYLDTHLDPSVKQFTCTVGVKPSHARYYLHSSNEVGALLETLVTGSYPRGVRPRPRGGSVSLADLVPDDEGSSSTPAVPQRTNGPRTSASGQKRRGLASSLPSQ

SEQ ID NO: 2741 - protein, 443 aa, Bradyrhizobium sp. ORS278
MRDGAQAEPIAQIEQLGQGALALLDLPAAHYAGYYEGFANSALWPALHSRSDLIRVSQDDYNSYREVNSFVARALLKFQKQDTLFWIQDYHFLSLGAELRTLGVKSPIGFFLHTPWPARSVIDSVPNHRDLVTAMLAYDLIGFQTEDDRENFAACVRADLGLQVRNGVVTSRHGRTRLAVFPIGIDADKFAQQAAKAASHPDVSRLRRSLHGEKLAIGVDRLDYSKGLVNRINAFDRMWSVHPTLLRAASLLQIATPSRESIEAYGNLQSEVARLVSEVNGRHGEVDWTPIRYLNKGYGQGVLAGLYRSAQVGVVTPLHDGMNLVAKEYVAAQSPVDPGVLVLSKFAGAANELDAALLVNPHDIDGMARTIAMALSMPLNERRMRHQILMTKLRRHSIQQWFADFLDALQDDGAHEPVEVEPLPAASAGLLGSRFMSSTARYH

SEQ ID NO: 2742 - protein, 908 aa, Chondrus ocellatus
MTPGPITTDAAAGVGVDTTDGTMKWELFEENRTLTTRSGQMIVNDGEFGKWNDTDEGRVKCFLTPDEGFGDAIESLVIVLYRLPIIAKRDATTGAWSFKWDDDALYLTSTGLRKGLEQLKVAPLWVGILNSDDEVPRQEREGVADRLLEEFNCVPVFIPHDTLKQFYQGFCKGTLWPLFHMVSSATDHTEHTTRFDDRLWRVYMNVNRMFRDKVVEVYDGDRALIWVHDYHLMLLPQASRSRLSGVKIGFFLHIPWPSSEVYRVLPWRNELLKGMLSATLLGFHLFDYARHFLSACVRLLNLEHEANRGSLGLEYDGRHVMLRVSHIGVDPERFSEGLSAPSLTDRVAEFKERFADCTVLGAVDDLDLIKGIALKLMGFQRYLDSAPKMRGKVVLVQVAIPKAARVKESVRNEIRELVAAINNKHGDGSGRRPVWYLEESISFESRLALYSIMDALVVTPIRDGLNLIPYEYIVSTSEGKGQLILSEFTGCSRALSSAERVNPWDLEKLSNVLDMVVQKAIAAAPEVELKRRADKAYVSAHSSQQWAQSFLHDLKEASEPAQVVVKVGPLAGLPGVLAYDEFTLLNRSAVLRAYKAAKRRLFLFDYDGTLTSITDQSPQMAHAWARPSEAVAANLDTLSKDPLNDVYIMSGRKTEVLEAGLNNSPTIGIAAEHGFFYRKKNSKEWNRLLEDADLSWMELALRIMLMYTDRTDGSYVEQKKAGLVWHYLDADREFGSWQAKEMRDHLESLLSPFSVQVVTGYGWLQVRMAAMNKGVMVETILRDMPEPPDFVLCCGDDRTDEDMFAYLDTHLDPSVKQFTCTVGVKPSHARYYLHSSNEVGALLETLVTGSYPRGVRPRPRGGSVSLADLVPDDEGSSSTPAVPQRTNGPRTSASCQKRRGLASSLPSQ

SEQ ID NO: 2743 - protein, 801 aa, Oryza sativa
  misc_feature (10)..(10): Xaa can be any naturally occurring amino acid
  misc_feature (295)..(295): Xaa can be any naturally occurring amino acid
SGEASLRLPXRVMSAASPASPTSPSTPAPARRVVVSHRLPLRAAADAASPFGFSFTVDSDAVAYQLRSGLPPGAPVLHIGTLPPPATEAASDELCNYLLANFSCLPVYLPADLHRRFYHGFCKHYLWPLLHYLLPLTPSSLGGLPFDRALYHSFLSANRAFADRLTEVLSPDDDLVWIHDYHLLALPTFLRKRFPRAKVGFFLHSPFPSSEIFRTIPVREDLLRALLNADLVGFHTFDYARHFLSACSRLLGLDYQSKRGYIGIEYYGRTVTVKILPVGIDMGQLRSVVSAPETXGDLVRRLTESYKGRRLMVGVDDVDLFKGIGLKFLAMEQLLVEHPELRGRAVLVQIANPARSEGRDIQEVQGEARAISARVNARFGTPGYTPIVLIDRGVSVHEKAAYYAAAECCVVSAVRDGLNRIPYIYTVCRQESTGLDDAAKRSVIVLSEFVGCSPSLSGAIRVNPWSVESMAEAMNAALRMPEPEQRLRHEKHYKYVSTHDVAYWAKSFDQDLQRACKDHFSRRHWGIGFGMSFKVVALGPNFRRLSVDHIVPSYRKSDNRLILLDYDGTVMPEGSIDKAPSNEVISVLNRLCEDPKNRVFIVSGRGKDELGRWFAPCEKLGIAAEHGYFTRWSRDSAWETCGLAVDFDWKKTAEPVMRLYKEATDGSTIEDKESALVWHHDEADPDFGSCQAKELLDHLENVLANEPVVVKRGQHIVEVNPQGISKGVVVDNLLSSMVSRGKAPDFVLCIGDDRSDEDMFESIVCPSNSSVKLPARQRGVRLHGRPRSRAWPSTTSTTRST

SEQ ID NO: 2744 - protein, 1527 aa, Rhodococcus sp. RHA1; identical to SEQ ID NO: 757

SEQ ID NO: 2745 - protein, 1535 aa, Colwellia psychrerythraea 34H; identical to SEQ ID NO: 759

SEQ ID NO: 2746 - protein, 84 aa, Melampsora medusae f. sp. deltoidis
YHKMKGDYHRYLAEFASGDGRKTASEAAHESYKQATEIAQSDLAPTHPIRLGLALNFSVFYYEILNSPDRACHLAKQAFDDAIA

SEQ ID NO: 2747 - protein, 750 aa, Oryza sativa Japonica Group
MPSLSCHNLLDLVAAADDAAPSPASLRLPRVMSAASPASPTSPSTPAPARRVVVSHRLPLRAAADAASPFGFSFTVDSDAVAYQLRSGLPPGAPVLHIGTLPPPATEAASDELCNYLLANFSCLPVYLPADLHRRFYHGFCKHYLWPLLHYLLPLTPSSLGGLPFDRALYHSFLSANRAFADRLTEVLSPDDDLVWIHDYHLLALPTFLRKRFPRAKVGFFLHSPFPSSEIFRTIPVREDLLRALLNADLVGFHTFDYARHFLSACSRLLGLDYQSKRGYIGIEYYGRTVTVKILPVGIDMGQLRSVVSAPETGDLVRRLTESYKGRRLMVGVDDVDLFKGIGLKFLAMEQLLVEHPELRGRAVLVQIANPARSEGRDIQEVQGEARAISARVNARFGTPGYTPIVLIDRGVSVHEKAAYYAAAECCVVSAVRDGLNRIPYIYTVCRQESTGLDDAAKRSVIVLSEFVGCSPSLSGAIRVNPWSVESMAEAMNAALRMPEPEQRLRHEKHYKYVSTHDVAYWAKSFDQDLQRACKDHFSRRHWGIGFGMSFKVVALGPNFRRLSVDHIVPSYRKSDNRLILLDYDGTVMPEGSIDKAPSNEVISVLNRLCEDPKNRVFIVSGRGKDELGRWFAPCEKLGIAAEHGYFTRWSRDSAWETCGLAVDFDWKKTAEPVMRLYKEATDGSTIEDKESALVWHHDEADPDFGSCQAKELLDHLENVLANEPVVVKRGQHIVEVNPQVSACHLPSFL

SEQ ID NO: 2748 - protein, 224 aa, Melampsora medusae f. sp. deltoidis
KLAEQAERYDEMVTFMKDVAKLGVELSVEERNLLSVAYKNVIGARRASWRIISSIEQKEDTKGNELHVGKIKEYRSKVEAELAEVCNDILAVLDQHLIPSAEAGESKVFYHKMKGDYHRYLAEFASGDGRKTASEAAHESYKQATEIAQSDLAPTHPIRLGLALNFSVFYYEILNSPDRACHLAKQAFDDAIAELDTLSEESYKDSTLIMQLLRDNLTLWTSDL

SEQ ID NO: 2749 - protein, 222 aa, Melampsora medusae f. sp. deltoidis
KLAEQAERYDEMVTFMKDVAKLGVELSVEERNLLSVAYKNVIGARRASWRIISSIEQKEDTKGNELHVGKIKEYRSKVEAELAEVCNDILAVLDQHLIPSAEAGESKVFYHKMKGDYHRYLAEFASGDGRKTASEAAHESYKQATEIAQSDLAPTHPIRLGLALNFSVFYYEILNSPDRACHLAKQAFDDAIAELDTLSEESYKDSTLIMQLLRDNLTLWTS

SEQ ID NO: 2750 - protein, 242 aa, Melampsora medusae f. sp. deltoidis
LGVELSVEERNLLSVAYKNVIGARRASWRIISSIEQKEDTKGNELHVGKIKEYRSKVEAELAEVCNDILAVLDQHLIPSAEAGESKVFYHKMKGDYHRYLAEFASGDGRKTASEAAHESYKQATEIAQSDLAPTHPIRLGLALNFSVFYYEILNSPDRACHLAKQAFDDAIAELDTLSEESYKDSTLIMQLLRDNLTLWTSDLHDAEDKPAEAAAAQPEAAAEAAPEAELLPQKPPRKRKTQ

SEQ ID NO: 2751 - protein, 1506 aa, Gluconobacter oxydans 621H; identical to SEQ ID NO: 769

SEQ ID NO: 2752 - protein, 293 aa, Arabidopsis thaliana
FRVVALDPNFRKLSIPCIVSDYKRAKSRAILLDYDGTLMPQNSINKAPSQEVLNFLDALCEDKKNSIFIVSGRGRESLSKWFTPCKKIGIAAEHGYFLKWSGSEEWETCGQSSDFGWMQIVEPVMKQYTESTDGSSIEIKESALVWQYRDADPGFGSLQAKEMLEHLESVLANEPVAVKSGHYIVEVKPQGVSKGSVSEKIFSSMAGKGKPVDFVLCIGDDRSDEDMFEAIGNAMSKRLLCDNALVFACTVGQKPSKAKYYLDDTTEVTCMLESLAEASEASNFSMRELDEAL

SEQ ID NO: 2753 - protein, 927 aa, Vitis vinifera
MPGNKYNGISSVPTSRVERLLRDRELRKSSRASHPNEANDTNRGTEVLEHEGDNLGSSHVEQHSETAAIRGVLSEECEKQETRPARQRLLVVANRLPVSAIRRGEESWSLEISAGGLVSALLGVKEFEARWIGWAGVNVPDEAGQRALTKALAEKMCIPVFLDEDIVHQYYNGYCNNILWPLFHYLGLPQEDRLATTRSFQSQFAAYKKANQMFADVVNKHYEEGDVVWCHDYHLMFLPKCLKKYNSEMKVGWFLHTPFPSSEIHRTLPSRSELLHSVLAADLVGFHTYDYARHFVSACTRILGLEGTPEGVEDQGRLTRVAAFPIGIDSHRFIRALDAPQVQDRINELKRTFTGRKVMLGVDRLDMIKGIPQKILAFEKFLEENSEWQQKVVLLQIAVPTRTDVPEYQKLTSQVHEIVGRINGRFGTLTAVPIHHLDRSLDFYALCALYAVTDVALVTSLRDGMNLVSYEFVACQESKKGVLILSEFAGAAQSLGAGAILVNPWNITEVASSIAQALNMPPEEREKRHEHNFEHVKNHTAQEWAETFVSELNDTVVEADLRKRKVPPRLTPENAIKCYLQSNNRLLILGFNVTLTEPVDTPGSRGGDQIKEMDLKLHPELKGPLTALGNDPKTTIVVLSGSDRTVLDDNFGEFDMWLAAENGMFLRHTKGEWMTTMPEHLNMEWVDSVKHVFEYFTERTPRSQLQKRETSLVWNYKYADAEFGKLQARDMLQHLWTGPISNASVDVVQGSRSVEVRAVGVTKGAAIDRILGEIVHNKSMTSPIDYVLCAGHFLGKDEDVYTFFEPELPSDNISMAKSRAIDAFKLSGERKSSLKLPANKSGSKSSHGKTQRPLPNPDKKTPDHSSGSGSGRRPSPEKTSWNVLDLKGENYFSCAVGRTRTKARFTFGSSDEVVSFLKELAGAKSSF

SEQ ID NO: 2754 - protein, 417 aa, Methanosarcina mazei Go1
MVDTSDMLVFWAVVIARFLIPLTIPRYPLPGVLACLILDGIDQTIFQLFTNLPLEGYQSYDKSLDIYYLTITYLSTLRNWSNLYAFKLDRFLFYYRLVGVAIFEFTQLRSMLLVFPNTFEYFFIFYEAIRLKWDPEVLTKSKLITAAALIWVFIKIPQEYWIHVAQLDTTDWIRANPSNAFILIAYAIFLLGMAWWLVRDLPPMRPGLEISADPFQPASEKLPGKKTKINFPVIDSSERFFNNALVEKILLVSLLGIIFAQVLPDVRSSNFQLAIGTAIIIIINTALSHWLARRGTHWKSIIREFIVMSLVNLGIVLAFDFLLPRYNGSINLFNTLFFILLLTLNITLYDRYRVLHARNTNNNNNNNSNNNNNNNNNNNNNNNNNNNNNSNNSNSNNNNNNNNNNNNNNNNNNNKGS

SEQ ID NO: 2755 - protein, 908 aa, Ulva pertusa
MTPGPITTDAAAGVGVDTMDGTMKWELFEENRTLTTRSGQMIVNDGEFGKWNDTDEGRVKCFLTPDEGFGDAIESLVIVLYRLPIIAKRDATTGAWSFKWDDDALYLTSTGLRKGLEQLKVAPLWVGILNSDDEVPRQEREGVADRLLEEFNCVPVFIPHDTLKQFYQGFCKGTLWPLFHMVSSATDHTEHTTRFDDRLWRVYMNVNRMFRDKVVEVYDGDRALIWVHDYHLMLLPQASRSRLSGVKIGFFLHIPWPSSEVYRVLPWRNELLKGMLSATLLGFHLFDYARHFLSACVRLLNLEHEANRGSLGLEYDGRHVMLRVSHIGVDPERFSEGLSAPSLTDRVAEFKERFADCTVLGAVDDLDLIKGIALKLMGFQRYLDTAPKMRGKVVLVQVAIPKAARVKAAVRNEIRELVAAINDKHGDGSGRRPVWYLEESISFESRLALYSIMDALVVTPIRDGLNLIPYEYIVSTSEGKGQLVLSEFTGCSRALSSAVRVNPWDLEKLCGVLGMVVQKAIAASPEVELKRRADKAYVSARSSQQWAQSFLHDLKEASEPAQVVVKVGPLAGLPGVLTYDEFTLLNRSAVLRAYKAAKRRLFLFDYDGTLTSITEQSSQMAHAWARPSEAVAANLDTLSKDPINDVYIMSGRKTEVLEAGLNNSPTIGIAAEHGFFYRKKNSKEWNRLLEDADLSWMELALRIMLMYTDRTDGSYVEQKKAGLVWHYLDADREFGSWQAKEMRDHLESLLSPFSVQVVTGYGWLQVRMAAMNKGVMVETILRDMPEPPDFVLCCGDDRTDEDMFAYLDTHLDPSVKQFTCTVGVKPSHARYYLHSSNEVGALLETLVTGSYPRGVRPRPRGGSVSLADLVPDDEGSSSTPAVPQRTNGPRTSASGQKRRGLASSLPSQ

SEQ ID NO: 2756 - protein, 115 aa, Glycine max
CSLSNQTIIYKGMLRSEVLGLFYSDLQNDLYKSPFAIYHRRYSTNTSPRWPLAQPMRLLGHNGEINTIQGNLNWMQSREPSLKSPVWRGRENEIRPFGNPKGSNSTNLDSASELL

SEQ ID NO: 2757 - protein, 908 aa, Ulva prolifera
MTPGPITTDAAAGVGVDTTDGTMKWELFEENRTLTTRSGQMIVNDGEFGKWNDTDEGRVKCFLTPDEGFGDAIESLVIVLYRLPIIAKRDATTGAWSFKWDDDALYLTSTGLRKGLEQLKVAPLWVGILNSDDEVPRQEREGVADRLLEEFNCVPVFIPHDTLKQFYQGFCKGTLWPLFHMVSSATDHTEHTTRFDDRLWRVYMNVNRMFRDKVVEVYDGDRALIWVHDYHLMLLPQASRSRLSGVKIGFFLHIPWPSSEVYRVLPWRNELLKGMLSATLLGFHLFDYARHFLSACVRLLNLEHEANRGSLGLEYDGRHVMLRVSHIGVDPERFSEGLSAPSLTDRVAEFKERFADCTVLGAVDDLDLIKGIALKLMGFQRYLDSAPKMRGKVVLVQVAIPKAARVKESVRNEIRELVAAINNKHGDGSGRRPVWYLEESISFESRLALYSIMDALVVTPIRDGLNLIPYEYIVSTSEGKGQLILSEFTGCSRALSSAERVNPWDLEKLSNVLDMVVQKAIAAAPEVELKRRADKAYVSAHSSQQWAQSFLHDLKEASEPAQVVVKVGPLAGLPGVLAYDEFTLLNRSAVLRAYKAAKRRLFLFDYDGTLTSITDQSSQMAHAWARPSEAVAANLDTLSKDPLNDVYIMSGRKTEVLEAGLNNSPTIGIAAEHGFFYRKKNSKEWNRLLEDADLSWMELALRIMLMYTDRTDGPYVEQKKAGLVWHYLDADREFGSWQAKEMRDHLESLLSPFSVQVVTGYGWLQVRMAAMNKGVMVETILRDMPEPPDFVLCCGDDRTDEDMFAYLDTHLDPSVKQFTCTVGVKPSHARYYLHSSNEVGALLETLVTGSYPRGVRPRPRGGSVSLADLVPDDEGSSSTPAVPQRTNGPRTSASGQKRRGLASSLPSQ

SEQ ID NO: 2758 - protein, 1531 aa, Mycobacterium abscessus; identical to SEQ ID NO: 786

SEQ ID NO: 2759 - protein, 239 aa, Melampsora medusae f. sp. deltoidis
LGVELSVEERNLLSVAYKNVIGARRASWRIISSIEQKEDTKGNELHVGKIKEYRSKVEAELAEVCNDILAVLDQHLIPSAEAGESKVFYHKMKGDYHRYLAEFASGDGRKTASEAAHESYKQATEIAQSDLAPTHPIRLGLALNFSVFYYEILNSPDRACHLAKQAFDDAIAELDTLSEESYKDSTLIMQLLRDNLTLWTSDLHDAEDKPAEAAAAQPEAAAEAAPEAEAAAPEAATEA

SEQ ID NO: 2760 - protein, 302 aa, Oryza sativa; identical to SEQ ID NO: 2184

SEQ ID NO: 2761 - protein, 504 aa, Aspergillus nidulans FGSC A4
MPGVEKSSQNESRLLLVSNRLPITIKRSEDGKYDFSMSSGGLVSGLSGLSKTTTFQWYGWPGLEVPEEEIPTLKNRLKEEYNAIPVFIDDELADRHYNGFSNSILWPLFHYHPGEITFDESAWEAYKEANRLFAQAVASQVQDGDLIWVHDYHLMLLPEMLREEIGNTKKNIKIGFFLHTPFPSSEIYRILPVRNELLLGLLHCDLIGFHTYDYTRHFLSACSRLLGLPTTPNGIEFQGKIIACGAFPIGIDPEKFKEGLKKEKVQKRIATLEQKFQGVKLMVGVDRLDYIKGVPQKLHALEVFLSDHPEWVGKVVLVQVAVPSRQDVEEYQNLRAVVNELVGRINGKFGTVEFMPIHFLHKSVNFDELIALYAVSDACVVSSTRDGMNLVSYEYIATQEKRHGSLVLSEFAGAAQSLNGSIIVNPWNTEELAAAYHEAVTMSDEQRALNFSKLDKYVNKYTSAFWGQSFVTELTRISEQAAGKLPTKETPVNGETSKLETSSQ

SEQ ID NO: 2762 - protein, 265 aa, Paracoccidioides brasiliensis
MGYEDAVYLAKLAEQAERYEEMVENMKIVASADKELSVEERNLLSVAYKNVIGARRASWRIVTSIEQKEESKGNEAQVALIKEYRQNIETELAKICEDILDVLDKHLIASAETGESKVFYHKMKGDYHRYLAEFALGDKRKDSADKSLEAYKNATEVAQTDLAPTHPIRLGLALNFSVFYYEILNSPDQACHLAKQAFDDAIAELDTLSEESYKDSTLIMQLLRDNLTLWTSSEAEPAPEVAPAPSEQKDEAPAATSEDAPKAAE

SEQ ID NO: 2763 - protein, 721 aa, Triticum aestivum
  misc_feature (340)..(340): Xaa can be any naturally occurring amino acid
TSKHYMWPLLHYLLPLTPSTLGGLPFDRALYHSFLSANRAFADRLTEVLAPDDDFVWIQDYHLLALPTFLRKRFPRARVGFFLHSPFPSSEIFRTIPVRDDLLRALLNADLVGFHTFDYARHFLSACSRLLGLDYQSKRGYIGIEYYGRTVTVKILPVGIDMGQLRSVVSAPETADVVRQVADAYKGRRLMLGVDDVDLFKGIGLKFLGMEQLLVENPELRGKAVLVQITNPARSEGRDVQEVQDEARAISARVNERFGTPGYTPIVMISRPVSEHEKAAYYAAAECCVVSAVRDGLNRIPYIYTVCRQESTALGDAPKRSVIVLSEFVGCSPSLSGAIXRVNPWSVESVAEAMSSALRMSDGEQRLRHEKHYKYVSTHDVAYWARSFDQDLQRACKDHFSWRHWGIGFGMSFKVVALGPNFRRLSVEHIVPSFRKTENRLILLDYDGTVMPESSIDKAPSSEVISVLNRLCEDPKNRVFIVSGRGKDELSKWFAPCEKLGIAAEHGYFTRWSKESPWETCGLVADFDWKKTAEPVMRLYTEATDGSYIEHKESALVWHHDEADPDFGSCQAKELLDHLESVLANEPVVVKRGQHIVEVNPQGISKGVVVESLLSSMVRGGKAPDFVLCIGDDRSDEDMFESIVCPANGSVKLPATSEVFALHRGEEAEHGQVLPGRHGGRDQDAAGARERAVAAAAVARAAPGHLRGRKRSMNKPRRRCQ

SEQ ID NO: 2764 - protein, 260 aa, Brassica napus
MAVSAREEFVYMAKLAEQAERYEEMVEFMEKVSAAVDGDELTVEERNLLSVAYKNVIGARRASWRIISSIEQKEESRGNDDHVTAIRDYRSKIETELSGICDGILKLLDSRLVPAAASGDSKVFYLKMKGDYHRYLAEFKTGQERKDAAENTLSAYKAAQDIANAELAPTHPIRLGLALNFSVFYYEILNSPDRACSLAKQAFDDAIAELDTLGEGSYKDSTLIMQLLRDNLTLWTSDMQDDAADEIKEASAPKPTEEQQ

SEQ ID NO: 2765 - protein, 266 aa, Zea mays
MSPSEPTREESVYMAKLAEQAERYEEMVEFMERVARSAGGAGGGEELSVEERNLLSVAYKNVIGARRASWRIISSIEQKEEGRGNEAHAASIRTYRSKIETELARICDGILALLDSHLVPSAGGAESKVFYLKMKGDYHRYLAEFKSGAERKDAAESTMNAYKAAQDIALADLAPTHPIRLGLALNFSVFYYEILNSPDRACNLAKQAFDEAISELDSLGEESYKDSTLIMQLLRDNLTLWTSDTNEDGGDEIKDAAAPKESAEGQ

SEQ ID NO: 2766 - protein, 207 aa, Arabidopsis arenosa
MASFEESSDLEAIQSHLFEDLLACDGFMGDFDFDASFVSGLWCIESQVPKQEPDSPVLDPDSFVNEFLQVEGESSSSSSPELNSSSSTYETDQSVKKAERFEEEEEARHYRGVRRRPWGKFAAEIRDPAKKGSRIWLGTFESDVDAARAYDCAAFKLRGRKAVLNFPLDAGKYEAPANSGRKRKRSDVQEELQRTQSNSSSSSCDAF

SEQ ID NO: 2767 - protein, 592 aa, Petunia x hybrida
MMRIAVRYCLNGNPFFSFFAYSIAPRHYSTNTCSISVKGNFGVSNEFENVKCLDDAFSLFRQMVTTKPLPSAVSFSKLLKALVHMKHYSSVVSIFREIHKLRIPVDAFALSTVVNSCCLMHRTDLGFSVLAIHFKKGIPYNEVTFTTLIRGLFAENKVKDAVHLFKKLVRENICEPDEVMYGTVMDGLCKKGHTQKAFDLLRLMEQGITKPDTCIYNIVIDAFCKDGMLDGATSLLNEMKQKNIPPDIITYTSLIDGLGKLSQWEKVRTLFLEMIHLNIYPDVCTFNSVIDGLCKEGKVEDAEEIMTYMIEKGVEPNEITYNVVMDGYCLRGQMGRARRIFDSMIDKGIEPDIISYTALINGYVEKKKMDKAMQLFREISQNGLKPSIVTCSVLLRGLFEVGRTECAKIFFDEMQAAGHIPNLYTHCTLLGGYFKNGLVEEAMSHFHKLERRREDTNIQIYTAVINGLCKNGKLDKAHATFEKLPLIGLHPDVITYTAMISGYCQEGLLDEAKDMLRKMEDNGCLPDNRTYNVIVRGFFRSSKVSEMKAFLKEIAGKSFSFEAATVELLMDIIAEDPSLLNMIPEFHRDNKK

SEQ ID NO: 2768 - protein, 591 aa, Petunia x hybrida
MMRISVRYCLNGNPFFSFFAYSIAPRHYSTNTCSISVKGNFGVSNEFQNVKCLDDAFSLFRQMVRTKPLPSVASFSKLLKAMVHMKHYSSVVSLFREIHKLRIPVHEFILSIVVNSCCLMHRTDLGFSVLAIHFKKGIPYNEVTFTTLIRGLFAENKVKDAVHLFKKLVRENICEPNEVMYGTVMNGLCKKGHTQKAFDLLRLMEQGSTKPNTRTYTIVIDAFCKDGMLDGATSLLNEMKQKSIPPDIFTYSTLIDALCKLSQWENVRTLFLEMIHLNIYPNVCTFNSVIDGLCKEGKVEDAEEIMRYMIEKGVDPDVITYNMIIDGYGLRGQVDRAREIFDSMINKSIEPDIISYNILINGYARQKKIDEAMQVCREISQKGLKPSIVTCNVLLHGLFELGRTKSAQNFFDEMLSAGHIPDLYTHCTLLGGYFKNGLVEEAMSHFHKLERRREDTNIQIYTAVIDGLCKNGKLDKAHATFEKLPLIGLHPDVITYTAMISGYCQEGLLDEAKDMLRKMEDNGCLADNRTYNVIVRGFLRSNKVSEMKAFLEEIAGKSFSFEAATVELLMDIIAEDPSITRKMHWIKLHIA

SEQ ID NO: 2769 - protein, 1575 aa, Rhodopseudomonas palustris CGA009; identical to SEQ ID NO: 812

SEQ ID NO: 2770 - protein, 750 aa, Oryza sativa
MPSLSCHNLLDLVAAADDAAPSPASLRLPRVMSAASPASPTSPSTPAPARRVVVSHRLPLRAAADAASPFGFSFTVDSDAVAYQLRSGLPPGAPVLHIGTLPPPATEAASDELCNYLLANFSCLPVYLPADLHRRFYHGFCKHYLWPLLHYLLPLTPSSLGGLPFDRALYHSFLSANRAFADRLTEVLSPDDDLVWIHDYHLLALPTFLRKRFPRAKVGFFLHSPFPSSEIFRTIPVREDLLRALLNADLVGFHTFDYARHFLSACSRLLGLDYQSKRGYIGIEYYGRTVTVKILPVGIDMGQLRSVVSAPETGDLVRRLTESYKGRRLMVGVDDVDLFKGIGLKFLAMEQLLVEHPELRGRAVLVQIANPARSEGRDIQEVQGEARAISARVNARFGTPGYTPIVLIDRGVSVHEKAAYYAAAECCVVSAVRDGLNRIPYIYTVCRQESTGLDDAAKRSVIVLSEFVGCSPSLSGAIRVNPWSVESMAEAMNAALRMPEPEQRLRHEKHYKYVSTHDVAYWAKSFDQDLQRACKDHFSRRHWGIGFGMSFKVVALGPNFRRLSVDHIVPSYRKSDNRLILLDYDGTVMPEGSIDKAPSNEVISVLNRLCEDPKNRVFIVSGRGKDELGRWFAPCEKLGIAAEHGYFTRWSRDSAWETCGLAVDFDWKKTAEPVMRLYKEATDGSTIEDKESALVWHHDEADPDFGSCQAKELLDHLENVLANEPVVVKRGQHIVEVNPQVAACHLPSFL

SEQ ID NO: 2771 - protein, 544 aa, Desulfovibrio vulgaris subsp. vulgaris str. Hildenborough; identical to SEQ ID NO: 814

SEQ ID NO: 2772 - protein, 213 aa, Arabidopsis thaliana
  misc_feature (65)..(65): Xaa can be any naturally occurring amino acid
TRPMEVINPEDDYVWIQDYHLMVLPTFLRKRFNRIKLGFFLHSPFPSSEIYRTLPVRDEILRGLXYIKILPVGVHMGRLESVLSLDSTAAKTKEIQEQFKGKKLVLGIDDMDIFKGISLKLIAMEHLFETYWHLKGKVVLVQIVNPARSSGKDVEEAKRETYETARRINERYGTSDYKPIVLIDRLVPRSEKTAYYAAADCCLVNAVRDGMNL

SEQ ID NO: 2773 - protein, 1142 aa, Sorghum bicolor
MDMERGAGSEQGSPDSEMGDGDNDSVGYGAEMEVDAGSGSAGASAPASSASASASVSASAYAARAGAYDGVDPFEGMEFDDEEDAWTFYNVYAHRVGFSTRISVMHRSRRDGSVMSRQFVCAKEGFRTYRGKNEVSRADAVDPGDDDGGRGRRTRAVTRVGCKAMIRVKKQDNGRWSVTKLETAHNHPLVPANQAHCLRPHKPLSECGKQRPFGGHRNGGSLLAIEPPPPPLTPPVPHTSIPQVVPQYVSDGIGNGTRVILDYVKRMQAEDPAFFYAMQFVEGRPVGNVFWADARARTAYKDFGDAVVLDDYCKRSKHELPLVAFTGVNHHCQPVLFGCAIMAHNNEASFIWLFETFLLAMSGQQPTSLTMEHDNALKSAALKVFPLTRLQFCKWHIMNEAQDKLSYLLDAFPSFHEDFINCVNMSDTINEFETNWKALISKVSSQKTEWLDLVYNCRHQWVPVYLRDTFFGDVSLKLQCSSRSSLFEGYISAKTDSQSFIQQYEKALDCCYEKEVKEEFETKYSLPDIKTPSPIEKQGAELYTRSMFLKFQQELIDASVYTAEMVKEVGNASVYTVTRSEGSEKSVTVEFSSSGSSATCSCRMFEYFGIVCRHILTVFGVRGVSALPSHYFVKRWTKNALDRSSGKNVDEVSRVEEPKEEQRSSAEDDEQSLTWRYNSLCREALRYAEEGASSLEVYIVAMQALQEAANRVNMAKRGIGQVAPLAVMPIAAQPPESFARNQGIISNKQKKRKRNSNSSRENATSNQLMYVQQPVNFLFVAPGPGSSSALQGPSQLVAAAPVSLSSKYGQTSGANNSVDDNIPPASVVDKFSGLPDRNASAPSTGLLWQIQIKWALGGFGIFYQDISAYQLFLGYVECENYGILTTFNYRAGISEMLHAIYCSCSTSLSFTLGCIVQSNILSLVLCDKSHELSQANGSRGCSVNTLNSSAVPQLVTVPIGLCLPSTDASKISAAGMNSVNSGDISSNGKLSFGQSQSSAQQPATPSQTKTLDRIDSRANPEGSSIRAAAIAAGARIASPSDAATIIKAAQSKGAIHIRPGENLPNYLKPLAPKPLSSLPPVNPLSSAHASPGQHSFGDSAAAKDAIFGSSDGSDDDEEDTDDEEDTDDDEDEGLTGDDAEHE

SEQ ID NO: 2774 - protein, 1580 aa, Polaromonas sp. JS666; identical to SEQ ID NO: 824

SEQ ID NO: 2775 - protein, 268 aa, Arabidopsis thaliana; identical to SEQ ID NO: 2661

SEQ ID NO: 2776 - protein, 989 aa, Cryptococcus neoformans var. neoformans JEC21
MDSMHPDPTPDIPPSLPDLKAQVARLEASHKEKGLPLSGRIIHVMHHLPVEIVRIVPADALESAGSGFLSPPMTPEFKPEDAETTVESADAKWRIHARTAHPALVSGIKSLSETHDQLLVAWTGEVLIQPDNTQSPQQPSQATFSSIASNLLAPFSGGAGDATPQPQPPPQQGSLMVFGGEFNEADQKEIASELDRFAEAESKFDPTDKLKYVPVFLPPDVSKGHYEGFCKKTLWPLFHYLLWLDSTATVPSPDPSWLAYQKTNQMFAQRVAQIYKPGDLIICHDYHLLLAPKMIRESLGQVFHPNAGWGTAHPSPSLHHAQRKGFDWESNQQTPTPEKAKGEKIGAFMNHVGTALGNHLGTMEHGLQNEIMIGMFMHTPWPSSEIFRCLPKRREILDGMLGANLVSFQTYSYSRHFVSTCIRVCGYESTPGGVDANGQVTAVGYCPIGIDIKRVVHDRAQPGVLPKMQALRDLYKDKKIIVGREKLDVAKGVYNKLQAFEKFLQVYPEWRGKVVLIQVTTPALSESPKLERMTAELVSHINGTYGSLDFTPVHHYHQALEKDEYFGLLSCADLALITSLRDGMNTTSMEFILCQDKTSKSPLVLSEFMGTAPSFASALQINPHDLLGVAQAINKGLTMREEEKAERHANLLEGVLAHTSHTWAATILKQLLENVGGEHTAHHTPALDTAQFADAYKKANKRLLLFDYDGTLTPIVKVPAHAVPTERTRNAIAALCKDPKNIVYLISGRDGDFLEEHWGHLDRLGLSAEHGSFVKQPGEEDFINMTEALDMSWMSEVEEIFKYYTERTTGSTIEVKKASITWHYRNSDPDFGEFQCKQALDLLESSLAPRRPIEVLVGKKNLEVRPLAVNKGEIVRRLMYENPDVDLIFCAGDDKTDEDMFRALRTVFPPGGVVDNNPVVMKPPVAVTSALEPEEVAELPDVELSIRTKGVFATTVGPPAKRTLAGWHVTCPEEVVEALESLLEEIQVV

SEQ ID NO: 2777 - protein, 265 aa, Coccidioides immitis RS
MGIEDAVYLAKLAEQAERYEEMVQNMKVVASADKELSVEERNLLSVAYKNVIGARRASWRIVTSIEQKEESKGNEAQVTLIKEYRQKIESELAEICEDILDVLDKHLIPSAQSGESKVFYHKMKGDYHRYLAEFALGDRRKKSADNSLEAYKNATEVAQTDLAPTHPIRLGLALNFSVFYYEILNSPDQACHLAKQAFDDAIAELDTLSEESYKDSTLIMQLLRDNLTLWTSSEAEPAPESAAAPPAPAEQPKEGAPAEEPKAAE

SEQ ID NO: 2778 - protein, 2192 aa, Phaseolus vulgaris; identical to SEQ ID NO: 832

SEQ ID NO: 2779 - protein, 2196 aa, Phaseolus vulgaris; identical to SEQ ID NO: 835

SEQ ID NO: 2780 - protein, 727 aa, Schizosaccharomyces pombe
MNQANFLQELPNVLKRLETGLIIPQLKDILRVFGLRLSGTKAELITRIKQLIERIAIENNTTSWEALKKAIDGDVTSAVCILKYNTYQIYSAAAPIAPPSSASGNRSYSRPFAPVVHSRIRFRKSPFYDILEQFNAPFVVPACVGTRNTISFSFHVTPPALSKLLNDPKQYRVYLFSTPSETIGFGNCLMEFPTPQMELRINNQVAHANYRRLKGKPGTTNPADITDLVSKYAGPPGNNVVIYYMNSTKSYSVVVCFVKVYTIENLVDQIKSRKAESKEKIIERIKNDNQDADIIATSTDISLKCPLSFSRISLPVRSVFCKHIQCFDASAFLEMNKQTPSWMCPVCASHIQFSDLIIDGFMQHILESTPSNSETITVDPEGNWKLNTFDEPVESSEDEFVPKEKVIELSDGEGISTMANKSNDQPTRRASTHNSGPPAKRKRESLVIDLTISDDDENVATSTTESPSNATKENSLSRNVQSPNIDTAISNRSTNVRHGHPGFKDYTVENSPASRERSTSESAQSSVHMGYAGEGGLLSGALRAPSQQNNNNSNTQHSINLHTIVPSPYEPPLSVTPSTAITNLSIPESNRTNSSASSKSFTMNDLILPPLHLKNTTQTNNAHEDAQSSNLSQNHSLFYERIPQRPSYRIEKQNKGIYEDENEQSISAMPIPRAHPQLPKNLLSQTAGPLWDEQQDAQVDWNSELQSNNSYHNSGFEGTGNTFQSID

SEQ ID NO: 2781 - protein, 592 aa, Petunia x hybrida
MMRIAVRYCLNGNPFFSFFAYSIAPRHYSTNTRSISVKGNFGVSNEFENVKCLDDAFSLFRQMVRTKPLPSVVSFSKLLKALVHMKHYSSVVSLFREIHKLRIPVHEFILSIVVNSCCLMHRTDLGFSVLAIHFKKGIPFNQVIFNTLLRGLFAENKVKDAVHLFKKLVRENICEPNEVMYGTVMNGLCKKGHTQKAFDLLRLMEQGSTKPNTCIYSIVIDAFCKDGMLDGATSLLNEMKQKSIPPDIFTYSTLIDALCKLSQWENVRTLFLEMIHLNIYPNVCTFNSVIDGLCKEGKVEDAEEIMRYMIEKGVDPDVITYNMIIDGYGLRGQVDRAREIFDSMINKSIEPNIISYNILINGYARQKKIDEAMQVCREISQKGLKPSIVTCNVLLHGLFELGRTKSAQNFFDEMLSAGHIPDLYTHCTLLGGYFKNGLVEEAMSHFHKLERRREDTNIQIYTAVIDGLCKNGKLDKAHATFEKLPLIGLHPDVITYTAMISGYCQEGLLDEAKDMLRKMEDNGCLADNRTYNVIVRGFLRSNKVSEMKAFLEEIAGKSFSFEAATVELLMDIIAEDPSLLNMIPEFHRDNKK

SEQ ID NO: 2782 - protein, 380 aa, Populus tremula x Populus alba
MCGGAIISGFIAPTTTARSSRRLTSGFEWLEPKKPFNNKHLKPVVADPEDDFEADLQEFKDESDVDEDYDVFADAKPFAFSASASEPAKKRGLPRGSTAVKSAGFSGLAKNSAKRKRKNQFRGIRQRPWGKWAAEIRDPRKGVRVWLGTFNTAEEAARAYDSEARRIRGKKAKVNFPDEAPCASARHPIKENSQKRLTKANLSQDFSYLSNPETDYNNMGFVEEKPQVSQFGIMNSIPVNGDSGVTPLTPSDNASMYFNSDKGSNSFDCDFGWGEQGAEILSVLAATPEVDESVFVEANPKKLKSYTEYAVPVEERNGKSLSEELLAFDNQLMNLQMPDLVGNWEASLDSFLNGDTTQDGTNAVDLWSFEDFPSMVGGVY

SEQ ID NO: 2783 - protein, 1521 aa, Rhodopirellula baltica SH 1; identical to SEQ ID NO: 839

SEQ ID NO: 2784 - protein, 860 aa, Oryza sativa
  misc_feature (91)..(91): Xaa can be any naturally occurring amino acid
MVSRSYSNLLDLATGAADQAPAPAALGALRRRLPRVVTTAGLIDDSPLSPSTPSPSPRPRTIVVANHLPIRAHRPASPSEPWTFSFYEDSXLRPLQHSSSSSSSEFIYIGCLRDDIPLADQDAVAQALLESYNCVPAFLPPDIAERYYHGFCKQHLWPLFHYMLPLSPDLGGRFDRALWQSYVSANKIFADKVLEVINPDDDFVWVHDYHLMVLPTFLRKRFNRIKLGFFLHSPFPSSEIYKTLPVREELLRALLNSDLIGFHTFDYARHFLSCCGRMLGLSYESKRGHICLEYYGRTVSIKILPVGVNMGQLKTVLALPETEAKVAELMATYSGKGRVVMLGVDDMDIFKGISLKLLAMEELLRQHPEWRGKLVLVQVANPARGRGKDVDEVKGETYAMVRRINEAYGAPGYEPVVLIDEPLQFYERVAYYVVAEVCLVTAVRDGMNLIPYEYIVSRQGNEALDRMLQPSKPEEKKSMLVVSEFIGCSPSLSGAVRVNPWNIEAVADAMESALVLPEKEKRMRHDKHYRYVDTHDVGYWATSFLQDLERTCKDHAQRRCWGIGFGLRFRVVSLDLSFRKLAMEHIVMAYRRAKTRAILLDYDGTLMPQAINKSPSANSVETLTSLCRDKSNKVFLCSGFEKGTLHDWFPCENLGLAAEHGYFLRSSRDAEWEISIPPADCSWKQIAEPVMCLYRETTDGSIIENRETVLVWNYEDADPDFGSCQAKELVDHLESVLANEPVSVKSTGHSVEVKPQGVSKGLVARRLLASMQERGMCTDFVLCIGDDRSDEEMFQMITSSTCGESLAATAEVFACTVGRKPSKAKYYLDDTAEVVRLMQGLASVSNELARAASPPEDDDE

SEQ ID NO: 2785 - protein, 575 aa, Physcomitrella patens subsp. patens
MSITRDGSMDYRGTPADKRTTGRFKANAFIIGIEIGERLAFYGISANLVTYLTHVLHEGTEKSATNVNNWMGTTFLAPLLGAFLADAFWGRFWTILIFGVVYFVGLVTLTLSVTVDTFKPPSCTHTSFAGIQQCPPATAGQVGFFYFALYLMSLGGGCMKPCIAAFGADQFDEEDIRENEMKKSFFNWWVFGISLGALVSATVLVYVQSYISWGWGFGTPTVLMGIYLVLYIVGLKFYRHNRPTGSPFTQIGQVIVAAVRNFRLRVPADPALLNEVVDKERLQAGTRLIPHSNTMRFLDKAAVLPNISEGSTIGIDDHSPWKLATVTEVEEVKLVLRLLPIWVAALIFQTPSAQISTFYTRQGNTLNVDLGSNFKIPAASLQSIIPLTIVCLIPIYDRIFVPIARHFTGNVRGISMLQRIGIGIIISLLSMVCAATTEIYRVKVARENGLLDEPFQTLPLTVFILLPQYILLGAAEVFTSIGALEFFYDQAPDSMRSLGTAIFLSTIGIGNFLSSMLLSSVVKVTSLCGQSWIVDNLNRCRLDYFYWLLAGLMAANLCFFFALARWYQYKQVTSL

SEQ ID NO: 2786 - protein, 1529 aa, Mycobacterium tuberculosis CDC1551; identical to SEQ ID NO: 846

SEQ ID NO: 2787 - protein, 615 aa, Physcomitrella patens subsp. patens
MIDDITVADGAVDVRGRPSIKSRTGNWKACWPIFGCEVCERVAFYAISSNLVIYLTTVLHEDISVSARNVNNWSGTTFLTPLIGAFIADACLGRYLTLGTFLCGYFLALTFVTMSVTLPVLKPPECKELTSALTKLCPPATKLQRGFFYFALYLMAMGAGGIKSCVTAFAGDQFDITDPVEAKRKMSFPNWWFVSISFGTMLSVSLLVYAQDTIGWSWGYGIPTGIAGLATLIFFIGTPLYRTHHIRGGSPFTRVAQVLVSAARNWRVSVPTNPELLYELDDKEALTQAHGKLRRHTSGLLFLDKAATVQVMEHECVFRFEEVIKPDPWRLCTVTQVEEVKLLVRMLPIWVTNLMFSAVFAQVGTLFLNQGTTLNRKMGPSFQIPAASMPLFVTLTICIFLPLYDKFFVSAVRRITGDKRGLTMLQRIGVGQVISTLSITVAAFVEMKRLRLAHSLGKDYVGPLPMTIFWLLPQYMLTGICEVFLSVGQMEFFLDQAPESMRSLGNALYLSTVAVGSFLSSLLVSIVTNITYDSNGGWIGNNLNESHMDYFYWLLAGLSLLNLLFYTFFSKRYTYKDCNKADGSRRSPESPSSDSSGHCLTVPNAVAPLGYKELK

SEQ ID NO: 2788 - protein, 795 aa, Arabidopsis thaliana; identical to SEQ ID NO: 2644

SEQ ID NO: 2789 - protein, 529 aa, Frankia sp. EAN1pec; identical to SEQ ID NO: 854

SEQ ID NO: 2790 - protein, 534 aa, Mycobacterium sp. JLS; identical to SEQ ID NO: 855

SEQ ID NO: 2791 - protein, 189 aa, Zea mays
  misc_feature (164)..(164): Xaa can be any naturally occurring amino acid
  misc_feature (166)..(166): Xaa can be any naturally occurring amino acid
  misc_feature (169)..(169): Xaa can be any naturally occurring amino acid
PPSSSDKDVEDAKEDAYITAKRINERFGLEGYEPIIIIDCHVPFYEKAAYYALAECCIVNAVRDGLNLVPYRYTVCRQGSSKLDEALEIASDFPRVSALVVSEFIGCSPSLIGAIRANPWDIDAVAEALNLAITMPVGEKQLRHEKHYRYGSSHFLAYWTRSFXQXQRXTGKDHYSNRCWGIGFGPNFR

SEQ ID NO: 2792 - protein, 1567 aa, Burkholderia vietnamiensis G4; identical to SEQ ID NO: 863

SEQ ID NO: 2793 - protein, 1486 aa, Pectobacterium atrosepticum SCRI1043; identical to SEQ ID NO: 867

SEQ ID NO: 2794 - protein, 182 aa, Glycine max
  misc_feature (25)..(25): Xaa can be any naturally occurring amino acid
NAVVKGVGDHGCEYMTGGIVVVLGXTGRNFAAGMSGGIANVLDMDGKFLSQCNHELVDLDKVEEEEDITTLRMLIQQHQRHTNSVLAKEVLPDFENLVPKFIKVFPKEYKRVLASTKSKEASKDAVESASNHGEEQDEIELVEEDAFEKLKKLATASINGKPSEVTVNFFNEARSTYPRRNY

SEQ ID NO: 2795 - protein, 942 aa, Arabidopsis thaliana
MPGNKYNCSSSHIPLSRTERLLRDRELREKRKSNRARNPNDVAGSSENSENDLRLEGDSSRQYVEQYLEGAAAAMAHDDACERQEVRPYNRQRLLVVANRLPVSPVRRGEDSWSLEISAGGLVSALLGVKEFEARWIGWAGVNVPDEVGQKALSKALAEKRCIPVFLDEEIVHQYYNGYCNNILWPLFHYLGLPQEDRLATTRSFQSQFAAYKKANQMFADVVNEHYEEGDVVWCHDYHLMFLPKCLKEYNSKMKVGWFLHTPFPSSEIHRTLPSRSELLRSVLAADLVGFHTYDYARHFVSACTRILGLEGTPEGVEDQGRLTRVAAFPIGIDSDRFIRALEVPEVKQHMKELKERFTDRKVMLGVDRLDMIKGIPQKILAFEKFLEENANWRDKVVLLQIAVPTRTDVPEYQKLTSQVHEIVGRINGRFGTLTAVPIHHLDRSLDFHALCALYAVTDVALVTSLRDGMNLVSYEFVACQEAKKGVLILSEFAGAAQSLGAGAILVNPWNITEVAASIGQALNMTAEEREKRHRHNFHHVKTHTAQEWAETFVSELNDTVIEAQLRISKVPPELPQHDAIQRYSKSNNRLLILGFNATLTEPVDNQGRRGDQIKEMDLNLHPELKGPLKALCSDPSTTIVVLSGSSRSVLDKNFGEYDMWLAAENGMFLRLTNGEWMTTMPEHLNMEWVDSVKHVFKYFTERTPRSHFETRDTSLIWNYKYADIEFGRLQARDLLQHLWTGPISNASVDVVQGSRSVEVRAVGVTKGAAIDRILGEIVHSKSMTTPIDYVLCIGHFLGKDEDVYTFFEPELPSDMPAIARSRPSSDSGAKSSSGDRRPPSKSTHNNNKSGSKSSSSSNSNNNNKSSQRSLQSERKSGSNHSLGNSRRPSPEKISWNVLDLKGENYFSCAVGRTRTNARYLLGSPDDVVCFLEKLADTTSSP

SEQ ID NO: 2796 - protein, 502 aa, Pyrococcus furiosus DSM 3638; identical to SEQ ID NO: 877

SEQ ID NO: 2797 - protein, 466 aa, Erythrobacter sp. SD-21
MSTDARLVVISNRVAVPKARGAAGAQGGLAGALHSALTSRRGLWFGWSGEESESGRTGNIATQTSDGVTTATIDLSKRDVEEYYNGYANSTLWPLFHYRLDLAKYERETGKGYERVNERFAELVTPLIEPDDVVWVHDYHLIPLGERLRAQGCKNRIGFFLHIPWPATRLFVSLPYHERLVRTMLHYDLVGFQTKEWLDSFLHYCRSELGAEVNEETSEITLDGNTTMARAYPIGIDWEHFSKLGETGEARQAQQRLMSSTRRRTAMIGVDRLDYSKGLPERLDGISRFFDRHPERVRDLVFAQIAPPSREDVDSYQAIRATLEQKAGQINGARSEVDLVPVRYVNRGYSHAELFGFFRAAKIGLVTPLRDGMNLVAKEYIAAQDPEDPGVLILSRFAGAAAQLQDAVLVNPHSPDDLAHAIRVALDMPLEERKERYENLVATVRDDDVQDWTETFLTDLDNIPIA

SEQ ID NO: 2798 - protein, 1560 aa, Cyanothece sp. ATCC 51142; identical to SEQ ID NO: 881

SEQ ID NO: 2799 - protein, 523 aa, Legionella pneumophila str. Lens; identical to SEQ ID NO: 882

SEQ ID NO: 2800 - protein, 493 aa, Propionibacterium freudenreichii subsp. shermanii
MSEDQLSIPSAPANDGRTEDPVPRDAPAAGTSQFVVVANRLPVDRVQNDDDSSGWALSPGGLVTALIPVMKDHGGTWVGWVGSADEHIQPFTFDGYGIMPVDLSAQEFNEYYEGMSNATFWPLYHDCVEHPEYHREWWDSYMEVNQRFATAAAEVAAPGATVWVQDYQLQNVPALLRQMRPDLKIGFFLHIPFPPSELFMQLPWRYQVISGLLGSDQIGFQDPGSARNFAHLVRRLAGMRTQGDRIFSPDGRVILARAYPISIDAQGILDLSRTPQARAEAEQLREDLGNPDKIFLGVDRLDYTKGLRHRVRAFGELFTSGQLDPMRNVYLQIATPTREGVARYQVLRSIIDEMVGRINSSVGRIGRSPIEYRHASYPKMALAAMYRAADVMVVTPLRDGMNLVAKEYVASHDSDAGALVLSEFAGASLELKQAYMVNPYDLNGMKNQLLRAAGDTHANHVRRMRSMRKQVFRHDIDAWANSFLTDLGTERSV

SEQ ID NO: 2801 - protein, 361 aa, Oryza sativa Indica Group
MPGSSGRAPLFACRGAAAVSASSMLGGGGAAYQAAVVAHVAPVPAIRPCASWVVEAMRASSPTRPAAAAAVDAEYDAWTQRKHPSALGSFEQVAAAASGKRVVVFLDYDGTLSPIVADPDMAFMSDEMRAAVRDVAEHFPAAIVTGRCVDKVQSFVGLPELYYAGSHGMDIKGPSSNEEEDTKILLQPAREFLTVINKAYKALMEKTKSTPGARVENNKFCLSVHFRCVDEKRWNPLAEQVKAVLRDYPELKLTQGRKVLEIRPSIMWDKGKAVEFLLKSLGFDDDRRDVLPVYIGDDRTDEDAFKVLRKRGQGLGILVSKCAKETDASYSLQDPTEVMEFLVRLVQWKLRRSSSAMRPRV

SEQ ID NO: 2802 - protein, 244 aa, Solanum lycopersicum
MYQLPTSTELTFFPAEFPVYCRSSSFSSLMPCLTESWGDLPLKVNDSEDMVIYGFLQDAFSIGWTPSNLTSEEVKLEPREEIEPAMSTSVSPPTVAPAALQPKGRHYRGVRQRPWGKFAAEIRDPAKNGARVWLGTYESAEEAALAYGKAAFRMRGTKALLNFPHRIGLNEPEPVRVTVKRRLSESASSSVSSASESGSPKRRRKGVAAKQAELEVESRGPNVMKVGCQMFQLASSYWLVKIWS

SEQ ID NO: 2803 - protein, 260 aa, Thellungiella halophila
MAVSAREEFVYMAKLAEQAERYEEMVEFMEKVSAAVDGDELTVEERNLLSVAYKNVIGARRASWRIISSIEQKEESRGNDDHVKAIRDYRSKIETELSGICDGILKLLDSTLIPAAASGDSKVFYLKMKGDYHRYLAEFKTGQERKDAAEHTLSAYKAAQDIANAELAPTHPIRLGLALNFSVFYYEILNSPDRACTLAKQAFDDAIAELDTLGEESYKDSTLIMQLLRDNLTLWTSDMQDDAPEEIKEASAPKPSEEQQ

SEQ ID NO: 2804 - protein, 553 aa, Alkalilimnicola ehrlichei MLHE-1; identical to SEQ ID NO: 905

SEQ ID NO: 2805 - protein, 534 aa, Oryza sativa
  misc_feature (35)..(35): Xaa can be any naturally occurring amino acid
  misc_feature (58)..(58): Xaa can be any naturally occurring amino acid
  misc_feature (478)..(478): Xaa can be any naturally occurring amino acid
MEAVGVAPAPAGVPEKKLLEVKESRKAAPAAPSTXSMAAKWAMKKKLVGGDAGYVLEXDVPHLTDYLPELPTYPNPLQDNPAYSVVKQYFVNTDDTVTQKIVVHKTSARGTHFRRAGPRQRVYFQSDEVNAAIVTCGGLCPGLNTVIRELVCGLYDMYGVTSVVGIEGGYKGFYSRNTVALTPKSVNDIHKRGGTVLGTSRGGHDTGKIVDSIKDRGINQVYIIGGDGTQKGASVIYEEVRRRGLKCSVVGVPKTIDNDIAVIDKSFGFDTAVEEAQRAINAAHVEAESAENGIGVVKLMGRNSGFIAMYATLASRDVDCCLIPESPFYLEGKGGLLEFIEKRLKDNGHMVIVVAEGAGQDLIAKSMNFVDTQDASGNKLLLDVGLWLSQKIKDHFKKKRNFPITLKYIDPTYMIRAVRSNASDNVYCTLLAHSALHGAMAGYTGFTVAPVNGRHAYIPFYRITEKQNKVVITDRMWXARVLCSTNQPCFLSHEDVEHLKHDDDEHHLHNTQLLEGESSPVKDSSKCNGTAAPV

SEQ ID NO: 2806 - protein, 898 aa, Oryza sativa Indica Group
MSRSYTNLLDLAAGNFEALGPAGGGRRRSFGAKRMTRVMTVPGTLSELDDEDDEPAATSSVASDVPSSAACERLIVVANQLPVVARRRPGAAARGWAFSWDDDSLLLRLRDGVPDEMEVLFIGTLRADVPACEQDEVSQSLIDGFGCAPVFLPAGLYDRFYQHFCKGYLWPLFHYMLPFASALPAAASGDGRFDRGAWEAYVLANKYFFEKVVEVINPEDDYVWVHDYHLMALPTFLRRRFNRLRIGFFLHSPFPSSEIYRSLPVREEILRTLLNCDLIGFHTFDYARHFLSCCSRMLGIEYQSKRGYIGLDYFGRTVGIKIMPVGIHMGQLQSVLRSSEKEKKVAELRQQFEGKSVLLGVDDMDIFKGINLKLLAFENMLRTHPKWKGRAVLVQIANPARGKGKDLEAVQAEIRESCDRINKEFGQLGYSPVIFIDQSVPSAVRLAYYTVAECVVVTAVRDGMNLTPYEYIVCREGIPGSECAPEVSGPKKSMLVVSEFIGCSPSLSGAIRVNPWNIEATAEALNEAISMSEREKQLRHEKHYRYVSTHDVAYWSKSFVQDLERACKDHFRKPCWGIGLGFGFRVVALDPHFTKLNFDSIIMSYERSKSRAIFLDYDGTLVPQASLNKNPSEELLRIINTLCADRNNTVFIVSGRSKDDLSKKLISCPKLGIAAEHGYFLRWTRDEEWQTTAQTSDFGWMQMAKPVMDLYTESTDGSTIETKETALVWHHQDADQGFGSSQAKEMLDHLESVLANEPVSVKSGQFIVEVKPQGVTKGLIAEKVLTSMKEKGQLADFVLCIGDDRSDEDMFENIADVMKRSIVAPKTPLFACTVGQKPSKARFYLDDTFEVVTMLSSLADASEPDLMADLEDDLATSVSSIEISDRVVSFSNLRTEGS

SEQ ID NO: 2807 - protein, 218 aa, uncultured archaeon GZfos14B8; identical to SEQ ID NO: 906

SEQ ID NO: 2808 - protein, 272 aa, Nicotiana tabacum
MAESTREENVYMAKLAEQAERYEEMVEFMEKVAKTVDVEELTVEERNLLSVAYKNVIGARRASWRIISSIEQKEESRGNEDHVSSIKEYRGKIEAELSKICDGILNLLESHLIPVASTAESKVFYLKMKGDYHRYLAEFKTGAERKEAAENTLLAYKSAQDIALAELAPTHPIRLGLALNFSVFYYEILNSSDRACNLAKQAFDDAIAELDTLGEESYKDSTLIMQLLRDNLTLWTSDTTVSLSLSQKYTPTNADAPTNNTVHTSKSFLGSA

SEQ ID NO: 2809 - protein, 1498 aa, Corynebacterium efficiens YS-314; identical to SEQ ID NO: 912

SEQ ID NO: 2810 - protein, 262 aa, Populus tremula x Populus alba
MSPTESSREENVYMAKLAEQAERYEEMVEFMEKVAKTVDNEELTMEERNLLSVAYKNVIGARRASWRIISSIEQKEESRGNEDHVTIIKEYRGKIEAELCKICDGILSLLETHLVPSASAAESKVFYLKMKGDYHRYLAEFKTGAERKEAAESTLLSYKSAQDIALSELAPTHPIRLGLALNFSVFYYEILNSPDRACSLAKQAFDEAISELDTLGEESYKDSTLIMQLLRDNLTLWTSDITDDAGDEIKEASKRESGDGPQ

SEQ ID NO: 2811 - protein, 782 aa, Kluyveromyces lactis NRRL Y-1140
MQHLLDDTSIDSVKQEIMLLKVAELKNVCRSIGLPISGRKTELQDRLSSFLMAPSRAGMNDPFRIPAVNILVKKAGAGDPVPKFETLLHALATGSFMHPVATGHQDASALIGNNRLAGKPHLRFQQSPFYNLKRLVGSESAPEAPSKRGVANISFKLVEEEMKLLKSSPKIKLYVFCGINNSFGASNDIPIQFPLRNEIKFNGIQIKDNVHGLKNKIGTAKPADLTPYINWPPKSNLLQLVYAFTKDDHMVYVYLVELIETEELLQKTLSSPKIVRPATLQYIKQTLSEEEDEDMMTTSTVMSLQCPISYSRMKYPVKSIHCRHLQCFDAQWFIESQRQIPTWQCPVCQKQIRIEDLAICEFVQEIISSTDEEVEQVEISKDGSWVIKDETENHNQEASTAPNIKQEATPDIKPEDSHAVEQHDEHPPPEHVIISLDSDEEDEIEQATSKTNPPNRQSTSQNSDNTSSSTDLNQDNDLLDDEDMAFIEELANSIIDRVPRRSQHENNVTSTSNLNVNGLIDPNTRNEVPERRTSLDPRMNDYDLLNLAAEQPTNFRQMRGRLLSENNQENSRPPVPNLLGKAPLNTDSHKVGPQLPNMSQLTNADSMLFNGNGQAHPQAPSGSFSDSNSRIVVQPMGSSPRGQTSDKVTQVSIQPTEPPSMGVPVLPPLPTLPVRSTTSTMSPNLPQPPPIHDPRRRKPEVSPFLPKKNFKNVLPKKRAHSNGNAQNVHSEINGNHDSGTLPAPSPISNVQVSPSPAIMNSNNVPPPNDSLNSDDLIDLTSD

SEQ ID NO: 2812 - protein, 1517 aa, Spinacia oleracea; identical to SEQ ID NO: 915

SEQ ID NO: 2813 - protein, 525 aa, Staphylococcus aureus subsp. aureus Mu50; identical to SEQ ID NO: 918

SEQ ID NO: 2814 - protein, 1514 aa, Salinibacter ruber DSM 13855; identical to SEQ ID NO: 920

SEQ ID NO: 2815 - protein, 500 aa, Synechococcus sp. PCC 7002
MKSSLVILYHREPYDEVRENGKTFYRDKTSPNGIMPTLKSFFANAEQSTWVAWKQISGKQQENFQAKMAFPGQENSVVHRIPLSADQVKNFYHITSKEAFWPILHSFPWQFTYDSSDWENFKQINEMFAEAACEDADDDALFWVHDYNLWLTPYFIRQKKPNAKIAFFHHTPFPSVDIFNILPWREAIVDSLLCCDLCGFHLPRYVQNFVAVARSLRKVEITRQVPVDEHAFTAVGTALAEPEITTQLKYKDHLVNLDAFPVGTNPTQIRAQVEKASTQERIRKIREELGSNKLILSAGRVDYVKGTKEMLVCYERLLERRPELQTKVNLVVAAAKAASGMRVYKNAQSEIERLVGRINGRFAKLNWTPILLFTSALSYEELLGFFGAADIAWITPLRDGLNLVAKEYVVAHGCDDGVLILSEFAGSAVELPDAILTNPYAAKRMDESIDQALAMPVEEQQRRMKSMYQAIQRYDVQQWANHMFREAKATAVLGKEPTPV

SEQ ID NO: 2816 - protein, 253 aa, Aspergillus flavus
MGHEDAVYLAKLAEQAERYEMVENMKVVASADVELTVEERNLLSVVYKNVIGARRASWRIVTSIEQKEESKGNESQVTLIKEYRQKIESELAKICDDILEGLDKHLIPSGQSGESKGFYHKIGDYHRYLAEFAIGDRRKGAADASLEAYKAATEVAQTDLTPTHPIRLGLALNFSVFYYEILNSPGQACHLAKLAFDDAIAELDTLSEESYKDSTLIMQLLRDNLLDTLSEESYKDSTLIMQLLRDNHPLDLV

SEQ ID NO: 2817 - protein, 207 aa, Olimarabidopsis pumila
MATFEDGSDLEAIQKHLFEDLLVCDGFMGDFDFDASFVSGLWCIEPQVPKQEPDSPVLDPDSFVNEFLQVEAESSPSSPELNTSPLSTYETDQSVKKAERFEEEEEARHYRGVRRRPWGKFAAEIRDPAKKGSRIWLGTFESDVDAARAYDCAAFKLRGRKAVLNFPLDAGKYEAPANSGRKRKRSDVQEELQRTQSNSSSSSCDAF

SEQ ID NO: 2818 - protein, 554 aa, Vitis vinifera
MMSRSYTNLLDLATGNFPAIGRERKRLPRVMTVPGNVYELDDDQANSVSSDNPSSVAQDRLIIVANQLPVKANRRADDRGWVFSWNEDSLLLQLKEGLPEDMEVLYVGSLRVDVDLEEQEEVSQILLETFKCVPTFLPHDVLEKFYHGFCKKLLWPLFHYMLPFSADHGGRFDRSMWEAYVSANKLFSQKVIEVINPDDDYVWIHDYHLMALLNSDLIGFHTFDYARHFLSCCSRMLGLEYQSKRGYIGLEYYGRTVGIKIMPVGIHMGRIASVMKLADKEKKVGELKQQFEGKTVLLGVDDMDIFKGINLKLLAMEQLLQQHSKWQGKAVLVQIANPAKGKGADLEEIQAEIRESCRRINEEFGEPGYEPIVLLTDQFQSMRELPITVLLSMLLSRLSGMGWIAVQKLEIKENDRSWLMSSLHQIFSRRYFLRRSALKLFMIDRSNFFFDFRGTFVRTRKTRAPVEWWAAYGASTPNLQRFVMKVLNLTCSASGCEWNWSIFENIHKKRINRLNHQHLNDLVYIKYNRALKRRYNEYNTIDPIFLKDIDASNE

SEQ ID NO: 2819 - protein, 851 aa, Arabidopsis thaliana
MISRSYTNLLDLASGNFPVMGRERRRLPRVMTVPGNVSEFDEDQAYSVSSDNPSSVSSDRMIIVANRLPLKAEKRNGSWSFSWDQDSLYLQLKDGLPEDMEILYVGSLSVDVDSNEQDDVAQILLDKFKCVPTFFPPDLQSKFYDGFCKRQIWPLFHYMLPFSADHGGRFDRSLWEAYVATNKLFFQKVIEVINPDDDFVWIHDYHLMVLPTFLRRRFNRIRMGFFLHSPFPSSEIYRSLPVREEILKALLNSDLIGFHTFDYARHFLTCCSRMLGLEYQSKRGYIGLEYYGRTVGIKIMPVGINMGRIQSVMRYSEEEGKVMELRNRFEGKTVLLGIDDMDIFKGINLKLLAMEQMLRQHPNWRGRAVLVQIVNPARGKGIDVEEIRGEIEESCRRINGEFGKPGYQPIIYIDTPVSINEINAYYHIAECVVVTAVRDGMNLTPYEYIVCRQGLLGSESDFSGPKKSMLVASEFIGCSPSLSGAIRVNPWNVEATGEALNEALSMSDAEKQLRHEKHFRYVSTHDVAYWSRSFLQDLERICVDHFKKRCWGMGISFGFRVVALDPNFRKLSIPCIVSDYKRAKSRAILLDYDGTLMPQNSINKAPSQEVLNFLDALCEDKKNSIFIVSGRGRESLSKWFTPCKKIGIAAEHGYFLKWSGSEEWETCGQSSDFGWMQIVEPVMKQYTESTDGSSIEIKESALVWQYRDADPGFGSLQAKEMLEHLESVLANEPVAVKSGHYIVEVKPQGVSKGSVSEKIFSSMAGKGKPVDFVLCIGDDRSDEDMFEAIGNAMSKRLLCDNALVFACTVGQKPSKAKYYLDDTTEVTCMLESLAEASEASNFSMRELDEAL

SEQ ID NO: 2820 - protein, 834 aa, Triticum aestivum
  misc_feature (492)..(492): Xaa can be any naturally occurring amino acid
QVCTKKQAGTGPEFPGISSTHASADGAWEFSWDQDSLLRQLKEALRAHQGRAHMDFVYIGGLRDDIPAEEQDKVALELYDRFRCVPAFLPDDLRSRFYHGFCKQQLWPLFHYMLPLSPELGGRFDRDLWKAYLSVNKIFSDKILEVINPEEDFVWVHDYHLMVLPTFLRKKFNRVRLGFFLHSPFPSSEIYKTLPVREEVLRALLNADLIGFHTFDYARHFLSCCSRMLGMKYESQRGYIGLEYYGRTVTVKILPVGIHLTQLQAVLNLPETGLKVAELMKEFPDRHRIMMLGVDDMDIFKGISLKLLAFEELLTQHPEYRGKVVLVQIANPARGKGKDVKEVQDESYAMVKRINEAFGQPDYQPVILIDRPLHFYERMAYYVVADCCLVTAVRDGMNLIPYEYIIARQGNEKIDRILGLSPFTRKKSMLVVSEFIGCSPSLSGAIRVNPWNIESVAEAMDKALHTGEGEQALRHEKHHKFVSTHDVGYWAXNSFLQDLARTCQDHNKRRCWGIGFGLRFRVVALDTSFKKLAAEHLVSAYRKATTRAILLDYDGTLMPESSFGKMPSSKTINMLNSLCRDEKNLVLIASTKTRATLSEWFSACEDLGLAAEHGYFIRLERDAEWETCGLSTDFSWKQIAEPVMKTYTETTDGSIIEDKETAIVWCYKDADRDFGSCQAKELHDHLESVLSNEPVSVKADLHYVEVKPQGVSKGLVAKRMLSTMQELGLQPDFILCVGDDRSDEDMFEVITTAVDGPYLSPSATVFACTIGQKPSKAKYYLDEPADIKRMIRALASVSDQELALEEGEELEEGEDPPYPFLAGDGTSSDDTWLD

SEQ ID NO: 2821 - protein, 456 aa, Escherichia coli
  misc_feature (345)..(345): Xaa can be any naturally occurring amino acid
  misc_feature (363)..(363): Xaa can be any naturally occurring amino acid
  misc_feature (418)..(418): Xaa can be any naturally occurring amino acid
  misc_feature (430)..(430): Xaa can be any naturally occurring amino acid
SRLVVVSNRIAPPDEHAASAGGLAVGILGALKAAGGLWFGWSGETGNEDQPLKKVKKGNITWASFNLSEQDLDEYYNQFSNAVLWPAFHYRLDLVQFQRPAWDGYLRVNALLADKLLPLLQDDDIIWIHDYHLLPFAHELRKRGVNNRIGFFLHIPFPTPEIFNALPTYDTLLEQLCDYDLLGFQTENDRLAFLDCLSNLTRVTTRSAKSHTAWGKAFRTEVYPIGIEPKEIAKQAAGPLPPKLAQLKAELKNVQNIFSVERLDYSKGLPERFLAYEALLEKYPQHHGKIRYTQIAPTSRGDVQAYQDIRHQLENEAGRINGKYGQLGWTPLYYLNQHFDRKLLXKIFRYSDVGLVTPLRDGXNLVAKEYVAAQDPANPGVLVLSQFAGAANELTSALIVNPYDRDEVAAALDRALTXSLAERISRHAEXLDVIVKNDINHWQECFISDLKQIVPR

SEQ ID NO: 2822 - protein, 1513 aa, Oceanicola granulosus HTCC2516; identical to SEQ ID NO: 930

SEQ ID NO: 2823 - protein, 501 aa, Nocardia farcinica IFM 10152
MRTGANAPQGAGSGFVVVANRLPVDLERLPDGSTRWKRSPGGLVTALEPVLRNNKGAWVGWAGVPDVDVDPIIEDGLELHPVPLSAQEVADYYEGFSNGTLWPLYHDVIVRPTYDRAWWAAYVQVNRRFAEETAKVAAEGATVWVQDYQLQLVPKMLRMLRPDLTIGFFLHIPFPPVELFMQMPWRTEIIEGLLGADLIGFHLPGGAQNFLYLARRLAGQPTSRGTVGVRSKLGVVQVGFRTVRVGAFPISIASAELDEQSRRRSIRERAAKIRAELGNPKNILLGVDRLDYTKGIDIRLNALEELLVEGRFDPAETVMVQLATPSRERVESYIQMRGDIERQVGRINGEFARVGYPVVHYLHRPIPRDELLAFFVAADVMLVTPLRDGMNLVAKEYVACHSGLNGALVLSEFTGAAAELRQAYLCNPHDLDSVKDAIVSALEDDRETKRRRMRSLRRQVLAHDVDRWARAFLDALAQDQVAGSALITENDDYGDNDAPSR

SEQ ID NO: 2824 - protein, 1497 aa, Solibacter usitatus Ellin6076; identical to SEQ ID NO: 937

SEQ ID NO: 2825 - protein, 259 aa, Tropaeolum majus
MASAREESVYMAKLAEQAERYEEMVEFMEKVSASAEGEELTVEERNLLSVAYKNVIGARRASWRTISSIEQKEEGRGNEDHVTVIRDYRSKIESELSNICDGILKLLDTRLIPSASSGDSKVFYLKMKGDYHRYLAEFKTGAERKEAAESTLTAYKAAQDIANSELAPTHPIRLGLALNFSVFYYEILNSPDRACNLAKQAFDEAIAELDTLGEESYKDSTLIMQLLRDNLTLWTSDMQDDGADEIKEAAAPKPAEEQQ

SEQ ID NO: 2826 - protein, 111 aa, Glycine max
DIPDWCYVEARGTIAKNCFTEPPSADDLTLFQSKSPISHVSKVKAPTLFLLGAQDIRVPIFDGLQYARALKEKGVEVKIIMFQNDVHALKRPQSDLECFLHIGVWFNKYCK

SEQ ID NO: 2827 - protein, 269 aa, Oryza sativa; identical to SEQ ID NO: 2312

SEQ ID NO: 2828 - protein, 1554 aa, Cyanothece sp. PCC 8801; identical to SEQ ID NO: 941

SEQ ID NO: 2829 - protein, 531 aa, Zea mays
MEAVGVTPAPVAAPEKKKLLDLKDPFPAAANSGAKASSASKWATKKKLVGGDAGYVLEDVPHLTDYMPQLPTYPNPLQDNPAYSVVKQYFVNPDDTVTQKIVVHKTSARGTHFRRAGPRQRVYFQSDEVNAAIVTCGGLCPGLNTVIRELVCGLYDMYGVSSVVGIEGGYKGFYSKNTVALTPKSVNDIHKRGGTVLGTSRGGHDTAKIVDCLQDRGINQVYIIGGDGTQKGASVIYEEVRRRGLKCSVVGVPKTIDNDIAVIDKSFGFDTAVEEAQRAINAAHVEAESAENGIGVVKLMGRNSGFIAMYATLASRDVDCCLIPESPFYLEGKGGLLEFVERRLKDNGHMVIVVAEGAGQDLIARSMNFVDTQDASGNKLLLDVGLWLSQKIKDHFKKKPSFPITLKYIDPTYMIRAVRSNASDNVYCTLLAHSALHGAMAGYTGFTVAPVNGRHAYIPFYRITEKQNKVVITDRMWARVLCSTNQPCFLSHEDVENMKHDDDEHHHMHNTQLLEGGSSPVSKCNGSAAAV

SEQ ID NO: 2830 - protein, 879 aa, Glycine max
  misc_feature (63)..(63): Xaa can be any naturally occurring amino acid
MDLVPSVKEKLNYFRIKELKDVLTQLHLSKQGKKQDLVDRILSVLSDEQVSKMWAKKNAGGKXQVAKLVDDTYRKMQISGATDLASKGQGASDSSSVKVKSEFDDAFQRDVKIRCLCGSRLETEDLVKCDDPRCHVWQHIICVIIPEKPTEGIPPVPDKFYCELCRLTRADPFWVSVAHPLHPVKLTTTSNPTDGNNPVQSVERTFQLTRADMDLVSKPEFDVEAWCMLLNDKVPFRMQWPQYTDLQVNGVPVRATNRPGSQLLGANGRDDGPIITPYTKDGINKISLTGCDARIFCLGVRIVKRRSMQQILNSIPKESDGEKFEEALARVCRCVGGGNAADDADSDSDLEVVSDTFTINLRCPMSGSRMKIAGRFKPCIHMGCFDLEVFVEMNQRSRKWQCPICLKNYALENIIIDPYFNRITSMMMNCGEEIAEIEVKPDGSWRVKVKSESERLELGNLAQWRLPDGTLCVSTDGDVKRVDTLKQVKQEGVSDSPAGLKLGIKKNCNGVWEVSKPEGTNTSSGNNLKRVFGNPEQVVIPMSSSATGSGRDGDDPSVNQGGGGHIDYSTTNGIEMDSLCLNNVDLAYEYTAPNTSAQVGGAEVIVLSDSEEDNDLLASPAIAYKNNRNDATDGYSVPPPVIVDSYTEDHNLGGNSCLGLFPNDDDFGMSSLWPLPSGSQAGPGFQLFGSDADVSDALVHLQHGPMNCSSSLNGYALAPDTALGSGGILQESSAGRSVADLNGGLVDNPLAFGGDDPSFQIFLPTRPADSSMHNELRDQANVANGVCTEEDWISLRLGGGAGGNNGDAPTQNGLNSRHQIPTREGAKNTLDDTASLLLGMNDVRSDRARRQRSDSPFSFPRQKRSVRPRLYLSIDSDSE

SEQ ID NO: 2831 - protein, 2141 aa, Oryza sativa Japonica Group; identical to SEQ ID NO: 956

SEQ ID NO: 2832 - protein, 459 aa, Erythrobacter sp. NAP1
MVISNRVAVPKARGVAGAQGGLAGALNAALKDRGGVWFGWSGQESEDRTGNMDLQRNDGVTTATIDLSTRDVGEYYNGYANSTLWPLFHYRIDLARFENRTGEGYERVNDRFAESALPLIEEDDLVWVHDYHLIPLGERLRSRGIKNRIGFFLHTPWPPTRLLTSLPFHERLVRTMLSYDLIGFQTKEWLSSFVHYCETELGAKVDHDTGRITHEGRTTTARAYPIGIDWKHFQAQGDTGEARNASQRLLASTRHRTAMIGVDRLDYSKGLPERIDGIGRFFDEHPERTRDLVFIQIAPPSREDVESYQQIRGLLEQKTGQINGARSEVDIVPIRYVNRGYTHAQLFGFFRAAKIGLVTPLRDGMNLVAKEYVAAQDPEDPGVLVLSEFAGAAHQLGCDGKGAVLVNPHSPDALAGAIRKALDMPLEERKSRYEAMIATVRDDDVRDWTQNFCTDLAAD

SEQ ID NO: 2833 - protein, 857 aa, Solanum tuberosum
MMSRSYTNLLDLASGNFPVMGRERDRRRMSRVMTVPGSICELDDDQAVSVSSDNQSSLAGDRMIVVANQLPLKAKRRPDNKGWSFSWNEDSLLLRLKDGLPEDMEVLFVGSLSVDVDPIEQDDVSSYLLDKFRCVPTFLPPNIVEKYYEGFCKRHLWPLFHYMLPFSPDHGGRFDRSMWEAYVSANKMFSQKVVEVLNPEDDFVWIHDYHLMVLPTFLRRRFNRLRIGFFLHSPFPSSEIYRTLPVREEILKALLCSDLVGFHTFDYARHFLSCCSRMLGLEYQSKRGYIGLEYYGRTVGIKIMPVGIHMGHIESMKKIADKELKFKELKQQFEGKTVLLGVDDLDIFKGINLKLLAMEHMLKQHPSWQGQAVLVQIANPMRGKGIDLEEIQAEIQESCKRINKQFGKPGYEPIVYIDRSVSSSERMAYYSVAECVVVTAVRDGMNLTPYEYIVCRQGVSGAETDSGVGEPDKSMLVVSEFIGCSPSLSGAIRINPWNVEATAEAMNEAVSMAEQEKQLRHEKHYRYVSTHDVAYWSRSFLQDMERTCADHFRKRCYGIGLGFGFRVVSLDPNFRKLSIDDIVNAYIKSKSRAIFLDYDGTVMPQNSIIKSPSANVISILNKLSGDPNNTVFIVSGRGRESLTKWFSPCRKLGLAAEHGYFLRWEREQKWEVCSQTSDFGWMQLAEPVMQSYTDATDGSCIERKESAIVWQYRDADSGFGFSQAKEMLDHLESVLANEPVAVKSGQHIVEVKPQGVTKGLVAEKVFTSLAVKGKLADFVLCIGDDRSDEDMFEIIGDALSRNIISYDAKVFACTVGQKPSKAKYYLDDTSEVVLMLDSLADATDTPVTSDDEPVDSD

SEQ ID NO: 2834 - protein, 497 aa, Synechococcus sp. RS9916
MTKEEGKSSFILLYHRTPFDEIIDEQGNRSWGDQKSPNGIIPTLRNLFRSHLNGTWIAWRQVEENDTSGDERIAMEEPAPFTLRRIPLEHYQISSFYHVTSKESIWPILHTFPNYFDVNNADWGIFEEVNRRFAEAACREAAKAATVWVHDYNLWLAPGYIRAERPDLKIAFFHHTPFPGNDVFAILPWRREILESLLCCDLVGFHIPRYTENFARAANCLLGAKKGPKRGVNARFLSTGSALTEPSETPWLTYEGRTIQLLSSPVGTSPDVIQDLVSDPEIQALGERIEEDTRKGRKLILSASRVDYTKGNEELLLAFERLLERRADLHGEVVLMLACVSAANGMKIYEDTQRSIEEMAGRINGRFSKMDWVPVRFSTRRIPYEEMVAWFTHADVCWITPLRDGLNLVAKEYAAARKDKSGVLVLSEFTGASVVLDGAVLTNPYSHRRMDEAIELALSMPENEQKRRMRTMTTAVESFTVQDWAEEQMGSLDSFLA

SEQ ID NO: 2835 - protein, 724 aa, Oryza sativa Japonica Group
MEGVVTSSVGEPNQDNEPRDSSIELPRVITDMETSAMHDPEAQKLIGHEADTELTPYEGMEFESEDAARDFYSKYARHAGFRIRISRYTRSRRDNSIISRRIVCSKEGFHETRDCENLHVDQKQQARVGTRVGCKAMLMIKKFGPDKWVVTKFIKIHNHGPVPPRKPHAGEHHDCDLMENPHSIEVDPIDEPVEGMEFESEEAAKLFYINYARVNGFRARISRYCRSRRDNSIISRQIVCSKEGFREVRARKDITDGGKTTKRPRMITRVGCKAMIVVKRMNSGKWMVSKFEKEHNHSLLSSRAVPITSNDSSREVIDFAATSNDPNEVKAEGCSTGIQCNSTDSLTVLYNHLCQEAIKFAKEGSVTEEIYHVAMNALKEAAEKVSEVKRSHPTMSQSKHEVMQMETMSASQCSNDDKQKTMTPQLKFLQEPSPSLVLIPTNLLTHSSSNCADNIPLSCDLTINAGEVKHVSESSCLAANRKEDSSQKSQGKDERFHVLSKETTVAIPAIPLTLYMPIMKNPTGDSADKIWILIDCYLPLECSPDIFPFSWNADGQYRLLAAPIEAVPISYRPAEPIQQPHGSFPNSGPLPGFLPKLYKRGKGPNSLVHATALACGARVVPPEEAASLIKAIESKIRSGGATIAKLPSSSLTPLIPEVASMSSSSEDDEENDHSEPLMASVEHNCHDQSSEEMKLEADPPSELETEAENCSAQPENENNGPTHC

SEQ ID NO: 2836 - protein, 1516 aa, Streptomyces avermitilis MA-4680; identical to SEQ ID NO: 965

SEQ ID NO: 2837 - protein, 1478 aa, Bacillus anthracis str. Sterne; identical to SEQ ID NO: 966

SEQ ID NO: 2838 - protein, 1501 aa, Photobacterium profundum SS9; identical to SEQ ID NO: 967

SEQ ID NO: 2839 - protein, 1515 aa, Photobacterium profundum SS9; identical to SEQ ID NO: 968

SEQ ID NO: 2840 - protein, 733 aa, Cytophaga hutchinsonii ATCC 33406
MNDEKRLIIVAYRIPFKVTFKESGERVLQQNSGGLVSAILSLAEKGDVFGKNQKIHWFGYSTPDILQEGETQVENENFIVHPVLIEDALNDAYYEGFCNSTIWPISHYYPYLTSFNEEDYEAYVKANKIFADQINAFIRPGDMVWIQDYQLMLLPGMLRSENPDASIGYFHHIPFATFEIFRLLPKQWQTELLKGMIGADLVGFHTNDYSQYFLRSVQRVLGYDTTARDISIPNRIVRVDTFPISIDYNKFQELYNDPGVIEKRKEFLKDLSAEKNIFSVDRLDYSKGLIHRLNGFEYFLDQYPQWHTRVVLTMIVVPSRETILKYAEMKHELEEAVGRINGKYGTLGWRPVIYLYRSLSFEELGALYTLADVALITPIRDGMNLVAKEFVATRTDKKGVLILSEMAGASLELNGAILINPTDKRTLAAAIIQALTMDEQEQTQRMQMMQDRIRVYDIFKWTEDYMDQLDIIKLKQMEFEEKIINQDVLKSFKQIFDESSRRLFLLDYDGTLSPIVPDPSSSKPSVGIVDVLKKLSSDFNVNVAIISGRDKEFLNYIFDPNTILSAEHGAFLRIPGQDWELQYDYNDQWKRSVLPVFQKYTDRCAGSFIENKSTSLAWHYRNTEKEYAHIRSREFIEELENKVGIKSNLAIIDGDKVIEMKPSDVDKGIAARKICDLYQPDFILSIGDDRTDEDMFKALPDNALTIKVGVKNSSAKFTIKTQEEVMTILNTFL

SEQ ID NO: 2841 - protein, 551 aa, delta proteobacterium MLMS-1
MESAQRLDHNSELSLLEFPYIIRWREDRCSRCGRCTAVCPTRAIEASVLAQRLVHSQGDTPLPATIKRVSSVIRQVNDIDRHCVGCGTCSLVCPNMAIMPEYNPRHKFLFHKNRGGIPYARGGRRNDPATSTLDKLKFTRISMLTDPSLDAGRHEFHIRTLMGRNLPAEELPLERQGDLLLPRPGAFIPPVREIFPIRIGGMSIGALSPPMWEGLAMGVAYLNEVENIPVVMCSGEGGLPPRLLKSRYLKYFIPQIASGYFGWDEIIHALPEMIEDPAAIEIKYGQGAKPGDGGLLMAYKVLKLIAKIRGVPMYVDLASPPTHQTKYSIEEAVAKMIQSVSMAWGFRVPVYPKISGTKTALAVLNNLARNPYAAALTIDGEDGATGAAYNVSMDKMGHPIASNLRDCYLELVKSGKQNELPLFAAGGVGKEANLAANAAALILLGASGVDIGKYIMQAAAECYGDEYNRCNLCNLGRCPRGITTQDPRLYRRLDADRVAERVVDIFKTAETELKKIFAPMGRSTQLPIGMADGLGVGDQAIADRLSISYVC

SEQ ID NO: 2842 - protein, 278 aa, Brassica rapa
MAAATLGRDQYVYMAKLSEQAERYEEMVQFMEQLVTGGATPSSELTVEERNLLSVAYKNVIGSLRAAWRIVSSIEQKEESRKNEEHATLVKGYRSKVETELSSVCEGILKLLDSHLIPSAAASESKVFYLKMKGDYHRYMAEFKSGDERKVAAEDTMGAYKAAQDIAAADMAPTHPIRLGLALNFSVFYYEILNSSDKACNMAKQAFEEAIAELDTLGEESYKDSTLIMQLLRDNLTLWTSDMQLFLTGILGKSNGNNTSNSHKTNPIAHNYSGNKRN

SEQ ID NO: 2843 - protein, 503 aa, Methanosarcina barkeri str. Fusaro; identical to SEQ ID NO: 975

SEQ ID NO: 2844 - protein, 207 aa, Arabidopsis arenosa
MASFQESSDLEAIQSHLFEDLLVCDGFMGDFDFDASFVSGLWCIEPQVPKQEPDSPVLDPDSFVNEFLQVEGESSSSSPELNSSSSSTYETDQSVKKAERFEEEEEARHYRGVRRRPWGKFAAEIRDPAKKGSRIWLGTFESDVDAARAYDCAAFKLRGRKAVLNFPLDAGKYEAPANSGRKRKRSDVQEELQRTQSNSSSSSCDAF

SEQ ID NO: 2845 - protein, 913 aa, Vitis vinifera
MPGNKYNGISSVPTSRVERLLRDRELRKSSRASHPNEANDTNRGTEVLEHEGDNLGSSHVEQHSETAAIRGVLSEECEKQETRPARQRLLVVANRLPVSAIRRGEESWSLEISAGGLVSALLGVKEFEARWIGWAGVNVPDEAGQRALTKALAEKMCIPVFLDEDIVHQYYNGYCNNILWPLFHYLGLPQEDRLATTRSFQSQFAAYKKANQMFADVVNKHYEEGDVVWCHDYHLMFLPKCLKKYNSEMKVGWFLHTPFPSSEIHRTLPSRSELLHSVLAADLVGFHTYDYARHFVSACTRILGLEGTPEGVEDQGRLTRVAAFPIGIDSHRFIRALDAPQVQDRINELKRTFTGRKVMLGVDRLDMIKGIPQKILAFEKFLEENSEWQQKVVLLQIAVPTRTDVPEYQKLTSQVHEIVGRINGRFGTLTAVPIHHLDRSLDFYALCALYAVTDVALVTSLRDGMNLVSYEFVACQESKKGVLILSEFAGAAQSLGAGAILVNPWNITEKEKNGMSITFEHVKNHTAQEWAETFVSELNDTVVEADLRKRKVPPRLTPENAIKCYLQSNNRLLILGFNVTLTEPVDTPGSRGGDQIKEMDLKLHPELKGPLTALGNDPKTTIVVLSGSDRTVLDDNFGEFDMWLAAENGMFLRHTKGEWMTTMPEHLNMEWVDSVKHVFEYFTERTPRSQLQKRETSLVWNYKYADAEFGKLQARDMLQHLWTGPISNASVDVVQGSRSVEVRAVGVTKGAAIDRILGEIVHNKSMTSPIDYVLCAGHFLGKDEDVYTFFEPELPSDNISMAKSRAIDAFKLSGERKSSLKLPANKSGSKSSHGKTQRPLPNPDKKTPDHSSGSGSGRRPSPEKTSWNVLDLKGENYFSCAVGRTRTKARFTFGSSDEVVSFLKELAGAKSSF

SEQ ID NO: 2846 - protein, 478 aa, Acinetobacter sp. ADP1
MSRLIILSNRVSLPQTECVAGGLAVAMQDALSQLGGVWVGWNGKKIEQPFEQHFDILYKSKITYMTCALTQQQYQDYYCGFSNNTLWPAMHDREDLIEYNPKEFKTYQDVNRLFATKIAEFAQPDDLIWVQDYHFLSVARHCRELGMQNKIGFFLHIPFASLEIWRKIPCAEQLMDDLCHYNLIGLQTAQDQENCISVCSVLLKAQKIQNNMISLNQRVTQIQDYPIGVDVKGIQKTLSNLSDQDQYLTNPSAIKTIIGVDRIDYSKGLFERFNAFAEFLDRNTAFHQKVQHVQIASPCRLEVATYKRLFERFKLKVELINSEFSQDNWLPIVCHYDSKPHHELMQFYRNADICWVTSLKDGMNLVAKEYIAAQNPDNPGVLILSEFAGAAEQMQDALIVNPKNRDAMIKALKLALNMSLEERQYRYHKLIKQLIEYDINQWRDDFLKDLNSSQYIQNFDYNHRLSTVLFYPNYSSRI

SEQ ID NO: 2847 - protein, 256 aa, Yarrowia lipolytica CLIB122
MTREDNIYLARLSEQAGRYEDMVEYMKEIATGDQELSVEERNLLSVAYKNVIGAHRAWWRVVSSCEQKEEQKGKETKIIDDFRQKIEAGLQDICHDILNVLEKHLIPKLEKPSAEATEAAAKDGADPSELSESIVFYYKMKGDYYRYLAEFTTDDKRKEAAEKSLQAYQFASDEATSKLPPTHHIRLGLALNFSVFYYEILNSPERACQLAKQAFDDAIADIDSITEERSKDYALIMQLLRDNLTLWTNNDEPEQA

SEQ ID NO: 2848 - protein, 260 aa, Populus trichocarpa
MAATPSAREENVYMAKLAEQAERYEEMVEYMEKVSASIDNEELTVEERNLLSVAYKNVIGARRASWRIISSIEQKEESRGNEDHVSVIRDYRAKIETELSSICDGILKLLDTRLIPTASSGDSKVFYLKMKGDYHRYLAEFKTGAERKEAAESTLTAYKSAQDIANAELAPTHPIRLGLALNFSVFYYEILNSPDRACNLAKQAFDEAIAELDTLGEESYKDSTLIMQLLRDNLTLWTSDMQDDAADEIKEAAPKTGDEQ

SEQ ID NO: 2849 - protein, 502 aa, Glycine max
FGSSLKLLAMEQLLIQHPEYREKVVLVQIANPARGRGKDVKEVQAETKATVKRINETFGKPGFDPVILIEEPLKFYERVAYYVVAECCLVTAVRDGMNLIPYEYIISRQGNEMLDAVLGLASSPKKKSMLVVSEFIGCSPSLSGAIRVNPWNIDAVADAMDSALEMADSEKELRHEKHYRYVSTHDVGYWARSFLQDLERTCSHHVRRRWWGIGFGLSFRVVALDPNFKKLSMEHIVSAYKRTATRAILLDYDGTLMPQSSTIDKSPSSKSIEILSSLCRDKNNMVFLVSARSRKMLSEWFSPCENLGVAAEHGYFLRMKRDEEWETHVAATDTSWKQIAEPVMKLYTETTDGSTIEDKETALVWCYEDADPDFGSCQAKELLDHLESVLANEPVTVKSDQNNVEVKPQGVSKGLVATRLLSAMQEKGMCPDFVLCIGDDRSDEDMFEVITSSMGGLIAPKAEVFACTVCRKPSKAKYYLDDTTEIVRLLQGLACVSEQIDK

SEQ ID NO: 2850 - protein, 261 aa, Populus tremula x Populus alba
MAATPSAREESVYMAKLAEQAERYEEMVEYMEKVSASLENEELTVEERNLLSVAYKNVIGARRASWRIISSIEQKEESRGNEDHVSVIRDYRAKIETELSSICDGILKLLDSRLIPTASAGDSKVFYLKMKGDYHRYLAEFKTGAERKEAAESTLTAYKAAQDIANAELAPTHPIRLGLALNFSVFYYEILNSPDRACSLAKQAFDEAIAELDTLGEESYKDSTLIMQLLRDNLTLWTSDMQDDGADEIKEAAPKPGDEQQ

SEQ ID NO: 2851 - protein, 132 aa, Arabidopsis lyrata
MDQGGRSGGGGGGGGAEQMKYRGVRRRPWGKYAAEIRDSRKHGERVWLGTFDTAEDAARAYDRAAYSMRGKAAILNFPHEYSMGTGSSSTAASSSSSSRQVFEFEYLDDSVLDELLEYGENYNKTHNINTGK

SEQ ID NO: 2852 - protein, 204 aa, Oryza sativa
  misc_feature (33)..(33): Xaa can be any naturally occurring amino acid
  misc_feature (56)..(56): Xaa can be any naturally occurring amino acid
  misc_feature (116)..(116): Xaa can be any naturally occurring amino acid
WHEGSICFRCAPVFLPDPLNERFYHRFCKRHLXPLFHYMLPFSSSASPSPSSSSSXSSSSSPSSSSGSGRFDRGAWEAYVLANKFFFEKVVEVINPEDDYVWVHDYHLMALPTFLXRRFNRLRIGFFLHSPFPSSEIYRTLPVREEILKALLNCDLIGFHTFDYARHFLSCSSRMLGLEYQSTRGYIGLDYFGRTVGIKIMPVG

SEQ ID NO: 2853 - protein, 520 aa, Zea mays
MEAVGVTPAPVAAPEKKKLLDLKDPFPAAANSGAKASSASKWATKKKLVGGDAGYVLEDVPHLTDYMPQLPTYPNPLQDNPAYSVVKQYFVNPDDTVTQKIVVHKTSARGTHFRRAGPRQRVYFQSDEVNAAIVTCGGLCPGLNTVIRELVCGLYDMYGVSSVVGIEGGYKGFYSKNTVALTPKSVNDIHKRGGTVLGTSRGGHDTAKIVDCLQDRGINQVYIIGGDGTQKGASVIYEEVRRRGLKCSVVGVPKTIDNDIAVIDKSFGFDTAVEEAQRAINAAHVEAESAENGIGVVKLMGRNSGFIAMYATLASRDVDCCLIPESPFYLEGKGGLLEFVERRLKDNGHMVIVVAEGAGQDLIARSMNFVDTQDASGNKLLLDVGLWLSQKIKDHFKKKPSFPITLKYIDPTYMIRAVRSNASDNVYCTLLAHSALHGAMAGYTGFTVAPRITEKQNKVVITDRMWARVLCSTNQPCFLSHEDVENMKHDDDEHHHMHNTQLLEGGSSPVSKCNGSAAAV

SEQ ID NO: 2854 - protein, 94 aa, Picea glauca
  misc_feature (6)..(6): Xaa can be any naturally occurring amino acid
DICRIXLAEQAERYEEMVEFMEKVTKGVEVEELTVEERNLLSVAYKNVIGARRASWRIIWSIEQKEESRGNDEHVVTIREYRSKVESYLSACSA

SEQ ID NO: 2855 - protein, 1601 aa, Opitutaceae bacterium TAV2; identical to SEQ ID NO: 999

SEQ ID NO: 2856 - protein, 501 aa, Clostridium thermocellum ATCC 27405; identical to SEQ ID NO: 1000

SEQ ID NO: 2857 - protein, 536 aa, unidentified eubacterium SCB49; identical to SEQ ID NO: 1001

SEQ ID NO: 2858 - protein, 1501 aa, Candidatus Pelagibacter ubique HTCC1002; identical to SEQ ID NO: 1003

SEQ ID NO: 2859 - protein, 213 aa, Brassica napus
  misc_feature (186)..(187): Xaa can be any naturally occurring amino acid
  misc_feature (194)..(195): Xaa can be any naturally occurring amino acid
  misc_feature (201)..(201): Xaa can be any naturally occurring amino acid
  misc_feature (208)..(208): Xaa can be any naturally occurring amino acid
  misc_feature (211)..(211): Xaa can be any naturally occurring amino acid
METGKLNQTPSKKPGATTMEDVLVALHETKEERDLRIRRLFEFFDSSKLGFLDDTHIEKGLTSLRIPPKYKYARDLLRVCDSNRDGRVDYEEFRRYMDAKELELYIIFKAIDVERNDDICPEELSQALVKSGIEIEDKELASFMEHVDKDKNGTITFQEWRDFLLLHPHEATVENIYHHWERVRLXXIGEQPVXXDGISKXAQRNKLXLPXRT

SEQ ID NO: 2860 - protein, 515 aa, Colwellia psychrerythraea 34H; identical to SEQ ID NO: 1004

SEQ ID NO: 2861 - protein, 280 aa, Securigera parviflora
KRGNILEKGPENASQVMLSGPVLNEGDLESLLKDSLLKPQVLPTFFDITKGIDGSLEKALNKLCEAADEAVRNGSQLLILSDRSEALEPTHPSIPILLAVGTVHQHLIQNGLRMSASIIADTAQCFSTHQFACLVGYGASAVCPYLALETCRQWRLSGKTVNLMRNGKMPTVSIEQAQKNYCKAVKAGLLKILSKMGISLLSSYCGAQIFEVYGLGKEVVDLAFRGSVSKIGGLTFDELARETLSFWVKAFSEDTAKRLENFGFIQFRPGGEYHANNPEM

SEQ ID NO: 2862 - protein, 629 aa, Oryza sativa Japonica Group
MPSLPNSGDEGGAPPPTPPPPGARRVVVAHRLPLRADPNPGAPHGFDFSLDPHALPLQLSHGVPRPVVFVGVLPSAVAEAVQASDELAADLLARFSCYLVFLPAKLHADFYDGFCKHYMWPHLHYLLPLAPSYGRGGGLPFNGDLYRAFLTVNTHFAERVFELLNPDEDLVFVHDYHLWAFPTFLRHKSPRARIGFFLHSPFPSSELFRAIPVREDLLRALLNADLVGFHTFDYARHFLSACSRVLGLSNRSRRGYIGIEYFGRTVVVKILSVGIDMGQLRAVLPLPETVAKANEIADKYRGRQLMLGVDDMDLFKGIGLKLLAMERLLESRADLRGQVVLVQINNPARSLGRDVDEVRAEVLAIRDRINARFGWAGYEPVVVIDGAMPMHDKVAFYTSADICIVNAVRDGLNRIPYFYTVCRQEGPVPTAPAGKPRQSAIIVSEFVGCSPSLSGAIRVNPWNVDDVADAMNTALRMSDGEKQLRQEKHYRYVSTHDVVYWAQSFDQDLQKACKDNSSMVILNFGLGMGFRVVALGPSFKKLSPELIDQAYRQTGNRLILLDYDGTVMPQGLINKAPSEEVIRTLNELCSDPMNTVFVVSGRGKDELAEWFAPCDEKLGISAEHGYFTR

SEQ ID NO: 2863 - protein, 247 aa, Solanum tuberosum
MYQLPISTELPPTFFPAEFPVYCRSSSFSSLMPCLTESWGDLPLKVNDSEDMVIYGLLQDAFSIGWTPSNLTSSEVKPEPREEIEPVMSTSVSPPTETAAAPAALQPKGRHYRGVRQRPWGKFAAEIRDPAKNGARVWLGTYESAEEAALAYDKAAFRMRGTKALLNFPHRIGLNEPEPVRVTVKRRLPEPASSSVSSASESGSPKRRRKGVAAKQAELEVQSRGPNVIQVGCQMEQFPVGEQLLVN

SEQ ID NO: 2864 - protein, 262 aa, Picea sitchensis
MSPAESSREESVYMAKLAEQAERYEEMVEYMEKVAKTVDVEELTVEERNLLSVAYKNVIGARRASWRIISSIEQKEESRGNEEHVTMIREYRGKVESELSNICDGILRLLDTHLIPSSTSGESKVFYLKMKGDYHRYLAEFKTGAERKEAAESTLLAYKAAQDIAIAELAPTHPIRLGLALNFSVFYYEILNSPDRACTLAKQAFDEAIAELDTLGEESYKDSTLIMQLLRDNLTLWTSDMQEETGGDEIKEAPKKEEGDGH

SEQ ID NO: 2865 - protein, 227 aa, Glomus mosseae
RDGMNTTSLEYIMCQQENHGPLILSEFTGMAGSLGTAIMVNPWDYDGVAKTINDALSLPAEEKKAKHMQLYKHVTVHTAQFWAKSFTKELVASLNNHNQSSITPYLDMDYLQKKYKSAKKRLLLFDYDGTLTPIVRTPSAAVPPPRMLEALDELTNDPNNTTWVVSGRDSTTLENWLGSVKKLGFSAEHGSFLKNPDGDKWINLTEDIDMSWKNDVLEIFTYYTERT

SEQ ID NO: 2866 - protein, 260 aa, Brassica napus; identical to SEQ ID NO: 2764

SEQ ID NO: 2867 - protein, 224 aa, Zea mays
MLLQGHSGIRLDYWLLLEVTIMCLFIRWSRYSPWESPDLKVDYGWKKMVEPVMDLYVAVTDGSSVETKETALVWHYEGTDPVFGPSQAKELRDHLSDVLAKEPVSVRSGYNIVEVNPQEVDKGTAVQRIIAAMRDRGRIPDFILCVGDDASDEDMFKAVTAPSNKSAFPEDAEVFACTIGTKPSLAKYYLDDPVEVLSMLKGLIKSSVEERPGDGEGPSRVSFD

SEQ ID NO: 2868 - protein, 557 aa, Burkholderia thailandensis E264; identical to SEQ ID NO: 1016

SEQ ID NO: 2869 - protein, 502 aa, Microcoleus chthonoplastes PCC 7420
MKSSLVILYHREPYDEVVENGKVHYRAKKSPNGIVPTLKSFFAGVNQGTWIAWKQVNAKQKANFEQRIVVEGEANYNVRRIPLSADQVKHFYHITSKEAFWPILHSFPYHFTYETSDWENFHTINRLFAEAACDEAADDALIWVHDYNLWLVPYYIRQLKPNARIAFFHHTPFPSVDIFNILPWREEITDSLLCCDIVGFHIPRYSENFVNVARSLRPVEIVKKEPVPEHITPMGIALAEPEMTTQIRYKDQLVNIDPFPVGANPQQILSILHKPETQKRFEEIKESLGDRKLIISAGRVDYVKGTREKLEAYGRLLARRPDLHGKINMLVTCVASASGMRVYKTAQTQIEQLAGKINGRYGNLDWLPIMLYTQPVPLPDLLCYYKAADICWTTPLRDGLNLVAKEYIITHEKQEGVLVLSEFVGAAVELPDAILTNPYSIDRMDESIEQALAMSPEEQKERMAKMYDIVTKYDIQCWADHLFEMFEKTKHQTAKQQQAVAV

SEQ ID NO: 2870 - protein, 516 aa, Oryza sativa Japonica Group
MVSKSYTNLLDMSGEDVFDFQQPFRSLPRFVTSPSITSNPDWDTSNADDSVGPASCCVRKIIVSNFLPLNCTKDEATGQWSFSMDDNQLLVQLKDGFPMESEVVYVGSLNAEVDPGEQDQLSQKLFREYKCIPTFLPADLQQQFYHGFCKQQLWPLFHYMLPICLDKGELFDRSLFQAYVRANKIFGDKVMEAINSDDDCVWVHDYHLMLLPTFLRKKLHRIKIGFFLHSPFPSSEIYRTLPVRDEILKSLLNADLIGFQTFDYARHFLSCCSRLLGLNYESKRGHIGIEYFGRTVSLKILAVGVHVGRLESVLRLPATISKVQEIEQRYKGKMVMLGVDDMDIFKGISLKLLGLEFLLERTPKLRGKVVLVQIINPARSTGKDVEEAINEAVSVAERINIKYGSAEYKPVILIDYPIPSYEKIAYYAASDCCIVNAVRDGMNLIPYEYTVCRQGNEEIDKLRGVDKSSHHTSTLIVSEFVGCSPSLSGAFRVNPWSIEDVADALYKAMDLTQSER

SEQ ID NO: 2871 - protein, 249 aa, Brassica napus
VKTHTAQEWAETFVSELNDTVIEAQLRISKVPPELPQDDAIRRYSKSTNRLLILGFNATLTEPVDNQGRRGDQIKEMDLNLHPELKGPLKTLCSDPSTTIVVLSGSSRSVLDKNFGEYDMWLAAENGMFLRLTNGEWMTTMPEHLNMEWVDSVKHVFKYFTERTPRSHFETRDTSLIWNYKYADIEFGRLQARDLLQHLWTGPISNASVDVVQGSRSVEVRAVGVTKGAAIDRILGEIVHSKSMTTPID

SEQ ID NO: 2872 - protein, 1548 aa, Nostoc sp. PCC 7120; identical to SEQ ID NO: 1031

SEQ ID NO: 2873 - protein, 847 aa, Chlamydomonas reinhardtii; identical to SEQ ID NO: 1032

SEQ ID NO: 2874 - protein, 248 aa, Zea mays
MEEREKLVCLAKLAEQAERYDDMVEFMKNLARMDVDMSAEERHLFSVGFKNTIGAKRASWRIICSHEQKVAADRQTGVMIDAYKKKVEEELRKVCNEVLSVIAIHCLPLASTGENIVFFYKMKGDYYRYLAEFSTGTEKKAASDQSLMAYQHAMVVASSELSPAHQIRLGLALNLSVFFYEIMNSHERACQVAKQAFDEALTEINSGEGVYKDSTIMMQLLKDNLALWTSELTGGEASKGSDDVDMEG

SEQ ID NO: 2875 - protein, 457 aa, Carica papaya
MANHRIGETGLSDSPPSNHHHHHVSYVVHGINNNPASFINQEGSAFDFGELEEAIVLQGVKLSNDEGKALFTEARPAATLEMFPSWPIRFHHTPRGSSKSGGESTEESGSGLNSVSEAQLDLESPITIKPSSSSSSSHHHHHLQVDMANDASTPGSSNNQTPPKPTQDKRKVSSSDKQLDAKTLRRLAQNREAARKSRLRKKAYVQQLESSRIKLTQLEQDLQRARSQGLFLVGCGGGGGNISPGGAIFDMEYGRWVEDDERHISELRRGLQAHLSDKDLGVMVDGYISHYDEIFRLRGIAAKSDVFHLITGMWTTPAERCFIWMGGFRPSDLIKMLISQLDPLTEQQVMGIYSLQHSSQQAEEALYQGLEQLQQSLMDTIAGGPLVDGMQQMAVALAKISNLEGFVRQADNLRQQTLHQLRRILTVRQAARCFLVIAEYYARLRALSSLWATRPRE

SEQ ID NO: 2876 - protein, 622 aa, Gibberella zeae PH-1
MSVTSIVEGVGDGLREPQNSRDARVEELWSSLEPDHTGELDLKGLKKGLRRIDHPMKNADDMLKRIMEEVDRNGDGKIQYNEFRKFVENAERQLFALFRSIDKDGNGKLDKLELQTAFKSAGLTLSNRRLSEFFDDMDINNDGYVSFDEWRNFLLFMPPHDHDSQLHAVLDFYYSVVSVTPEGDTLVSEETLEGLGTDGFRSLFITLFGSLLRVAFPFEYPKPIPDRTSTSVSKPSISNPNESSSKTENMATAAAVTYPDYDDPATEISQEVESLTQHLDDGTHEHTTGTSTTVHKKFRLTQFVPDPGYFLAGAIAGGVSRTATAPLDRLKVYLLVNTTSRAETAGAALMQGRPIAALQNAAKPFTDAFRDLVRSGGARSLFAGNGLNVVKIMPETAIKFGSYEAAKRALANFEGHGDPKKLSSWSKFASGGLAGMIAQASVYPLDTLKFRLQCETVKDGLTGAALVRQTAVKMYADGGLRACYRGLTMGLIGMFPYSAIDMGTFELLKKSYKSYYARVENVHEDDIKLGNIATGIIGASSGAFGASVVYPLNVVRTRLQTQGTAMHPATYTGIWDVTKKTIQREGYRGLYKGLTPNLLKVAPALSITWVMYENSKRILGLS

SEQ ID NO: 2877 - protein, 2145 aa, Saccharomyces cerevisiae; identical to SEQ ID NO: 1041

SEQ ID NO: 2878 - protein, 1557 aa, Erythrobacter sp. SD-21; identical to SEQ ID NO: 1042

SEQ ID NO: 2879 - protein, 588 aa, Hordeum vulgare
MVMGSTDRFDKSPLLDGGSSSQESTTEYTGDGSVCTSGHPASKKHTGNWKASSLTIVCSFCCYLAYSSIGKNLVSYLTKVLHETNLDAARHVATWRGTSYLAPLVGAFVADSYLGKYRTALIACTIFIMGMMMLLLSAALPLISAGPHAWTLWADPVSSRYIMFLVRLYMVGLGYGAQSPCVTSFGADQFDDTDEVEKTRKSSFFNWHYFSINAGSLIAGTVIVWVQEHEGWLWGFTISTLFVTLGISVFSLGSIVYRFQKPGGSPLARIWQVVVAASRNFDKVLPCDSSALYEFSGQGSAIEGSRKLVHTSGLEFFDKAAIVTLPDCESPGQLNEWKICTVTQVEELKILIRMFPIWSAMVLFAAVQEQMFSTFVEQGMTMEKHIGSFEIPAASFQSIDTITVIMLVPIYEKVLVPVIRKFTGRANGITSPQRIGIGLCFSMFSMLLAALVESNRLQIAQAEGLVHSKVVVPMSILWQGPQYFLLGVAEVFSNIGLTEFFYDESPDAMRSLGMAFSLLNISVGNYLSSFILSLVPVFTARGGSPGWIPDNLNEGHLDRFYLMMAGLSLLNIFVFAFYARRYKCKKAS

SEQ ID NO: 2880 - protein, 212 aa, Oryza sativa Japonica Group
MSLSLGFSAGAGVGADRLAAAPALQAAGALPPRVDVSLSLARAANGQPSSYLPLNENDSLDMVLFDVLREASAVAALSSSSSSSPELGARTTAPVVAGHPAGRKGGGGGGGGRGAAARGGAAGGRHYRGVRRRPWGKYAAEIRDPTRHGARLWLGTFGTAEEAAAAYDRAAFRMRGAKALLNFPPAVAGDGARRGAAAAAKQVGMSDGECVI

SEQ ID NO: 2881 - protein, 1503 aa, Vibrio vulnificus YJ016; identical to SEQ ID NO: 1054

SEQ ID NO: 2882 - protein, 1512 aa, Vibrio vulnificus YJ016; identical to SEQ ID NO: 1057

SEQ ID NO: 2883 - protein, 557 aa, Ralstonia solanacearum GMI1000
MRPIISTPAGTSSLAIPDTPGADEAQRADPFQPASRPRSRHPQFERLPSPPVRTRSQELRAARLRRCASDVSATPEARPRLVVVSNRLIDPQRPAAGGLAVALGDMMRDTDGLWFGWSGKTVDEPDTACVRTEPFGRTTLAQVDLGRTDYEGYYAGFSNSVLWPIFHERVKWADLNPAYFKAYEAVNRILASHLRPMLRDSDILWVHDYHLIPFAQALRALGCTQRMGFFNHIPLPSPDVIRRIPQHRQLMRALASYDLVGMQSPRDVLNLQRYWDAENIAAQSERRHDSVHAFPIGIDVESLRALVPSPASQAVIDEVRGAAGRCVLMIGVDRLDYSKGIPTRLKAFRQLLQTHARMRSKVTLVQIAAPTRQSIPAYARLRDKTEQLVREINRRFGTGDWTPVMYFSESVDRTALPQLYRMSRVGVVTPVADGMNLVAKEYVAAQAARDPGVLVLSRGAGAASQLRDALLVPSKNRAATADAYAQALSMPLEERKARHAGLMRNIETEDLRWWRDNYLKALACAPWPAGPEGAEDTRPDAGGASVSGASDGGLTQA

SEQ ID NO: 2884 - protein, 2111 aa, Schizosaccharomyces pombe; identical to SEQ ID NO: 1059

SEQ ID NO: 2885 - protein, 878 aa, Oryza sativa Japonica Group
MFSRSYTNLVDLANGNLSALDYGGGGGRGGGGNGAGGRPPRARRMQRTMTTPGTLAELDEERAGSVTSDVPSSLASDRLIVVANTLPVRCERRPDGRGWSFCWDEDSLLLHLRDGLPDDMEVLYVGSLRADVPSAEQDDVAQALLDRFRCVPAFLPKDVLDRFYHGFCKQTLWPLFHYMLPFTSDHGGRFDRSQWEAYVLANKLFSQRVIEVLNPEDDYIWIHDYHLLALPSFLRRRFNRLRIGFFLHSPFPSSELYRSLPVRDEILKSLLNCDLIGFHTFDYARHFLSCCSRMLGIEYQSKRGYIGLDYFGRTVGIKIMPVGINMTQLQTQIRLPDLEWRVAELRKQFDGKTVMLGVDDMDIFKGINLKVLAFEQMLRTHPKWQRKAVLVQIANPRGGGGKDLEEIQAEIDESCRRINAQFSRPGYVPVVIINRALSSVERMAYYTVAECVVVTAVRDGMNLTPYEYIVCRQGFPDLDGSGDDGPRRKSMLVVSEFIGCSPSLSGAIRVNPWNIDTTAEAMNESIALSENEKQLRHEKHYRYVSSHDVAYWSKSYIHDLERSCRDHFRRRCWGIGLGFGFRVVALDRNFKKLTVDSIVTDYKNSKSRVILLDYDGTLVPQTTINRTPNESVVKIMNALCDDKKNVVFIVSGRGRDSLEKWFSPCQDLGIAAEHGYFMRWTRDEQWQLNNQCSEFGWMQMAKPVMNLYTEATDGSYIETKESALVWHHQDADPGFGSSQAKEMLDHLESVLANEPVCVKSGQQIVEVKPQGVSKGFVAEKILSTLTENKRQADFVLCIGDDRSDEDMFEGIADIMRRSIVDPQTSLYACTVGQKPSKAKYYLDDTNDVLNMLEALADASEETDSQEDAEEITSIPDPE

SEQ ID NO: 2886 - protein, 472 aa, Burkholderia thailandensis E264
MSRLIVVSNRVAAGQDARPTAGGLAVGVLDALKETGGVWFGWNGEIAGAPEEPAIERDGNVTYATVGLTRRDYDQYYRGFSNATLWPVFHYRGDLARFDRQEYAGYLRVNCALAKQLRALVQPDDIIWVHDYHLLPFAHCLRELGVKNPIGFFLHIPFPSPEVLRTVPPHEELMKFMCAYDVVGLQTEGDKQAFVDYIERRGLGTSSEDGILHAHGRVVKVAAYPIGIYPDAIGKAAVEYGSRKAVKALRDTMRERKLVISVDRLDYSKGLVERFQAFERMLANAPGWQGRVSLVQIAPPTRSDVQTYQRIRQTLEGEAGRINGRFAQLDWTPIQYLNRKYERNLLMALFRLSQVGYVTPLRDGMNLVAKEYVASQDPNDPGVLVLSEFAGAAAELPGALLVNPFDLSQMAESLERALAMPLEERQARHAENIARLRKNDLSVWRDSFLADLRSVATAASVTQRAGRRVANA

SEQ ID NO: 2887 - protein, 817 aa, Physcomitrella patens subsp. patens
MLIVGHMLPLTASRGPDEQGWTFTWDEDSLALQLKAGLPKDMEVIYIGCLKVEVDDSEQDEVAATLLENFNCVPAFLPLEVRSRFYHGFCKQMLWPLFHYMLPLSPEHGGRFNRSFWQAYVSVNKVFADKVMEVISPDDDYVWIHDYHLMVLPTFLRKRFNKVRLGFFLHSPFPSSEIYRTLPVRDEILRALLNADLIGFHTFDYARHFLSCCSRMLGLEYESKRGYIGLEYYGRTVGIKILPVGIHMEQLNAGLRLADTEWRIAELRAEFKDRTVLLGVDDMDIFKGIGLKLLALEQLLRQHPKTRNRVVLVQIANPARGRGRDIEDLQNEAYTIAQRINDEFGNDDYQPVVLLERPVALYERIAYYTIAECCVVTAVRDGMNLIPYEYIACREGSPELDAGVDRGPCPAPLKKSMLIVSEFIGCSPSLSGAIRVNPWNIEALAEAMNMSITLPDIEQQMRHEKHFRYVNTHDVAYWARSFMTDLVRTCKGHARRRCYGIGFGLGFRVVALDPDFRRLRTDLIVSAYKKSTSRAILLDYDGTMIPQASINNPMPTPEVLSILNTLCSDRKNFVVIVSGRPRQILNECFSTCKRLGLAAEHGYFYRWHQDIDWVTCRYQRDDFDEYENDRMEWKEIVEPVMQQYTESTDGSYIEEKESAMVWHHRDADPDFGSWQAKELQDHLDSVLANQPVSVKSGAHIVEVKPQGVSKGVVVEELLAMMALKSAAPDFVLCIGDDRSDEDMFESIATVTARSGLAEVFACTVGQKPSKAKYYLDDIAEVIKLLQGIAAASDPGATPASLPTATSSQVSLETSLHI

SEQ ID NO: 2888 - protein, 549 aa, Oceanobacter sp. RED65; identical to SEQ ID NO: 1068

SEQ ID NO: 2889 - protein, 255 aa, Arabidopsis thaliana; identical to SEQ ID NO: 2448

SEQ ID NO: 2890 - protein, 749 aa, Solibacter usitatus Ellin6076
MRRMVPFTLALLAGLALLAWAASGVVQTTARRWFERDIGARANLVLVSSEKSLANNWNGEPGELQKQLAALTRDERVMGAAACDPDLKTRAATVGFPEDFGCWAVGTRVRSIDSNGVAHFRPWSTVSDLPTGRVHVSVMPLANPAGQELGFAILLHDLSFIDRREAQARTFLFATFGILAFIALLLPVWVARLARYDWSRELSSLLRGGGKQQQSREFQPILSDVRELVSRMAYDRDDAPGQWNAERLKHSLNSNLHGERVVILSNREPYIHEFTPHGGIEVQHPASGLVTALEPVMRACSGVWVAHGSGSADRETVDRKDHVRVPPGEESYHIRRVWLTEEEQQGYYYGFSNEGLWPLCHVAYARPIFRAEDWRQYRAVNQKFADAVLSEVDSSDPIILVQDYHFALVPAMIRKRLPAATVIMFWHIPWPNAENVGICPWRNQLLEGLLGSSILGFHTQLHCNNFLDSVDRYLETRIDRENNAVVMQGHRTLIRPYPISLEWPVHWAVEAPSPEDCRAQVWRDLGLKRDALLGVGIDRLDYTKGIEERLLAVEQLLERYPEYRGRFSFAQLAAPSRTKIERYRQLSEDVERLAERINQRFGKPDYRPVILLRSHHEPPEVFRYFRASDLCYVSSLHDGMNLVAKEYVAARTDLKGVLVLSEFTGAARELSEALIVNPYDLEASSDALAAALAMPLEEQRDRMASMRSLLVQFNVYRWAGRMLVDAARLRNQERVAGRLAERTGVGSSA

SEQ ID NO: 2891 - protein, 547 aa, Prosthecochloris aestuarii DSM 271; identical to SEQ ID NO: 1073

SEQ ID NO: 2892 - protein, 1140 aa, Debaryomyces hansenii CBS767
MSGIGNQAILSDEEYSDTIGCLNKLKVPQIKDIVRCLSLPLSGKKQDLIDRVVGYLEQGRRFNDNVRLLAVRTIVLKVRNNDPIPNFTALYDALRTGAYNFVEGIGQYSNYKNQSTSSSSSSQNKSSNESHPYKGHVLYFKESPFYKLKRLVHGGPQIAIPSKAKAVCRYQFILNDEENKLLKLSDEKIRFYLLCGVSNNSTASTSSALLQFPIPIEIHVNGTHIKENVRGIKGKPGTARPANVTAHILPDQQLNKIEMAYAGTTESFLLYLYIVEYVSCEEIIQTIVQQPHIHKNSTIVEIKKEYSNDDGEDDDIIVSTSSISLKCPLTYARMRYPTKSIFCQHIQCFDGLSYLQLQEQVPNWICPVCSNKIEISHLAISDYYCDILENTNDEVENVRINDDGTWEAINETSNSNNNNSNNNNNNNYRSSESSYNENKLTEVKRSPLSRVLSEETRERTPSYQPEAIEIISIDSDTDDDVDMNEPTDPYSPHGIGAQMLTLLDSNRTQPPNLPHSNTVTDHTSVVDDSDVHSLNRHTIRDNNVPNPSKINNDNISLPPINQQTVTNNDEHLAASNRNVPATVLARKSTINEHNNLHSDITNSKSGASNSEFGNERGVRNVPPHGAINNLNRFNSTNNRKNTETEGNILAPINQNNSNSNPRNNELLIIRPAPLPGHHSIGHTSHNRLMPGVQLNNTPSIQDQESMSIQRIHGLLPISNNAPMEDRRIQLVTNINLMSSSSVPKRTSTTESVPLLEKPKGQTTSNQRSTSVPVPLTLKAHEQNVRDKGKNYSDPPTTLLGAKLRPLKLLPMKVNPSQNSSALPNIHQLENLLGIRNHDDRQLYQLSKRTPNQTTNQRASISNIYEAPREHSKHGPSLAADISRTPNSSRPSPLMFYGRDSFSNVYQSHNPTIRESNQQMGSVSLNDYYRINRTDKTQHLSSATSHELDTNEKSPLQSQNLPLYNSKQAPRVEPLNQAYNQKQASNMNGSDNGSNYDPTQSVDKTSVSPPAQPNSLRYSRSAFDLMNKNQSEPVTSDKQQGVVGLLGIVLSEDSMHMNQPSPQPPHSQRSDLTPLKGKIDNMRLGTSSDKKRSLSGSSSGRTWNKKMNPDHNDSIEGKGTNHDTTPSKPVYDTLNNQRLHG

SEQ ID NO: 2893 - protein, 585 aa, Oryza sativa Japonica Group
MGSSLEAEQQSLIVRTTEPEDVDDYTGDGSVGFSGQPILKHETGNWRACSLILGTEVCERLAYYGISKSLVTYLSTRLHEGNVSAARNFTTWQGTCYLTPLIGATLADSYWGKYKTIAVFSTIYFLGMAALTFSALVPSLQPPQCFGSFCPQPTVPQYLIYFVGLYMIALGSGGIKPCVSSFGADQFDDTDPVERTKKGAFFNWFYFAINIGSLISGTVLIWVQQNCGYGIGFGIPTIFIALAIGSFFIGSQRYRYQIPGGSPLIRVCQVVIAAIHKRNVDLPVDSSVLYELHGKTSAIEGSRKLEHSSEFSFLDKAAVILSNERGGSHDPWRLCTITQVEELKILMRMFPIWATGIVFFTVCAQNSSMFIEQGMALNNQIESFKIPPATLSSLDVISIVVWVPIYETFVVPIASRLTGKERGFSELQRMGIGLFVATTAVATAALVEIKRLEIARSEDLIHSKVPVPMSILWQAPQYLLVGIGEVFTAIGQAEFFYNQSPDSMRSLCSAFALVTVSLGSYLSSFILTLVSYFTTRDDNPGWIPDNLNEGHLDRFFWLIAGLSFLNLLLFVYYAQQYKCKKAAAI

SEQ ID NO: 2894 - protein, 1530 aa, Listeria monocytogenes str. 1/2a F6854; identical to SEQ ID NO: 1082

SEQ ID NO: 2895 - protein, 237 aa, Nicotiana sylvestris
MYQPISTEFPVYHRTSSFSSLMPCLTDTWGDLPLKVDDSEDMVIYGLLSDALTTGWTPFNLTSTEIKAEPREEIEPATSPVPSVAPPAETTTAQAVVPKGRHYRGVRQRPWGKFAAEIRDPAKNGARVWLGTYETAEEAALAYDKAAYRMRGSKALLNFPHRIGLNEPEPVRLTVKRRSPEPASSSISPASENSLPKRRRKAVAAKQAELEVQSRSNVMQVGCQMEQFPVGEQLLVS

SEQ ID NO: 2896 - protein, 274 aa, Oryza sativa Japonica Group
MAQRVGHSADGVFVMIVDEDKSHANFARGMLSSLNFHVIVYSSPVNALVFLENNAQDVAVVLAAVDMKQLSGFQFLEAARVKRQDLQVIMMSAETTMSTMMRCVKLGARFLVKKPLNEETVGNLWQHVDLKVLKMEKIRELLQDPGQETVITISYEEQFSGETEADENNEEEEVNSFEAKKADSVKVQSDEKGHDNAKISNTAAAEGSDEKVSSGDGHVVPKAYNNVNVEESIGSNNTSGEQVSDKIKSDARVGVILVDYPDFEDDETKKPTST

SEQ ID NO: 2897 - protein, 210 aa, Ammopiptanthus mongolicus
MRNPSSMAVKQNQNLKKNNNNIGAEVQVHYRGVRKRPWGRYAAEIRDPARKTRVWLGTFDTAAEAARAYDAAARQFRGLKAKTNFPSENNQCSTVESSTPDSPEREVTRRCDDVCGIDRFPFLPLQTRHVAFGGEGLDVAPVRPVFFSEPAVGTEFVSQSCPIRFDPEPVEFNGGFGIGAQSESDSSFVVDCKPKTVLNLDLKLALPIDA

SEQ ID NO: 2898 - protein, 321 aa, Oryza sativa Japonica Group
MVIDEDKCHADSTSYMLSAELNFSVTVFTSPIKALDFLQNHAEGVDLVLADVHMEEMNGFDFLKVARELHKSIQVIMMSTETTMYTMKRCVKLGAQFLVNKPLDAGTIKNLWQYVDLKVLRMEKIKDLLQGIGDESTCANETNSLAENPKNDTKKKYYLMWTPHLQKKFLHALQILGKDASPKNIKKIMGVDNIDCRQIAAHLQMQILSEDAEYDDVYAAMRRALQYGIVFDESKHSSDPSGDEDEQVVVGGDQDGCANEANDIDSSGDHHQVAAVVTKPCNANASQEIINKMTNSDGMQATKGSKAAVFRLVDYSESDSD

SEQ ID NO: 2899 - protein, 179 aa, Oryza sativa
  misc_feature (56)..(56): Xaa can be any naturally occurring amino acid
  misc_feature (100)..(100): Xaa can be any naturally occurring amino acid
  misc_feature (131)..(131): Xaa can be any naturally occurring amino acid
DKNSMEEASNVTKVFTDNGLEVLGWPVLFNVSVVGRYAKRTMHDIQQICETRKIKXIMRITDREGWTLFVFFVKQKCRIVLGKLYLDLWNGLYKSLFAIXQRKCSTNTNRRWPLAQSVRLLGHNGERNAIXGNLSRMQSREATVQSPVWRRCEHGIHPFGDPKASEHETLQQTLTALLK

SEQ ID NO: 2900 - protein, 561 aa, Oryza sativa; identical to SEQ ID NO: 1085

SEQ ID NO: 2901 - protein, 1481 aa, Pseudomonas syringae pv. tomato str. DC3000; identical to SEQ ID NO: 1086

SEQ ID NO: 2902 - protein, 851 aa, Arabidopsis thaliana; identical to SEQ ID NO: 2819

SEQ ID NO: 2903 - protein, 255 aa, Salinibacter ruber DSM 13855
MRNAWHPTDTKYGIQNTRHERPLMPTVVEPPLFFLDYDGTLAPIVDDPAAAVPHPEAPDLLRDLDAQFPLWIVTGRDLQALSSFLDRPYSAIGLHGAQEGVVGRDIHNRMSDEAAAALRRLRASVPSVDGLRVEDKARSFAVHYREARDESGARDQLKDWLADLPEVLDAIWGKKVVELRPDGLTKGTAVRRIAAQHPDHVPVYLGDDVTDEDAFAALQEMDRDAVSIKVGPGDTRADARLDGPDAVMAYLRRYV

SEQ ID NO: 2904 - protein, 624 aa, Magnaporthe grisea 70-15
MKITDVVSELEASMAESQNARDKRMEELWRELDPKGAGELDLKELKRGLRRIDHPMKNAENMLGDVFKTVDTSGDGKIQYEEFRTFVETAERQLFALFRSIDRDNNGRLDKEELRSAFQKCGLTVSSKRLTGFFNEIDMNRDGYISFEEWRDFLLFMPVHDGDGGAALATALSFYSQIVTINAEGDSLVSEDTLEGLDNPPIERPMSSNPASKSSRPSALTASASAPIVALPERGVAATDDPLPDTAARAHSKAILDLATQHTGEGSSSVLSPAALEEEAEYALSAPKQVEKKKTKPSKLTEYLPEPGYFLAGAIAGGVSRTATAPLDRLKVYLLVNTKARTSAEAAVAAAAKGQPLKAVKNAGHPIAAAITSLYRSGGLRTFFAGNGLNVIKIMPETAIKFGSYEFAKRTLATLEGHSDPTHINPYSKFVAGGVAGMVAQFCVYPLDTLKFRLQCETVQGGLTGNALLVQTAKRMYATGGVAAAYRGVTMGLVGMFPYSAIDMGTFELLKTTYRRYKARACGIHEDDAEPGNIAMGMMGATSGAIGATIVYPLNVLRTRLQTQGTEMHRPTYTGIWDVTTRTVRNEGVRGLYKGLTPNLLKVAPALSITWIVYENSKKFLNLQ

SEQ ID NO: 2905 - protein, 528 aa, Marinobacter sp. ELB17; identical to SEQ ID NO: 1101

SEQ ID NO: 2906 - protein, 1573 aa, Rhizobium leguminosarum bv. viciae 3841; identical to SEQ ID NO: 1105

SEQ ID NO: 2907 - protein, 230 aa, Zea mays
  misc_feature (190)..(190): Xaa can be any naturally occurring amino acid
MRVVSALADQVCLCACTRPLPRTSSKNMSLSLERSSSVVRDVATPAPPATSGASAPYPRAGAGASLSLPGAAAAHGHSQYLPLNEDDSLDMVLFDVLREASGSASTSAAAPATYQPPSSLPTLKALASGAARRGSRTAYAPKAATAGRHYRGVRRRPWGKYAAEIRDPARHGARLWLGTFATAEEAAAAXDRAAVRMRGAKALLNFPPAVAGCGSAATATAKQAGLTEAK

SEQ ID NO: 2908 - protein, 262 aa, Zea mays
MDMARYESCYRHWIAGQEAGLAELEAASANAAAGRATDAELRTVVERCMLGYQDYATRRRALSREDGVAFFAPPWCTAFENSVLWLGGCRPSLTVRLLYNLSGEGLEAQVEELLGGLSNGVIPTGALGITSAQLVLINDLHSRTVHQENALSDRLATLQEDIADRPLLPIGAADAEVDAALDSYKAALSRLLVEADELRMATARALATEILTPRQAVEMLAAGKHLHFSVRDWSRRREAAAGAQQQLGGQSAGTDNTVRPST

SEQ ID NO: 2909 - protein, 538 aa, Sulfitobacter sp. EE-36; identical to SEQ ID NO: 1106

SEQ ID NO: 2910 - protein, 128 aa, Glycine max
  misc_feature (28)..(28): Xaa can be any naturally occurring amino acid
  misc_feature (96)..(96): Xaa can be any naturally occurring amino acid
KVIDITYSKGRGKKGLEEALDRICAEAXAAISDGYTTLVLSDRAFSRKRVAVSSLLAVGAVHQHLVKTLERTRVALVIESAEPREVHHFCTLVGFXADAICPYLAVEAIWRLQVDGKIPPKTNGEFHT

SEQ ID NO: 2911 - protein, 756 aa, Glycine max
  misc_feature (9)..(9): Xaa can be any naturally occurring amino acid
  misc_feature (18)..(18): Xaa can be any naturally occurring amino acid
  misc_feature (24)..(24): Xaa can be any naturally occurring amino acid
VHHYYNGYXNNILWPLFXYLGLPXEDRLATTRSFQSQFEAYQKANQMFAAVVNKHYEEGDVVWCHDYHLMFLPQCLKNYNRKMKVGWFLHTPFPSSEIHRTLPSRSELLHAVLAADLVGFHTYDYARHFVSACTRILGLEGTPEGVENQGKLTRVAAFPIGIDSERFIRALDLPQVKEHIKELQERFKGRKVMLGVDRLDMIKGIPQKILAFEKFLEENRDWRDKVVLLQIAVPTRTDVPEYQKLTSQVHEIVGRINGRFGELTTVPIHHLDRSLDFHALCALYAVTDVALVTSLRDGMNLVSYEFVACQDKKKGVLILSEFAGAAQSLGAGAILVNPWNITEVATAIAKALNMPSAEREKRHKHNYEHVKTHTAQEWAETFVSELNDTVVEAQIRTKQVPPRLPTETAVERYLQSNNRLLILGFNGTLTEPVEREGDRFKERELTVHPELKLPLAELCSDPKTTVVVLSGSGRAVLDENFKEYDIWLAAENGMFLNPSKGEWMTTMPEQLNMEWVDSVKHVFDYFTDRTPRSYFEEREASLVWSYRHADAEFGRLQARDMLQHLWTGPISNASVDVVQGSRSVEVRAANVTKGAAIDRILGEIVHSKFMTTPIDYVLCIGHFLTKLQQDEDIYAFFEPELPSIGVGLQRSKGTEGVKFPVERVSSLKNPASRNGAAKSSSQKKGQRPVSNNEKKRNNHVCRGPRRLAPEKISWNVLDLKKENYFSCAVGRTQTNARYTLGSPDEVVAFLKELANV

SEQ ID NO: 2912 - protein, 1520 aa, Thermobifida fusca YX; identical to SEQ ID NO: 1109

SEQ ID NO: 2913 - protein, 1226 aa, Oryza sativa Indica Group
MASGKRQEGRGRPMGDGVVATGAGCAATQQPGNKAAHPRGRTACRRRAQGQGNGDGESRWLGLRAAGIAMAAWMASAEDAKAAAVVPARQASNGAVLGGDGGGLPQIRASWPDLEGGRRWWSATAADLRRLATAVGDGGNGGGHGSWRRQGRLPMLTEDLAATRRRTATAKRPLAVAAQVEVRGEDGNNEVVGRSTAAAMVVAAVTAVIGGMTASDGQPRAWEMATFGRTKRWGLIISPWNQIGPWSLDCASCVTLCLFHLGGRGGDPAILEAQSGHTACPPSRAGAGFVEMSSHIHDKLAYFRIKELKDILNQLGLPKQGKKQDLIDRVLALLTDEQGQRHHGWGRKNSLTKEAVAKIVDDTYRKMQIQCAPDLATRSHSGSDFSFRPIEEAYDSFQPEAKVRCICSSTMVNDSMIQCEDQRCQVWQHLNCVLIPDKPGESAEVPPVFYCELCRLSRADPFWVTAGNPLLPVKFVSSGVTNDGTSVPQSVEKSFQLSRSDRETVQRQEYDLQVWCMLLNDKVQFRMQWPQYAELHVNGISVRVVTRPGSQLLGINGRDDGPLITTCSREGINKICLSRVDARTFCFGVRIAKRRTVAQVLNLVPKEAEGESFEHALARVRRCLGGGDTAENADSDSDLEVVAESVTVNLRCPNSGSRMRIAGRFKPCIHMGCFDLETFVELNQRSRKWQCPICLKNYSLESLMIDPYFNRITSLLRNCNEDVNEVDVKPDGSWRVKGDAASRELSQWHMPDGTLCNPKEDVKPAMQNGNEQMMEGTSDGQKSLKIGIKRNPNGIWEVSSKADDKKPSVVGNRMQNNSGFRALNNIMHMSNSPTSSYRDGEDPSVNQESNRHVDLSLNNGNNEFDSFSLNFGQACNTDDRPQQQHNATDVIVLSDSDEENDAMVCPPAVYDNTTTANGSGFPFTTNGTGYTERYQEDAGVGTSGLGLLSNNVDDFEMNNWQMHSSYQQPEQGFQFFGNDTDVHNTFVGSHNSFGLAPNDYSLDCNVGVEEASVTPALSVCRNSNEMHGSLVDNPLALVGDDPSLQIFLPSQPSSVPLQEELSERANAPNGVQSDDWISLTLAAGGGGNEEPAPADVNSQPQIPSTETGIEPLTDAASAFLSTNIERRSGADLNPRRIENIFSHPRQPRFAMQCTRMLGFVLTAPSMLAHPTVRILHLDDGFWRSALLRLGMTHECLPGSLLAQGARGNMQFVPEAAPDLPGDGIAQ

SEQ ID NO: 2914 - protein, 493 aa, Alteromonadales bacterium TW-7; identical to SEQ ID NO: 1110

SEQ ID NO: 2915 - protein, 256 aa, Zea mays
MSREENVYMAKLAEQAERYEEMVEYMEKVAKTVDVEELTVEERNLLSVAYKNVIGARRASWRIVSSIEQKEESRKNEEHVNLIKEYRAKIEAELSNICDGILKLLDSHLVPSSTAAESKVFYLKMKGDYHRYLAEFKTGPERKESAESTMMAYKAAQDIALAELAPTHPIRLGLALNFSVFYYEILNSPDKACNLAKQAFDEAISQLDTLGEESYKDSTLIMQLLRDNLTLWTSDLTEDGADEGKEAPKGEAGDGQ

SEQ ID NO: 2916 - protein, 441 aa, Pseudomonas putida GB-1; identical to SEQ ID NO: 1114

SEQ ID NO: 2917 - protein, 2738 aa, Debaryomyces hansenii; identical to SEQ ID NO: 1115

SEQ ID NO: 2918 - protein, 449 aa, Thermus thermophilus
MGLIIVANRAPFRLTPEGLVPAVGGLATALLPVLERRHGVWVAAGEWREKGQAATPRESQVRLEQVFLPEKEWQGYYGGFSNRVLWPLCHYFLERVELRRDFYQDYQRANRRFAERVAQVFREGDTVFVQDYHLLLLPRLLRERIPAKIGFFFHIPWPSSGVFRILPWGRALVEGVLGADLIGFHTPEYVENFLRTAAYYGYQVEENRVRVGERWVRVEAHPLGIDTGRFGELAQDPHIGLHARALKRLAGAERLILGVDRLDYTKGILERLLAYERLLQSYPQWRGRVAFFQIATPSRTSVHAYRELKRRVDEVVGRIMGSFLREDWVPLRYFYQTYTQEELAAFYRAADVALITPLRDGMNLVAMEYAYTTEDGVLVLSNLAGAAEYLKEALLVNPYDLDGMAQALDRALRMPGGERRERLSALKARIEALDVQGWAERFLASLEEG

SEQ ID NO: 2919 - protein, 453 aa, Desulfitobacterium hafniense Y51; identical to SEQ ID NO: 1119

SEQ ID NO: 2920 - protein, 264 aa, Candida albicans SC5314
MPASREDSVYLAKLAEQAERYEEMVENMKAVASSGQELSVEERNLLSVAYKNVIGARRASWRIVSSIEQKEEAKGNESQVALIRDYRAKIEAELSKICEDILSVLSDHLITSAQTGESKVFYYKMKGDYHRYLAEFAIAEKRKEAADLSLEAYKAASDVAVTELPPTHPIRLGLALNFSVFYYEILNSPDRACHLAKQAFDDAVADLETLSEDSYKDSTLIMQLLRDNLTLWTDLSEAPAATEEQQQSSQAPAAQPTEGKADQE

SEQ ID NO: 2921 - protein, 94 aa, Oryza sativa
MFSRSYTNLVDLALPSFLRRRFNRLRIGFFLHSPFPSSELYRSLPVRDEILKSLLNCDLIGFHTFDYARHFLSCCSRMLGIEYQSKRGYIGLDY

SEQ ID NO: 2922 - protein, 107 aa, Zea mays
  misc_feature (81)..(81): Xaa can be any naturally occurring amino acid
ISALTLDDRVRYAQDVVIAAATAADEYAYGSAAMIATGCVIARIRHTNHCPVGAASHREQLRARFSGAPGHLHNYLLLATXEDQAPLAQVGSDKAGYISGRTDLPKP

SEQ ID NO: 2923 - protein, 239 aa, Pfiesteria piscicida
MAGRDKQVYFAKLAEQAERYDEMAEHMEGVGNSDGELSVEERNLLSVAYKNAVGSRRAAWRIITSVEQKEKSKGHDDNAAWAREYCTKVEGELQKICDTILGLLDGKLIPAANNGKSKVFYQKMKADYFRYIAEFTNGDAKTKGANSAEAAYADAAAVAEKDLAVTHPIRLGLALNYSVFLYEVQSKPDDACKMARTAFEDAIAELDNVQEDSYKDSTLIMQLLRDNLTLWTSDDAGDQ

SEQ ID NO: 2924 - protein, 451 aa, Physcomitrella patens subsp. patens
MRIRKLFEAFDSGKCGYLESTQIESGLQSLSFPFQRKYVLELLEACDANRDGRIDFAEFRRYVNDKEIELFNLFEAIDVSRDGVLQREELLFALRNAGVQLGDQELDAFLQHIDQDKNGHITFGEWRDFLLMYPHEATLSNIYQYWEKISLVDIGEQAVIPEGIDEHNRMRFLLAGAVAGAMSRTATAPLDRLKVMLAVQTHSTTSSIMHGLTHIYQKNGVIGFFRGNGLNVLKVAPESAIKFYAYEIMKSALVGDEKHGEIGTLGRLVAGGSAGAIAQTIIYPLDLLKTRLQCHNEPGRAPRLAKFTYDILIHEGPRALYRGLLPSLLGIIPYAGIDLTTYETLKIKARLLLPPGTEPGPFVHLCCGTFSGAFGATCVYPLQLIRTRLQAQSSKSNERYTGMVDAFRHTYRKEGLRGFYKGWLPNMLKVVPSASITYLVYEDMKTRLSIK

SEQ ID NO: 2925 - protein, 217 aa, Brassica napus
MTLDRICAEANEAIKEGYTLLVLSDRAFSSTRVAVSSLLAVGAVHHHLVKSLARTQVGLIVESAEPREVHHFCTLVGFGADAICPYLAVETVHRLQVDGKIPPKSNGEFHSKEELVKKYYKASNYGMMKVLAKMGISTLASYKGAQIFEALGLSSEVIEKCFAGTPSRVEGATFEMLARDALLLHEMAFPARAYAPGSAEASALSNPGNYHWRKNGD

SEQ ID NO: 2926 - protein, 135 aa, Glycine max
  misc_feature (19)..(19): Xaa can be any naturally occurring amino acid
  misc_feature (46)..(46): Xaa can be any naturally occurring amino acid
  misc_feature (53)..(53): Xaa can be any naturally occurring amino acid
  misc_feature (60)..(60): Xaa can be any naturally occurring amino acid
  misc_feature (90)..(90): Xaa can be any naturally occurring amino acid
  misc_feature (96)..(96): Xaa can be any naturally occurring amino acid
  misc_feature (108)..(108): Xaa can be any naturally occurring amino acid
LERANLQEAARTYSVDFYXQYSKLIHEWIIASNWRGLLKFKETPVXIPIDELXPAREIAXQFCSGAMSYGSISSEALTVFTLTINKMGGXSNSSHXMEQPSRLDPLSXRIINSKKTSINQAATRRFKVSSYYLTN

SEQ ID NO: 2927 - protein, 1542 aa, Rhodococcus sp. RHA1; identical to SEQ ID NO: 1139

SEQ ID NO: 2928 - protein, 591 aa, Zea mays
  misc_feature (492)..(492): Xaa can be any naturally occurring amino acid
  misc_feature (536)..(536): Xaa can be any naturally occurring amino acid
  misc_feature (563)..(563): Xaa can be any naturally occurring amino acid
  misc_feature (576)..(576): Xaa can be any naturally occurring amino acid
LIPDTPTEGAGPDIPPHFYCELCRLNRADPFWVTTANPLLPVKFISSGVGNDGASAPQIVEKTFQLSRAERETVQRPEYDLQVWCILVNDKVQFRMQWPQYAELQVNGIPVRVMTRPGSQLLGINGRDDGPLVTTCSREGINKISLSRVDARTFCFGVRIVRRRTVPQVLSLIPKEGEGESFEDALARVRRCLGGGGATDNADSDSDLEVVTESVTVNLRCPNSGSRMRIAGRFKPCVHMGCFDLETFVELNQRSRKWQCPICLNNYSLENLMIDPYFNRITSLLHNCSEDVNELDVKPDGSWRVMGDAATRDLSQWHMPDGTLCDSKEDTNPGVASVNEFKREGASDEHRTLKLGIKKTPNGLWQVSSKPDDMKPVVRNHIQNNTGYSIPNIVPMISSPTGSCRDGEDVSVNQEGGGIQFDISLNQEFDSFAHNFGQTYNTEDRQQEPQHNAADVIVLSDSDEENDPIVRLPAVYANTPTNGDSFPFVTDXLYQEELSERANTPNGVHPDDWRISLTLAAGGGGNEEPTSVDGLXSQPKVPSKEAGVEPLLDAASALPSMNXDRCNGSNLNPRRXNIFSHPRQPRSVRPR

SEQ ID NO: 2929 - protein, 270 aa, Schizosaccharomyces pombe
MSTTSREDAVYLAKLAEQAERYEGMVENMKSVASTDQELTVEERNLLSVAYKNVIGARRASWRIVSSIEQKEESKGNTAQVELIKEYRQKIEQELDTICQDILTVLEKHLIPNAASAESKVFYYKMKGDYYRYLAEFAVGEKRQHSADQSLEGYKAASEIATAELAPTHPIRLGLALNFSVFYYEILNSPDRACYLAKQAFDEAISELDSLSEESYKDSTLIMQLLRDNLTLWTSDAEYSAAAAGGNTEGAQENAPSNAPEGEAEPKADA

SEQ ID NO: 2930 - protein, 293 aa, Oryza sativa Japonica Group
MTARSMLRNHPEASVLDTIRQHLLEEPRGGGGGEAAEASFGSLVADMWSDSLPFRDDDADDMVVFGAMRDAFSCGWLPDGVFAEVKPEPLLSPDSSSYDGSGGRGGGGDGGAREGGGGAAAVARGKHYRGVRQRPWGKFAAEIRDPAKNGARVWLGTFDTAEDAALAYDRAAYRMRGSRALLNFPLRIGSEIAAAAAAAAAAAAGDKRPSPEPATSESSFSSSSSCTTTTTSSSTSSSGSPKRRKRGEAAAASMSMPLVPPPSQLNWPVQAWYPAAAPVEQVAITPRVEQLVI

SEQ ID NO: 2931 - protein, 496 aa, Shewanella oneidensis MR-1; identical to SEQ ID NO: 1145

SEQ ID NO: 2932 - protein, 534 aa, Cyanobium sp. PCC 7001; identical to SEQ ID NO: 1148

SEQ ID NO: 2933 - protein, 746 aa, Opitutaceae bacterium TAV2; identical to SEQ ID NO: 1149

SEQ ID NO: 2934 - protein, 1629 aa, Arabidopsis thaliana; identical to SEQ ID NO: 1150

SEQ ID NO: 2935 - protein, 2738 aa, Debaryomyces hansenii; identical to SEQ ID NO: 1154

SEQ ID NO: 2936 - protein, 1515 aa, Vibrio salmonicida LFI1238; identical to SEQ ID NO: 1155

SEQ ID NO: 2937 - protein, 891 aa, Arabidopsis thaliana
MSPESWKDQLSLVSADDYRIMGRNRIPNAVTKLSGLETDDPNGGAWVTKPKRIVVSNQLPLRAHRDISSNKWCFEFDNDSLYLQLKDGFPPETEVVYVGSLNADVLPSEQEDVSQFLLEKFQCVPTFLPSDLLNKYYHGFCKHYLWPIFHYLLPMTQAQGSLFDRSNWRAYTTVNKIFADKIFEVLNPDDDYVWIHDYHLMILPTFLRNRFHRIKLGIFLHSPFPSSEIYRTLPVRDEILKGFLNCDLVGFHTFDYARHFLSCCSRMLGLDYESKRGYIGLEYFGRTVSIKILPVGIHMGQIESIKASEKTAEKVKRLRERFKGNIVMLGVDDLDMFKGISLKFWAMGQLLEQNEELRGKVVLVQITNPARSSGKDVQDVEKQINLIADEINSKFGRPGGYKPIVFVNGPVSTLDKVAYYAISECVVVNAVRDGMNLVPYKYTVTRQGSPALDAALGFGEDDVRKSVIIVSEFIGCSPSLSGAIRVNPWNIDAVTNAMSSAMTMSDKEKNLRHQKHHKYISSHNVAYWARSYDQDLQRACKDHYNKRFWGVGFGLFFKVVALDPNFRRLCGETIVPAYRRSSSRLILLDYDGTMMDQDTLDKRPSDDLISLLNRLCDDPSNLVFIVSGRGKDPLSKWFDSCPNLGISAEHGYFTRYFAKTLPFHHLPSHFCKVNTFLLLICNHRWNSNSPWETSELPADLSWKKIAKPVMNHYMEATDGSFIEEKESAMVWHHQEADHSFGSWQAKELLDHLESVLTNEPVVVKRGQHIVEVKPQGVSKGKVVEHLIATMRNTKGKRPDFLLCIGDDRSDEDMFDSIVKHQDVSSIGLEEVFACTVGQKPSKAKYYLDDTPSVIKMLEWLASASDGSKHEQQKKQSKFTFQQPMGQCRKKA

SEQ ID NO: 2938 - protein, 867 aa, Arabidopsis thaliana; identical to SEQ ID NO: 2735

SEQ ID NO: 2939 - protein, 2166 aa, Oryza sativa; identical to SEQ ID NO: 363

SEQ ID NO: 2940 - protein, 1453 aa, Idiomarina baltica OS145; identical to SEQ ID NO: 1166

SEQ ID NO: 2941 - protein, 240 aa, Vitis vinifera
MKETTMGEIGLPPIREHSEASICFPVSTSGEKPVYGRSSSFNSLMPFLTENWGDLPLKVDDSEDMVLYGVLRDAVSVGWTPFGLPPPPEVKEEPREEVAAPAMPEVRAAPSRGRHYRGVRQRPWGKFAAEIRDPAKNGARVWLGTYETAEEAAVAYDRAAYRMRGSRALLNFPHRVGSGEPDPVRITAKRRSPEPEPSPESGSPKRLKNGLAAEVERRSNVFQVGHQMGALPVGEQLLVV

SEQ ID NO: 2942 - protein, 1579 aa, Bordetella bronchiseptica RB50; identical to SEQ ID NO: 1173

SEQ ID NO: 2943 - protein, 502 aa, Synechococcus sp. PCC 7335
MSMKSSLVILYHREPYDEVEENGKIYYREKKSPNGIVPTLKSFFSNADQSTWVAWKQIKPEQSEGFEERVTMEGGSDSCVVRRIPLNAEQVRNFYYITSKEAFWPILHSFPEHFTYDSSDWENFQNINRLFAEAACEDAADDALIWIHDYNLWLAPLYIREKMPNVKIAFFHHTPFPAADVFNILHWRNAIIDSLLCCDLCGFHIPRYVQNFVSAARSCREVEILETMPVPKAFTRVGTALAEPEMTTKLRYNGRVVNIDAFPVGTNPKNIRKTVLTQEITNRVKEIREQIGDNKLIVSAGRVDYVKGAKEMLQCFERLLERQPIMVGKVNLVMTAVKAAAGMRVYQEAQQTIEQLVGQINGRFSSLGWTPIVLFTEPLPQEDLMALYKTADICWICPLRDGLNLVAKEYVAAHGGEDGVLILSEFTGSAVELPEALLTNPYSSTRMDECIDAALVMSPEEQKQRMAKLYKAICRYDVQQWANHLFREAKATSVQTSASLLS

SEQ ID NO: 2944 - protein, 252 aa, Oryza sativa
MAQRVGHSADGVFVMIVDEDKSHANFARGMLSSLNFHVIVYSSPVNALVFLENNAQDVAVVLAAVDMKQLSGFQFLEAARVKRQDLQVIMMSAETTMSTMMRCVKLGARFLVKKPLNEETVGNLWQHVDLKVLKMEKIRELLQDPGQETEEVNSFEAKKADSVKVQSDEKGHDNAKISNTAAAEGSDEKVSSGDGHVVPKAYNNVNVEESIGSNNTSGEQVSDKIKSDARVGVILVDYPDFEDDETKKPTST

SEQ ID NO: 2945 - protein, 481 aa, Physcomitrella patens subsp. patens
MKVSVGNGGAVLEDVPHLTKWLPGLPTYENPLKHNPAYSAVRQYFVEDTDVVARDVVVNVNTTGEGIHFRRAGLRDKIYFKSEDVRACIVTCGGLCPGINTVIREIVCGLWTQYGVRDISGIEGGYRGFYSRNTISLNPKVVSDIHKRGGTYLKSSRGGHDTHKIVDSIQDRGFDQVYIIGGDGTQKGANAIHEECKRRGLKVAVAGIPKTIDNDLDVIDKSFGFDTAVEEAQRAINAAHVEAESIHNGIGVVKLMGRYSGYIAMHATLASRDVDLCLIPEVPFYLHGPGGLIEFVHHRLRENGHMVIVVAEGAGQELMAETMGSLDKMNDASGNKLLLDVGLWLCNHLKEHFLKAFREPLNLKYIDPTYMIRAIPSNASDNVYCTLLAHSAIHGAMAGYCGFTVGPVNVRHCYIPIARVVATSRRVNVADRMWARLMSSTNQPNFAQYSHAIQQSRKQNATKRREEEALSNGSSTAVISL

SEQ ID NO: 2946 - protein, 234 aa, Solanum lycopersicum
MDQQLPPTNFPVDFPVYRRNSSFSRLIPCLTEKWGDLPLKVDDSEDMVIYGLLKDALSVGWSPFNFTAGEVKSEPREEIESSPEFSPSPAETTAAPAAETPKGRHYRGVRQRPWGKFAAEIRDPAKNGARVWLGTYETAEEAAIAYDKAAYRMRGSKAHLNFPHRIGLNEPEPVRVTAKRRASPEPASSSGNGSMKRRRKAVQKCDGEMASRSSVMQVGCQIEQLTGVHQLLVI

SEQ ID NO: 2947 - protein, 1486 aa, Klebsiella aerogenes; identical to SEQ ID NO: 1176

SEQ ID NO: 2948 - protein, 473 aa, Salmonella enterica subsp. arizonae serovar 62:z4,z23:--
MSRLVVVSNRIAPPDNKGGAGGLAVGVLGALKAAGGLWFGWSGETGNEDEPLKKVTKGNITWASFNLSEQDYEDYYCQFSNAVLWPAFHYRLDLVQFQRPAWEGYMRVNALLADKLLPLIKENDIIWVHDYHLLPFASELRKRGVNNRIGFFLHIPFPTPEIFNALPPHDELLEQLCDFDLLGFQTENDRLAFLDSLSSQTRVTTRSGKHHIAWGKDFQTEVYPIGIEPDEIALQAAGPLPPKLVQLKAELKNVKNIFSVERLDYSKGLPERFLAYEALLENYPQHRGKIRYTQIAPTSRGEVQAYQDIRHQLETEAGRINGRYGQLGWTPLYYLNQHFDRKLLMKIFRYSDVGLVTPLRDGMNLVAKEFVAAQDPANPGVLVLSQFAGAANELTSALIVNPYDRDDVAAALNRALTMPLAERISRHAEMLDVIVKNDINRWQERFIHDLKEVTPRSAERRQQNNVATFPKLA

SEQ ID NO: 2949 - protein, 1531 aa, Zymomonas mobilis subsp. mobilis ZM4; identical to SEQ ID NO: 1178

SEQ ID NO: 2950 - protein, 267 aa, Saccharomyces cerevisiae
MSTSREDSVYLAKLAEQAERYEEMVENMKTVASSGQELSVEERNLLSVAYKNVIGARRASWRIVSSIEQKEESKEKSEHQVELICSYRSKIETELTKISDDILSVLDSHLIPSATTGESKVFYYKMKGDYHRYLAEFSSGDAREKATNASLEAYKTASEIATTELPPTHPIRLGLALNFSVFYYEIQNSPDKACHLAKQAFDDAIAELDTLSEESYKDSTLIMQLLRDNLTLWTSDMSESGQAEDQQQQQQHQQQQPPAAAEGEAPK

SEQ ID NO: 2951 - protein, 332 aa, Polaromonas sp. JS666
MRYESILDAIGHTPLVRLNQLTRHLSCAVYAKLEFLSPGGSVKDRIGMYMIQQAERRGEIGPGATIVECTSGNTGMGLALFAAGRGYKTVFTIADKQSKEKVDMLRAMGAEVIVCPTDVPPDDPRGYIQAAQRLARDIPGAFLCNQYDNPDNTLAHYASTGPEIWNDTGGMVTHFVCGMGTCGTISGAGRYLKEQNAMVRVIGVDPQGSIFHELFHRGVTVQPHVYRLEGIGEDFIPKALDWHVIDDVIQVSDQGSFLMARRLARDEGIFAGGSSGAAMLAALQVAEKLGPNDLMVVLLPDGGRQYLGKLYNDDWMREHGYLDAKPDSAPRS

SEQ ID NO: 2952 - protein, 947 aa, Arabidopsis thaliana [sequence omitted]

SEQ ID NO: 2953 - protein, 1528 aa, Saccharomyces cerevisiae YJM789
MGIPKFFRYISERWPMILQLIEGTQIPEFDNLYLDMNSILHNCTHGNDDDVTKRLTEEEVFAKICTYIDHLFQTIKPKKIFYMAIDGVAPRAKMNQQRARRFRTAMDAEKALKKAIENGDEIPKGEPFDSNSITPGTEFMAKLTKNLQYFIHDKISNDSKWREVQIIFSGHEVPGEGEHKIMNFIRHLKSQKDFNQNTRHCIYGLDADLIMLGLSTHGPHFALLREEVTFGRRNSEKKSLEHQNFYLLHLSLLREYMELEFKEIADEMQFEYNFERILDDFILVMFVIGNDFLPNLPDLHLNKGAFPVLLQTFKEALLHTDGYINEHGKINLKRLGVWLNYLSQFELLNFEKDDIDVEWFNKQLENISLEGERKRQRVGKKLLVKQQKKLIGSIKPWLMEQLQEKLSPDLPDEEIPTLELPKDLDMKDHLEFLKEFAFDLGLFITHSKSKGSYSLKMDLDSINPDETEEEFQNRVNSIRKTIKKYQNAIIVEDKEELETEKTIYNERFERWKHEYYHDKLKFTTDSEEKVRDLAKDYVEGLQWVLYYYYRGCPSWSWYYPHHYAPRISDLVKGLDQDIEFDLSKPFTPFQQLMAVLPERSKNLIPPTFRPLMYDEQSPIHDFYPAEVQLDKNGKTADWEAVVLISFVDEKRLIEAMQPYLCKLSPEEKTRNQFGKDLIYSFNPQVDNIYKSPLGGIFSDIEHNHCVEKEYITIPLDSSEIRYGLLPNAKLGAEMLAGFPTLLSLPFTSSLEYNETMVFQQPSKQQSMVLQITDIYKTNNVTLEDFSKRHLNKVIYTRWPYLRESKLVSLTDGKTIYEYQESNDKKKFRFITKPAETQDKKLFNSLKNSMLRMYAKQKAVKIGPVEAIATVFPVTGLVRDSDGGYIKTFSPTPDYYPLQLVVESVVNEDERYKERGPIPIEEEFPLNSKVIFLGDYAYGGETTIDGYSSDRRLKITVEKKFLDSEPTIGKERLQMDHQAVKYYPSYIVAKNMHLHPLFLSKITSKFMITDATGKHINVGIPVKFEARHQKVLGYARRNPRGWEYSNLTLNLLKEYRQTFPDFFFRLSKVGNDIPVLEDLFPDTSTKDAMNLLDGIKQWLKYVSSKFIAVSLESDSLTKTSIAAVEDHIMKYAANIEGHERKQLAKVPREAVLNPRSSFALLRSQKFDLGDRVVYIQDSGKVPIFSKGTVVGYTTLSSSLSIQVLFDHEIVAGNNFGGRLRTNRGLGLDASFLLNITNRQFIYHSKASKKALEKKKQSNNRNNNTKTAHKTPSKQQSEEKLRKERAHDLLNFIKKDTNEKNSESVDNKSMGSQKDSKPAKKVLLKRPAQKSSENVQVGLANFEKAPLDNPTVAGSIFNAVANQYSDGIGSNLNIPTPPHPINVVGGPIPGANDVADVGLPYNIPPGFMTHPNGLHPLHPHQMPYPNMNGMSIPPPAPHGFGQPIPFPPPPPMTNVSDQGSRIVVNEKESQDLKKFINGKQHSNGSTIGGETKNSRKGEIKPSSGTNSTECQSPKSQSNAADRDNKKDEST

SEQ ID NO: 2954 - protein, 431 aa, Streptomyces tenjimariensis
MSTDVSTDPSSPSNRPPHILRLTPHLYWPQLAGRSWPVRFDAIGGMQSQIYRLTRQLDERGVRQTVLTLRLPGAPRRWPISGRTEVRGVRIPVLPLRSRIRGMVDLNLAWALGVAADLVRRRERPDILHVHCSGVIIPPLLGWLLTRLLRVPLVLTVHCSIIVTYHPMNRLDGMLQPLARWIECRAIRASARTITLTPRTIPLLTRRTGVPKERFAVLPDVIDADAFAARATPEAVRDARAAWGLPEGRPVVGYVGRIAREKGWPIILDIAEELRDTDVHWLICGDGNERDLFERAVRERGLTGRVTVTGYVPNEDVPAAMGAMDLLLMAPLHEEFGSVMLEAMACGLPIVAVGVGGVADVLEHGELGRLVPERTPAAFAKGIRESLAEPEWRAATAERAAKTVRARYDLGQVAARTAEVYEEVVRARRRG

SEQ ID NO: 2955 - protein, 440 aa, Streptococcus thermophilus LMG 18311
MRIGLFTDTYFPQVSGVATSIRTLKTQLEKMGHNVFIFTTTDRDVDRYEDWQIIRIPSVPFFAFKDRRVAYRGFSKALEIAKQYKLDIIHTQTEFSLGLLGIAIAHELKIPVVHTYHTQYEDYVRYIAKGMVIRPSMVKYIVRGFMSDLDGVICPSEIVYDLLLKYKVAAEKRVIPTGIELEKFQRPEITEEDVSDLRAKLGISSDETMLLSLSRVSYEKNIQAVMAALPSVLEEEDKVRLVVAGDGPYLPHLKSQAKKLGIEDKVVFTGMIAPGETALYYKAADFFISASTSETQGLTYLEALASGTPIIAHGNTYLDNIITDKMFGILYYHDNDLAGAILEAAIVTPEKDETKWAEKLYEISAENFGKRVYEYYLDLTISKDFHNDLNGEDSTMKRLTRMVTHLPTKAITLPVNGSVRIIKGSAKQVKKIRNIKKFLD

SEQ ID NO: 2956 - protein, 323 aa, Nicotiana tabacum
MDQHFSKDNCKPTSFFNNVPLIDLSKPDSKNLIVKACEEFGFFKVINHSVPTEFITKLSEAIKFFSSPLSEKEKAGPPDPFGYGNKQIGCNGDSGWVEHILVSTNSEFNYYKFASILGVNPENIRAAVNDYVSAVKKMACEILEMLAEGLKIHPRNVFSKLLMDEKSDSVFRLNHYPPCTEIQQFNDNNLIGFGEHTDPQIISVLRSNNTSGLQILLKNGHWISVPPDPNSFFVNVGDSLQVMTNGKFKSVKHRVLANSMKSRLSMIYFGGPPLSEKIAPLASLMEGEDSLYKEFTWFEYKKSAYKTRLADNRLILFEKIAAS

SEQ ID NO: 2957 - protein, 151 aa, Picrophilus torridus DSM 9790
MFNLKIKVNGRLYEKEVEPRKLLVSFLREDLGLTGTHIGCDTTNCGACTVLMDGLPVKSCTVLAVQANNHNIMTVENSDETLSNLKESFLKNNGLQCGYCTPGMLMTSFYIVNSKIRDDDEIKRNLEGNLCRCTGYDGIIKSIREVSRNEP

SEQ ID NO: 2958 - protein, 678 aa, Picrophilus torridus DSM 9790
MNHKDIVNGRGKYINDIKFDGMLYMSLVRSPYAHAKINRINGGLNSSELKAYYMSEEMASSGELGSLGSSSSGASLFEPVLAIDYVNYMGQPVAAVFGNNEYESEDLLDSVEVDYDPLEAVATIDDAFKKGSIHNGTKNNIVNSSYLGRDFNPEYDVVVEDTLMNNRIVQNPIETRGIVAVPENDNITVYISTQSAHLIRDGICSALKIPKDRLRVIQADTGGAFGLKAVMYPEYIIAVYAAMKYKRPVKWIETRREHLMAAHAGRGIKAHLKLYAKKDGKITGIKGEIIVDAGAYKAGVGESTANFVAFQLTGPYDIKNAYINAISVFTNKAPMGYYRGAGRPEASFFMERMIDLLADKLNMDPARLRLINASDGPFRSPLGLEVKEATRPFLENALKAFNYYQVSKYEHTGISFFVLIPAVSPGETARALIKDNKIKVWLGGNDHGQGHEYLVKSILSDQLGIDPDIISYENGDTSSMESGIGTWGSRSAIAAGSALYALCRKLKDDVYKKYGDYSPELLLRDEHDEYVFAKIDSPINSVNACMVTADVDDLGNIKVKDIYSYFDLGHVMNRENVNNQIYGGSLQGMAQVLSECVRYSEDGQLMTSSIYDAGLLTADKIPRYHNIIVENPSNALNGAKGLGESPAIGVPSALSRAVEMATGKRIRETPVSQEYLIK

SEQ ID NO: 2959 - protein, 195 aa, Mycobacterium abscessus
MTLRTIGDEFPAYNLTAVIGGDLSKVNAQQPDDYFTTVTSDDHPGKWRVIFFWPKDFTFVCPTEIAAFGRLNDEFADRDTQVLGASVDNEFVHFQWRAQHEDLKTLPFPMLSDLKRELAEAAGVLNADGVADRATFIVDPDNIIQFVSVTAGSVGRNVDEVLRVLDALQSDELCACNWRKGDPTINAGELMSAGV

SEQ ID NO: 2960 - protein, 340 aa, Erythrobacter sp. NAP1
MNITQPFGDTLALIGNTPLVRLAGPSEAAGCDIWGKCEFANPGSSVKDRAALYMIRDAEGRGELKPGGTVIEGTAGNTGIGIALVANALGYKTIIVMPDNQSKEKMDTLRALGAELVLVPPTKYADPCHFQHVSRRMAEETEGAIWAGQFDNTANRRAHIEGTAIELWEQTGGKISGFTCAAGTGGTIAGVGMGLKEKNPDIRIALTDPHGAALYNYYAHGELKGEGSSVAEGIGQGRITANLEGAPIDTQFRISDEEGLVWVEHLLRKEGLCLGLSSGINVAGAIELGKQLVADGVENPQVATILCDTGFRYLSTLYNAEWLASKNLPVFDWLTQNQSD

SEQ ID NO: 2961 - protein, 235 aa, Chlamydomonas reinhardtii
MAALQSASRSSAVAFSRQARVAPRVAASVARRSLVVRASHAEKPLVGSVAPDFKAQAVFDQEFQEITLSKYRGKYVVLFFYPLDFTFVCPTEITAFSDRYKEFKDINTEVLGVSVDSQFTHLAWIQTDRKEGGLGDLAYPLVADLKKEISKAYGVLTEDGISLRGLFIIDKEGVVQHATINNLAFGRSVDETKRVLQAIQYVQSNPDEVCPAGWKPGDKTMKPDPKGSKEYFSAV

SEQ ID NO: 2962 - protein, 532 aa, Burkholderia vietnamiensis G4
MSEPIRFYHRHAVREVSGANVTRTVLQYLREDAHCTGTKEGCAEGDCGACTVVVGELTDAGAVAFKAVNACIQFLPTLDGKALLTVEDLRRPDGSLHPVQQAMVDCHGSQCGFCTPGFVMSMWALYEQHGHERCGSAASNASCVESVAGAPSVPSRTEIADALTGNLCRCTGYRPIIDAAVRMFDASGERTPAQDSPVDAVALARTLASLRRERTFEYAAADGARFAAPRTLDALAALKAERPDARLLAGSTDIGLWVTKQMRRLDDLIYVGQVAELQRIVHGDDWIEIGAGVTVERAYAALAGTYPELTEMWKRFASLPIRNAGTLGGNVANGSPIGDSMPGLIALGARVVLRGGDSVRELPLDALYTGYQQKDMAPHEFVVALKVPTRSGARAALQFRTYKLSKRFDSDISAVCAAFAFIADGDTIREPRIAFGGMAATPKRAPHTEAVLDGAPWHEATAQAAMQALERDYQPLTDMRATSAYRVDAAKNLLYRFWLETRMHDPLPAHALNVREVAAETGAEAADGAARV

SEQ ID NO: 2963 - protein, 444 aa, Streptococcus mutans UA159
MRVGLFTDTYLPQISGVATSIKTLKEELEKQGHEVYIFTTTDKHVKRYEDPTIIRLPSVPFISFTDRRIVYRGLFESYKIAKTYKLDIIHTQTEFSLGILGKMVGKALRIPVIHTYHTQYEDYVRYIANGKLIRPSMVKYIVRGFLNDLDGVICPSRIALNLLDGYSVKIPKRIIPTGIDLREYERPDISQEDIAKLREKWAIASDETVLLSLSRVSYEKNIQALLANMPKILSNNPKVKLLIVGDGPYLEELKEQAQDLAVMDNVIFTGMVSHNETALYYKAADFFISASTSETQGLTYAESLASGKPIIAQSNPYLDDLITDKMFGTLYQTESDLADAVLNAIVSTPAKQEKVWQKKLYEISAEAFGKSVFAFYLDMIISKKAKKKEKWSLAVEGNRADTSIRIVKSTIKLPATALKKTAKTSVKVIKAPVRMVNAIRDFLD

SEQ ID NO: 2964 - protein, 320 aa, Rhodococcus sp. RHA1
MARFDSLIDTLGDTPLVGLPRLSPSWNGTAPVRLWAKLEDRNPTGSVKDRPALRMIEQAENDGTLTPGATILEPTSGNTGISLAMAAKLKGYQLICVMPENTSVERRQLLAMFGAQIIDSPARGGSNQAVAVAKELSAEHPEWVMLYQYGNPANALAHYETTGPEILRDLPEITHFVAGLGTTGTLMGVGRYLREHVDGIEIVAAEPRYGELVYGLRNIDEGFVPELYDESVLTSRFSVGPADAVRRTRQLIDNEGIFAGISTGAILHAALGVARKAVKAERAANIAFIVADGGWKYLSTGAYGGTVEEAEEALEGQLWA

SEQ ID NO: 2965 - protein, 787 aa, Burkholderia vietnamiensis G4
MNQQAEPFLTALDAQTDGAQVHVSRVHESAHLHVSGRATYTDDIPLVAGTLHAALGLSAKPHAKIVSMNFDAVRATPGVVAVFTAADIPGVNDCGPIVHDDPVLADGVVQFVGQPMFIVVATSHDIARLAARRAQVDYEELPAILTAQDARNAESYVIPPLKLARGDAPARLAAAAHRESGEMYLGGQEQFYLEGQIAYAVPKDDDGMHVYCSTQHPSEMQHLVAHVLGVASHDVLVECRRMGGGFGGKESQSGLFACCAALAAWKLLCPVKLRPDRDDDMMITGKRHDFHYRFDVGYDDDGRIDGVALDMTSRCGFSADLSGPVMTRAVCHFDNAYWLGDVAIAGYCGKTNTQSNTAFRGFGGPQGAFAIEYILDDIARALGRDPLDVRYANLYGKTERNVTPYGQTVEDNVLHELLGELETTSGYRARRAAVREFNARNAVLKKGIALTPVKFGIAFNVTHFNQAGALVHIYTDGSVLVNHGGTEMGQGLNTKVAQVVAHELGIRFDRIRVTATDTSKVANTSATAASTGSDLNGKAAQDAARQLRERLAAFAAKRFGDGSVAAADVKFGNDVVWVGATSVPFADVVASAYLARVQLWSDGFYATPKLYWDQSKLQGRPFYYYSYGAAVSEVVIDTLTGEMRTLRVDALHDVGASLNPALDIGQVEGAFIQGMGWLTTEELWWNAGGKLMTHAPSTYKIPTVNDTPPEFNVRLFRNRNVEDSIHRSKAVGEPPLLLPFSVFFAVRDAIAAVGDYRVNPPLDAPATGEAILRAVHAVRAASAARAG

SEQ ID NO: 2966 - protein, 201 aa, Idiomarina baltica OS145
MAVLVGRKAPDFTAAAVMGSGEIVEDFKFSDAIKGKKAVLFFYPLDFTFVCPSELIAFDKRLDEFKKRGVEVIGVSIDSQFTHSAWRNTATEDGGIGQVKYPLVADVRHSICKAYDVEHPEAGVAFRGSFLIDEDGVVRHQVVNDLPLGRNIDEMLRMVDALNFNQKHGEVCPAGWEEGKEGMKENAEGVAAYLSKNADKL

SEQ ID NO: 2967 - protein, 292 aa, Chlamydomonas reinhardtii
MPSETETLGFVVLEAMASGLPVVAVAAGGLKDILAPAAASASSPGGSSSAADLAAAAGCSGTPFGYLYPPGDYAAAAQLVAALAASPELRASVGAAARAEVERYGWGEATRVLREEQYKRAIHVHASRRRFAWLAKRARVARLLQRLWAALLAAATALVDGLDYAHDLRRQYQQQQLVMAAAYVCMHVEDEEGEDTAPYGCHSLVAALEQCLCVLDASSVAASSASVLLIAGPVLQRLRESIGDIAAALQALAAAVEVPQPRSGEGSDSDGSESVVALLRALRRELLNVPLT

SEQ ID NO: 2968 - protein, 857 aa, Enterococcus faecalis V583
MYSIIVNGQSETCETNKKLMDFLREDLGLTGTKDGCNQGSCGACTVLVNGKASKACLFTLEKLAGKEVTTIEGLSQRQKDVYAYAFAKTGAVQCGYCIPGMVISAQGLLNKKPEPTKEDIQKAIRGNICRCTGYVKIIEAIQLAAKMFCEEASIPEEHSNGKLGEDFQRVDAVEKTLGTGIYVDDIDIEGMLHASALRSAYPRAKVLSIDSTQALAHPDCVAVFTAKDVPGNNKIGHLEFISDWDVMIPEGEITRYVGDAVALVVSKRKETLPEIKNLVEVDYEEMIPLTSCEAALAEGAPAIHEKGNILSHEHLVRGNAEEVLENSAFVVTEHYSVPINEHAFMEPECAIAQPEGEGILLFSAGQSIYDEQREVARMLGLDKEKIHVQSKLVGGGFGGKEDMSVQHHASLAAWLLKKPVKVLLSREESLMVHPKRHGMEMDFTTGCDEEGNLTAMKAVIYADTGAYASLGGPVLQRACTHAAGPYKYQTIDVEGFAVYTNNPPAGAFRGFGVCQTAFAIESNLNLLAEKVGLSPWEIRFKNAVAPGDTLPNGQLVSKNAALKEALLAVKDVYEQAEVAGISSFFKNSGVGVGLPDTGRCIISVEEGKIHVRTSAACIGQGMATVTTQIACETLNLPPEMIVAEAPDTRRTPNSGTTTASRQSLFTGEATRRAAMQLRYELDMGRALSDLEGEEFYGEYSAKTDPLINDKKSPVSHAGYGYAAEVAILDDKGKVAKFVAAYDMGQVVNPRAAEGQIEGGIAMGMGYALTEKFALEEGYVKAKYATLGLVNATQVPPIETILVHADNLHEGLAYGIKGVGELATIPTAPALAGAYFALDGQLRPSLPLENTPYQKKKR

SEQ ID NO: 2969 - protein, 377 aa, Medicago sativa subsp. caerulea
MPSLSEAYRAHPVHVNHKHPDFNSLQELPESYTWTHLDDHTLINSNNTMKESANSSSVPVIDLNDPNASKLIGHACKTWGVYQVVNHGIPISLLDEIQWLGQTLFTLPSHQKLKAIRSPDGVSGYGLARISSFFPKLMWSEGFTIVGSPLDHFRQLWPQDYAKHCDTVLQYDEAMKKLAGKLMWLMLDSLGITMEDIEWAGSKAQFDEKACAAMQLNSYPSCPDPDHAMGLAPHTDSTFLTILSQNDISGLQVQGEGSGWVTVPPLHGGLVVNVGDLFHILSNGLYTSVLHRVLVNRTRQRFSVAYLYGPPSNVEICPHEKLVGPTQPPLYRSVTWNEYLGTKAKHFNKALSSVSLCAPINGLFDVNDSNKSSVQVG

SEQ ID NO: 2970 - protein, 307 aa, Bacillus cereus ATCC 14579
MRVAQSVSELIGKTPIVKLNRIVESDSADIYLKLEFMNPGSSVKDRIALAMIEDAEKKGLLKEGDTIIEPTSGNTGIGLAMVAAAKGYNAILVMPETMSIERRNLLRAYGAELVLTPGPEGMGGAIRKATELAKEHGYFIPQQFKNQSNPEIHRLTTGPEIIEQMGDQLDAFIAGIGTGGTITGAGEVLKEAYKDIKIYAVEPADSPVLSGGKPGPHKIQGIGAGFVPETLDVEVYDEIIQVKTEQAFEYARRVAKEEGILVGISSGAVIYAATEVAKKLGKGKKVLVIIPSNGERYLSTPLYQFES

SEQ ID NO: 2971 - protein, 665 aa, Arabidopsis thaliana
MAASNHSSGKPGGVLSDALCRELWHACAGPLVTLPREGERVYYFPEGHMEQLEASMHQGLEQQMPSFNLPSKILCKVINIQRRAEPETDEVYAQITLLPELDQSEPTSPDAPVQEPEKCTVHSFCKTLTASDTSTHGGFSVLRRHADDCLPPLDMSQQPPWQELVATDLHNSEWHFRHIFRGQPRRHLLTTGWSVFVSSKKLVAGDAFIFLRGENEELRVGVRRHMRQQTNIPSSVISSHSMHIGVLATAAHAITTGTIFSVFYKPRTSRSEFIVSVNRYLEAKTQKLSVGMRFKMRFEGEEAPEKRFSGTIVGVQENKSSVWHDSEWRSLKVQWDEPSSVFRPERVSPWELEPLVANSTPSSQPQPPQRNKRPRPPGLPSPATGPSGPVTPDGVWKSPADTPSSVPLFSPPAKAATFGHGGNKSFGVSIGSAFWPTNADSAAESFASAFNNESTEKKQTNGNVCRLFGFELVENVNVDECFSAASVSGAVAVDQPVPSNEFDSGQQSEPLNINQSDIPSGSGDPEKSSLRSPQESQSRQIRSCTKVHMQGSAVGRAIDLTRSECYEDLFKKLEEMFDIKGELLESTKKWQVVYTDDEDDMMMVGDDPWNEFCGMVRKIFIYTPEEVKKLSPKNKLAVNARMQLKADAEENGNTEGRSSSMAGSR

SEQ ID NO: 2972 - protein, 200 aa, Synechococcus sp. RS9916
MTATGALRVGQQAPDFTATAVVDQEFKEVTLSQYRGKYVVLFFYPLDFTFVCPTEITAFSDRYADFSSKNTEVLGVSVDSQFSHLAWIQTPRNQGGLGDIAYPLVADLKKEIASAYNVLDEDAGVALRGLFIIDPDGVIMHSTINNLPVGRNVDETLRVLQAFQYVQSHPDEVCPANWTPGEKTMKPDPVGSKEFFAAVN

SEQ ID NO: 2973 - protein, 375 aa, Nocardia farcinica IFM 10152
MRIVQLANFYGPRSGGLRTALHHLGAGYVAAGHEVVLIVPGPRRREEVLPGGAVRITLPALPIPWTGGYRAADPRRVADVLTGLRPDVLEVSDRLTLRGFGRWARRRDVAGVMISHERLDRLLGQVLPGPLARRCADIANRHTAADYDIVVCTTEFARAEFRRIGAPNVELVPLGVDLDLFSPRRRDGRLRADLAAPGHPLLVHCGRLSVEKRVDRSIEAVGELNRAGAPVRLVVAGDGPRRDALEKRARSVPALPDGRPAVHFTGFISDRHRVATLLATADVSLAPGPHETFGLAALEALAAGTPVVASRSSALADIVTADCGAIADDDPAAFATAVTDILARPPATRRRAARHRAEQFTWGRAVSGMLKILAR

SEQ ID NO: 2974 - protein, 326 aa, Staphylococcus aureus subsp. aureus N315
MIEKSQACHDSLLDSVGQTPMVQLHQLFPKHEVFAKLEYMNPGGSMKDRPAKYIIEHGIKHGLITENTHLIESTSGNLGIALAMIAKIKGLKLTCVVDPKISPTNLKIIKSYGANVEMVEEPDAHGGYLMTRIAKVQELLATIDDAYWINQYANELNWQSHYHGAGTEIVETIKQPIDYFVAPVSTTGSIMGMSRKIKEGHPNAQIVAVDAKGSVIFGDKPINRELPGIGASRVPEILNRSEINQVIHVDDYQSALGCRKLIDYEGIFAGGSTGSIIAAIEQLITSIEEGATIVTILPDRGDRYLDLVYSDTWLEKMKSRQGVKSE

SEQ ID NO: 2975 - protein, 242 aa, Nelumbo nucifera
MAASACGVFSPICSSFASSPLYSSRSKQTGSSVVPISISFPSSSRKFSRLLSIVKAQESGDHNKDSSTSIDVQHVDQTKGTAVERTPRRSAFDIFPFGLVDPVSPMRTMKQMLETMDRLLEESWTFPGTERWAGAGEMRTPWEVREEETEVKMRFDMPGLSKEDVKVSMEDDMLVIKGEKKKKTETEDDSWSSRSFSSYDTRFLLPDNCHQDKIKAELKNGVLIISIPKTKVHRKVIDVDIQ

SEQ ID NO: 2976 - protein, 155 aa, Ralstonia solanacearum GMI1000
MDLDVNRRPVKVECDPATPLLWVLRDHLSLTGTKFGCGVAACGACTVHVDGAAVRSCVLPVAAVAGRRITTIEGLAEAPGKRHALQQAWIDEQVPQCGYCQSGMLMAAADLLARQPDPSDADIDAAITNLCRCGTYPRVRTAIKRAAQALREGRA

SEQ ID NO: 2977 - protein, 149 aa, Bacillus cereus ATCC 14579
MIKKLTLYINGENRQGIVRTADTLLDTLRDQFNLTGAKRGCENGDCGTCTVLVDGWPIKSCIMLAVEATEKRITTIEGLHESPVQRAFIEHWAFQCGYCTPGFIVNCHALIVNYPKVTDKIIEEWLESNICRCTSYQEIREAVKSLLQS

SEQ ID NO: 2978 - protein, 323 aa, Shigella flexneri 2a str. 2457T
MSKIFEDNSLTIGHTPLVRLNRIGNGRILAKVESRNPSFSVKCRIGANMIWDAEKRGVLKPGVELVEPTSGNTGIALAYVAAARGYKLTLTMPETMSIERRKLLKALGANLVLTEGAKGMKGAIQKAEEIVASNPEKYLLLQQFSNPANPEIHEKTTGPEIWEDTDGQVDVFIAGVGTGGTLTGVSRYIKGTKGKTDLISVAVEPTDSPVIAQVLAGEEIKPGPHKIQGIGAGFIPANLDLKLVDKVIGITNEEAISTARRLMEEEGILAGISSGAAVAAALKLQEDESLTNKNIVVILPSSGERYLSTALFADLFTEKELQQ

SEQ ID NO: 2979 - protein, 680 aa, Bacillus cereus ATCC 14579
MVIADSESAAQRAVFSIHVTYKEIPVVNSPIQAYQNNAPLVHERLGEYRIIEEAKPEPNTNIATRTKVRKGDIKNGFNQSDVIVEESFSFSQSDHAAMETRCTKVEIKSNGVVLVTSTSQAPFEIRKQLSEAFGIDEGNIHVSVPLVGGAYGGKTMVQLEILSYIASKAVGGRKVKLRNSREEDFITSPVHIGLQAKVKLGCTKEGILKSAEFLFLFDGGAYADRAVVVSKAAGLDCTGPYSIEHVECDSLCMYTNHPYATAFRGFGHSEYTFVVERTIDIMANKLGMCPLEFRLKNAIKPGDMTPTQVPVTRSNMGNPKQCLERLKKLINWNKGQYIQISDRKVRAKGIAFAWKNSTTPPDAGAGAVITFNENGSVNIHCGAVEIGTGTKTVLAQMVAEKMQLKMEDIHIKMEVDTQVAPKHWKTAASRTTYLVGNAVLAATEDIISQLKKSASILLGYPIESLEIANKQVYVKESPGLSIEIAHIALGYVSSNGQVINKQIIGRGAYTFEGITEPDKETGKGKPGPEWGIAAQAVEVEFDTQDYTYKLIRAFSVIDAGKVLNLKGAETQIMGAMSMGLSFATREAFTYDKKGKVLNNQFRSYKVTHYGQQPEYKVEFIETPHDDSPFGSRALGEHGILGMPAALANCLSVAAQVSLHQLPITPELIWRTKLKKENPLL

SEQ ID NO: 2980 - protein, 320 aa, Trichodesmium erythraeum IMS101
MRIAHNITELVGRTPLVQLNSIPKAEGCLAKIIVKLEGMNPAASVKDRIGVNMINVAEREGLIKPGKTTLVEPTSGNTGIALAMVAAARGYKLILTMPETMSMERRVMLRAYGAELVLTPGSEGMKGAITKAQEIVDLSSNGYYMLQQFQNPANPEIHSKTTALEIWEDTDGKVDILVAGVGTGGTVTGVAETIKARKPEFQAIAVEPSNSPVLSGGKPGPHKIQGIGAGFVPDVLDTKIIDEVIQVPDSEAMVYGRRIAKEEGILSGISTGAALCAAIEVGKRPENDGKLIVMIQPSFGERYLSTPLFQELGPTLAEVR

SEQ ID NO: 2981 - protein, 225 aa, Capparis spinosa
MASTLTVSSGSPLVSPTSRRATSKAVGSCSVSFPRRDSRRLSVVRAQDHKDNSVDVRVNKDNQGSAVEKSPRRLAVDVSPFGLLDPLSPMRTMRQMLDTMDRMFEDAMTVPGRNRGGGEVRAPWDIKDDEHEIKMRFDMPGLSKDDVKVSVEDDILAIRGEHKKEEDGTDDSWSSRSYSSYDTRLSKLPDNCEKDKIKAELKNGVLLISIPKAKVDRKVIDVQIQ

SEQ ID NO: 2982 - protein, 210 aa, Triticum aestivum
DARARSFVARAAAEYDLPLVGNKAPDFAAEAVFDQEFINVKLSDYIGKKYVILFFYPLDFTFVCPTEITAFSDRHEEFEKINTEILGVSVDSVFSHLAWVQTERKSGGLGDLKYPLVSDVTKSISKSFGVLIPDQGIALRGLFIIDKEGVIQHSTINNLGIGRSVDETLRTLRALQYVKKPDEVCPAGWKPGEKSMKPDPKGSKEYFAAI

SEQ ID NO: 2983 - protein, 152 aa, Methanosarcina mazei Go1
MKLPIKRPSRDVYSWDPFDEIKRMQEYMEQMMRAFPALENRYVSDTLSPLTDVAEEDNKVIVTTDLPGIDKENVELNLRENLLVISAQKGKEEETEKEGYLRKERSFMRYYREIPLPDNVTEDGATAQLKNGVLTVTLPKTKDVTEKRIQIE

SEQ ID NO: 2984 - protein, 492 aa, Mesorhizobium sp. BNC1
MTATRNEIRFLLNGLKIVLRDLRPGQTLLDYLRLNRRLTGTKEGCAEGDCGACTVLVGRLSGDAVIYEGVDACIRFLASLDGCHVVTIEHLKRPDGSLHPVQQALVHHHGSQCGFCTPGIVMSLYALWMRNPRPSDKDIEKALQGNLCRCTGYEPIMRAARAISSYGEPASDPLALERAAIIAELKRIKDGTRVEIGTGQDRLAIPASVDDLADILEAEPDTTIVSGSTDVGLWVTKFMREIAPAVFIGGLDELRTVSQEDGVITIGAGVSYSDAFSYLSDRIPALGQLIERIGGDQVRNMGTIGGNIANGSPIGDTPPPLIALGATLTLRKGQSRRTIPLEDFFIAYGRQDRQPGEFVEAVHVPLPAPETRFAVWKISKRRDEDITAVLGAFAVTLDADGTVASARIAYGGMAATPKRALAVEAALHGRPWTIETIEQALPAYEQDFTPISDMRASAEYRMMTAKNLLRRLYLETSGASGPVTLQRYEAVA

SEQ ID NO: 2985 - protein, 533 aa, Magnaporthe grisea
MAANTMAARGAQSVTESATDLIGNTPLVRLNKIPQSLGIKAQVFGKLELMNTGGSVKDRIALRMIEEAEKEGRIKPGDTLIEPTSGNTGIGLALVGAVKGYKTIITLPEKMSAEKVSVLKALGATIIRTPTQAAWDAPESHIGVAKRLLKEIPNSHILDQYSNPNNPLAHEHGTAEEIWAQTGGKITAVVAGAGTGGTISGLARGLRKHSKTVKVIAADPIGSILALPESLNDNGVNEPYKVEGIGYDFIPDVLDRELVDKWYKTEDRESFMYARRLIAEEGLLVGGSSGSAMAAMVRAVKDLNLGEDDVVVVVLPDSIRSYLSKFADDDWLAANDLLLPTPDSSVNGDTLDSPAVAEAQALHKSRARRASNPYGGATVRSLRLKPVTSVLADSKCSEAIETMRDKGFDQLPVVRDNKLVGLVTLGNMLSYVSRGRVKTNSPVSDVMFDFGRLDEVITDPRDVEGAAKMSTAHGRKKRNFVEITMNTPLDVLSKFLEWNSAAIVTEKSGEVSKPVAVVTKVDLLTWMMKELKA

SEQ ID NO: 2986 - protein, 997 aa, Oryza sativa Indica Group
MGVPAFYRWLADRYPQTVSDAVEEEPVELEPGAFVPVDLRRPNPNGLEFDNLYLDMNGIIHPCFHPEGRPAPTTYDEVFKSIFAYIDHLFGLVRPRKLIYMAIDGVAPRAKMNQQRSRRFRAAKDAADAAAEEERLRKEFEAEGRTLVAKEKSEAIDSNVITPGTPFMFVLSSALQYYIQLRLNHTPGWQSVKVMLSDSNVPGEGEHKIMSYIRLQRNLPGFDPNTRHCLYGLDADLIMLSLATHEVHFSILREVITMPGQHEKCFLCGQVGHLAAECRGSGQADKTVELPPIHKKKYQFLNIWVLREYLEKDLEIVDPPFKINFERVVDDFVFMCFFVGNDFLPHMPTLEIREGAINLLMNIYRREFTSMGGYLTDGGEVLLDRVEHFIQSVAVHEEQIFQKRARIQKAIQNNEERNRVQTENSEDNQYVDKAGFKTLGFPVKLGEPGYRVRYYAEKFKEEAELKPIDQVQRDVVQKYVEGLCWVMRYYYQGVCSWQWFYPYHYAPFASDLKCLAELEITFFLGQPFKPFDQLMGTLPAASSNALPKYYGDLMNDPNSPLKSFYPKDFEIDMNGKRFAWQGIAKLPFIDERRLLAETQKLEETLTDEERFRNRTMFDILYVRETHPLAAQIAFLYQMCSQSPNASYIIPIDPAASGGMNGFLCLSERNCYSIAVTSPVKGFNGIAQNRVLNATYLNPQYHKHIPEPPEGVIIPAKILKPSDFKPFPILWHEDNSRRQPRERPQVSGALSGSVLGEAAHRLVKNSLQIKSGYSAGLLDMPYRGAPYGPGNRPRPAGPLGYERGFVENSYNGHMSRSVPNSHPQFFGDAQANRQNVRILERPNYRNNDSAIHSGMSQLTIQDGPRMHQNNRMQNSGFSPNQPHPNQYAGFPPQRPMQNSGFTPQRPAQYSGFPHQRPVQIGLQHQPAVNGIQPPLPPSAWIGRPISGVPAGVPAKQDPRMAMDRQPKQDNSRSQHDKRQQATKVVYRVKGQGPNGLSE

SEQ ID NO: 2987 - protein, 781 aa, Mesorhizobium sp. BNC1
MNKPAASDFSSTKITGGVATDLRHDSAHKHVTGEAVYIDDMPEPAGTLHAYLGLSAIAHGTIRAIDLSQVEAAPGVVAVLAARDIPGENDISSTGHHDEPIFAETEVQFFGQPIFAVVAETREAARRACRLAKIEYEERPAIIDIAGADPQNPRLVTKPLKLERGDVEKALGAAPRRINGQMRVGGQDHFYLEGQIALAVPGEDLDVTVHSSTQHPSEVQHMVAHALGVPSHAVTVEVRRMGGGFGGKETQANLFAAVAAVAAKRTGRPVKLRPDRDDDMIATGKRHDFLIDYDVGFDDQGNILAVDLRYAARCGFSADLSGPVTDRALFHCDNAYFYPAVRALSAPLYTNTVSNTAFRGFGGPQGMVGAERVIEEIAFAVRKDPLEIRKKNFYGETERNVTPYHQTVEDNIIHRLVSGLEESADYAARRGAIAEFNAGSAIVKRGIALTPVKFGISFTATHFNQAGALVHVYTDGSVHLNHGGTEMGQGLYVKVAQVVAEEFQIDIDRVKITATTTGKVPNTSATAASSGSDLNGMAAQNAARQIKDRLIDFAIGRYDVPREQVVFLPNRVRVGNQEIPFPDLIRQAYEARIQLSAAGFYKTPKIHWDREKGRGHPFYYFAYGAACTEVSVDTLTGEYMVERVDILHETGRSLNPAIDLGQIEGGFIQGVGWLTTEELVWDEKGMLRTHAPSTYKIPLASDRPKIFNVKLADWAENAEPTIHRSKAVGEPPFMLAISALHALSDAVASVADHRICPRLDAPATPERVLMAVERLKAEAGR

SEQ ID NO: 2988 - protein, 158 aa, Nocardioides sp. JS614
MEVTLTVNGEVVTRDVEARLLLVHFLRDDLGLTGTHWGCDTSNCGSCVVLYDDEPVKSCTVLTAMAAGHDVRTVEDLEQDGELDPVQQGFMECHGLQCGFCTSGMLMSARALLDRDPDPSEEDIREAISGQICRCTGYASIVRSVRWAADHPEGRIEA

SEQ ID NO: 2989 - protein, 152 aa, Rhodobacter sphaeroides 2.4.1
MIHLTVNGREMSLDVDPDTPLLWVLRDELRLTGTKFGCGVAQCGACTVMLDGMPRRSCVTPVGMIENASVTTIEGMEGPEISAVQAAWAASDVPQCGWCQSGQVMSATALLRQIPKPTDEEIDHAMGGNLCRCATYVRIRQAIHDAARTLEG

SEQ ID NO: 2990 - protein, 330 aa, Haloarcula marismortui ATCC 43049
MYSTHSILGALLRGPIVFSRCMQSYAQRDDDGTVPASVTDLIGDTPLVCLDSFAGNLLGKVEAANPYSVKDRIALYMVEAAAESGDLTDDGMVVEATSGNTGIGLAAVCAARGYDCVLTMPESMSEERRQLLSGLGADLELTPADGGMSGAIERANELADAPGTVRARQFENEANPRAHRETTGPEIWADTDGDVDAVVAGVGTGGTITGISEYIKERVGADLTSVAVEPEQSKLLSAADPDSHDIQGIGPGFVPDILRRDLIDEVRTASKAESVAASQRLASQAGIMVGISSGAALHAAAEYATEHPEETVVVVLPDTGERYLSTDLWE

SEQ ID NO: 2991 - protein, 308 aa, Geobacter metallireducens GS-15
MEHTPFSLSGSIGSTPLVEIRKLNPNPKVRILAKLEGNNVGGSVKDRPALYMLAKAEAAGELSPERTILEPTSGNTGIAIAMLGAAKGYRVKLVMPACVSLERRAVLEAYGAELVLSPAEEATDGAIRLAHRILDEEPDRYYMPNQYANPNNPLAHYETTGPEIYRGTDGTVDFFVAGMGTGGTLMGVSRYFRETKPSVRIVGVEPRLGHKVQGLKNMQEAIVPAIYNPAALDLKLTVQDEPAFDTARDLAVREGLFVGMSSGAAMAGAIRVAKDAPAGSTIVVLLPDRGDRYLSTVLFRSVCGKCPP

SEQ ID NO: 2992 - protein, 203 aa, Anaplasma phagocytophilum HZ
MRRLMNLVTKPAIDFTARAVMSDGKMCDLTLSKHVAGKYAVLFFYPRDFTFVCPTEILSLHSRIPQFSEQNAEVIAISTDSEFAHSHWRNTPLEKGGIGMVSFPLVADDSHSISESYGMLFAGKVSLRGTIIIDENFVVRHQSINDLPIGRNVDEFLRIIDAIEHHKKHGEVCPAGWSKGKVAMEATQQGVEHYLQSHIDSLS

SEQ ID NO: 2993 - protein, 151 aa, Synechococcus sp. WH 8102
MAIGVGDSLPSFCLDDQDGVQRTPETARGRWLVLFFYPKDDTPGCTAEACGFRDSSAAFQELGAEVWGISGDDAISHRRFATRHGLNFPLLVDRNNSLRRSLGVPKALGLVPGRVTYVVDGEGVIRHVFSNLLDGPAHVREAERVISSLQG

SEQ ID NO: 2994 - protein, 422 aa, Frankia sp. CcI3
MLVVADKFPPVLGGIQTFAYHLAAGLPADRVVVVAPAAPSAAAFDRTLPFPVIRMDERILTSPGSRRLLRSVVRSEHCEAAWFPTAAPLGLLAPTLRTAGISRVVSSSHGHEVAWSRLPGGWSLVRAVAARADVLTYLTAFTRRRLLAVAPPGTTLARLTGGVDTGRFRPRVGGEEIRRQHGWSDRPVVICVARLVARKGQDMLIRGWPVVLRRHPAARLLLVGQGPAADRLRRLATQVGVADAVHFAGAVTEQDLPAYLDAADVFAMPSRTRLLGLDLEGLGLSALEAAASGLPVVTGAQGGAPDVVLPGRTGVVVDGRDRHAVATAVADLLDDPERSARMGLAGRDWMCRNWNWGELSRRLAGLLAGGPDSDLEGVAGHSFGSSAAHREVPDGVVSSNIGPSGMISDDIVPDRIDVSQGG

SEQ ID NO: 2995 - protein, 154 aa, Anaplasma phagocytophilum HZ
MVVREGDKAPGFKEEEGVVFPILASYYGNKNVVLYFYPKDDTPGCTKEAEGFRDANDKFANLNTAVVGVSRDSITSHENFKKKYQLPFELIADEEAILAKAYGVWVEKSMFGKCYMGIERSTFLIDKCGILKRIWRNVKVHDHVDTVLKAVNEL

SEQ ID NO: 2996 - protein, 223 aa, Parvularcula bermudensis HTCC2503
MMSEALAHSDVVILSGPPRYSIVVIFSLLGWRITTAQALRRITNAMVVAKHPRATGMVMPSPPRKWRIIMVEIGNAAPSFELPSENGNVSLSDFKGKWLVLYFYPKDDTSGCTKEAIGFSEQLDAFREAGAEVLGVSKDSVAKHQKFREKHDLTVPLASDEGGDIIDLYGVWVEKSMYGKTYMGIERATFLIDPEGVVREIWRKVRVPGHVDKVLKALTDHAG

SEQ ID NO: 2997 - protein, 260 aa, Hordeum vulgare subsp. vulgare
AGGHAADRIVRLPGQPEVDFDMYSGYITVDEAAGRSLFYLLQEAPEEAQPAPLVLWLNGGPGCSSVAYGASEELGAFRVMPRGAGLVLNEYRWNKVANVLFLDSPAGVGFSYTNTSSDIYTSGDNRTAHDSYAFLAAWFERFPHYKRREFYVAGESYAGHYVPELSQLVHRSGNPVINLKGFMVGNGLIDDYHDYVGTFEFWWNHGIVSDDTYRRLKDACLHDSFIHPSPACDAATDVATAEQGNIDMYSLYTPVCNISS

SEQ ID NO: 2998 - protein, 181 aa, Nocardioides sp. JS614
MTSLFEEVPAAAAEGVPVRRITVRVNGTPRTADVEPRLLLAHLLRQGFKLTGTHTGCDTTNCGACTVLVDGLPVKSCTMLAVQADGHEVTTVEGLAGPSELHPLQEGFKDEHGLQCGFCTPGMMLAAKALLAENPDPTEDEVRFALSGNLCRCTGYQNIVKSVLWAAKQMNGASADEGSAE

SEQ ID NO: 2999 - protein, 804 aa, Nocardioides sp. JS614
MTATEPAPTTSRALDEIKIGGMGASRRRVEDNRFIRGRGHYVDDVVLPGMLHMEILRSPVAHARIVSIDTTRAWNMPGVRLVLTGEMMATRNLAWMPTLSYDTQAVLATDKVRFQGQEVACVIADDPYIAKDACEAIEVEYEQLPVIVNPTQAMAPDAPIIRDDKEGQADNVIFDWEVGDKEGTDRAFAEADHVSTIRMHYPRSHPSPLECCGSVADFDRATGKLTIYMTTQAPHIVRAAVALIAELPEHMIRIVSPDLGGGFGNKVPVYPGYVMTILASILLERPVKWIEDRSGNLISTGFGRDVYLEGELALRRDGKILAVRMHTDSDHGAFFGDAQPSKFKIGLLHSTFSCYDIPTAHLTARGVYTNKAPGGVAYRCSFRVTEAMFFQERMMQAAADELGIDQAEFRRMNFVRDDDFPHRTPFGFLTDSGQYAKCLQVGLDAIDYEGFRREQAEAAKQGRLLGIGISCMTEPLGAGNSREYDILGIKMFDSAELRVHMTGKAILRTGAKTQGQGHETTWAQIVAHELGLPADDVVVEEGDTDTAPFGMGTYASRSTPVAGAAVAMVARKIRAKARKLAAHLLEVSEEDVEWELGRFYVRSAPDRGVTIQECAMAAYSNMPDGLEPGLEANAYYDPPNLTWPFGCYIVTVEVDPMTGVWDVLRVVAVDDCGVRINPMIVEGQIMGGLTEAYAMSSMQFITFDADGNCIGSNFMDYLLPTAWETPGYELHEVVTPCPHHPIGAKGIGECATVGGPAAFVNAVMDALKQYGVRNVDMPLLPDRVHEAITQRHDVSGAPPIRTDA

SEQ ID NO: 3000 - protein, 139 aa, Oryza sativa Indica Group
DRYDEFEKLNTEILGVSIDSVFSHLAWVQTDRKSGGLGDLKYPLISDVTKSISKSFGVLIPDQGIALRGLFIIDKEGVIQHSTINNLAIGRSVDETMRTLQALQYVQDNPDEVCPAGWKPGDKSMKPDPKGSKEYFAAI

SEQ ID NO: 3001 - protein, 215 aa, Thermotoga sp. RQ2
MEGRIPLIGEEFPRLEVKTTHGKKVLPDDFRGKWFVLFSHPADFTPVCTTEFVAFQKRYDEFKKLNTELIGLSIDQVFSHIKWIEWIKEKLGVEIEFPVIADDLGEVSRRLGLIHPNKGTNTVRAVFIVDPNGIIRAIVYYPQEVGRNIDEILRAVRALQTSDEKGVAIPANWPSNELINDSVIVPPASSVEEARKRLESKDFECYDWWFCYKKV

SEQ ID NO: 3002 - protein, 322 aa, Salmonella typhimurium
SKIYEDNSLTIGHTPLVRLNRIGNGRILAKVESRNPSFSVKCRIGANMIWDAEKRGVLKPGVELVEPTNGNTGIALAYVAAARGYKLTLTMPETMSIERRKLLKALGANLVLTEGAKGMKGAIQKAEEIVASDPQKYLLLQQFSNPANPEIHEKTTGPEIWEDTDGQVDVFISGVGTGGTLTGVTRYIKGTKGKTDLITVAVEPTDSPVIAQALAGEEIKPGPHKIQGIGAGFIPGNLDLKLIDKVVGITNEEAISTARRLMEEEGILAGISSGAAVAAALKLQEDESFTNKNIVVILPSSGERYLSTALFADLFTEKELQQ

SEQ ID NO: 3003 - protein, 505 aa, Desulfococcus oleovorans Hxd3
MIKEYKDIAGDIEETVDVCVIGTGAGGAVVAADLAEKGLRVAVLEEGSRFTIKNFNQDPADMMAMMYRDDGFTVTLGLPPVSLPLGKAVGGTTIINSATCFRTPKPVVEKWADRYDCAGLSYDTLAPYFDGVEKAISVVELSEDVLGKNYQIVRRGAKKLGIETKPLKHNVKGCEGAGVCQWGCVKQAKQSTDLAYIPRADKAGARIYANCRAKRIVTEAGRVVGVKGRVVNPANGRETGSFFIRARIVCAAMGSMITPAFLLKNRLANVSGQVGRNLTIHPCGRVVAEMDEVVNGHHGVSQGGFIDAFADEGIMLEGIFIPPGVMGLALPGMGQKHKALARAYNNIAAFGVMVSDTTRGRILPGLPGYAYTAWYSLNQADAETLRKGVGILADIFFAAGARRVFTGCFKLPEITGKQELERFKTMPIRPWHFELMAFHPLGTCRMGNNPRSAVVNLNLESHDVKGLFITDGSVFPSSLGVNPQVTIMAFAARAADYIAAHAGRY

SEQ ID NO: 3004 - protein, 219 aa, Xerophyta viscosa
MPGLTIGDTIPNLELDTTQGRIKIHDYVGNGYVILFSHPGDFTPVCTTELGKMAAYADEFSKRGVKLLGLSCDDVQSHKEWIKDIEAYTPGCHVKYPIAADPTREIIQQLNMVDPDETESSKCAVPSRALHIIGPDKRIKLSFLYPASTGRNMDEVLRAVESLQQAAKHKVATPANWKPGEPVVIKPDVSSEEAKKLFPQGYKSVDLPSKKDYLRFTNV

SEQ ID NO: 3005 - protein, 302 aa, Clostridium perfringens ATCC 13124
MKYYNDIRDLIGNTPILKLNNISTKEGVNIYAKIEGTSPGGSCKDRVGIYMVEKAEKEGKLKSGSTIIEATAGNTGIGIALAAINKGYKIIFIVPNKFSIEKQKIMKALGAEIINTPKEEGMEGAINLANSLLSEIPNSLSLNQFKNEANPLAHYETTGRELYDGLDGQIDYFVAGAGSGGTISGVLKFLKENISEVKGILADPVGSIIGGGQCGTYKIEGIGNNFIPETMDMSLVDDVIKVNDEEAFDAVKLLAKKEGLIVGSSSGAAFAAVLKLAEKIEEGNIVTIFPDRGDRYFSTDLF

SEQ ID NO: 3006 - protein, 637 aa, Desulfococcus multivorans
MGHIEKPYLLTFGDNEHGAFGGFRYYDHYGPYVFAFSAGNSRFIFLDSSGKTSFQWQARWLEEELDVAPNQNVFLFVGHPLLPVDKKGAFAFDFDDDYLADEAFRSLLMPIFQDSRIKAVFSSNLPLFSVQKYNDTLFVVTGGAGGFVLNNDRSFYHYVKVQVSRSQVDIEPVRLNIGQHKLFRTVESIWFFIHSLFYVGYLNYLLIVCFFIVSAYWLYSLLLKERDYYPDFNQPSEPNLDREIKVAMFTNNYLPFIGGVPISIYRLSSVLKKLGHKVLILAPQYEQSAEPQEERDIYRIPCLFKQAADKGIVVPNIFSFAAIRKVREFAPDVIHIHHPFWMGTVGLWMARRLNIPAVYTYHTRLEHYSYAVPLPKALFRNFISHALVRRLGNRCNAIVVPTEASEHYLRTIGVKIPVFVVPTGIETDKFAKLYEIEGSGLRAEMGIADDELVLLSVSRLSAEKNISFMLEAVSYLAKNCSQRFKFVLIGEGPERERLYQTAETLGLRDTVLFPGAVPPERMPAYYSLGDIFVFASTSETQGMVILEAMASAMPVVAIRASGIDDFVVDGMTGFKTMQNTSAWAEKVQLLLENDTLRHELSGHAASLASRFGIDEFGRRMERVYAHVLIDRQKGDAL

SEQ ID NO: 3007 - protein, 379 aa, Cupriavidus taiwanensis
MPSRIQTTIRPRIACLITNSEIGGAQSHVADLLQSADGQADMVLLAGGQGPLLDVAQRIDIPVIRLQQLDNALSPVRALAAMRELLQALRRAAPDLIHAHSAKAGALGRIAGLLLGIPVVYTVHGFAFKPQAPVRQRVAARMAESILAPLTARIICVAEAEKDLARRLPIRPERLVVIPNGIADSSARARPEAPLRRIIMVARLAPPKRPDLTIRAFARAGIPDCELVITGDGPQRPALQRLADELAPGRIRFTGSIDNVPALLATAQIFVLTSDHEGFPLSVLEAMRAGLPVVASDLPGIREQLDSGQCGELLPGNDESALADALSGLARDANRRATLGDAARRRWQQHYGLDRMTQATWAVYQDVLGNRARAARVPT

SEQ ID NO: 3008 - protein, 303 aa, Shigella flexneri 2a str. 2457T
MSTLEQTIGNTPLVKLQRMGPDNGSEVWLKLEGNNPAGSVKDRAALSMIVEAEKRGEIKPGDVLIEATSGNTGIALAMIAALKGYRMKLLMPDNMSQERRAAMRAYGAELILVTKEQGMEGARDLALEMANRGEGKLLDQFNNPDNPYAHYTTTGPEIWQQTGGRITHFVSSMGTTGTITGVSCFMREQSKPVTIVGLQPEEGSSIPGIRRWPAEYLPGIFNAALVDEVLDIHQRDAENTMRELAVREGIFCGVSSGGAVAGALRVAKANPGAVVVAIICDRGDRYLSTGVFGEEHFSQGAGI

SEQ ID NO: 3009 - protein, 340 aa, Mesorhizobium loti MAFF303099
MRILMVTDAWRPQVNGVVHTLERLTETLKSFDVAVDFLTPNIFRTLPLPTYPDIRLALTTPGHVARLIDAYKADHIHIVTEGPLGIMARRYCRNAGRPFTTSYHTRFPEYLSARLPVPESWAYRWLRDFHNSGQGTLVATQSLADDLSARGFNKLRPWTRGVDTDHFRPDKRKDLGFPGPVFLCVGRVAIEKNLSAFLDLDLPGSKVIVGEGPELAKLKSRYPNAHFLGHRPNDELAEIYASADVFVFPSRTDTFGNVIIEALASGTPVAAYPVTGPIDIVGDGFGGAVSNDLREAALAALEVDRAQARERAMRYSWKACAEMFLDTVEEALGRTRKLAA

SEQ ID NO: 3010 - protein, 302 aa, Arabidopsis thaliana
MVCSTIIKAVLISTGIITAMSMFLKVFLPVTLYFSLSFSTLWSSFLPWLKPPYLFVFVNVMITIIIASSRYYRSIGDHDGKDEKNLHGRGYYRIQTEPIVNQTSPPRLEVKDMDLDVDFDFMATIQPPEVERSEVVYEEKEEEISELINGGDEFVVLEESENLPPVEKPLVSARFEHRKMVKVTPKGDDIRKKALKVVNPKRDNKWKTISEEGTSRPLSTSHYQRPDIFGLGAGGDSLRKSETFRDVTNYYHQSSLTVTPPVKMEKEMLPSLEDLNRRIEAFIKKVKEERLESLRLDKEVAG

SEQ ID NO: 3011 - protein, 466 aa, Brassica oleracea var. medullosa
MRNLYFLVLFPLSILILVDASLHVKYLPGLEGPLPFELETGYVSVGESGDVELFYYFVKSERNPDKDPLMIWLTGGPGCSSICGLLFANGPLAFKGDEYNGTLPPLELTSFSWTKVANILYLESPAGSGYSYAKTRRAAETSDTKQIHQIDQFLRSWFVDHPEFISNSFYVGGDSYSGKIVPGVVQQISLGNEKGLAPLINIQGYVLGNPAVRTNLEPNHRVSFAHRMGLISDELHESLERNCGGKFFNVDPSNAKCSNGLLAYHRCISEIYIEQILLPNCKVDYVLSDISQTLPNIRTSRRRELKEFSRNDSSSLPPPSCFTYRYFLSAFWANDENVRRALGVKKGFGKWSRCNTQNIPYTYDIHNAIPYHVNNSRKGFRALIYSGDHDMMIPFSSTEAWIKSLNYSIVDDWRPWMMSSNQVAGYTRTYANKMTFATIKGGGHTAEYNPDQCSLMFKRWIDGESL

SEQ ID NO: 3012 - protein, 682 aa, Alcanivorax sp. DG881
MIDIKVFVRSHNQSLSAKTSTHFRADYTEAMGQLTLRQHPTAIALCRALFPAGKTLPAADTDALLGKMDAQLTGHPALQRSLKTGLLWLDNRHRLVRGYAFHRASPARQARFLDKLATTTVSGKLLRLLALPFKAAYVLDDQVEQATGCREPVQLPAQIETFRWQQQITAARDCEEDLTLEADVVILGSGAGGAAAAYELACRGLAVVIIEEGQYYDRSHFNGKLTEVIPKLYRSWGATVATGNAIIPVPVGCNVGGTTTINSGTCMRTPPSVLARWREQGLHDFTEQNLAPWFEGVERMLCVQQATPETVGPIGHIIDQGAAANGFLQRQPLMRNATGCDGQGLCQFGCPTDAKQSTNVSYIPRALERGAFLFSGFRAERLHRHGNRITGVTARGTNAAGRPVTLRLTSQRTIVAMGSLFTPLFLQQQGVRNRHLGRHLTLHPAGVVNALFAQQDLGNGRSIPQGYGVSDWEEQGLMFEGGTIPLAGHSLLNPLVGRDWVRFTEDYPHTAYFGFMIRDTSEGRVRRGPHRGLPLIRYHLNRQDFALFKRGIHTLACWYLDAGAKQVLIPGLNRIARIHNRTELERFLRSPLKPTDFLISAYHPLGTARIAASPHEGVCDSHHRVFGHPGLYVMDGASVPTSLGANPQVTIMAMASRAADTLARELLDDMDSTHTRPQGECA

SEQ ID NO: 3013 - protein, 292 aa, Yersinia pestis CO92
MTTLEHCIGHTPLVKLQRLSQGLNAEIWVKLEGNNPAGSVKDRAALAMIQQAELRGDIAPGDVLIEATSGNTGIALAMIAAMKGYHLKLLMPENMSQERQAAMRAYGAELILVSREQGMEGARDLALTMQENGEGNVLDQFNNADNPYAHFTGTGPEIWQQTAGKVSHFVSSMGTTGTITGVSQYLKSQNPQVKVIGLQPAEGSSIPGIRRWSAEYIPGIFRPELVDQVLDITQSVAEQTMRRLAKEEGIFCGVSSGGAVAGALRIAADNPDAVIVAIICDRGDRYLSTGVF

SEQ ID NO: 3014 - protein, 162 aa, marine gamma proteobacterium HTCC2143
MIEFTLNGKAVRTDDDPGTPLLWVVRDTFKLKGSKFGCGAGLCGACTMHIDGKASRTCMTPISAVSGRNVTTIEGLGTPDELHPLQAAWVELSVPQCGYCQSGQIMSAASLLNKNPTPSSADVDAAMSGNICRCGCYVRIKEAVLTVAGQSLAYNADEEIKA

SEQ ID NO: 3015 - protein, 516 aa, Burkholderia sp. 383
MSEPIRFYHRHAIREVSGADVTRTVLQYLREDAHCTGTKEGCAEGDCGACTVVVGELTDAGAVEFKAVNACIQFLPTLDGKALLTVEDLRQPDGALHPVQQAMVDCHGSQCGFCTPGFVMSMWALYEKHGHEGCGSAGTCAKAKDVPTRTEIADALTGNLCRCTGYRPIVDAAVQMFDAPAPSAPVDTAALARTLASLKRDDTFDYTTINGARFAAPRTLDALAALKVERPDARILAGSTDIGLWVTKQMRRLDDLIYVGQIAELQRLMERGDWIEIGAGVTVEKAYAALAGQYPELTEMWKRFASLPIRNAGTIGGNVANGSPIGDSMPGLIALGARVVLRGGDTVRELPLEALYTGYQQKDMAPHEFVIGLKVPTRTGAREKLQFRTYKLSKRFDSDISAVCAAFAFIADGDTIREPRIAFGGMAATPKRATHTEAVLDGAQWHEATAQAAMQALERDYQPLSDMRATSTYRLDTAKNLMYRFWLETRPHDPLPPQALNVREVAAELGTDAARV

SEQ ID NO: 3016 - protein, 784 aa, Burkholderia sp. 383
MNQQAEPFLSTLDPQADAAQVHVSRAHESAHLHVSGRATYTDDIPVVAGTLHAALGLSAKPHAKIVSMNFDAVRATPGVVAVFTADDIPGVNDCGPIIHDDPVLAKGIVQFVGQPMFIVVATSHETARLAARRAQVDYEELPAILTAQEARAAETYVIPPLKLARGDAAARLAVAPHRESGEMLLGGQEQFYLEGQIAYAVPKDDDGMHVYCSTQHPSEMQHLVAHVLGVASHNVLVECRRMGGGFGGKESQSGLFACCAALAAWKLLCPVKLRPDRDDDMMITGKRHDFHYRFDVGYDDDGRIDGVALDMTSRCGFSADLSGPVMTRAVCHFDNAYWLGDVDIAGYCGKTNTQSNTAFRGFGGPQGAFAIEYILDDVARSLDRDPLDVRYANLYGKTERNVTPYGQTVEDNVLQELLGELETTSDYRARRAGVREFNARNTVLKKGIAITPVKFGIAFNVTHFNQAGALVHIYTDGSVLVNHGGTEMGQGLNTKVAQVVAHELGIRFGRIRVTATDTSKVANTSATAASTGSDLNGKAAQDAARQLRERLAVFAAKQFGDGKVDAADVKFGNDFVWVGGASVPFGEVISKAYLARVQLWSDGFYATPKLYWDQSKLQGRPFYYYSYGAAVSEVVIDTLTGEMRTLRVDALHDVGASLNPALDVGQVEGAFIQGMGWLTTEELWWNKGGKLMTHAPSTYKIPTVNDTPPEFNVLLFKNRNVEDSIHRSKAVGEPPLLLPFSVFFAVRDAVAAVGDYKVNPPLDAPATGESILRAVSAVRAAKAG

SEQ ID NO: 3017 - protein, 306 aa, Erythrobacter sp. SD-21
MKAQSVLETIGGTPHIRLSRLFPDHEVWVKSERANPGGSIKDRIGLAMVEDAEKAGKLKPGGTIIEPTSGNTGIGLAMAAAVKGYKLVLVMPESMSMERRRLMLAYGATFDLTPKEGGMKGAISRAAELVEQTDGAWMPSQFENPSNFEVHKRTTAKEILDDFSDSPIDVMITGVGTGGHLTGCAEVLKETWPEMLAYAVEPTLSPVISGGDPGPHPIQGIGAGFVPENLHTDAIDGAIQVEPEDAKEWARQCAAKEGLLVGISSGATLAAIAKKLPELEAGSRVMGFNYDTGERYLSVPDFLPTE

SEQ ID NO: 3018 - protein, 212 aa, Microcoleus chthonoplastes PCC 7420
MALRLGDTVPNFTQSSSEGEINFYDWAGDSWVVLFSHPADYTPVCTTELGEVAKLKPEFDKRNAKVIALSVDDAKSHQGWIQDINETQNTTVNYPVLADADKKVSDLYDMIHPNANASVTVRTVFVIDPQKKLRLTITYPPSTGRNFDEILRVIDSLQLTDHHQVATPVNWKEGDDCVIVPSLKDPEVLKEKFPKGYTEVKPYLRMTPQPNK

SEQ ID NO: 3019 - protein, 151 aa, Synechococcus sp. CC9605
MALGIGDRLPSFSLEDQNGDLRTPASVQGRWLVLFFYPKDDTPGCTAEACSFRDNAESFAALDAEVWGISGDDAVSHRRFATRHNLTFPLLCDRNNALRREMGVPKALGLLPGRVTYIVDGEGVIRHTFSNLLDGPAHVREAQQVLNQLRG

SEQ ID NO: 3020 - protein, 181 aa, Listeria monocytogenes EGD-e
MAERLVGTQAPRFEMEAVMPNQTFGKVSLEKNIEDDKWTILFFYPMDFTFVCPTEIVAISARSDEFDALNARIIGASTDTIHSHLAWTNTPIKEGGIGKLNYPLAADTNHQVASDYGVLIEEEGVALRGLFIINPKGEIQYEVVHHNNIGREVDEVLRVLQALQTGGLCPINWQPGEKTIV

SEQ ID NO: 3021 - protein, 174 aa, Arthrobacter nitroguajacolicus
MREVTISVNGRPVTAEIDERTLLVDFVRRTAQLTGTKAGCLEARCGSCSVHVDGRLIKACNVLALQCDGTSVTTVEGLTGNSAETTEVSLAHIVGVQEEPELTPLQKSFHKHGALQCGYCTPGMLMCLTDLLARCEGPSEEDVRRGLTGNLCRCTGYQTIVDATLAVAQADAQE

SEQ ID NO: 3022 - protein, 338 aa, Yersinia aldovae
MKNVAFVITKSIIGGAQGWVIEQVKLLKEDCRVILITSEPGWLTETIVCDKVVIIPEIRKMASIKAIYALYKTLKENKIDIVVSSSANAGLYSRLARLFLRFRGVYVSHGWSCIYNGNVLKSVFCYIEKLLSNITDVIWCVSQSDADKAVNIIGIKPEKIVTQLNAITPLVERPDRPHQNKIIYVCRLAYPKRPDLMLKVAVANPQYHLDIVGDGEYYHDLKKEYNSYENIHFYGEIKGFDKFNEYDVFVLTSESEGLPMAAIEATSASLPVILSNVGGCGEVVDQNGILIENTTAALDAALNTVFSNYDSFYKGAQKQKNKFNINNVKDKCREIILG

SEQ ID NO: 3023 - protein, 795 aa, Arthrobacter nitroguajacolicus
MVESISAPKMVGQAIPRKENAGLLTGAALFVDDVVLEGMLHAKILRSPTAHANLLSVDASRARTMPGVHDVVTGPEMTGVLKRFGGLVKGLPFNDRIVMADDKVVFEGQEIAAVAAESPYEAWDAVEAIKVAYDELEPVVDIEFAASSEAKAIWDYNGTNVWENYKLKIGDAQSAHGAVTVGGKFRTNRPAAVAMEPHVCIADFDRITKSLTLYTSTQFTHLLAGIIADVLQIPPAKVRVATLNVGGSFGSKGDLFPHEVIACLLSLRTGRPVKLVLSREEVFKAVGGRCAQVTTAELKMDQDGSIVSYGAKVLHNTGAVSPFGGQIMKIGLHIGMLPYPIPNIDINASAVSTTTISGGPVRGFGVPQVLFVKEQLIDMAAEELGLDPIEVRLKNIPANAEEGYVTPSGIRIDSTTAHFCLRKVADEIGWWDRHEKREAYVGYGAGLAVKYTSARHPSLDTDLSTIRLLLTPDGRVTIFSGDVPHGQGHHTMLSQIVADATGAKFDEIGLVAADTATTPFSLGTFGSRSAAVLGSAAMRAGELLAERIRTVAASIMKCPADILELRESMVWVKGSTEPALPFEAVAAVALFATSGLSGGSVAGPIEAQATYDTPTEREREDGGGNWAATYSAGAHAARVEVDPSTGQFKILDYVMAHDSGNIINPLIVEGQHHGGFAHGLAMVTEDLQIGSDGKLLNASLATYGVLTAHDVPNLHQLYDVDVPSTVIPIGSKGAGETATGAVPAVIANALADATGIRFTRLPITPEDVVLALAEKERQGVDRLVWPLTETQGDTQ

SEQ ID NO: 3024 - protein, 786 aa, Cupriavidus taiwanensis
MNKQTEPFLLDAAAEQVPQVGISRPHESAHLHVAGTATYTDDIPELAGTLHAALGMSTRAHARIKSVSLDKVRAAPGVVDVLTVDDIPGTNDCGPIIHDDPILARDVVQFIGQPVFIVVATSHDAARRAARLGVIDYEDLPPVLSPQAAHEAGSYVLPPMHLTRGEPAARIAGAAHQDSGKIHLGGQEQFYLEGQISYAAPRENDGMHVWCSTQHPTEMQHAVAHMLGWHAHQVLVECRRMGGGFGGKESQSALFACCAALAAWKLMCPVKLRPDRDDDMMITGKRHDFVFDYEVGHDDEGHIEGVKVQMVSRAGFSADLSGPVMTRAICHFDNAYWLPNVQIDGYCGKTNTQSNTAFRGFGGPQGAFAVEYILDNVARTVGKDSLDVRRANFYGKTENNVTPYGQTVEDNVIHELIDELVASSEYRARREATRAFNAASPVLKKGIAITPVKFGISFNVAHYNQAGALVHVYNDGSVLVNHGGTEMGQGLNTKVAMVVAHELGIRMERVRVTATDTSKVANTSATAASTGADLNGKAAQDAARQIRERLTAFAARKAGVEPSEVRFNDDLVSAGELRLSFGELAREAYVARVQLWSDGFYTTPKLHWDQKALQGRPFYYFAYGAACSEVLVDTLTGEWKLLRADALHDAGRSLNPAIDIGQVEGAFIQGMGWLTTEELWWNKDGKLMTHAPSTYKIPTVNDCPEAFNVRLFQNRNVEDSIHRSKAVGEPPLLLPFSVFFAIRDAVAALGDYRINPPLKAPATSEAILDAVDAVRAASAQGAAQAA

SEQ ID NO: 3025 - protein, 155 aa, Clostridium perfringens SM101
MSIEINKLAPDFKLMGSDGKEHSLSDYKGKNIVLYFYPKDNTAGCTTEACNFRDNIQNFHDLNAIILGVSRDSLASHDKFITKLSLPFVLLSDPDEIVCKLYDVIKEKNMYGKKYMGVERSTFLINKEGILIEEFRKVRVKGHIEKVLDKLKEIN

SEQ ID NO: 3026 - protein, 500 aa, Cupriavidus taiwanensis
METQTIRFFHRGQVKEVSDAPITRTVLQYLREDARCTGTKEGCAEGDCGACTVVIGELQDGGDVEFKAVNACIQFLPTLDGKALITVEDLRQADGTLHPVQEAMVECHGSQCGFCTPGFVMSLWALYQQHNPGGEAPSRQTICDALTGNLCRCTGYRPIIDAGERMMALPAPTDGKLDPKQIADTLRNLKRGETFRYRAQGQDFFAPRTAAEFGAIKAAQPDIRILAGSTDVGLWVTKQFRELGSLLYVGQVEDLNQIAQRDGMIEIGAAVTLEKAYAALNAAHPELEELWKRFASLPIRNAGTLGGNIANGSPIGDSMPALIALGAEVVLQHGETRRTLPLEDLYLAYQKTAMQPGEFVAALRVPVAGPQHFRTYKLSKRFDEDISAVCAAFGITVQDGIVTEARIAFGGMAATPKRAAATEAALTGQPWNEATARAGMAALAQDYTPLTDMRATASYRSRGAANLLYRFWLETASEALPAAAVNVRAPGAGTIAIVTA

SEQ ID NO: 3027 - protein, 152 aa, Helicobacter pylori J99
MEKLEVGQLAPDFRLKNSDGVEISLKDLLHKKVVLYFYPKDNTPGCTLEAKDFSALFSEFEKKNAVVVGVSPDNSQSHQKFISQCSLNVILLCDEDKKVANLYKAYGKRMLYGKEHLGIIRSTFIINTQGVLEKCFYNVKAKGHAQKVLESL

SEQ ID NO: 3028 - protein, 79 aa, Triticum aestivum
  misc_feature (35)..(35): Xaa can be any naturally occurring amino acid
PGQGIAFKGFFLLCKEGGIQPSPIYTLGFGPSVDXPFRTPQGLQYGQKNPNEVCPAGWKPGGKSIKPAPKGSKGDFAAL

SEQ ID NO: 3029 - protein, 321 aa, Brassica oleracea
MESFPIINLEKLNGEERGLTMEKIKDACENWGFFECVNHGIPHELLDRVEKMTKEHYKKCMEDRFKESIKNRGLDSVRSEVNDVDWESTFYLKHLPASNISHVPDLDDDYRTLMKEFAGKIEKLSEELLDLLCENLGLEKGYLKKVFYGSKSPTFGTKVSNYPPCPKPDLIKGLRAHTDAGGIILLFQDDKVSGLQLLKDGEWVDVPPVKHSIVVNLGDQLEVITNGKYKSVEHRVIAQTDGEGRMSIASFYNPGSDSVIFPAPELIGKENEKKDNYPKFVFEDYMRLYSAVKFQAKEPRFETMKAMETTVANNVGPLATA

SEQ ID NO: 3030 - protein, 221 aa, Ustilago maydis 521
MPGLRLGSIAPNFTAETTHGVLNFHEYLGDSWGILFSHPDDFTPVCTTELGEVARKAPEFEKRGVKIIGLSANDIASHDRWIKDINEVGNTSVNFPIIGDKDRKVSTEYDMLDALDPTNVDAKGIPFTVRDVFVIDPKKVIRLKISYPASTGRHFDEILRVIDSLQIGDKYRVTTPVNWQKGDKVIVHPSVQGEEAEKLFPGYETVKPYLRFTKDPSTSSA

SEQ ID NO: 3031 - protein, 1273 aa, Oryza sativa Japonica Group
MATTRPPASHPAKSTHLSFSLPLTLADLNSQKNRDGQSGETLAPPHSPREVFRPRPPWRRAGEAPPPPPPPPADADAASSSRGPGDDEGSGRAGASQEAGGGGCGVTPYEQARKALALRSPFDGDEAVGRDALLPARVARWAAVGDVRKKHKKAQQPEAAAAAAAAAVEQQPKPSSGSKEFWDLMEPYFREINWDDFEALMQAPLLGFNGPLDPCFLVPFVGSGKEFGENYDPSCVVVEDESSHLNSNLGKDSDELESSIVRSKQDSHGSSDFVGGNMDPVINNGANDEHGEQDMQEVVLQEEQPMEIEQDHGRSDAIALPPDTEESDVSLNWLLGARDRFVLTSERPNKKRKLLGADAGLERLVQLPPLEGEAGTTCDEKGALKPVKRDSGQIADGGNLKFVHLFCSLWTPEVVVEDLNSMEPVTNVGDIQENRTKLVCSLCKVEMRAFCLKHSTVQETISIQNDRICAEEDTSQIELDDASLATQKIQQLRLTRNNKDKFTSSMIASSCSSSLKQTTELATSPSTARSVESQETQITDMAVDRPIGDRCLVSNSGDVSTALRKLIDQGMVNVGDIESELGVSSESLEAALVPETSTFSPGLKLKIIKLLQNTIRVPSVQEKCSKEGSLALQGTVFTGESKSLTDTQICSELEEGISSFDHCCPEGDNTNKDWADSVENGFHNCGEDCISGKCFLNSSTKLEQLADIAVADQVSKAKSSGILEHSPHDEIEGELLHLQSRLLDDVGGAKQRYEDLVLKIVQSLSHDLDSFNKRKWDHIIANQFLRDLREAKKRGNTERRHKEAQAIMAAAARCILPTSRNAPVRKVAECDVLSAKQELFVCLQSVPVAVPAKQEVHSPKQESIPKFNTGSSRVSQLISVQQANDSSPNSKVSADANIGSFDLAKFSKKNALPCDICMRSETVLNRIFVCSSCKAAVHLDCYRSVTNPTGPWKCELCQEMPSDVVAGSQSDCDGSKPCLLQCDLCHGTSGAFRKTIKGRCIHAFCAEESLPKDKDTCAICHRNVGSCLKCSTVDCQITFHPTCARDAGFYMDTKTIGSTLEHKAYCGKHGIEQRKADLLQLHGPEEVKNMKQMRVDLEVLRLICERVVKREKLKKDLVVCGHDTLAARRNSIAYSTRTSYCGSGPGASSESATTSVNNSYSGLMQRTDDVAVDSIISRKPTVRFSLNNSDADRNTADSSTSSISYKQKLDDRESLADKNLPKKPATAMQISEEGETKSSDKKNQRPPKSIVYTRRSALSKKRQLSQNVEGPGG

SEQ ID NO: 3032 - protein, 704 aa, Candida albicans SC5314
MDSIFPSKVEYKQIDTFIALCDGLIYDTTVDEIKDVIAPDFPQEKLQEYVKTFTRPSQTPGFREAIYDTINSNTTNASRSFGILCNILGSRILAPTLTNSLTPIKDMTLKERETLLASWRDSPLAAKRRLFRAICALSGTTIVRLASELHLKAIHFPQRDLRETAYEGQVIDPFRYDFMEKPSFEGAEIYLPDIDVIIIGSGAGSGVVAHTLANDGYKTLVLEKGKYFSASELQFDDHTGVKQLYQGGGAVATLNQQMLILAGSTFGGGTTVNWSACIKTPFKVRKEWYDDFGVEFAATDSYDKDQDYVFKQMGASTDGITHSLANEVIMEGGKKLGYASKEINQNSGGHPHHPCGFCHLGCKYGIKQGSVVNWFRDAAANGSKFMEQVRVVKILNKNGIAYGVLCQDVATGVNFTITGPKKYVVSAGSLNTPTVLANSGFKNKNIGRNLTLHPVTTVFGDFGREVQADHFHNSIMTAVCTQVDDLDGRAHGAKIETILNAPFLQAAFLPWRGSNEFRRDLLRYNNMVAMLLITRDSTSGTVKGDPYRPDALYVDYTINKFDRNALLQALLITADMLYIEGAKRILSPQSWVPIFESNVPKDQRSIDDKDYVEWRKKVAGIPFDQYGAAYGSAHQMSSCRMSGKGPGYGAVDTNGKLYECSNVYVADASVLPTASGANPMISTMTVARHIGLGLAKDLKTKAKL

SEQ ID NO: 3033 - protein, 769 aa, Thauera sp. MZ1T
MNPRLPRNGTVGARTPLVDGVEKVTGKAKYTADIAAPGALVGRILRSPHAHARILSIDTAAAEALEGVFAVCTGAETPVPYGVLPIAENEYPLAREKVRYRGDPVAAVAAIDEATAEKALGLIRVDYEVLPAYFTPKAARKAGAVAIHDDKPDNVLREVHAEFGDVAAAFAEADLIREKTYTFAGVNHVHMELNATLAEYDPVRDMLTLNTTTQVPYYVHLKVAACLQMDSARIRVIKPFLGGGFGARTETLHFEIIAALLARKARGTVRLMQTREETFIAHRGRPWTEVKMKLGLKKDGKIAALALEATQAGGAYAGYGIITILYSGALMHGLYHIPAIKHDAWRVYTNLPPSGAMRGHGTVDTRAAFEALLTEMAEELGIDSLRIRQINMLPEIPYVTMYAQRVMSYGVPECLEKVKAASGWEERKGRLPKGRGLGIALSHFVSGTSTPKHWTGEPHATVNLKLDFDGGITLLTGAADIGQGSNTMASQVAAEVLGVRLDRIRVISADSALTPKDNGSYSSRVTFMVGNASISAAEELKGILVKAAAKKLDAREEDIEVIDELFMVSGSQDPGLTFQEVVKAAMVDSGTITVKGTFTCPTEFQGDKRIRGSAIGATMGFCYAAQVVEASVDEITGKVTAHKVWVAVDVGKALNPLAVEGQTQGGVWMGMGQALSEEIVYDKGRMLHGNILDYRVPTMMESPDIEVIIVESLDPNGPFGAKEASEGMLAGFLPAVQEAVYEAVGVRATEFPLSPDRITELLDAKEAAA

SEQ ID NO: 3034 - protein, 144 aa, Cyanothece sp. PCC 7424
MTMTLVRYNPFRDLDILQRQMNRLFDESFLSDTKENGIPAAEISETEDAIHLKLELPGIAKEDLDIQVTKNAVSVSGERKEETKTETNGVTRSEFRYGKFSRVIPLPVHVQNNNVTAQYKDGILTLTLPKSEEEKNKVVKVQVG

SEQ ID NO: 3035 - protein, 161 aa, Thauera sp. MZ1T
MKNILRLTLNGRLREDLVPDNMLLLDYLREAVGLTGTKQGCDGGECGACTVLVDDRPRLACSTLAHQVAGRKVETVESLSTHGTLSKLQAAFHEKLGTQCGFCTPGMLMASEALLRKNPDPSREEIKTALAGNLCRCTGYVKIIESVEAAAAARLCAEEAK

SEQ ID NO: 3036 - protein, 306 aa, Triticum aestivum
  misc_feature (186)..(186): Xaa can be any naturally occurring amino acid
TAIDSHVFLLRWFDRFPEYNGREFFIVGESYAGHYIPELAVTIDVQNKNPKLTPINLKGICIGNGILEFAEEHAELYEYLWHRAFISDAAHDTIAKHCKGPDDLSTVCQAARDTAYSNTGDISAFNVYAPTCHDKKVRPTDSKCTDIAGPCLAHCVEAYLNQRQVQTAIHANTALKYPWVGCRTPXYNLKRFGDSPTSMLPHLKALVTTGIRIWLFSGDFDAMVPVTATRRSVEKLQLGVEKDWRAWSPGPGKDVAGYVIAYKGLVLATVRGAGHMVTVDQPERGFALFTSFLRGEPLPSAAPQTD

SEQ ID NO: 3037 - protein, 144 aa, Bradyrhizobium sp. BTAi1
MNGRDYEIAAEADTPLLWVLRDTLGLTGTKYGCGIAQCGACTVMIDGQATRSCQVPLDSIGSADIRTIEAIDQDAVGRKVVEAWVTDQVPQCGYCQSGQVMAATALLKQTPHPSEADIADAMTNLCRCGTYNRVAAAIRRVAHA

SEQ ID NO: 3038 - protein, 355 aa, Bifidobacterium longum DJO10A
MTIHNSLAELIGNTPLVKLNHIPQAAGVKATIAVKVEYFNPGGSSKDRIAERIIDAAEQSGQLKPGGVIVEPTSGNTGVGLALVAQQRGYRTIFTLPDKVSESKRAVLRAYGAEVIVTPTDAGPDDPRSYYQVAERLANTIPGGFRPNQYDNPNGPLSHYYTTGPEIWEATDHKVTHFVAGIGTGGTISGTGKYLKEASNGAVKVIGSDPEGSIYSASSRDEVHQYDIEGVGEDFYPKAFDRNITDDIVRVSDAEAFEMTRRLAGEEALLVGGSSGMAVASAIKYALANDLDENQIVVVLAPDSGRSYLEKIFNDDWMRANGYGDIVERTSKPSLAEQYLNGAPSDEGAGDGLHN

SEQ ID NO: 3039 - protein, 427 aa, Micromonospora olivasterospora
MHVLRLTPYYYLAGRELTHRELQYEPIGGMQVQIMQTTEQLSELGIRQTVVFPQRPGMPRTVQLDARTSFELLSPPVAPIPTRSKGYVGLLVSWGLALVAWCVRQRLRGQHRQYSVIHMHCSELPWTFLFAVLARWLLRRPLALTVHCSALVTFHPETLAGRLLIGPARFFERVAIRRAEAVVVLTQRVRDAYVGLGLTDAERVHVVPDGVRLADFRPDRAAPAGTAEAESEPIVLYCGRFAPEKGWADYVDAAGLLVAEGTDARFVMCGDGNELARCRVQLRRLGIEDRVELLGHLDRPDIARTMRRAAVVVIPSRHEEMGGTVLEALTAGRPVVVTDVGGLPTVVGHGAAGLIVPPCDPPALAAAIRQCLASPELAERLGQAGMQRAAGYDLESVTRRLLDVYAAVAGAAAQAQQATPAAGVRAG

SEQ ID NO: 3040 - protein, 466 aa, Brassica napus var. napus
MRNLYFLVLFPLSILILVDASLHVKYLPGLEGPLPFELETGYVSVGESGDVELFYYFVKSERNPDKDPLMIWLTGGPGCSSICGFLFANGPLAFKGNEYNGTLPPLELTSFSWTKVANILYLESPAGSGYSYAKTRRAAETSDTKQIHQIDQFLRSWFVDHPEFISNSFYVGGDSYSGKIVPGVVQQISLGNEKGLTPLINIQGYVLGNPAVRTNLEPNHRVSFAHRMGLISDELHESLERNCGGKFFNVDPSNAKCSNGLLAYHQCISEIYIEQILLPNCKVDYVLADISQTLPNIRTSRRRELKEFSRNDSSSLPPPSCFTYRYFLSAFWANDENVRRALGVKKGFGKWSRCNTQNIPYTYDIHNAIPYHVNNSRKGFRALIYSGDHDMMIPFSSTEAWIKSLNYSIVDDWRPWMMTSNQVAGYTRTYANKMTFATIKGGGHTAEYNPDQCSLMFKRWIDGESL

SEQ ID NO: 3041 - protein, 336 aa, Rhizobium sp. NGR234
MLHTTVTQLIGQTPVMSIDVPGRNATLVLKIEKNNPGGSMKDRMARSMVIAALQDGRLPPGGTIVESSSGNTGTGLALAALEFGLRFIAVVDHHAAPDKIRMMRALGAEIRYVEGDFREDEVAVVERQRLAAQLGAQLPGALFMNQSDNPANPEGYTGLVDELVAQLPDGIDAFVGCVGTGGSMTGISQRLKRNNPAVRTIAVEPAGSIVFGKPGHPYYQSGTGTPAGDEVGKVLDYGCIDEGVQVTDTQAFETARYIARRKGLLVGGSTGGAIYKALEFIGAGKLTGTVVTTVADGGEKYLGTIFDEEWMAKRRLLDPAIAAQLDGWLFGKARAA

SEQ ID NO: 3042 - protein, 393 aa, Legionella pneumophila subsp. pneumophila str. Philadelphia 1
MLSKICMKILTVLDSYPPDLNGGAYFTHRLAKFLQAKGHEVLVICPSRSLKQGYTSYEGVNLYGVRSWPALGYKNFRVCWPFFIKKGILKAITDFNPDVVHLQGKFFLGGICYRACRKKGIPLMATNHFMPENFFHYTHLPKYFEKWFHRTTWNIVIDMLNHVKIVTTPTHTAANLLKEVHIQKEIHVVSCGVDLQKFQPKQNANLIRQRYKIPDKPILLYAGRLDKEKNLSIAIKAFYKARQSIDAHFVLTGRGAELQRLKKLVQTLNLTEHVTFTGYLSDAEYPLVYSLANCFVNPGTAELQSIVALEAIASGLPLLAAKAMALPELVKEGVNGYLFDPNDVETLSCYMVKILSDRTFSEQMGRESRKLSQEHDIKRTIEQYETLYQSMVS

SEQ ID NO: 3043 - protein, 324 aa, Mycobacterium abscessus
MTRYDSLLQALGNTPLVGLQRLSPRWDSGGDGSPHVRLWAKLEDRNPTGSIKDRPALRMIEQAEQDGLLERGATILEPTSGNTGISMAMAAQLKGYKMICVMPENTSIERRQLLELYGAQIIFSPAEGGSNTAVATAKELAAQNPSWVMLYQYGNPANADAHYRGTGPEILADLPEITHFVAGLGTTGTLMGTGRYLRENVPGVQIVAAEPRYGEGVYALRNIDEGFVPELYDPEVLTTRFSVGSFDAVRRTRELVQVEGIFAGISTGAILHAALGMAAKAVKAGERADIAFVVADAGWKYLSTGAYAGTVDDAEDALEGQLWA

SEQ ID NO: 3044 - protein, 184 aa, Synechocystis sp. PCC 6803
MTSKKFSWPKTIIALLLTLGLWLGLADLPTYALGGIQPELDQPAPLFTLPSTTGEGEVNLTDYRGQWVVLYFYPQDFTPGCTLEAQRFQRDLTKYQALNAQVIGVSVDDLDSHEAFCDAEGLKFPLLADSDGAVIKTYGSWLSGMALRHTYVIDPEGILRERFLGVRPATHSEEVLARLAELQA

SEQ ID NO: 3045 - protein, 787 aa, Burkholderia thailandensis E264
MNQQAEPFLSVAANAERDAFKQVHVSRPHESAHLHVSGRATYTDDIPLVAGTLHAALGLSAKPHARIASMRLDAVRAAAGVVAVLTAADIPGANDCGPIVHDDPVLADGVVQYVGQPMFVVVAASHDAARRAARLAQIEYEALPAILTAQAARAADSYVLPPMTLARGDAAERIARAVHRDAGELTLGGQEQFYLEGQIAYAVPKEDGAMHVYSSTQHPSEMQHLVAHVLGLASHDVLVECRRMGGGFGGKESQSGLFACCAALAAWKLQCPVKLRPDRDDDMMITGKRHDFHYRYDVGYDDAGVIEGVSVDMTSRCGFSADLSGPVMTRAVCHFDNAYWLPDVSIVGRCGKTNTQSNTAFRGFGGPQGAFAIEYIIDSVARALGRDPLDVRRANLYGKTERNVTPYGQTIEDNVLPELIAELEATSAYRARRAATRAFNAASPVLKKGIALTPVKFGIAFNVTHFNQAGALVHIYTDGSILVNHGGTEMGQGLNTKVAQVVAHELGVDFARIRVTATDTSKVANTSATAASTGSDLNGKAAQDAARQLRERLAAFAAEHFGGGNARAADVRFARDEVRVGETAVPFEALAAQAYRARVQLWSDGFYATPKLHWDQATLRGRPFFYYAYGAAVSEVVVDTLTGEMRVLRADALHDVGASLNPALDIGQVEGAFIQGMGWLTTEELWWNDGGKLMTHAPSTYKIPTVNDCPPDFRVKLFDNRNAEDSIHRSKAVGEPPLLLPFSVFFAIRDAVAAVGDYAINPPLAAPATGESILRAVQAVRAARAGA

SEQ ID NO: 3046 - protein, 496 aa, Streptomyces coelicolor A3(2)
MIRQRPENRNGARPVRCSQPLEGDPGSSDRHARSEEERLVSQYVSRLGRRSPAASPRLRLNRKPRRVAMLSVHTSPLHQPGTGDAGGMNVYIVELAQRLAAINIEVEIFTRATTAALPPAVELAPGVLVRHVDAGPYEGLAKEELPAQLCAFTHGVMQAWAGHRPGHYDLVHSHYWLSGHVGWLAAQRWGAPLVHAMHTMAKVKNANLADGDTPEPAARVIGETQIVAASDRLIANTAEEADELVRHYAADPDKVAVVHPGVNLERFRPFPKGRVPGPGQHGNARAAARARLGLPQDALIPLFAGRIQPLKAPDILLRAVAVLLDERPELRSRIVVPVVGGPSGSGLAKPEGLQKLAARLGIADVVRFRPPVGQEQLADWFRAASVLVMPSYSESFGLVAIEAQAAGTPVLAAAVGGLPVAVRDGHTGRLVHGHDPAAYARVLRDFADNPDLTPRMGDAAARHAQSFGWDSAAATTADVYTAAIQSYRRRVRSHHG

SEQ ID NO: 3047 - protein, 363 aa, Anthurium andraeanum
MATEVMTAVPAGSRVESLASSGIQAIPPEYVRPAEERVSLTDALEAARRAEDGPQIPTVDVAGFSSGDEAARRACAEAVRRAATDWGVMHVVNHGIPLELIRRMQAAGEAFFALPIEEKEKYANDQSSGNIQGYGSKLANNASGQLEWQDYFFHLIFPEDKANFSIWPKQPANYVEETREFGRQLRVVASKMLAMLSLGLGVEEGKLEAEVGGMEDLLLQMKINYYPRCPQPELAVGVEAHTDVSALSFILHNMVPGLQVHNEGQWVTARCVPDSIIMHVGDVVEILSNGQYKSILHRGLVNKEKVRVSWAVFCEPPRDKILLQPLPDILGQGHPAQFPPRTFSQHIQHKLFRKTQGDFATPN

SEQ ID NO: 3048 - protein, 327 aa, Rubrobacter xylanophilus DSM 9941
MQTRKLVKEVRMAAPGLSESVLEAIGDTPLIEVEEGIYAKLEYLNPSGSIKARIARYIVEKAEREGLLLPGHTIVEATSGNTGNAFSMVAAIKGYRMVVLMPEGLSTERVAISRAFGAHIEHVGEFYVTEALKRARELGKKEGYFCPAQFDSEWNVEENREWLGKEILGQLEEGGVGAPDALVMGVGTGGTLIGVGQAFREKNAEAKLIAVEPEESCTLLCGESGVHKIEGISDGFVPGIYERHAERLGVDEVYAVGSEEALGAMRWLARRRGLFVGPSSGANLVAARRLKEAHPELKSIVTLFCDEGEKYISEHFPATREVEAEAR

SEQ ID NO: 3049 - protein, 456 aa, Synechococcus sp. PCC 7335
MLFDPASNPSDLDGSNGFVVNGSNAVDYSGRSVSGAEDINGDGIIEMPKRTILIYRDQLLPYSETFIPAQAENYTRYQSFYAGSSRLSNIDTMLPVERCITLEQEKGLKKFWKGAYWFFNFPRPSWVEHLKDIEPCLIHAHFGLDGVMAMPLAKRLRVPLFVTFHAHYATKQPDADFNPREPLYKQLYFSDPIQYTWHLYLRKRAQLFESSNCIIAISNYIRQRLIEQGCPEEKVNVHYIGVDLQQFNAEITREIKASNTQLVNHQTTILFVGRLVEKKGCEYLLRSMAHVQQLMPYVKLIVIGDGVLRQPLENMASKTLRHCQFLGLQSTEMVKKWMALSSVLVVPSVTTETGETEGLPMVILEAMAMGLPVVASFHAGIPEAISHGENGFLVPERSISDLSQAILDLLRYPNIKEHFANKGIETIQANYDLQTNTKHLEMLYDTAVNQYQSSYK

SEQ ID NO: 3050 - protein, 189 aa, Shewanella sp. MR-4
MTQSIINSTIKPFKATAYHNGEFVPVTEQDLLGKWSVVFFYPADFTFVCPTELGDMADHYAKLQSMGVEVYSVSTDTHFTHKAWHDTSDTIKKINFPMLADPTGVISRNFGVMIEEEGLALRGTFVINPEGQVKVAEIHDLGIGRSAQELVRKIQAAQYVATHDGEVCPAKWQPGDETLAPSLDLVGKI

SEQ ID NO: 3051 - protein, 150 aa, Bradyrhizobium sp. BTAi1
MIKVKINGQEQSWDGDPSLPLLWYLRDELGLTGSKYGCGQALCGACTVMVDKEAARACITAISDVAGREVTTIEGLHPTGDHPVQKAWRQVNVPQCGFCQAGQIMQAAALLNQNPKPSHDQIRDAMSGNICRCGCYQRIENAVHLASTGV

SEQ ID NO: 3052 - protein, 187 aa, Lactococcus lactis subsp. lactis Il1403
MSLVGKKIEEFSTDAYLGGKFIKVSDKDFYGKWSVLCFYPADFSFVCPTELEDLEETYPTLKSLGVEVYSASTDTHFVHAAWHEHSDAISKITYPMLADPSQKISRAFDVLDEEAGLAQRGTFIIDPDGVIQALEITADGIGRDASQLVDKIKAAQYVRNHPGEVCPAKWKEDGASLHVGIDLVGKI

SEQ ID NO: 3053 - protein, 213 aa, Methylobacillus flagellatus KT
MATLRLGDTAPDFTQDSSIGPISFHEWLGDSWGILFSHPADYTPVCTTELGATAKLAEEFKKRNVKPIALSVDPVESHKGWITDINETQGAEVNFPIIADADRKVSELYDLIHPNASTTATVRSVFIIDPNKKIRLTLTYPASTGRNFNEILRVIDSLQLTEYHSVATPANWEDGDDVVIVPSITDPEVLKQKFPKGYKAVKPYLRLTPQPNK

SEQ ID NO: 3054 - protein, 377 aa, Prochlorococcus marinus subsp. pastoris str. CCMP1986
MKIAFFTETFLPKVDGIVTRLTKTIEFLTKNGDEVIVFCPEGCPDSYKGATIVGVAAMPLPLYPELKLGLPGPAVSDKLEEFKPDLVHVVNPAVLGLGGIWLAKTNNIPLIASYHTHLPKYLEHYGMGMLEPLLWELLKAAHNQALLNLCTSTAMVNELEDKGIQRTALWQRGVDTENFRPELRSEKMREKLFGKYQNTDSLLIYVGRLSAEKQIERIKPVLDNIPGACLALVGDGPYRGQLEKIFENTNTNFIGYLSGEELASAYASGDIFLFPSSTETLGLVLLEAMAAGCPVIGANKGGIPDIINNGINGCLYNPDEKDNGERSLIEATKKILADKNKKEAMRKEARKEAEQWDWNQATLQLQKYYAETLENIS

SEQ ID NO: 3055 - protein, 373 aa, Fragaria x ananassa
MAVGCMKTLSHHKEDDQKPLVFDASLLRYETDIPKQFIWPDDEKPCPNTRELQVPLIDLGDFLSGNPEAAMKASRLVGEACEKHGFFLVVNHRVKESLIADAHQYMDEFFGLPLSEKQRTQRKAGEHCGYASSFTGRFSSKLPWKETLSFSYTADQSSSNVVKDYLCNAMGEEFDEFGRVYQDYSEAMSTLSIGIMELLGMSLGVGRTHFKEFFGDNDSIMRLNYYPPCQKPDQTLGTGPHCDPTSLTILHQDQVGGPEVFVDEEWRSISPNLNAFVVNIGDAFMALSNGRYKSCLHRAVVNSKTPRKSLAFFLCPKDDKVVKPPRELIDSSYPRIYPDFTWPMLLEFTQKHYRADMKTLQAFTNWLQEQRSS

SEQ ID NO: 3056 - protein, 144 aa, Bradyrhizobium sp. ORS278
MNGRDHEVAVEADTPLLWVLRDTLGLTGTKYGCGIAQCGACTVMIDGQATRSCQVPIESIGSAEIRTIEAIEQDATGRKVVEAWVADQVPQCGYCQSGQVMAATALLTQNPKPSDSDIADAMTNLCRCGTYNRIAAAIRRAAQA

SEQ ID NO: 3057 - protein, 375 aa, Clostridium perfringens str. 13
MKLLFIHNTIPEYRIEFMNNLSNLIDTEFFISDKSLQEKIYGMTLESEIKNLKIDYISSTKRAKNIKNKIINSKCDVIILPPVDNIKEYINGVWALIYGKKNNKKVIYWTEKWEADLDKQPSMKKIKNFIQRIMIASLAKKCNICIAAGSKSKDYLRKIGIKEQKIKIAYDSSTSKKKYKEFDLRKKYNIPSEAKIILYLGRIVARKGADILIKAFNNIYGDIDDVYLLVCGDGDYIDECKKIASKLENNKIIFTGQIDYKLRSEYYSQSNIFVLPSYSLNGVIEAWGLTVNEAMECGLPVIATSAVGSAHDLIQNGFNGYVIKENDIDDLEDKILKIMKSDNYEVIKEQCVKTSVKYSVDNMAQSFFEAINLNE

SEQ ID NO: 3058 - protein, 379 aa, Cupriavidus taiwanensis
MKILIVTDAWEPQVNGVVRTLKSTRRELEAMGHTVDMITPLEFRTVPCPTYPEIRLSLLPGARVRRRIEAFGPDALHIATEGPLGLAARSHALRHQLPFTTAYHTRFPEYVQARFGIPLAWTYRFLRWFHGPAQAVMAPTPVVLDDLRRYGIGNAVLWTRGVDLDVFTPQRANVLNTAHPIFLYVGRVAVEKNVEAFLALDLPGSKWVVGDGPALPALRARYPGANYLGVLSQPELARVYASADVFVFPSRTDTFGLVLLEALASGLPVAAYPVTGPIDVLGDSPAGVMHEDLREACLEALRIDRATARAHAEQFSWRAASEQFLAHLRPFAGARPGRGGAAAPSATPKPSAPQTHAETASGTAVRPANAEAAARHAER

SEQ ID NO: 3059 - protein, 409 aa, Clostridium perfringens str. 13
MKILIVNTWYYPNLMGGAEHSVKLLAEGLVKSGNEVAIFCIDNRESGIKKQIINGVTVYRCDAGKYNLYKAYETNTNMIYKVFQKNIEIYNPTIKKQYFKVCEDFKPHIIHTNCLSGISLNVWKYNKLMGIQTVHTIRDYWLLSPRSVIEDEKKINIIYKIYLKFFQKYCKKQSMLVKYVTAPSKFTLNTLLNNGFFENAKRKLCISNSIEVDLDKLIKIIDEKKRKNSKNIKFIYAGWLSKEKGIQNLIEAFKKIDKKNIELIICGDGRLKKYVQDSSEIDTRIKYLGKLNPEELKQQYIDADVLIIPSIWEEPFGRVVIEGNSYGLPVIASNRGGIPEIINIMKSGIEFDALNIEELSKDIELMSDRERYKLYLDNILNNIEYFDIKKQIENYMKLYLEGINSITVK

SEQ ID NO: 3060 - protein, 907 aa, Bradyrhizobium japonicum USDA 110
MSFEINGKTFPQEPRAGQCLRTFLRELGHFGVKKGCDAGDCGACTVLLDGEPVHSCLIPAFRAEGRTVTTIEGLGGELGAHPMQQAFLDAQGFQCGFCTAGMILTCASLNQAQRTDLGAALKGNICRCTGYRAIEDALLGKINVEESVEAGAAFGRSLPAPAGPDVVRGKARYTFDTQIDGLLNIKLLRSPHAHARITAIDKSAALSVPGVHAVLTHEDAPSVLISTARHEKDWMDPEDTRILDDVVRFIGQKVAAVVAESEGAAEEACRRLKVTYEVLPALIDPEQAMAPGAPIIHPDRTTENRVADARRNLAAETHGEFGDVAAALATSAVTYEATFHSHRVQHAALETHGGLAWLDASGVLNVRTSTQVPFLTRRALSDIFQLPMDKVRVFCERVGGGFGGKQEMFVEDILALAALKTGRPVKLELTREEQFIATSTRHPMRVHIKAGADADGKLTALQLDVLSNTGAYGNHAGPVMFHSLSESIAVYNCPNKRVDGYAVYTNTVPSGAFRGYGLPQTLIAIEAAIDELAGQLGISPYDMRRRNIVKPGDPMLSPPPSEFHDVLYGSYGLDQCLDLVERAMQADGPRPELSPEWLIGDGIALTMIDTVPPAGHIADAMIALNDDGGFDLTVGTAEFGNGTSTVHRQIAATTLATTVDRIRLRQSDTAHGGHDTGAYGSAGTFVAGKATHAAAMQLATDLRAAAAGAWLCDVGSCALEDEFVVSGVRRMSFVELAKLARERGQPLAAQGNSGGTPRSVGFNVQGFRVAVNKGTGELKILRSVQAADAGVVANPMQCRGQVEGGVAQALGAALYEEMVIDADGRVTNAKFRDYHLPSFADVPRTEVFFAETSDTIGPLGAKSMSESPYNPVAAALGNAIADATGIRFTAPPFKPDRLFPALHDKFG

SEQ ID NO: 3061 - protein, 382 aa, Azoarcus sp. EbN1
MGSSYTHRHQYFQEANSHRLSKQKMNTRIIQHCFGKPASGGPIVALERLLAHSSVPYGVIRQTEPAGGLNVALIRRFVRELRQQQPQLVHVRGLGNEGFHAALAARLAGVPKILVSVHGTQRDLRHPGNPLRHWVVKSILEPLTLVMATHVATVCEFAAQRSFIRPFIGKLVGVVPNGVELPNLSRPEEPDFRARWGIPADLPLAVCVSRITEEKGYLTLASALRILDAECRLALLVVGGGDESKHIRNQFSGLANIVVRFVGHQHDVGSFLAASDLFLFPSLHENLSNALIEAMAHGLPAIATDVGGNTEVVARGGGILVPPGNAIELATAIARLLREPDFCMELAQQARENIRAHYSVERMVSDWQGLYERILKDDHGRA

SEQ ID NO: 3062 - protein, 202 aa, Vibrio campbellii AND4
MVLVGRQAPDFTAAAVLGNGEIVDNFNFAEFTKGKKAVVFFYPLDFTFVCPSELIAFDNRLADFQAKGVEVIGVSIDSQFSHNAWRNTAIEDGGIGQVKYPLVADVKHEICKAYDVEHPEAGVAFRGSFLIDEDGLVRHQVVNDLPLGRNIDEMLRMVDALNFHQKHGEVCPAQWEEGKAGMDASPKGVAAFLSEHADDLSK

SEQ ID NO: 3063 - protein, 214 aa, Populus trichocarpa
MVSISLPNHSLPSLLPTHKPKNLSSQNLPILSKSSRSQFYGLKFSHSSSLSIPSSSSSVKTTIFAKVNKGEVPPSFTLKDQDGKTVSLSKFKGKPVVVYFYPADESPSCTKQACAFRDSYEKFKKAGAEVVGISGDDPSSHKAFAKNNRLPFTLLSDEGNKIRKEWGVPADLFGALPGRQTYVLDKNGMVQLIYNNQFQPEKHIDETLKLLQSL

SEQ ID NO: 3064 - protein, 425 aa, Thermobifida fusca YX
MPLDRPLRIALLSYRSKPHCGGQGVYVRHLSRELAALGHHVRVLSGQPYPVLDDGVTLDPVPSLDLYNDEHPFQAPPMREWRDWIDALEVATMWTAGFPEPLTFSLRAFRELRARRHEFDVVHDNQTLGYGLLGIQAILPTVTTIHHPITVDRRIELESATGWQRWSKRRWYSFVTMQGRVARRLRSILVPSQSSADDVAREFRVRPSVINVVPLGVDTRVFHPRPDITRVPGRIVCVASADSPLKGVAVLLRAVAKLATERDIELTVVSKPQPGGPTEQLVDELSLHDRVTFVSGIDETELACLLSSAQIAVIPSLYEGFSLPAVEAMATATPLVASRAGALPEVVGDDGAGRLVPPGDAEALAAAIAELLDNDAARARMSEAAWRRVQEKFTWRTVAENTARHYAAALDAAQRGRADRSAAAS

SEQ ID NO: 3065 - protein, 205 aa, Photobacterium profundum SS9
MELTMSVLVGRPAPDFTAAAVLGNGEIVDSYNLFENIKGKAAVIFFYPLDFTFVCPSELIAFDKRYADFQSKGVEVIGISIDSQFSHNAWRNTLVEDGGIGEVQYPLIADTKHEICKAYDVEHPEAGVAFRGSFLIDKEGMVRHQVVNDLPLGRNIDEMLRMVDALQFHEEHGEVCPAQWEKGKEGMDASPAGVAAYLSEHTDDL

SEQ ID NO: 3066 - protein, 159 aa, Nocardia farcinica IFM 10152
MPAEVGPLPVGTVAPDFTLKDQNNQPVTLSDYRGRKNVLLVFYPLAFTGVCQGELCKVRDELPKFQNDDAEILAISVGPPPTHKIWAAEQGYTFPLLSDFWPHGAVAQAYGVFNDKSGFANRGTFVVDKAGLIRFSEMNGPGEPRDQAAWEKALAALDS

SEQ ID NO: 3067 - protein, 341 aa, Synechococcus sp. WH 5701
MGIRQGPCTQAGISQGFVEAVGNTPLIRLRLLSDLTGCEILGKAEFMNPGGSVKDRAALGILLEAEESGALQPGGTVVEGTAGNTGIGLTHLCNARGYRSLIVIPDTQSAEKIGLLRSLGAEVRTVPAVPYRDPNNYVKLSGRIAAEIPGAIWANQFDNLANRRAHYASTGPEIWEQTGGRIDAWVSATGTGGTYAGVALFLKERSERVRCVLADPHGSALHAWATGAGLKAEGSSITEGIGNSRVTANLEGAPIDDAVRIDDQSALETIYQLLWREGLFMGGSVGINVAAAVETARRLGPGHTIVTVLCDSGDRYRSRLYDADWLASRGLSQPRRERVPA

SEQ ID NO: 3068 - protein, 372 aa, Sinningia cardinalis
MAPIATTLTALAEENSLHQKFIRDEDERPKVAYNQFSTEIPIISLAGIDETNGHHREEICKKIVEACEDWGIFQVIDHGIDSKLINQMTCLAREFFALPSEEKLRFDMSGGKKGGFIVSSHLQGEAVQDWREIVTYFSYPIKARDYSRWPDKPEGWKATTEAYSEQLIKLASKLLEVLSEAMGLEKDALTKSCVDMDQKVVVNFYPKCPQPELTLGLKRHTDPGTITLLLQDQVGGLQATKDGGKTWITVQPIEGAFVVNLGDHGHYLSNGRFKNADHQAVVNSNCSRLSIATFQNPAPEAIVYPLKIRDGENSIMEKPITFLEMYKRKMSNDLELARIKKLSKQNNVKEEELVENSHGSEKSSKDLEQILA

SEQ ID NO: 3069 - protein, 370 aa, uncultured archaeon GZfos35A2
MKIIQASCYYPPHIGGVENHVMELTKALIRRDNDLQVLTSDIPKNEYNGCIKFKAKEIFPHYVPLIFGLSKIKFMDADIFHSHCPPPFFSNAICKANKKPHVITYHFDVKIPKRAGNIRIPTLLGEYVEKYYAQHYALKVIEDCDAIIVTGKSYAETSPILHEFLFKCHVIPNGIDISKFDAAIRTLNVRRSKIVLFVGRLVLPKGIDDLIRAMPAVLKEVPEAKLVIVGEGEEQKNLGVLVRNLALEDKVEFRGYVKFKELAKSYLEASVFVLPSFTRLENFGIVLLEAMACRTPVIASDIPGVRENITKDNGLLFPPRDVDRLAESIITIISDGEKVKRMGEAGRKLVEEKYDWNVIAEQVSKLYSGL

SEQ ID NO: 3070 - protein, 152 aa, marine gamma proteobacterium HTCC2143
MIQFSVNGEIIRSESPPETPLLWVIRDEIKLKGTKFGCGISQCGACTIHLDGSAVRSCVTPLGAAKGRSITTIEGLDSIAGKALQSAWVEEQVPQCGYCQSGQIMQAAQLLADTPKPTDEDINVAMNGNLCRCMAYTRIHKAIKRAANVEEV

SEQ ID NO: 3071 - protein, 195 aa, Triticum aestivum
AYLGDSIEQVCTKKQAGTGPEFPGYRRPTRPKKYVILFFYPLDFTFVCPTEITAFSDRHEEFEKINTEILGVSVDSVFSHLAWVQTERKSGGLGDLKYPLVSDVTKSISKSFGVLIPDQGIALRGLFIIDKEGVIQHSTINNLGIGRSVDETLRTLQALQYVQENPDEVCPAGWKPGEKSMKPDPKGSKEYFAAI

SEQ ID NO: 3072 - protein, 602 aa, Arabidopsis thaliana
MASVEGDDDFGSSSSRSYQDQLYTELWKVCAGPLVEVPRAQERVFYFPQGHMEQLVASTNQGINSEEIPVFDLPPKILCRVLDVTLKAEHETDEVYAQITLQPEEDQSEPTSLDPPIVGPTKQEFHSFVKILTASDTSTHGGFSVLRKHATECLPSLDMTQATPTQELVTRDLHGFEWRFKHIFRGQPRRHLLTTGWSTFVSSKRLVAGDAFVFLRGENGDLRVGVRRLARHQSTMPTSVISSQSMHLGVLATASHAVRTTTIFVVFYKPRISQFIVGVNKYMEAIKHGFSLGTRFRMRFEGEESPERIFTGTIVGSGDLSSQWPASKWRSLQVQWDEPTTVQRPDKVSPWEIEPFLATSPISTPAQQPQSKCKRSRPIEPSVKTPAPPSFLYSLPQSQDSINASLKLFQDPSLERISGGYSSNNSFKPETPPPPTNCSYRLFGFDLTSNSPAPIPQDKQPMDTCGAAKCQEPITPTSMSEQKKQQTSRSRTKVQMQGIAVGRAVDLTLLKSYDELIDELEEMFEIQGQLLARDKWIVVFTDDEGDMMLAGDDPWNEFCKMAKKIFIYSSDEVKKMTTKLKISSSLENEEYGNESFENRSRG

SEQ ID NO: 3073 - protein, 154 aa, endosymbiont of Riftia pachyptila
MLQIGEVAPEFELPDADMYMVKSTDFIGKKNLVLYFYPKDDTTGCTIEAVELSDLVETFEQSDTQIFGVSRDNCVSHAAFRDKHGLTVRLLADPDGEACEVYGVWQEREAHGEKRMGIVRSTFIIDKHGVLRHALYDVKPKGHAAEVLQLVQQL

SEQ ID NO: 3074 - protein, 260 aa, Zea mays
MACSFAAATVVSSAPTPAARPLAVAPQSVSVSRSAVATAARPLRLVASRSARATRLVARAGGVDDLPLVGNKAPDFEAEAVFDQEFINVKLSDYIGKKYVVLFFYPLDFTFVCPTEITAFSDRYEEFEKLNTEVLGVSIDSVFSHLAWVQTDRKSGGLGDLKYPLISDVTKSISKAFGVLIPDQGIALRGLFIIDKEGVIQHSTINNLAIGRSVDETMRTLQALQYVQENPDEVCPAGWKPGERSMKPDPKGSKEYFAAV

SEQ ID NO: 3075 - protein, 787 aa, Burkholderia mallei ATCC 23344
MNQQAEPFLSVAADAERDAFRQVHVSRPHESAHLHVSGRATYIDDIPLVAGTLHAALGLSAKPHARIASMRLDAVRAAAGVVAVLTAADIPGTNDCGPIVHDDPVLADGVVQYVGQPMFVVVATSHDAARRAARLAQIEYEERPAILTAQAARAADSYVLPPMRLARGDAAARIAHAAHRDAGELTLGGQEQFYLEGQIAYAVPKEDGAMHVYSSTQHPSEMQHLVAHALGLASHDVLVECRRMGGGFGGKESQSGLFACCAALAAWKLQRPVKLRPDRDDDMMITGKRHDFHYRYDVGYDDAGVIEGVSVDMTSRCGFSADLSGPVMTRAVCHFDNAYWLPDVSIVGRCGKTNTQSNTAFRGFGGPQGAFAIEYIVDSVARALGRDPLDVRRANLYGKTERNVTPYGQTIEDNVLPELIAELEATSAYRARRAATRAFNAASPVLKKGIALTPVKFGIAFNVTHFNQAGALVHIYTDGSILVNHGGTEMGQGLNTKVAQVVAHELGVDFARIRVTATDTSKVANTSATAASTGSDLNGKAAQDAARQLRERLAAFAAEHVGGGAARAADVRFAHDEVRVGEVAVPFEELVAHAYRARVQLWSDGFYATPKLHWDQAALRGRPFFYYAYGAAVSEVVVDTLAGEMRVLRADALHDVGASLNPALDIGQVEGAFIQGMGWLTTEELWWNDGGRLMTHAPSTYKIPTVNDCPPDFRVRLFDNRNAEDSIHRSKAVGEPPLLLPFSVFFAIRDAIAAVGDYAVNPPLAAPATGESILRAVRAVRAARAGA

SEQ ID NO: 3076 - protein, 318 aa, Zea mays
  misc_feature (167)..(167): Xaa can be any naturally occurring amino acid
MSDLASSCKDKLAYFRIKELKDILNQLGLPKQGKKQDLVDRVLAILSDEQGQHHHGWGRKNALTREAVAKVVDDTYRKMQVCAPDLPSRSHSGSDFSHFRPKEEAPDFYHVDTKVRCLCNSTLLNDNMIKCEDGKCQVWQHITCVLIPDKPTEGAGPDIPPHFYCEXLCRLKRADPFWVTTGNPLLPVKFMSSGVGNDGASVPQIVEKTFQLSRADRETVQRQEYDLQVWCILINDKVQFRMQWPQYAELQVNGIPVRVMTRPGSQLLGINGRDDGPLVTTCSREGINKISLSRVDARTFCFGVRIVRRRTVPQVLFI

SEQ ID NO: 3077 - protein, 239 aa, Triticum aestivum
MACAFSASTVSTAAALVASPKPAGAPQCLSFPRSFVARAAAEYDLPLVGNKAPDFAAEAVFDQEFIHVKLSDYIGKKYVILFFYPLDFTFVCPTEITAFSDRHEEFEKINTEILGVSVDSVFSHLAWVQTERKSGGLGDLKYPLVSDVTKSISKSFGVLIPDQGIALRGLFIIDKEGVIQHSTINNLGIGRSVDETLRTLQALQYVQENPDEVCPAGWKPGEKSMKPDPKGSKEYFAAI

SEQ ID NO: 3078 - protein, 507 aa, Mesorhizobium loti MAFF303099
MKGRFQPGNALQLEADAVIIGSGAGGASVADVLTAAGISVIMLEEGKHIPSSSASPIASEAFLAAWRSGGLTAAIGRPPINYAEGRCVGGGTEINSAITQRADSNLIDQWRELYKIENFTPDELAQYYERAETAVNASLTPGPLGRATDILRKGGEALGWKVSELKRGQRGCKGANRCSYVCPNGAKQSMAITLLPKAVDRGMRLLTQTRVDNIRIEKGRATEVLARSRDPGGHAMAVRVKAGMVFVCAGAIHTPALLRRSGPRKCIGNTLRVHPTIRATALFDEPVDAHQSRLPLTAITEFMPEQRIGGSVFTPAIFGLSLAEDWTNRGDLMRNWRFCGSYYGMIRPRGVGSVRPLPGINEPLVGFKLAPDDWIALCQVLTRLGQVMFEAGARKVFPGISGHEGWTSPNQVHEYWNKPLPKQATNLMSIHLFSSCPPGEHRDACAVDSYGRVRGVENLFVADGSLIPEAPGVNPQMTIMALAFRAAEAALCHSAQERARSAARDRN

SEQ ID NO: 3079 - protein, 322 aa, Prochlorococcus marinus str. MIT 9301
MEIANDITSLVGNTPLVRLNRIRNHFNCYPEIIAKLESFNPSASVKDRIAYSMLCKAEEDGLIKPDKTTLIEATSGNTGIALAMVAAAKGYKLILTMPDTMSIERRAMLRAYGAELQLTPGKEGMKGALDLANELSSTIANSYQFNQFENFANPDIHERTTAQEIWSQSNNNLDGLVTGVGTGGTITGCARFLKKVNPNCKIYAVEPQKSAVISGEKAGSHSIQGIGAGFVPKVLDTKLIDEIIKIDDDEAFYYGRLLARLEGLLSGISSGAALAATIKIGERKELTNKRLIVILPSFGERYLSTAMFESNTSIQARKDGYL

SEQ ID NO: 3080 - protein, 791 aa, Ralstonia eutropha JMP134
MNAPESQKFVGTAVKRKEDFRFLTGNGQYTDDIVLPQQSYGYFLRSPHAHARIKSIDKSAALDAPGVIAVLTGEDMAADKVGGLPCGWLIHSIDGTPMKEPPHPVIAQGKVRHVGDQVALVVAETLMQAKDAAEKIDVQYEELPAVVNAADAAAATTLVHDDVPANTCYTWGHGDKAATDAAFAKAAHVTTLDIVNNRLIPNAIEPRAVNASYTRQDDSYTVYVANQNPHVERLLMGAFVLGLPESRLRIIAPDVGGGFGSKIFLYAEDVALTWASKKVGRPIKWTAERSESFLTDAHGRDHVTKAELALDSDGKFLAMRVHTTANMGAYLSTFASSVPTILYATLLAGQYATPAIYAEVKAVFTNTAPVDAYRGAGRPEATYVVERLVETAAHEMKMDPAELRRKNFIRDFPYATPVGLTYDTGDYEPCLARAQELADVKGFPARRDEAKQRGKLRGLGYSCYIEACGLAPSNIAGALGARAGLFEVGEIRVHPTGSVTVFTGSHSHGQGHETTFAQIVADRLGIALESVEIVHGDTGRVPFGMGTYGSRSLAVGGSAIMKALDKIEAKAKKIAAHLLEASDADVEFSNGVFRVAGTDRTKTFGEVALTAYVPHNYPLDKLEPGLNENAFYDPTNFTYPSGAYVCEVEVDPETGESQVVKFTAVDDFGNIVNPMIVEGQVHGGIGQGLGQAMLEQCIYDSDSGQLLTGSYMDYAMARAGDLPDFTVETAKGTPCTHNPLGVKGCGEAGAIGSPPAFINALVDALSPLGVKDLQMPATPHRVWQAIQAAKP

SEQ ID NO: 3081 - protein, 505 aa, Burkholderia mallei ATCC 23344
MSEPIRFYHRRAIREVSGANVTRTVLQYLREDAHCTGTKEGCAEGDCGACTVVVGELNDAGGVEFKAVNACIQFLPTLDGRALFTVEDLRQPDGALHPAQEALVECHGSQCGFCTPGFAMSMWALYERHGHEAQRADRTTPSRAQIADALTGNLCRCTGYRPIVDAAVRMFDARPPKAPVDVAALARALQALRRDDTFHYEHAGQAFDAPRTLDALARLKAEKPAARVLAGSTDVGLWVTKQLRDLGDVLYVGQVPELRRIVEHDDWIEIGAGASVEAAYAALAAHYPELVEMWKRFASLPIRNAGTIGGNVANGSPIGDSMPGLIALGARVVLRGGRAARELPLEDLYVGYQKKDMAEHELVVALKVPKRTGARANLRFRTYKLSKRFDSDISAVCAAFAFEADGEVLRAPRIAFGGMAATPKRAAHAEAALAGAVWDEAAALAAMRALDHDYAPLTDMRATSAYRLETAKNLLYRFWLETRPHDPLPASAVNVREVAAEPAAS

SEQ ID NO: 3082 - protein, 169 aa, Ralstonia eutropha JMP134
MPIPIRLTVNGKAVDAQVEPNTLLVQFLREQLRLTGTHVGCDTAQCGACTIHLDGRAVKSCNILAVQADGAEVTTIEGLAGIRVGNGSPAMHPMQEAFRECHGLQCGFCTPGMVMAATALVNARPDADATTIRQQLEGNLCRCTGYHNIVKAVQQGQAAMLAGTAASAE

SEQ ID NO: 3083 - protein, 320 aa, Magnetospirillum magnetotacticum MS-1
MERTGHQVVMVTPDRFRSLPCPTYPEIRLAFKPGRKLAAMIEAAQPCAIHIATEGPLGWAARRYCLRRKIPFTSAYHTKFPEYIKARFGVPLPISYAVMRRFHDASSRVMVATQGIESELAGRGFSNIARWSRGVDTELFRPRPEVRGADGPFAHLAGPIFLYVGRVAVEKNIEAFLALDLPGSKAVVGDGPQADEMKRRFPEVHFAGARFGEDLARHYAAADVFVFPSRTDTFGLVLLEALASGLPVAAYPVPGPNDVIGTSPAGVLDEDLGLAAEAALRIDPALCRAHALTFSWEACTLQFLDNLRPFEMGVWQAAAE

SEQ ID NO: 3084 - protein, 210 aa, Hordeum vulgare
DARARSFVARAAAEYDLPLVGNKAPDFAAEAVFDQEFINVKLSDYIGKKYVILFFYPLDFTFVCPTEITAFSDRHEEFEKINTEILGVSVDSVFSHLAWVQTERKSGGLGDLKYPLVSDVTKSISKSFGVLIPDQGIALRGLFIIDKEGVIQHSTINNLGIGRSVDETLRTLQALQYVKKPDEVCPAGWKPGEKSMKPDPKGSKEYFAAI

SEQ ID NO: 3085 - protein, 303 aa, Haloarcula marismortui ATCC 43049
MKDSILDTIGSPLVSVRAPEGATVAAKIESFNPGGSAKDRPAKYMIDDAERNGSLQPDDTLVEPTSGNTGIGMAMVGATKGYDVVLVMPSSKSPERRQIMKAYGAEIELVEGDISDAKERANELCERDDYVQLRQFENPANPTAHYETTGEEILEQVGDRTVDALVAGVGTGGTLTGTGRRLQDAFPGMDIVAVEPADNAVLSGMEPGTGEDSFQGMGPGFVSDNLDTDLLDDVMTVELPDAEDECRRLAHEEGILVGQSSGASNLAAREFAEQLIRDGVDDPLVVTVYWDSGERYMSTGMFD

SEQ ID NO: 3086 - protein, 346 aa, Campylobacter upsaliensis RM3195
MKIVLLIGDITTGGGTQRVVSNLANAFCEYYEVELLSIYQTNETPAFPLNHKVKLNFLHHKERGMVRGKFYKLIDKFYESYLLKKRYQNCIIIYNNMPHYPIFKNKNTHYLYILHERQKKFRTKYKHYDALIAINLEQKALLEKHHKNVIYIPNFLPKMPDAITNHQQKVVLFLGRFSKEKGVLRLIDIWKKVQEDGEFKDWKLIIVGEGVLKETMQDKIKALHLSTSIIIKPFTKEVEKEYLSASIYAMTSHKEGFGMVLIESASYALPSIAFDIAGLSDIIENEKSGFLIKDNDLENYADKLQVLMRDENLRKTMGENAKIHTKKHFSKELVLQKWQDLFHSLS

SEQ ID NO: 3087 - protein, 457 aa, Physcomitrella patens subsp. patens
MQYGLSSGDISSVCSKGKEIADDNFLVSAYSDASAAAPLRSSEQEEFAKEWAHKPRRVVLFVEPSPFSYISGYKNRYQNFIRYLRELGDEVLVVTTHHGVPAEFYGAKVIGSWSFPLPWYKAVPMSLALSPRIYKEVKDFKPDIIHASSPGIMVFGALIIAKLVGVPVVMAYHTHVPMYIPKYTFSWLVKPMWLVIKFLHRAADLTLVMSVALGKELKSAGASTAERIRIWRRGVDSDSFHPRYKSAEMRHKLTDGKPETPTIIHVGRLGAEKNLDFLVKVMERISEARLVFVGDGPYKPTLEKLFEGKNVHFTGMLSGEELSQAYASGDIFITPSESETLGFVVLEAMASGVPVVCARAGGIPDIVNQDGVTGFLYTPGDVDDCVGKLKALIESPELRDRTGRAGREEVEKYDWRASTKQVRNEEYSAAIWFWRRRKQQLASRFSGWFKHPQPQTT

SEQ ID NO: 3088 - protein, 364 aa, Capsicum annuum
MVVATPTPLLRRGTKKTAAFGVPTIDLSEDKSIASEMIVKACEDYGFFKVVNHGVPKKVIARMEREAVDFFSHPIAQKGRAGPAAPFGYGCKNIGFNGDKGDLEYILLEANPISLSQRAKTMSNDPSTFSAVTNDYVSAVRKLACDILELVADGLWMENKSIFSKLISNSQNDSCLRVNHYPPFIAPNNNYNHNDNDDEELNNHWDPSSELVEEGLHISPLIPAVGSKSRVGFGEHTDPQILTILRSNDVSGLQICSHDGFWIPVPPDPNEFFVFVGDSFQALTNGRFTSVRHRVVAINSWKSRMSMMYFAAPPLDAWITAPPQINNSISSNIYRPFTWGNFKQIVYSLRLADSRLDYFTNHAQ

SEQ ID NO: 3089 - protein, 148 aa, Thermococcus kodakarensis KOD1
MKVGETALDFVLKDQDGKEFRLSDFRGKRVLLSFHPLAWTGICEKQMKALEENYERFEELNVVPVGISVDPVPSKKAWAEHMGLKRLRILSDFWPHGAVSKLYGIFREDGGFSERANVLVDEEGRVVFFKVYPISELPDLEEIFEVLH

SEQ ID NO: 3090 - protein, 346 aa, Vibrio vulnificus CMCP6
MRILHIINDLSKNGGAQKFLVDLVTGEETKYDIKILVLCHENDYLETLSRHGIECYVWQTLTFKEKWALFRWPDIVHGHLYPSIYLALLALGKKKLQTEHSSSNRRRDYPAFKFMEYLLYLSHDLTISISEKVQEELIKFMPNFRQKYKVINNGVDLSCFSMSARTGIKHPAQIKIGMVGRLHEHKDHEALIRAVALLPTQYQLHLAGDGQKREALESLAQQLDITNRVFFHGVVSDIPTFLEQMDLYVQSSLIEGFGLAAVEAMAAGLPVLSSNVPGLDDVIGNAGYLFEVSNSEELANKIIQVCDSNENYSVASKYSILRCKEFTIEKFRDSYYKAYDGLFTQG

SEQ ID NO: 3091 - protein, 365 aa, Candida albicans SC5314
MLGRIAKRSISITTNTPLKLPFIPLVSETGFPGAIGNTPLLKLPRISESINRNIYAKAEFMNPGGSIKDRAALYIIKDAEEKGLIKPGGTIVEGTAGNTGIGLAHVCRARGYKCIIYMPNTQSQNKIETLRLLGAEVHPVPAVAFTDPENYNHQAKRHAERLDNAVWTNQFDNVANRQAHIETTGPEIWAQLDGKVDAFTCSTGTGGTFAGTTRYLKDISNGKVKAVLADPPGSVLYSYIKSGGKEMIRGGSSFTEGIGQGRVTDNLQPDLELVDDAVKIPDEDSIAMVYRLLDEEGLYLGGTGALNVAAAVEVAKSLPEGSNVVTVLADSAHKYADRIFSKKWLAEKGLYDAIPPHLQKYAVLD

SEQ ID NO: 3092 - protein, 774 aa, Rhodopseudomonas palustris CGA009
MSGPAFQGGLDRAGVPLVDGIDKVTGRARYTADLDHTGALVARILRSPISHGDIVRLDVSKALALDGVAAIVTGEDCAITYGVLPIAMNEYPMARDRVRYRGEPVAAVAAVDAETARQALDLIELELRELPAYYESEAARAPDAWLLHDNKPGNIEREVHNEFGDLAAGFEAADLIRTHTHHCAEVNHAQIEPHACLMDYDPVTGRLTAQSVSQVGYYLHLMLARCLEIDPSRVRVIKPFVGGGFGARVEVLNFEVIAALLARKASGRVLMRLSREETFITHRARPQTDITLTIGTRRDGRFTACSCEVVQRGGAYAGYGIVTILYAGALLQGLYDIPAVKYDGYRVYTNLPPCGAMRGHGSVDVRHAFENLVDRMARELGLDPFAVRRANLLAAPTRTLNDLMVNSYGLAECLDKVERASGWHERIGRLPPGKGLGMACSHYVSGSAKPIHFTGEPHAVVALRLDFDGGITALTGAADIGQGSSTVVAITVAETLGVALNRVRVISGDSAITPKDNGAYSSRITFMVGNAAIDAATKLKQILIAAAARKLEAVPEQIECAGESFFIGSGAQAALRFAEVVKAALVDEGAITVKGIFTCPPESQGGQHRGGAVGSTMGFSYAAQVVEVSVDDATGLITVDKVWAALDCGRAINPLAVVGQVQGAVWMGMGQAMCEETRYLDGLPAHAHASFLEYRMPTMIESPPIEVAIVESVDPRGPLGDKEASEGALAGFPPEMVNAAAMRSVSISMICRQRPIGSSRRWHGGGARQSGRWR

SEQ ID NO: 3093 - protein, 325 aa, Cyanothece sp. PCC 7424
MDIKDGFIGTVGNTPLIRLNSFSEETGCEILGKAEFLNPGGSVKDRAALYIIQDAEEKGLLKPGGTVVEGTAGNTGIGLAHICNAKGYKCLIIIPDTQSQEKIDLLRTLGAEVRPVPAVPYKDPNNYVKLSGRVAQEMDNAIWANQFDNLANRNAHYETTGPEIWEQTGGKIDGWVAATGTGGTYAGVALFLKEKNPDIKCIVADPMGSGLYSYVKTGEISPQGNSVTEGIGNSRITANMEGVPIDDAIQVDDHEAIRVIYQLLSQDGLFMGGSVGINVGAAVALAKEMGPGHTIVTVLCDGGARYQSRLYNQEWLSAKGLLPQQ

SEQ ID NO: 3094 - protein, 747 aa, Roseovarius nubinhibens ISM
MNKITREKGQFKVVGTRVKRPDGIDKVTGRAQYGADLVVPGMLTGAILRSPHAHATINSIDTSEALALPGVKAVVTRADFAALDDDEMIDIADNCLARDKVLYHGHAVAGVAAKDAQTARKALKLIKVDYTPLPHVTDVDAAMKPGAPVVQSGRQEENVQPEHSENVTGYCEFGHGDVEAGFAKADHIIERDFKTAAAHQGYIEPHACLASMTNDGKADLWCCTQGQFNVRSLCSAILDMEASQLRVTASEIGGGFGGKTTVFIEPVALALSRKSGRPVKIVMTRDEVFRATGPTVSSSSTVKIGMTKDGRITAAHAKFRYQGGAFPCATYSFGAQAAFAAYDLEAVKSEGWNALTNRPKEAAYRAPGAPMAIYAVESVVDELTQHFGLDPLEVRLKNAARENTKAAYGPTFDQIGLVATLEAAQKHPHYSAPLGENQGRGVSCGFWFNFGGNTCVTMNLNDDGTVGITEGNPDIGGSRASISMMAAEELGIPYSDVRTIIADTSSLGHNDVTDGSRVTFAVGLATIEAARDAIRKMCGRVAKIWGIDEDAVIWEDGYAKPSGPNAGDFEPMSIKEIAAISSNTGGPIAGHYEVNADGAGVSFGVHLADVEVDPETGYTQVIRYTVFQDAGKAVHPDYVEGQMQGGAVQGIGWALNEEYIYGEDGVLQNAGFLDYRVPVASDLPEIDTVILEIPNPGHPYGVRGVGETSIVPPLAALSNAVSRAAGVRLHELPMSPPKILKAITDRG

SEQ ID NO: 3095 - protein, 77 aa, Triticum aestivum
MGYLWRVRLSSFAAGASTASAVGFLLLYKDHLLARAAIARQVEDVKRISEKHYEALNHQISALENRKESGTNKEASD

SEQ ID NO: 3096 - protein, 160 aa, Roseovarius nubinhibens ISM
MKKIHVTTKVNGDEVEFLCPPEETLLDALRDRLGFSGAKEGCGTGDCGACSVTLNGRLVCSCLVLGAEAEGAEISTVEGLAHGGELHPLQQSFIDNAALQCGICTPGILVAAKALLERNPDPSDSEIRYWLAGNLCRCTGYDKIIKAVKIAAAEMRGETA

SEQ ID NO: 3097 - protein, 380 aa, Bacillus clausii KSM-K16
MEKLRIGISCYPTVGGSGVVATELGKQLASRGHEVHFITTEIPFRLDDKVYPNIFFHQVEVNQYAVFKHPPHDLSAASKIAEVILTHDLDLLHVHYAVPHAICAILAREMSGKDIKIMTTLHGTDITVLGFEPSLRPLIRYGIEQSDIVTAVSYDLARQTNELVRTDKPIQTVYNFIDEQVYYPKQVEQLRACYGLSETDDIIIHISNFRPVKRIMDVLKTFQLIVKSRDAKLLLIGNGPELPIARQFVEENDLTNDVLMLGNQKHVAELLSMSDLMLLLSEKESFGLVALEAMACGVPVIATNIGGIPEVVEDEETGYLCSLGNIEEAAAKAISLLADDQKRQAFKRAALNRVKQSFDSQHIVSQYEHLYEAMLKEEPL

SEQ ID NO: 3098 - protein, 338 aa, Flavobacteria bacterium BBFL7
MEYVENILGTIGNTPLVKMNKLVEDLPCLVLAKYETFNPGNSTKDRMGLKMVEDAEADGRLKPGGTIIEGTSGNTGMGLALAAIMKGYKLICVLADKQSKEKMDILRAVGAEVYVCPTNVEPDDPRSYYSTSKRLSEEIPNSWYVNQYDNPSNAQAHYESTGPEIWKQTDGKITHFVVGVGTGGTISGVGKYLKEQNPNIKIHGIDTYGSVFKKYHETGIFDENEIYSYVTEGIGEDILPKNVNFEIIDHFTKVTDKDAAIYTRRLAKEEGMFLGNSAGSAIKGLRQIHKEYGFTKDDVVVVLFHDHGSRYVGKFFNDDWMLEKGYINEDGSYPQEDN

SEQ ID NO: 3099 - protein, 375 aa, Mycobacterium smegmatis str. MC2 155
MRVAIVAESFLPNVNGVTNSVLRVIDHLRRTGHEVLVIAPDTPRGQPPADRIHDGVRVHRVPSRMFPKITSLPLGVPRPRMIGVLRGFDPDVVHLASPALLGYGGLHAARHLGVPSVAVFQTDVAGFAESYGMGVASRAAWAWTRHLHSRADRTLAPSTSAMENLAAHRIPRVHRWGRGVDITGFVPSARDEHLRRTWSPDGRPIVGFVGRLAPEKHVERLAVLAARDDLQLVIVGDGVDRVKLQTVLPTAVFTGELRGAALAAAYASMDVFVHPGEHETFCQTVQEAMASGVPVIAPDAGGPRDLVAPCRTGLLLDVDGFECALPAAVTHLIAERRRYGIAARRSVLARTWPVVCDELIGHYEAVLGRRSLRAA

SEQ ID NO: 3100 - protein, 377 aa, Prochlorococcus marinus str. AS9601
MKIALFTETFLPKVDGIVTRLTKTIEFLIKNGDEVIIFCPEGCPESYMGATVVGVAAMPLPLYPELKLGLPGPAVSDKLEKFNPDLIHVVNPAVLGLGGIWLAKTNNIPLIASYHTHLPKYLEHYGMGMLEPLLWELLKAAHNQALLNLCTSTAMVNELKDKGIQRTALWQRGVDTYSFRPDLRNEKMRDKLFGKYKDANYLLIYVGRLSAEKQIERIKPVLESIPNACLALVGDGPYRNQLEKIFENTKTNFIGYLSGNELASAYASGDIFLFPSSTETLGLVLLEAMAAGCPVIGANKGGIPDIISDGINGCLYDPDEKDNGVQSLIEATKKILENEDKREIMRKEARNEAEKWDWNQATLQLQNYYSETLKEID

SEQ ID NO: 3101 - protein, 313 aa, Mycobacterium tuberculosis
  misc_feature (47)..(47): Xaa can be any naturally occurring amino acid
GSHMSIAEDITQLIGRTPLVRLRRVTDGAVADIVAKLEFFNPANSVXDRIGVAMLQAAEQAGLIKPDTIILEPTSGNTGIALAMVCAARGYRCVLTMPETMSLERRMLLRAYGAELILTPGADGMSGAIAKAEELAKTDQRYFVPQQFENPANPAIHRVTTAEEVWRDTDGKVDIVVAGVGTGGTITGVAQVIKERKPSARFVAVEPAASPVLSGGQKGPHPIQGIGAGFVPPVLDQDLVDEIITVGNEDALNVARRLAREEGLLVGISSGAATVAALQVARRPENAGKLIVVVLPDFGERYLSTPLFADVAD

SEQ ID NO: 3102 - protein, 523 aa, Coccidioides immitis RS
MAQSSTRSPPTVMESVTEQIGNTPLVRLHKIPRSLGIEATVYAKLEFFNAGGSVKDRIALRMIEEAERKGRIKPGDTLIEPTSGNTGIGLALVAAVKGYKTIITLPEKMSAEKVAVLRALNATIIRTPTEAAYDSPESHIGVAKRLEKELPNAHILDQYGNEDNPLAHEFGTAEEVWTQTDGKITAIVAGAGTGGTITGLSRGLRKHNPKVTVIAADPQGSILALPESLNEEHKNEPYKVEGIGYDFIPDVLDRQAIDKWYKTGDKESFKYARQLIAEEGLLVGGSSGSAIAALAQASKDFKFQKDDVVVVILPDSIRSYLTKFADDDWLAANDLLPAAPVSVPPSPEIQPKGSRDQFAGVKVKALRLKPVSTVPSDSACEAAIEIMREKGFDQLPVLAPTGRRLVGLITLGNILSWIARGRATGKTPVSEVMFDFSKLSEVITDSRDLTKLEQNAVHRRGKEDRKFIEITLDTPLSTLNRFFEWNSAAVVTERDEQGNMKPVAVATKVDLLTWLLNQTKVNA

SEQ ID NO: 3103 - protein, 165 aa, Nostoc punctiforme PCC 73102
MPLVRWNPFRDSERLEPFRDTESWEPFREIDTLQRQMNRLFDRLMPTTNGGERSGFIFSPAAELEETDDAIRLRLEVPGLEAKDINVEATPESISITGERKTETKSEENGITRSEFRYGKFQRVIPLPSQIQNDKVQAEYKNGILQLTLPKAESEKHKAVKVNLG

SEQ ID NO: 3104 - protein, 318 aa, Blastopirellula marina DSM 3645
MEGKVMPRGKSYDDACSAIGDTPMIKINRLVPEGHATVFAKCEFFNPLNSVKDRIGYAMIADAEKSGKINQYTHIIEPTSGNTGIALAFVCAAKGYKLTLTMPESMSLERRALLRVMGANLVLTPAAEGMKGAINTAHEMVEKESGAWLAGQFDNPANPAIHEATTGPEIWEDSGENIDAIVAGVGTGGTITGVARYIKSKNPDFKAVAVEPTSSPVISGGAPGKHRIQGIGAGFVPKNLDTSVLDEVIKVDDEDAFEWGRQLAKQEGIVAGISSGATMWAAAQLAARPEMKGKRIAVIMASLGERYISTPLFGGLDG

SEQ ID NO: 3105 - protein, 191 aa, Fagus sylvatica
SQLIGKTPLVYLNKVTEGCGGYIAVKQEMMQPTASIKDRPAYAMIMDAEKKNLISPGKTTLIEPTSGNMGISMAFMAAMRGYKMVLTMPSYTSLERRVCMRAFGADLIVTDPTKGMGGTVKKAYDLLESTPNAFMLQQFSNPANTQVHFETTGPEIWEDTNGQVDIFVMGIGSGGTVSGVGQYLKSQNPNE

SEQ ID NO: 3106 - protein, 448 aa, Pyrobaculum aerophilum str. IM2
MRPPYPRHFKYIKANSVEEALQYVEEGYRPLAGGQSISTLLKLGVVAHEGLVDIFELDELRYIREEEKLKIGALLTHNDVAMHETVVRWAPALSLAAWHIADLQVRNRGTIGGSLAHADPAANYPAVLAALNAEVAVRRKKGVYIYPISQFIKGPYETEAEDGLVVEIAVPKWSRQGVVVYKRRGASYPSLIIAVAAEEENGVVTKSRIAVGGLYTRPVVLEGALDGLTPAEAKDRADKIAAEMPEGEPYDDPHMKYDEKRRLLPIFMSKALAQLSGRAEWTLPKKREVEKWRGSGGNSAWINGGEFIIDAEPRRLLIDFLREKGFKEVKRGCDEGRCGACTVLLDGRAVKSCTIFAVQAAGHRVETVRSLQRGGQLHPVQKAFLEEYAMQCGYCTHGFIMAAVDYLRIDPQARDDVLKLSVKNICRCTGYLNIIKAIKKASVYLQSK

SEQ ID NO: 3107 - protein, 766 aa, Pyrobaculum aerophilum str. IM2
MTYREGLRFVTGAGEYIDDLPEPRGVLHMAIYRSPYPHARIKKVDVSDVWKRGGAAYAPEDLLRIIKNPIPNALGLPIKYYPIAVGKARYYGEPVAVVLARDKYKAVDLLDYVNVDFEPLEPVASIEDALRGRALVHEELGTNVATVRHMSFGDVDKAFKIADVVEKFQFKFPRHTAMPLEPYGVIADYRGDELEIWANIQGPALYMYFISRALDLPTSKIRLQTPRDIGGSFGIKYSLYPYIILAATASRLANAPVKWIETRIESLVASSSNGERAGTVEIAASKEGRILAVKYDFVEDVGAYLRPPEPGALYRVHGNLNGAYDIRAIEVRHTVVFTNRMPTGLNRGYGGPQFYFALERAVDELARRLGIDPFEIRLRNLISQFPLEKYGWRFYETVTGGLYPMQDYARVLKALEPEYRKWRDLQRRGMRVGVGIAVVIEPSGTNLGYVDVALQAERRKYPHSGSGEYVTISVDPHGAVNVFVNATNEGLGHETALAEVVARELEIDPSNVKVIYRVDTSLTWSLSSGSYSSRFAPVVASAAILAARIIKEKIIALGSALLGAGRVVYQKGVVYDEANPNRKLDLRQLASAVHWDPGGLPEGVDANLSATVFFHPPTVKAPVGDRVNSSAAYAIQAHLAVVEEAEGELRLLKYVVSHDAGRILKKELLEGQLLGGIHHGVCMALYEELKYDENASPKSLLLETYGTPDLSQFVGVDVELIHFETPVGYLPSGALGSGEGPVMGAPAAIANAVADLYKKTISSLPL

SEQ ID NO: 3108 - protein, 308 aa, Geobacillus stearothermophilus
MARTVNSITELIGDTPAVKLNRIVDEDSADVYLKLEFMNPGSSVKDRIALAMIEAAEKEGKLKPGDTIIEPTSGNTGIGLAMVAAAKGYKAILVMPDTMSLERRNLLRAYGAELVLTPGSQGMRGAIEKAEELVREHGYFMPQQFKNEANPEIHRLTTGKEIVEQMGDQLDAFIAGVGTGGTITGAGQVLREKYPNIKIYAVEPADSPVLSGGKPGPHKIQGIGAGFVPDVLDTNIYDEVITVTTEEAFAAARRAAREEGILGGISSGAAIHAALKVAKQLGKGKKVLAIIPSNGERYLSTPLYQFED

SEQ ID NO: 3109 - protein, 164 aa, Heliobacillus mobilis
MIQTFPRRFNSMAELIAGQIAPDFTLPASNGEEVSLSQFRGSYVVLYFYPKDNTAGCTTEAQEFRDLHGQFLDKNTVVLGVSRDSVTSHGKFITKQELPFLLLSDGDSTLCNLYQVLKEKNMYGKKSIGIERSTFIIDPDGVITHIFRKVKAAGHAAKVLDSIG

SEQ ID NO: 3110 - protein, 329 aa, Synechococcus elongatus PCC 7942
MSTSGTFFADNSQTIGKTPLVRLNRIVKGAPATVLAKIEGRNPAYSVKCRIGAAMIWDAEQRGLLGPGKELIEPTSGNTGIALAFVAAARGIPLTLTMPETMSLERRKLLAAYGAKLVLTEGVKGMTGAVRRAEDIAASDPDRYVLLQQFRNPANPAIHEQTTGPEIWEDTGGAIDILVSGVGTGGTITGVSRYIKQTQGKPILSVAVEPEASPVISQQRSGLPLKPGPHKIQGIGAGFIPENLDLSLVDQVERVSNEEAIAYARRLAQEEGLISGISCGAAVAAAVRLAQQSEHAGKTIVVVLPDSGERYLSTALFDGIFNEQGLAVV

SEQ ID NO: 3111 - protein, 483 aa, Sorghum bicolor
MSSSGQYSSPRRAATATLLLALAAGSFLLLPALARGSSSSSSFEEDRISALPGQPNDGVAFDMYGGYVTVDEHAGRAFYYWLQEADRGEVEDPDTAPLLLWLNGRPGCSSVGYGAMEELGAFRVHTDGHRLLLNEYAWNKVANVLFLDAPAGAGFSYSNTSSDLLVAGDISTAHDSYTFLVKWFERFPQYKYRDFYIAGESYGGHYVPQLSQLVYRNNIGVEKPVINLKGFMVGNGLTDDRADMVGMFEFWWHHGLIADETLDTGLKVCPGSSFIHVTPECRKIWDKALEEQGHIDGYSIYTPPCDKGSPYAHRLQSRPHPLMMLPAYDPCTAFYSTKYLNLPEVQTAMHANVSGSMEYPWVVCSNLLFDNWTDAATSMLPIYRELIEGGLKVWVFSGDTDTVVPLSATRRSLAALSLPVKTSWYPWMIVGCYEHELASDMAKSRALGKDILCRGPPAETLGKEKPSAKTPSAILFLNRRSMS

SEQ ID NO: 3112 - protein, 657 aa, Sorghum bicolor
MHEGLAVVELAVGTHRPVRARTHEFVSPAHKFATRPGEEAVVDEGLKGMGIFEALGGICSGATAEEQELAADSMAGHDEGRGNTDSEGGYRGRGGKQMATLEEYEEARNLRMGDRPRSTFRVHMGEDKVCRKDWCWSVRADYILEKLPDVSGPSFVQFHGRVCRSCAGIVHMSGVDLKWSYNMALDTRTWPREDVPGLGLTDEDVSLLWRTSRRQPPPGTGVGARVLEEQDHQQREDDLIRGLPGLPPNDDVPFDMYGGYITVDEQAGRALYYWFQEADRTEVEDPDAAPLLLWLNGGPGCSSIGGGALEELGAFRVHTDGERLLRNEFAWNRAHDAYKFLVKWFERFPKYKYRDFYIAGESYGGHYVPQLSQLVYRNNIGVENPSINFKGFMVGNGLTNDRTDMIGMFEFWWHHGLISDETLESGLKICPGSSFIHIEPECQKIWDKAVEEQGNIDGYSIYTPPCDKGTPYARRRLRRSRRPLMLPAYDPCTAFYSTKYLNLPEVQTAMHANVSGIIDYPWVLCSDPLYYNWTDTPASMLPIYKELIGAGLKVWVFSGDTDTAVPLSGTRRSLAALGLPVKTSWYPWYIVSTETRVLLSSPIRSSCPPMVMTAESYAEPVVMIMVFTTGSDGHYFHLPSNQRWNFFLPPVWFYNSN

SEQ ID NO: 3113 - protein, 732 aa, Sinorhizobium meliloti 1021
MRFDTPATTNPIDQGKVIGKPITRIDGPLKTTGKAIYAYEWHDPNTRYAYGYIVGSAIAKGRIRSMDVAAARNAPGVIAVVTSDGVGELKKGKYNTAKLFGGTEIQHYHQAIAVVVAETFEEARAAAALVKVDYAEEKGAFDLAAAKDSAVKPEGGGDSGAGDFDAAFKAAPVKLDQVYTTPDQSHAMMEPHASIAAWNGDDLTVWTSSQMIDWWRTDLATTLGIDKDKVHLMSPFIGGGFGVKLFLRADAVLAALAAREAKRPVKVALPRPFLMNNTTHRPATIQRIRIGAGRDGKITAIAHESWSGDLPGGGPEVAVQQTRLLYAGENRMTAMRLATLDLPEGNAMRAPGEAPGMMALEIAIDEMAESLALDPVEFRIINDTQVDPENPERPFSHRNLVGCLRTGAERFGWRERSKQPGARREGNWLIGMGVAAAFRNNLVLNSGARVRLDREGIVTVETDMTDIGTGSYTIIAQTAAEMLGVPIEKVAVSLGDSRFPVSSGSGGQFGGNCSTAGVYAACAKLREAVAQKLGFNSADDPIFAEGEVRSGDRRMPLAQAAGDEGLVAEDQIEFGDLTKTHQQSTFGAHFVEVAVDVATGETRIRRMLAVCAAGRILNPITARSQVIGAMTMGVGGALSEELVVDKERGFFVNHDLAAYEVPVHADIPHQEVVFLDETDPMSSPMKAKGIAELGICGVAAAVANAIYNATAIRVREYPITLDKLINELPEIS

SEQ ID NO: 3114 - protein, 383 aa, Streptomyces avermitilis MA-4680
MRVGLLTREYPPDVYGGAGVHVEFLARELRSLTDLAVHCWGEGGAGGVVRHRPWTALDGANDALRTFSVDLSIAAALEGRELVHSHTWYAHLAGHLGKLLHGIPHVMTAHSLEPLRPWKAEQLGGGYALSGWAERTAIEAADAVIAVSGAMREDILTCYPTLDPAKVRVVHNGIDTTLYRPDHGTDVLARIGLDADRPFVLFVGRITRQKGVPQLLRAVRDIDASAQVVLCAGAPDTPEIDQEFRDLFQELSRVRAGVHWIPQMLPRPDVIQLLTHAAVFVCPSVYEPLGIVNLEAMACGTAVVASRVGGIPEVVDDGRTGVLVPVDEDFEASLAHALDSVLGDPEAARRMGEAGRERAVREFGWDAVARRTVHLYEEVLKQG

SEQ ID NO: 3115 - protein, 444 aa, Glycine max
EEIPNMRVMGRACFTNFPSHTAFRGFGGPQGLLIAENWIQRIAVELKMSPEKIREINFQGEGSVLHYGQIVQYSTLAPLWNELKLSCDFAKARKEVDQFNSHNRWRKRGIAMIPNKFGISFTTKLMNQAGALVQVYTDGTVLVTHGGVEMGQGLHTKVAQIAASAFNIPLSSVFISDTSTDKVPNASPTAASASSDMYGAAVLDACEQIMERMEPIASKHNFNSFAELVGACYAERIDLSAHGFYITPDIGFDWTIGKGKPFRYFTYGAAFAEVEIDTLTGDFHTRVANIFLDLGYSLNPAIDVGQIEGAFIQGLGWVALEELKWGDEAHKWIPSGCLYTCGPGAYKIPSVNDVPFKFNVSLLKGHPNVKAIHSSKAVGEPPFFLASAVLFAIKDAIIAARAEMGRNEWFPLDSPATPERIRMACLDELTSSFVNSDFHPKLSV

SEQ ID NO: 3116 - protein, 212 aa, Nostoc punctiforme PCC 73102
MALRLGDTVPNFTQASTHGDIDFYQWAGDSWVVLFSHPADFTPVCTTELGTVAKLKPEFDKRNVKAIALSVDDVESHKGWVGDIEETQSTTLNYPILADADRKVADLYDMIHPNANAAVTVRSVFVIDPNKKLRLSFTYPPSTGRNFDELLRVIDSLQLTDNYSVATPADWKDGEDVVIVPSLKDPEVLKEKFPKGYEEIKPYLRMTPQPNK

SEQ ID NO: 3117 - protein, 455 aa, Guillardia theta
MAPWMAVVAMVAIGMQVALAVPTHSRRRAGGGLAEPLAPGATDEITDLPGLPKEVSKFKQYAGYIPVGGGKSLFYWFVEAQKNPASSPLVLWTNGGPGCSGLTGFLSEQGPFRAEKGGQLSLNKYSWNRVANMIFIEQPAGVGFSQGPSNMTYGDAEAAKDNRAFVLGFLSRYPMYKDNDLYLTSESYGGHYIPTLAMLLLDLPNFKGFAVGNPLTWMPYRDYGQYAAYASRQLIPKPLWDRFVALGCFLFPSANQTDCDSMTASMDAMTANMDPYALDFPICQTPSLASGRTERYLLLKKIASADKKQRKTLSGYFPKYKPCVDDYMTQYLNRKDVQKAIHVSNPGSVTWSVCSDVVNEAYNPKDVAAPMMGVYNELIKHGGLKMMIYSGDDDSICSTAGAQMWIWGLGKPIEEWQQWSSKGQVAGFTVKFPGLRFTTVHGAGHMVPSTAQAGI

SEQ ID NO: 3118 - protein, 320 aa, Anabaena variabilis ATCC 29413
MRVARNITELVGRTPLVQLNRIPQEEGCVAQILVKMESMNPSSSVKDRIGVSMINAAEQEGLIAPGKTVLVEPTSGNTGIALAMAAAAKGYRLILTMPETMSGERRAMLRAYGAELELTPGMEGMSGAIRRAQEIVNTTPHAYMLQQFRNPANVKIHRETTAEEIWEDTDGQVDMIVAGVGTGGTITGVAEVLKARKPSFQAIAVEPANSPVLSGGKPGPHKIQGIGAGFVPQVLKTQLIDEVITVTDEEAIAYGRRLAREEGLLSGISSGAALCAAIRVAQRPENAGRLIVLIQPSFGERYLSTPLFQDLETKVTASIS

SEQ ID NO: 3119 - protein, 188 aa, Oceanobacter sp. RED65
MTTLVNTEIKPFNATAFKQGEFVEISDADVKGKWAVFFFYPADFTFVCPTELGDVADKYEELQKLGVEVFSVSTDTHFTHKAWHDSSETIGKINYYMVGDQTGTITNNFGVMREGQGLADRATFLVDPDGVIQAMEITAEGIGRDADDLLRKVKAAQYVRNNPGEVCPAKWKEGDETLAPSLDLVGKI

SEQ ID NO: 3120 - protein, 336 aa, Brucella melitensis 16M
MRDSNGEYAMNKPLGSKDAEAAGRGRIYDSILDTIGNTPLVRIDKFARENGVKANLLVKLEFFNPLASVKDRIGLAMIEALEKQGKAVPGKTVFVEPTSGNTGIALAFAAAAKGYRLILTMPETMSMERRKLLRLLGAELVLTEGAKGMKGAIAEAEAIAEGNPNAIIPQQFENPANPEIHRLTTAEEIWNDTNGEADILISGIGTGGTITGVGQVIKARKPSFKVVAVEPKDSPVLSGGAPGPHKIQGLGAGFAPKTLDTGIYDEIVQISNEDAFTNARLVARLEGIPVGISSGAALAAAIEVGKRSENAGKNIVVVIPSFAERYLSTALFEGLE

SEQ ID NO: 3121 - protein, 158 aa, Geobacillus kaustophilus HTA426
MEETTKRELVLHVNGERRSIVTRQAETLLFVLRDGLGLTGAKPGCLNGDCGACTVLVDGTPIKSCMMLAIETVGKEITTIEGLDDAPIQHAFVRHFAFQCGYCTPGFIMNAHALIERHPGADQATIQEWLESNICRCTSYQEIEAAVKEALEAKKADI

SEQ ID NO: 3122 - protein, 326 aa, Glycine max
MVLLSKATTEQYSYIKNCMPTKFSSTIPIVDLSKPDAKTLIVKACEEFGFFKVINHGVSMEAISELEYEAFKFFSMSLNEKEKVGPPNPFGYGSKKIGHNGDVGWIEYLLLNTNQEHNFSVYGKNPEKFRCLLNSYMSSVRKMACEILELMAEGLKIQQKNVFSKLLMDKESDSVFRVNHYPACPELVNGQNMIGFGEHTDPQIISLLRSNNTSGLQIFLRDGNWISVPPDHKSFFINVGDSLQVMTNGRFRSVKHRVLTNGFKSRLSMIYFGGPPLSEKIVPLSSLMKGKESLYKEFTWFEYKNLTYASRLADNRLGHFERIVAS

SEQ ID NO: 3123 - protein, 775 aa, Geobacillus kaustophilus HTA426
MAIGKSIIRKEAWDKVTGRAKYTNDFKEQGMLHAALVTSPYAHARILSLDARRALAVHGVHAVVTGEGLPLTGEDMRDRPPIAVDKVRYYGEVVAVVVADTLAQAEQAARLVRVVYEPLPAVGSPREALKEGAPLLHEHLDRYEKNKTTHPEPGTNVAHRTKIRKGNIEQGFAESDVIVETSVSFAPSDHIAMETRCATAEIWPDGTIHISASSQSPFMIKKLLHTYFGEETGKVIVHTPLVGGAYGGKAPVQLELLAYLASKAVGGRKVSVWNSREHDMVTSPVHIGLEATVKIGATKEGLLKAMEILFLFDGGAYSDKAIDVSRAAAVDCTGPYHVENVFCDSLCVYTNRPYATPFRSFGHCEQAFAVERAIDELARTLQLDPWDVRRKNAIRPGHTTPTQVRLTKSNVGNISACLDRLRELMRWDEWQRVEVDAYTVRAKGISSGWKTSTIDTDASSGVILTFNSDGSVNVISGVVEIGTGTKTVLAQIVAERLKMDVDCVHVKMDIDTQTTPEHWKTVASRGTFMAGRAALAAADDAIRQLKDIAACVLRASPDDLEVGFGRVFLRDDPAIFLPIKDIAYGYKFPNGNAIGGQVIGRGHYILRHLTPLDPETGAGKPGPEWGVCAEGVEIEFNRRDYTYRIVKAYAVIDAGKVLNPKAALGQAMGAMSMGLSFASREGFLFDNEQRVLNPQLRTYRPIRFGEHPEYIVEFVETPQIDAPYGARGIGEHGLIGMPAALANALSLAAGVPLNELPLVPELIWRTQKGDSYGSV

SEQ ID NO: 3124 - protein, 186 aa, Streptococcus mutans UA159
MSLVGKEMVEFSAQAYHQGEFVTVNNEDVKGKWAVFCFYPADFSFVCPTELGDLQEQYATLQSLGVEVYSVSTDTHFVHKAWHDDSDVVGTITYTMIGDPSHVLSQGFEVLGEDGLAQRGTFIVDPDGIIQMMEVNADGIGRDASTLIDKVRAAQYIRQHPGEVCPAKWKEGAETLKPSLDLVGKI

SEQ ID NO: 3125 - protein, 500 aa, Fulvimarina pelagi HTCC2506
MSDQSAQPIRFLLNGEARSVSGQPATTTLLRYLRETERLTGTKEGCAEGDCGACTVLISENDGNGGLKRRPVNACIQFLPAMNGRAIETVEKLGSHRGADGADALREAMVEGHASQCGFCTPGFVVQLFSAWDGGKLTDRQAVKDQISGNLCRCTGYGPIIDAGETLAKLPKPDTLGEDLALAKRLGDIQNGAIFRYEAESSGGPQLWFAPENVDDLADIYGAHPDATLVAGATDVGLWVTKQHRDLSVLIDISKVRDLQMIEERLGVLYFGAGVTHTEALETLADIHPDLGEMMRRFAGAQIRNAGTVGGNIANGSPIGDLPPCLIALGARLYLRKGEDMRVLDLERFFVEYGKQDRAPGEFVVALEVPRLEDDQRYFAHKISKRFDSDISAVMAAFRLTFDGELVSEARLAFGGMAGVPKRASHAEAVLCGRPFDAVAVRDAQAALAEDFRPLTDMRASSEYRLKAAQNLLERFRLELTAERPARIAGFETGEARGTA

SEQ ID NO: 3126 - protein, 313 aa, Mycobacterium tuberculosis
GSHMSIAEDITQLIGRTPLVRLRRVTDGAVADIVAKLEFFNPANSVKDRIGVAMLQAAEQAGLIKPDTIILEPTSGNTGIALAMVCAARGYRCVLTMPETMSLERRMLLRAYGAELILTPGADGMSGAIAKAEELAKTDQRYFVPQQFENPANPAIHRVTTAEEVWRDTDGKVDIVVAGVGTGGTITGVAQVIKERKPSARFVAVEPAASPVLSGGQKGPHPIQGIGAGFVPPVLDQDLVDEIITVGNEDALNVARRLAREEGLLVGISSGAATVAALQVARRPENAGKLIVVVLPDFGERYLSTPLFADVAD

SEQ ID NO: 3127 - protein, 805 aa, Fulvimarina pelagi HTCC2506
MDETRIQDRSGAGEPSIAELGERPPTHERAIKGGVHTKRIHDSGVKHVSGAARYVDDEPELPGTLQIYIAMSEKAHARIVSLDVSKVRDVPGVACVLTANDIPGQNDYSPVFGDDPIFPQTSGPEALVQYVGQPIFAVAAETIDLARRAAKLAIVEYEELPAAITIEQALAAAGEAGHDLLDPHEMRIGDVDAALEGAPHRVLGRVAVGGQDHFYLEGQIAYSIPLEDGDVLVRSSTQHPSEVQHNVAKMLGVPDHAVTVEVRRMGGGFGGKESQPALFAAVTALAAVKTGRPVKCRLDRDDDMEMTGKRHEVTINYAVGFSGNGRIAAGDFSHLVRCGYSRDLSAAIADRAMFHADNAYSLPAARILSRRLKTHTVSNTAFRGFGGPQGMVGIERVMDRIAFETGIDPLDVRKVNLYPSFDSDRAPGVTPYHMPVTDSIIAELVEELEVTSGYRARREAIRQFNAQSPVLKKGLALTPVKFGISFTTSHLNQAGALVHVYKDGSVHLNHGGTEMGQGLFVKVAQVVAEEFQIDIEKVKITATTTAKVPNTSATAASSGSDLNGMAAQAAARTIKNRLIDYACGRYHVPEEQVVFAANRVLIGNEEKRFADLVGEAYLARISLSSTGFYATPDIHYDRESASGQPFYYFAYGAACSEVVIDMLTGEYKLLRADILHDCGTSLNPAIDRGQIEGGFIQGMGWLTMEELWWDDKGRLKTHAPSTYKIPTANDRPDDLRIAIWEKGENRSDTIYRSKAVGEPPFMLAISVFSALTDAVIAAGDGKAFPDLDAPATPERVLKAVEGVRG

SEQ ID NO: 3128 - protein, 187 aa, Clostridium perfringens ATCC 13124
MSLINKKVSDFKVQAYQNGEFKEVTSEDLKGHWSVFVFYPADFTFVCPTELGELADNYESFKEIGCEVYSISTDTHFVHKAWADASDTIGKIKYPMLADPTGKLARDFEVMIEEEGLALRGSFVINPEGEIKAYEIHDNGIGRNAEELLRKVQAAQFVAEHGDQVCPAKWKPGEETLAPSLDLIGKL

SEQ ID NO: 3129 - protein, 417 aa, Magnetococcus sp. MC-1
MWRVCEGQPLSIQAVEWHCETMRILTFSTLFPNPQMPYHGIFVARRLAQLQSYAQATGLALESRVVAPVPWFPVASPRFGRYGRWGAVAAQSEWQGFAVQHPRYLLLPKIGMSSAPWMLARGAYAPLKRLEQSWPFDLIDAHYMYPDGVAAILLGRWLNKPVVITSRGTDLNLIPNYTLPRRWITWAAAEAAGLVTVCAALKASLVGLGVAPSRVTVLRNGVDLQTFTPPLDRQALRDKLAMHHPTLLSVGHLIPRKGHELVIAALPQLPQVQLVVCGEGPMLAELKATAKRLGVAPRVRFAGALAAASLKDYYGAADALVLASDREGWANVLLESMACGTPVVASSVWGTPEVVASPAAGRLFTPRTAQALATEVQALLADPPPRSATRHYAEGFAWHSTSAGQFQMFQAILPHQP

SEQ ID NO: 3130 - protein, 405 aa, Magnetococcus sp. MC-1
MRVLHILDHGLPLHSGYTFRTRALVRAQRSMGWQPLLLTGPKQGVVESLEEDFEDLHYYRTLPLQGRWVQRGPLHQLGVIQALKQRLRGLIPHLKPDLLHAHSPALNGWAALWAARHFKVPLVYEVRAFWEDAAVSHGQTQAGSLRYRLSRAMESHVLRQANAVTTLCEGLKGDMLARGIAAEKITLIPNAVDVQLFNPLPAQGSAILRQELAFPPGLVLGFAGSFYGYEGLALLVEAVAQLAHTGQACNLLLVGGGPETQRLQRLIEQLGCGARVRMTGRVDHALVEDYYGVCDWMVYPRLSHRITETVTPLKPLESMALGRPVLASDVGGHRELIQHGVTGLLFPAGDLSGLVTVLQQLPQGTARQGLIDAGRDFVTTQRTWLRSAQAYAAAYGMALGREVSK

SEQ ID NO: 3131 - protein, 423 aa, Azoarcus sp. BH72
MSRGGHVAVARRADDAAMDAPLSLQDLARASRQLRIALVTETFPPEINGVAMTTGRMVDGLLRLGHRVQLVRPRQGADDQPARGEGYEEVLARGLPIPRYNHLKMGLPARSTLTRMWSLRRPDVVQVVTEGPLGWSAVAAARKLRLPVITEFHTNFHSYSRYYGMGWLKQPVEAYLRRFHNKGDLCLAPTAELAAQLAARGVRKVDVVARGVDTALFAPARRSEALRSSWGARPETLVLTVVGRLAAEKNLGLALRAFDALRQRRADVRLVLVGDGPARAALATASPETIFAGMRTGADLAAHYASADLFLFPSTTETFGNVTTEALASGLPVIGFDYAAAAERIRGGDNGCLAPLGDEQGFVEAVLRVGTDDALRLALAARARDSVADADWAAVAQRLAAVIERVVDRHEARLIGAAHVAAA

SEQ ID NO: 3132 - protein, 791 aa, Bradyrhizobium sp. ORS278
MTAPLTSLDRPNSYIGRSVPRPNAKRLLAGRGRYVTDLRLPRMLHAAFLRSPHAHARILSIDIEAARALAGVHLVATGADLARICTPWTGTLDHFKGMVSEPQLPLPLDRVVWAGQAVVAVVAESRAVAEDALELIAVDYEELPAVVDLDAARAPDAPTVNPAASSNICFRAQLDSGGVDEAFASAAHVVEQEFSFGRHTPVTLEPRAVVADYESDTGMLTVHHATQTPYQFQDLYSRHYGIPEARVRVIAPDIGGSFGMKLHVYHEDMAVVGLSILLGRPVKYVADRIESFVSDIHARDHHVRARMAVDADGKILAMDIHDATAVGAFSTYPRTSVVEGNQVIRLIGAPYDFKSYRAVLEVVFQNKVQTSQYRAVGHPIACAVTERMVDLAAERIGADPLAMRARNVIADDAYPTASPTGYKFEALSHEACLRRLREIMSYDGLRAEQAELRRRGVHRGIGIATFVEITNPSPAFYGVGGARISSQDGATLSLTPSGEVRCAISVTEQGQGTEAIIGQIVADQLGLAQEHVKIITGDTEVTPHGGATWACRGAGIGGETALQAARQLKANIVEIAALILQERPAALDIVDGQVVGKATRQPRIPVAEIARIAYFRSDTLPPGTQAQLTVSHHFAPQGYPFAFTNGVQGCYLEVDTDTGLIKLLKHYVVEDCGRIINPMLVDEQLRGGVVQGLGAALFEECRYSETGQLLNGSLADYLVPMAMEMPDIVIDHVETPTADTILGAKGCGEAGTAAASACVLNAVNDALTPFGASINAIPITPARVLKSLNQY

SEQ ID NO: 3133 - protein, 119 aa, Zea mays
HASAEGRGPTLARRLKKSDTWDTRPGRRPSGGGSSGEVDPAAVAPAGAMRKAETFNDGGAGRSRPAPAALVRREPSLGQDELNRRVEAFIHKFNMEMRLQRQESLKRYNDMIGRGRGSR

SEQ ID NO: 3134 - protein, 172 aa, Bradyrhizobium sp. ORS278
MLERDDADDAIRVRMVVNGRKVACDVAPRDTLVDCLRGPLELTGTHAGCEMGACGACLVQFDGHAVHACLMFAVQAEGARIDTIEGLSERGVIADLQAEFHRRNALQCGFCTPGMLMTAHELLSQMARPSREAIRDALSGNFCRCTGYEAIVDSIAAVAEARAAKAAEGPSR

SEQ ID NO: 3135 - protein, 238 aa, Triticum aestivum
MAAANAPFALSRLSPAARLPFRAWRAARPAPVWTGRTRPLSVASAAQENRDNSVDVQVSQAQNAGNQQGNAVQRRPRRAGFDISPFGLVDPMSPMRTMRQMLDTMDRLFDDAVGFPTARRSPAAASETPRMPWDIMEDEKEVKMRFDMPGLSREEVRVMVEDDALVIRGEHKKEAGEGQGEGGDGWWKERSLSSYDMRLALPDECDKSQVRAELKNGVLLVSVPKRETERKVIDVQVQ

SEQ ID NO: 3136 - protein, 308 aa, Moorella thermoacetica ATCC 39073
MGRIYQNITQLIGGTPIVKLHRMNPSEAEVLVKLELFNPGGSIKDRIALAMIEDAEERGLLDKDTVIIEPTSGNTGIGLAMVAAARGYKLILTMPETMSQERRQLLKGFGAELVLTPGAEGMKGAIRRAEELAATYPRAFIPQQFENPANPAAHRHTTAAEIYDATDGQLDILVCGVGTGGTITGTGEVLKERIPGLQVVAVEPASSPVLSGGMAGPHKIQGIGAGFVPEILNIDVIDEIIQVTDEEAIDTARRLAREEGIMVGISSGAACWAALRLAARPENAGKRILAVLPDTGERYLSTSLFQEI

SEQ ID NO: 3137 - protein, 381 aa, Bacillus subtilis subsp. subtilis str. 168
MTKKILFCATVDYHFKAFHLPYFKWFKQMGWEVHVAANGQTKLPYVDEKFSIPIRRSPFDPQNLAVYRQLKKVIDTYEYDIVHCHTPVGGVLARLAARQARRHGTKVLYTAHGFHFCKGAPMKNWLLYYPVEKWLSAYTDCLITINEEDYIRAKGLQRPGGRTQKIHGIGVNTERFRPVSPIEQQRLREKHGFREDDFILVYPAELNLNKNQKQLIEAAALLKEKIPSLRLVFAGEGAMEHTYQTLAEKLGASAHVCFYGFCSDIHELIQLADVSVASSIREGLGMNVLEGMAAEQPAIATDNRGHREIIRDGENGFLIKIGDSAAFARRIEQLYHKPELCRKLGQEGRKTALRFSEARTVEEMADIYSAYMDMDTKEKSV

SEQ ID NO: 3138 - protein, 150 aa, Pennisetum glaucum
MSLVRRGNVFDPFSMDLWDPFDNMFRSIVPSSSSSDTAAFANARIDWKETPEVHVFKADLPGVKKEEVKVEVEDGNVLVISGQRSKEKEDKNDRWHRVERSSGQFVRRFRLPEDAKTDQVNAGLENGVLTVTVPKAEGKKPEVKAIEISG

SEQ ID NO: 3139 - protein, 159 aa, Leptospira interrogans serovar Lai str. 56601
MSELKTGAKAPGFSALNEKGEKVKLSDLSGPKGTVLYFYPKDQTPGCTTEACDFRDNFSRIKKTGFNVVGVSKDSVKSHQKFIEKQELNFTLISDEDGKICEDYGVWQMKKFMGREFMGIVRTTFLIGADGKILKVYPKVSVKGHVDEILSDIKTLEKK

SEQ ID NO: 3140 - protein, 779 aa, Caulobacter crescentus CB15
MADSAAAAPTKAPPQGVHAALPHDSAARHVAGSAVYIDDMPEPAGLLHVAFGLSERAHARITRMDLSAVRAAPGVVLVISAEDIPGENDVSPVIHDDRLFADGEVYCVGQSLFAVAATSLAAARAAAAKAVVDYEDLPAAIDIAAARAMDLKMEASQRMARGDAQAALAASPRRVQGKFAIGGQDHFYLEGQIALATPREEGDVHVWSSTQHPTEVQHLIARVLGKPDHCVTVEVRRMGGGFGGKETQASLFAATAALVAVKTGRPAKARPDRDEDMVMTGKRHDFEALYDVGFDGEGRLTGLSLALSSRCGATTDLSPAINDRAMFHADNAYFLPAVEILSHRFRTHTVSNTAFRGFGGPQGMLAIERIMDAVAAELGLDPLEVRRRNLYGGDGRNLTPYHQVVEDNVAPQLIEELAASCDYAARRREIEAFNRASTVLKKGIALTPVKFGVSFTTTHLNQAGALIHLYADGSIMLNHGGTEMGQGLNTKVAQIVAQAFQVDIARVKITSTVTDKVPNTSATAASSGADLNGMAALNAAETIKARLVDFAAAKWGVAQADVAFTPDGVRVGGQTLAFEAFVRQAYLARISLSATGFYATPKIHYDRATHTGRPFYYFAYGAACSEVLIDTLTGEMKVTRADILHDVGKSLNPALDLGQIEGGFIQGMGWLTTEELVFDAQGRLRTHAPSTYKIPTCGDRPAQLDVRLWKAGRNVEATVHRSKAVGEPPLMLAISVHSAITHAVASVGDHKVFPDLDAPATPEAILMACEDVRRRARDV

SEQ ID NO: 3141 - protein, 152 aa, Pennisetum glaucum
MSLVSRSSVFDPFSMDLWDPFDSMFRSIVQSAGSPDSDTAAFAAARIDWKETPEAHVFKADLPGVKKEEVKVEVEDGNVLVISGQRSKEKEDKNDRWHRVERSSGQFMRRFRLPGNAKVDQVKAGLENGVLTVTVPKAEEKKPEVKAIEISG

SEQ ID NO: 3142 - protein, 225 aa, Arabidopsis thaliana
MSDKERAEPLRLGSTAPNFQAKTTLGPIDFHEFIGSNWCILFSHPEDYTPVCTTELGAFAKLEPEFTKRGVKLIGLSANTVECHGQWIDDIQEISGCKLNFPIIGDKDRKIAYTYDMLDHQDTTNVDSKGIAFTIRSVFIIDPQKIIRLILSYPASTGRSSAEILRVVDSLQAGDKYRVTTPVDWVPGNEVIVHPSITNEEAKSLFPEFRIVKPYLRYTSIPTAK

SEQ ID NO: 3143 - protein, 152 aa, Thermoplasma volcanium GSS1
MELLKVGDQAPDFETVDQSGSKVRLSDFKGQPVVLYFYPKDNTPGCTTEACNFRDNFNSFKEAGIKVIGVSVDSPESHKRFAEKYQLNFTLASDKEKEICKKYGVLGLATAKRVTYIIDRDGKIVYVYPKVTPKDHAVEVMNKIKELGLIPS

SEQ ID NO: 3144 - protein, 199 aa, Magnetospirillum magnetotacticum MS-1
GAEIVLTPASKGMTGAVRQAEELLASTPGAIMPQQFKNAANPAIHERTTAEEIWNDTDGKVDIIVSGVGTGGTISGIGRVLKARKPGLKMVAVEPEDSPVLSGGAPGPHKIQGIGAGFVPDILDRGVIDEILQIGNETALSTARKAAKLEGVPVGISSGAAIAAALELGSRPENAGKVIVAIIPSFAERYLSTALFDQV

SEQ ID NO: 3145 - protein, 159 aa, Pennisetum glaucum
MSLIRRSNVFDPFSLDLWDPFEGFPFGSGSNSGSLFPSFPRTSSETAAFAGARIDWKETPEAHVFKADVPALKKEEVKVEVEDGNVLQISGERNKEQEEKTDTWHRVERSSGKFMRRFRLPENAKTDQIRASMENGVLTVTVPKEEVKKPEVKSIQISG

SEQ ID NO: 3146 - protein, 308 aa, Desulfovibrio vulgaris subsp. vulgaris str. Hildenborough
MDIASSMTDLVGKTPMVRLNKVTLGCVAEVVAKLENFNPCSSVKDRIALNMVEAAIARGEIAPGAVLVEPTSGNTGVGLAFVCAVRGLKLVLTMPESMSAERRALLKAFGTTLVLTPAAKGMRGAVEEAERIVADTPGAVMLQQFANPDNPAAHEATTGPEIWADTDGMIDCFVAGVGTGGTITGTGRYLKGRNPDIRVIAVEPAESAVLSGGAPGPHAIQGIGAGFVPPVLDTSVYDEVMPVPGADALTMARRLLQEEGILCGISSGANVHAAIAYARRPENAGKRVVCIICDTGERYLSTPLFAPE

SEQ ID NO: 3147 - protein, 143 aa, Schizosaccharomyces pombe
MSLQPFFGFPPTVNDLFSDFVSYSPRLNNQIPGELSPSIDVHEGKDTVSVDVELPGVKKEDVQVHYDSGKLTISGEVVNERKNESTEGNQRWSERRFGSFSRTITIPAKIDADRIEANFSNGLLTVTLPKVEKSQTKKQIAIK

SEQ ID NO: 3148 - protein, 219 aa, Methanosarcina mazei Go1
MPLIGDDAPSFTAVTTQGIIKFPDDYKGKWVILFSHPADFTPVCTTEFMTFASMQEEFRSMNTELIGLSIDSVFSHIAWLKRIEEKIEYKGMKNLEIKFPVIEDLKMDVAKKYGMVQPKASTTQAVRAVFIIDPEAKIRTILYYPQSTGRNMQEIKRIVVALQKNAAEKVATPANWQPGEDVIIPPPSSMEAVKERMGKEEEGKRCLDWFMCLKKDTQK

SEQ ID NO: 3149 - protein, 380 aa, Geobacter metallireducens GS-15
MAAVAHVKIDAAGEKRVLYLVDKSGFGGVQTIAYTLMRHGVDERIGMDFFFLRNINDRFGMEDVREPNVFYSRATHRYSLRPFVEILRFIREKKVSILHLNGNKSIILGLVIKKLFQPTIKIIAHEHGGVFDYSRWYAAFLKSFRNSFDLFITISNYRKHFLVERCLVAPSAIRVIDNFVDPARLATASASACGHTDRCDSEGDKPFVIGYVGGLSRIKGCDVLIRALPPLRERLGNFRVMIAGDGPARAELEELVAALGLGDIVSFLGFVDPPGIAYAQFDMMVIPSRSEEGPICLYEAWMMGLPVVASNAPVLNERIRDGETGILFQSDEPCDLAEKIYSVCRNPDVAAHIRAGGSCEAARHTVERYRGDLRDVYLSL

SEQ ID NO: 3150 - protein, 169 aa, Bordetella pertussis Tohama I
MSDITESTAQHVSLTVNGRACGGCAEPRMHLADFLRGELGLTGTHIGCEHGVCGACTVLVDGYSTRSCLMLAVQAQDSRIDTIEGLAGEDDALHPIQQAFHELHALQCGYCTPGILMSVAELLAANPNPDEAQVRDVLSGHLCRCTGYQNIVAAVLRAAQLMRAEAGHD

SEQ ID NO: 3151 - protein, 793 aa, Bordetella pertussis Tohama I
MTDATSPGLGRSAPRIEDDALLRGQARFLDDIEVEGVLHACFVRSPHAHARLVSIDLSAARAVPGVAAVYGARDLFGQLTSWRMPLGFPLAALPDDTTPFVLAEREVAFVGEAIAVVVADSRHIAEDAAARVAIEYEVLGAVVDCRDALRPDAPLVRGELASNILQQYTLAYGDCETAFAQAHRVLEDDFWVHRGCAHPMEGRGVLARMDRATDTLTVWSSTQMAHELHYTLALMLGQPEDRLRVVTPDVGGGFGAKFMIYPEEMAIPAAARKLGRPVKWVEDRREHFTTSIQERDQYWKVAMAIDDQGHVLGIRGNFVHDNGAYTPQGTNVPYNAASSMTGPYVVPAFSLDVSVAYTNKVPVATVRGAGYPQAAFVMERMMDRVAAELGIDPGECRRRNLIGPAKIPYTKPLKSRAGMPLTIDSGDFPALQACALQASDYDGFAVRRDAALARGRWRGIAVANSVEPTGRGPFEVARVRVQPSGQVSIYTGALAMGQGIKTTLAQICAGHLGVPVAAVEVQAGDTAYVGYGMGGFASRQAIMAGSAVDQAAAQVRRQALETAAAVLKAEAETLELADGEVRAPDGQSVSLARLAMLRKGVPGYALVSPGDPGLDATAYFHCDAQTYAGASHVCEVEVDPATGAIEIVRYVAAQDSGRIINPQLAEGQVHGGVVHGIGNALFEWMGYDAAGQPLSTTFAEYLLPTAPEVPPIEVVFQPSPTPLNPLGVKGVGECATIPVAVAVVGAVEHAVAHCGVRVTEFPLTPVRLLELLTQAEARAAAPTDSGEFVDGVH

SEQ ID NO: 3152 - protein, 361 aa, Cyanothece sp. PCC 7424
MNQVLINLSVIFNKPTGISNYILNVLPYLKPLNPILLTASSREGFKTYTIPENLSPEQGIKGHFNRLLWTQFKLGKIYQDLKGSLLFSPLPEAPLFQNYPFVVMVHDLIPLRFPNPYSPLTPYFRYYIPQVLRQADHIICNSQATAKDIQDFLGISAQKITPIPLAYDDHHFRPLSLPQPEHPYFIYLGRSNPHKNLPRLISAFAKLPNCKEYQLWLAGPKDPRYIPKLESQVKELELIDRVKFLDYVSYDQLPVILNQALALVFPSLWEGFGLPVLEAMGCGVPVITSNLSSLPEVTSDAAILINPYHTEEITAAMAAIARDSQLRSHLRSLSLQRAQTFSWAKTGQATLEILKHYANCL

SEQ ID NO: 3153 - protein, 327 aa, Aquifex aeolicus VF5
MSLKSCLMWVLGEHDEPYRKARETILKLVGNTPLVRVKKCLPEDIPEDVEIWAKLESFNPGGSVKDRPALSMFLDALKRGLIKEGKVVIDATSGNTGIALAMVGAALGVPVELAMPANVSEERKKIIKAFGAKLYLTDPLEGTDGAILFVRELVQKYPEKYVYLDQYNNPANWKAHFYSTGIEIWNQTKGRITHFVAGIGTGGTIMGTGRRLKIYNPNIQVIGVQPAYPFHGIEGLKHIESSIKPGIFDETFLDRTIFVETEDAYYWARELAKKDAIFVGQSSGAALWACIQLARELAKKGEKGVIVTVFPDGGEKYLTTALFSDKD

SEQ ID NO: 3154 - protein, 385 aa, Prosthecochloris aestuarii DSM 271
MKIGISCHHTYGGSGAIATELGKALARNGHIVHFINRAAPFRLGSFSRNIFYHEVEAMHYPLFECPFHSLALASKIAEVAMYEKLDIVHAHYAIPHALSAILARQMVEDKCSKAQCFRIATTLHGTDITVVGADSSMHGAVRLAINKSDGVTAVSGYLKRETEALFEPRRAIEVIANFVDTNEFSRMTDVEPIREQLGLGGEKICIHISNFRPVKRISDVLKTFSRIVEKVSATLLLVGDGPDRGDAETWSRVHGIAEHVRFLGKIDDIVPLLSVSDLMLMPSNAESFGLAALEAMACGVPVIVTDAGGFPEFIVHDKHGYLVAPGNVDLMAEKSLDLLLDEELRMRFSRACVEQARKYHISMLVEQYEQFYSRLLDTEAGVTGQ

SEQ ID NO: 3155 - protein, 322 aa, Prochlorococcus marinus str. MIT 9312
MEIANDITSLVGNTPLVKLSRIRNYFNCYPEIIAKLESFNPSASVKDRIAYSMLCKAEEEGLITPDKTTLIEATSGNTGIALAMVAAAKGYKLILTMPDTMSIERRAMLRAYGAELQLTPGQEGMKGALDLANELSSSIANSYQFNQFENFANPDIHERTTAQEIWAQSNNNLDGLVTGVGTGGTITGCARFLKKVNPNCKIYAVEPRKSAVISGEKAGSHSIQGIGAGFVPKVLNTKLIDEIIKIDDDEAFYYGRLLARLEGLLSGISSGAALAATIKIGERKELINKRLIVILPSFGERYLSTAMFESNTSIQARTDGYL

SEQ ID NO: 3156 - protein, 787 aa, Burkholderia cenocepacia J2315
MNQQAEPFLSTLDPQADAAQVHVSRAHESAHLHVSGRATYTDDIPIVAGTLHAALGLSAKPHAKIVSMNFDAVRATPGVVAVFTADDIPGVNDCGPIIHDDPVLAKGVVQFVGQPMFIVVATSHDIARLAARRAQVDYEELPAILTAQEARAAETYVIPPLKLARGDAAARLAVAPHRESGEMLLGGQEQFYLEGQIAYAVPKDDDGMHVYCSTQHPSEMQHLVAHVLGVASHNVLVECRRMGGGFGGKESQSGLFACCAALAAWKLLCPVKLRPDRDDDMMITGKRHDFHYRFDVGYDDDGRIDGVALDMTSRCGFSADLSGPVMTRAVCHFDNAYWLGDVDIAGYCGRTNTQSNTAFRGFGGPQGAFAIEYILDDIARSLGRDPLDVRYANLYGKTERNVTPYGQTVEDNVLQELLGELETTSDYRARRAGVRAFNARNTVLKKGIALTPVKFGIAFNVTHFNQAGALVHIYTDGSVLVNHGGTEMGQGLNTKVAQVVAHELGIRFGRIRVTATDTSKVANTSATAASTGSDLNGKAAQDAARQLRERLAVFAAKQFGDGKVDAADVKFGNDVVWVGGHGVPFGEVIAKAYLARVQLWSDGFYATPKLYWDQSKLQGRPFYYYSYGAAVSEVVIDTLTGEMRTLRVDALHDVGASLNPALDIGQVEGAFIQGMGWLTTEELWWNQGGKLMTHAPSTYKIPTVNDTPPEFNVRLFQNRNVEDSIHRSKAVGEPPLLLPFSVFFAVRDAVAAVGDYRVNPPLDAPATGESILRAIGAVRAASAARAG

SEQ ID NO: 3157 - protein, 533 aa, Burkholderia cenocepacia J2315
MSEPIRFYHRHAIREVSGADVTRTVLQYLREDAHCTGTKEGCAEGDCGACTVVVGELTDAGAVEFKAVNACIQFLPTLDGKALLTVEDLRQPDGTLHPVQQAMVDCHGSQCGFCTPGFVMSMWALYEKHGHEGCGSACAKAKDVPTRTEIADALTGNLCRCTGYRPIVDAAVRMFDAAGEGAAGEGATGEGAPAPSAPVDTAALARTLASLKRDDTFDYTTVDGARFAAPRTLDALAALKAERPDARILAGSTDIGLWVTKQMRRLDDLIYVGQIAELQRLAERGDWIEIGAGVTVEKAYAALAGTYPELTEMWKRFASLPIRNAGTIGGNVANGSPIGDSMPGLIALGARVVLRGGDTVRELPLEALYTGYQQKDMAPHEFVVGLKVPTRTGAREQLQFRTYKLSKRFDSDISAVCAAFAFIADGDTIREPRIAFGGMAATPKRATHTEAVLDGAQWHEATAQAAMQALERDYQPLSDMRATSGYRLDTAKNLVYRFWLETRPHDPLPPQALNVREVAAEAGADVADASARV

SEQ ID NO: 3158 - protein, 195 aa, Synechococcus sp. PCC 7002
MAAQVGQLAPDFTATAVIDQEFKTIKLSDYRGQYVVLFFYPLDFTFVCPTEVGAFSDRHGEFQKLNTEVLGVSVDSEFAHLAWIQTDRKMGGVGDLAFPLVSDLNKTISTAYGVLEPEAGISLRGLFIIDPEGMIQHITVNNFSFGRSLDETLRVLQAIQHVQTNHNEVCPVDWQVGDRTMVPNPSEAQAYFSTL

SEQ ID NO: 3159 - protein, 168 aa, Pseudomonas putida
MQAHEESQLMRISATINGKPRVFYVEPRMHLADALREVVGLTGTKIGCEQGVCGSCTILIDGAPMRSCLTLAVQAEGCSIETVEGLSQGEKLNALQDSFRRHHALQCGFCTAGMLATARSILAENPAPSRDEVREVMSGNLCRCTGYETIIDAITDPAVAEAARRGEV

SEQ ID NO: 3160 - protein, 444 aa, Streptococcus pyogenes MGAS8232
MRVGLFTDTYFPQVSGVATSIRTLKEELEKEGHEVYIFTTTDRDVKRFEDPTIIRLPSVPFVSFTDRRVVYRGLISSYKIAKHYNLDIIHTQTEFSLGLLGKMIGKALRIPVVHTYHTQYEDYVSYIANGKIIRPSMVKPLLRGYLKDLDGVICPSRIVLNLLEGYEVTIPKRVIPTGIPLEKYIRDDITAEEVTNLKAELGIAGDETMLLSLSRISYEKNIQAIINQMPAILAENAKIKLIIVGDGPYLQDLKHFAMQLEVDKHVTFTGMVPHDKVALYYKACDFFISASTSETQGLTYIESLASGTPIIAHGNPYLDDVVTDKMFGTLYYAETDLTDAIIDAILKTPVMDKRLLAKKRYEISAQHFGKSIYTFYLDTLIARNSKEAQKLRLYLNHSGKSSSLKLVQGAIHLPKRAAKVTAITSVKVVKAPIKLVHAIKDFLD

SEQ ID NO: 3161 - protein, 788 aa, Pseudomonas putida
MMKHEVVALKKKSIGTSVLRREDTRLLTGRGRYIADLVLSGMLHVASLRSPFAHARIVSIDVADAQALPGVELVWCGADVAELSQGIVATMQVEGFQTTIQPLLANGVTRFVGEIVAVVVASSRAIAEDAAQLIQVEYEELPAVTGIEAALEGEARANDTLAGNVVSRTSRARDELAPIFASSAGVVRGQFSCGRVSACPMETRGAVAQYEWTTQQLILWTATQMPSFVRTMVAMFCAIPEHLIEVRVPDVGGGFGQKAHLHPEELLVCLLSRALGRPVRWIEDRQENFLGATHAKQQRNEMGLAFDGDGRFLALENRSITDGGAYNNLPWTQLVESHVGNAVILGVYKVPAVSEESIAVATNKCPIGAYRGVGFTAGQIARETLIDRAARQLGLSPFEIRRRNVVMPEDFPFTNRLGQTHREGTYLQTINLLEEMVNPEAFRQRQAEARARGKYLGLGVSVFNEVTGTGTRTLSFLGTPTTTHDSATVRIDPTGKVTVTTSLASSGQGHETTLAQIAADVLGVPASDVVIQAGSTKNTYGFGAYASRGAVIGAGSIGRAASIVRERVKQLAGHLLEAASEDIVIEDGLVHVAGVPAKGMPFAEVVGAAYFADATHPPGFDATLEATATYDPSDLVLANGGHAAIVEIDASTYATRVTDFFAVEDCGTMINPMIVEGQIRGGIAQAIGQTLLEEVIYDDFGQLVTTTLMDYLIPTTLDVPDIRIRHLETPSPLVPGGIKGMGESAMISAPAAVVAAVNDALAHLEVVIETVPITPERIFRSIQERPMQ

SEQ ID NO: 3162 - protein, 308 aa, Streptococcus suis 89/1591
MAIYQNITQLVGKTPVIKLNNIVPEGAAEVYVKLEAFNPGSSVKDRIALAMIEDAEKAGTIKPGDTIVEPTSGNTGIGLAWVGAAKGYKVIIVMPETMSVERRKIIQAYGAELVLTPGSEGMKGAIAKAKEIAEEKNGWVPFQFANPSNPKVHEDTTGQEILEDFGTTGLDAFVSGVGTGGTVSGVSHVLKTANPDIAIYAVEADESAVLSGEAPGPHKIQGISAGFIPDTLDTSAYDGIIRVKSDDALATGRAIGGKEGFLVGISSGAAIHAAIEVAKELGTGKKVLAILPDNGERYLSTALYEFND

SEQ ID NO: 3163 - protein, 368 aa, Leptospira interrogans serovar Copenhageni str. Fiocruz L1-130
MILHIDTETGWRGGERQLLLLAEGLKKRKIPQLILGRPGSALENRCSDQGLPFQAVDMRGEWDLTSIQTIRAIVLEKKIKLIHTHTAKAHTLALLAKSKLPNTKLIVSRRVDFSIRKNLFSIWKYKSKRNDLFLTVSDKIREILLRDGVDPAKTVTVHSGIDFAFAKKLPNSTLYKKEFSLKKDTIVIGNVAALVDHKDQKTLLKAVSKIDPSKNFKVFIVGEGELRKELEDFANTLEISDKLIFTGYRTDVPDILSLFDIFTLTSKEEGLGTSILDAMAVGLPIVATKGGGIGEMLTHEKGAFLAEVGDSESLAKYYEILIDDLKLRRTFGNFNKESVKRFSIKNTIRKTELAYYSFLGEDLFGEKV

SEQ ID NO: 3164 - protein, 299 aa, Campylobacter jejuni subsp. jejuni NCTC 11168
MKVHEKVSELIGNTPIIHLKKFGINVFAKCEFLNPSHSIKDRAAFEMIKDALDSKKINQDTTIVEATSGNTGISLAMICADLGLKFIAVMPESMSLERRKMITLFGARLELTPANLGMKGAVDKANEILLNTPNSFMVSQFENISNKNAHRKNTALEILRDLDNELDIFVAGFGTGGTISGVGEILKEKLEKVHIVGVEPLNSPLLSKGEAGSHKIQGIGANFIPAILNKEVIDEVITVSNEDAINTAKELAKSGLMVGISSGANVFAASMLAKKFPDKRILTMLNDTAERYLSTDLFA

SEQ ID NO: 3165 - protein, 182 aa, Bordetella pertussis Tohama I
MKTVGDKLEPFKVTGVKPGFNQHEENGVSAFEDITESSFPGKWKVIYFYPKDFTFVCPTEIVGFNKLAKDFEDRDAVLLGGSTDNEFVKLAWRREHPDLNKLGHYQFGDTTGALIDQLGVREKGAGVALRATFIVDPDNTIQHVSVNNLNVGRNPEEVLRLLDGLQTDELCPCNRSVGGATL

SEQ ID NO: 3166 - protein, 387 aa, Verrucomicrobium spinosum DSM 4136
MPKKPVIASYVSDFLKSDMLHVYRQVTGLQNLEPWVFTHKRENEARFPFPKKRLVVLPKPKLRWWRRWVHKNLKKAPWHLYTWEVRHALLELERAEAKLLHIYFGHTAIHFLPLIKACPHPVVVSFHGADAGVDVHKPSHLSPLREVFAAADLIQARSQSLADDLIKLGCPAEKVRVQRTSIPLEEWTFTPREIPADGVWRLFQSCRLIAKKGLDLTLDAFATVHREFPNATLTIAGDGPLKEELEAHAARLGVAESVRFAGFLDQADLRKEVAASHFFLHPSRTTSDGNREGVPNAMLEAMASGATVIATKHGGIPEAVESGESGWLVGENDGAGLSAGLLALIKDPQRSQAMALQARARVEAMFDRSTNIKVLEDCYRGLMEGAS

SEQ ID NO: 3167 - protein, 322 aa, Salmonella typhimurium
SKIYEDNSLTIGHTPLVRLNRIGNGRILAKVESRNPSFSVACRIGANMIWDAEKRGVLKPGVELVEPTNGNTGIALAYVAAARGYKLTLTMPETMSIERRKLLKALGANLVLTEGAKGMKGAIQKAEEIVASDPQKYLLLQQFSNPANPEIHEKTTGPEIWEDTDGQVDVFISGVGTGGTLTGVTRYIKGTKGKTDLITVAVEPTDSPVIAQALAGEEIKPGPHKIQGIGAGFIPGNLDLKLIDKVVGITNEEAISTARRLMEEEGILAGISSGAAVAAALKLQEDESFTNKNIVVILPSSGERYLSTALFADLFTEKELQQ

SEQ ID NO: 3168 - protein, 156 aa, Vibrio campbellii AND4
MNTLTAGSPAPAFSLLDQDGNTVSLGDFKGKKVLFYFYPKAMTPGCTTQAQGLRDVKAELDAHNVVVLGVSIDPVKRLGKFIERDELNFTLLSDEDHAAADQFGVWGEKKFMGKVYDGLHRISFLINEEGVIEHVFNKFKTKDHHEVVLNYLKDNA

SEQ ID NO: 3169 - protein, 424 aa, Nocardia farcinica IFM 10152
MRIALLSYRSKTHCGGQGVYVRKLSAGLAELGHEVEVFSGQPYPEDLDPRVRLTEVPSLDLYRESDPFRTPHPREIRDRIDLLELATMWTAGFPEPRTFSLRAARLLRERAGDFDVVHDNQCLGSGLLDIAEFLPVVATVHHPITRDRAVDLAAAPWRRKPLVRRWYGFLGMQQRVARRIPDLVTVSSSSAADIVADFGVDPGRLNVVPLGVDTSLFAPRAAPRVAGRIVAVASADKPLKGVAHLLRACARLRVTHRIELQLVAKLEPEGPTEKLIAELGLSDIVTVRAGLSDADLADLLASAEIACIPSLYEGFSLPAVEAMASGTPLVVSRTGALPEVVGEPGVCADLITPGDADELAAALGALFDAPLRRQAMATACRERAVSVFSWESVAAQTARIYLRAIARTGSRALDNAQEVPRAHR

SEQ ID NO: 3170 - protein, 344 aa, Bradyrhizobium sp. ORS278
MTIRNDVVAAIGNTPLIKLTRASEATGCTILGKAEFMNPGQSVKDRAGKWMILEAEKRGDLKPGGLVVESTAGNTGIGLAVVANARGYRTLIVIPETQSQEKKDMLRMCGADLVEVPALPFNNPNNYAHVGRRLADELRKSEPNGVLFADQWNNLDNAKAHYESTGPEIWEQTGGKVDGFVCAVGTGGTLAGTSRYLKEKNAGIVTACADPHGFAMYNWFKNREVKSTPGDSITEGIGIGRVTPVIETAKVDTAFLISDEDAVNTIYDLLQHEGLCLGGSSGVNIAGAVQLAKQLGPGHTIVTILCDPGNRYQSKLYNPEFMRSKNLPVPEWLERRSGIKPPFV

SEQ ID NO: 3171 - protein, 664 aa, Nocardia farcinica IFM 10152
MLRCHTTALESHPMELSAKQRAALELICDTFAPGDGLALPSATQLGVPDVMLRMLGRDPNEAAGKQLATLLGIWDTPLLGLLAGAGPRPFSRRSPTEREQLLLKLGASRLGVKRALFQALKQGSLLSYYVTPGPDGFNPLWKEMGYPGPPGQLAAAPRPALDPLRCTAPTTLDCDVVVVGSGAGGGTAAAVLAEAGLDVVVLERGDYYDDADFGNGELDALTRLYAPGPNATAEGQLTLVSGTCLGGGTVVNWSTSLRTPDSVRAEWASLGATQFAEDEFGAALDAVERRLSVTYDKSPISRRDSVLERGVRALGWDIGPLPRNVTDACDAGEECGRCGYGCRVGAKQSVTKTWLADAAARGARLVVGADVRRIVVRGGTAEGVVAVTDNGAELTVRAKAVVVSGGAIQTPALLRRSGLRNKNIGAHLRLHPASAVFGTFEEEVRPWEGGLQTRISRKHADLDGAGYGVIYETGPMHPGMLVGFMNWRGGAEHRRAMLDLAHTAAIGVITRDRDSGRVEVDKAGHPIVHYTISDRDRDHLHTGILGAASILEAAGAKKIFSGHQAGPVYQPGVRGSHAEFAAACQAAGYRPGRCGMAALHIMGSARMGGSRDTCALDPDGATWEVPNVVVADASCFPTSSGVNPMVSIEAIAYMNATRLAARLS

SEQ ID NO: 3172 - protein, 314 aa, Candidatus Blochmannia floridanus
MNKIYQDNSYTIGHTPLVRLNKIGNQFIMAKIESRNPSFSVKCRIGSNMIWDAEKKNILNPNITIIEATSGNTGIALAYVTAARNYKLLLTMPETMSIERQKLIRALGADIILTEGHLGMKGAINRATEIANDNPSKYLLLQQFSNPANPNIHERTTGPEIWYDTHGNIDIFVAGVGTGGTITGVGRFFKQIQNKKITIVAVEPKDSPVITQTLSGQSIKPAPHKIQGIGAGFIPKNLDLNLIDQVVTVETDAAISYAKFLMQKEGILAGISSGAALAAAVQLQQQEKHTNKNIVIILPSSGERYLSTILFSDS

SEQ ID NO: 3173 - protein, 783 aa, Acidobacteria bacterium Ellin345
MADYQWPDEQHRSLLGKRITRVDGPIKVSGRAKYTYDVRPDGMLWGKILRSPYPHCKVTSIDTSAAEKMPGVKAVQILQKPGSEIHWAGDEIVAIAAVDEPTAYDALKAIKVEYEVLPFHVSDAEPPKNLGVSNEPLTIDELGDMEDNQVPDDEVIAAIQKRGMTEIPDAKTLEALAKDGVPPEIIAAIKKAQVRKGSGVKSPYKKTAVQTQGKPADAFAAAKTDGVVSEGIYGVPVITHCCLESHGAMSQFVDDKNLEVHVSTQNLSGIPAQMSEPMGMPASNIRVLQQYIGGGFGSKFGIDRWGVATAQLAKNTNGKAVKIMLARDEEQQVAGARPSAYARVSVAANKDGRLTAWQSDGWGTGGPGGGGSPPLPYVFDIPNQKKQYTAIATNQGPSRAWRAPNHPQAALITMSALEDTAAKLNMDPLELLRKNIDMTGPRAKTYEEEFVIADQMMGWKERWKPRGSSTGVVRTGMGLSLHTWGGRGHDSNCDLTIQPDGSVEIKMGTQDLGTGTRTCIMIVAADTLGIPLESVNLKIGDTRYPVSGGSGGSTTIGGVSSSTRRAAVDARDQLLAKVAPALGTTPDQIEIKDGTVSVKGDASKSMTWKQACSKLGAVPITVRGVNKGGMKPDLTNSGVGGVQMAEVSVDTETGIVKVTKMVAVQDCGLVVDVKTAETQVYGALIMGISYALYEEKFMDPVTGRMLNPNMEFYRLAGLSDIGELQVHMMTGAGYDDRGVIGLAEPPVVSPGAAISNAVANALGVRVPYLPLTPDRVLAALERS

SEQ ID NO: 3174 - protein, 362 aa, Sorghum bicolor
MHTVSRGEQEKNAISRSPGEYYSPWRAATTTLLLALAAVVSLLLPALAQGSSEDDRILAMPGQPNDVAFDMYGGYITVDEQAGRALFYWFQEADQTAVKDPDDAAPLVLWLNGGPGCSSIGGGALEELGAFRVHKDGERLLLNEYAWNKAHDAYTFLVKWFERFPKYKYRDFYIAGESYGGHYVPQLSQLVYRRNIGVDKPIINFKGFMVGNGLTDDRTDMIGMFEYWWHHGLISDETLARGLKVCPGTSLIHASPECKEVWDVATKEQGNIDGYSIYTPPCEKGNPYARIFERSRRQVGGWSMEYEGLTFVTVRGAGHEVPLHRPEQALFLFKQFLQGEPMPAEAKNASLIQLPSEKAHSY

SEQ ID NO: 3175 - protein, 464 aa, Mycobacterium marinum M
MRIAQHISDLIGGTPLVRLNAVVPAGIGTVAAKVEYLNPGGSSKDRIAIKMIDAAEASGALRPGGTIVEPTSGNTGVGLALVAQHRGYKCVFVCPDKVSEDKRNVLRAYGAEVVVCPTAVPPEDPDSYYSVSDRLVREIDGAWKPDQYANPEGPASHYATTGPEIWADTDGKITHFVAGIGTGGTITGAGRYLKEVSGGKVRVIGADPEGSVYSGGTGRPYLVEGVGEDFWPAAYDPAVPDEIIAVSDSDSFDMTRRLAREEAMLVGGSCGMAVVAALRVAEQAGPDALVVVLLPDGGRGYMSKIFNDAWMSSYGFLRSRLDGRTDASTVGDVLRRKSGALPALVHTHPSETVRDAIGILREYGVSQMPVVGAEPPVMAGEVAGSVSERELLSAVFSGKAKLADAVSQHMSPPLKLIGAGELVGVAGKALRDWDALMVVEEGKPVGVITRYDLLGFLSEGALRR

SEQ ID NO: 3176 - protein, 792 aa, Cupriavidus taiwanensis
MNAPDNQRLVGASVKRKEDYRYLTGNGQYTDDIVLPQQSYAYFLRSPYAHARIRAIDKSAALAAPGVIAVLTGADLAADKVGGLPCGWLIHSIDGSPMKEPPHPVIAHDKVRHVGDQVALVIAETLQQARDAAEQIDVDYEELPAVVSAADAASASTLVHDDVPANTCYTWGHGDKAATDAAFARAAHVTTLEIVNNRLIPNAIEPRAVNASYTRQDDSYTVYVANQNPHVERLLMGAFVLGLPESRLRIIAPDVGGGFGSKIFLYPEDVALTWASKKVGRPVKWTADRSESFLTDAHGRDHVTRAELALDADGKFLAMRVHTVANMGAYLSTFASSVPTILYATLLAGQYATPAIYAEVQAVFTNTAPVDAYRGAGRPEATFVVERLVETAAHELNIDPAELRRKNFIRQFPYATPVGLTYDTGDYEPCLARAQELADVKGFPARRDEAKQRGKLRGLGYSCYIEACGLAPSNIAGALGARAGLFEVGEIRVHPTGTVTVFTGSHSHGQGHETTFAQVVADRLGLQLDQVEIVHGDTGRVPFGMGTYGSRSLAVGGSAIVKALDKIEAKAKKIAAHLLEASDSDIEFSNGVFRVAGTDRTKTFGEVALSAYVPHNYPLDKLEPGLNENAFYDPTNFTYPSGAYVCEVEVDPDTGESQVVKFTAVDDFGNIINPMIVEGQVHGGIGQGLGQAMMEQCVYDKDSGQLLTGSYMDYAMPRAGDLPDFTVETASGTPCTHNPLGVKGCGEAGAIGSPPAFINALVDALSPLGVKDVQMPATPHRVWQAIQAARTP

SEQ ID NO: 3177 - protein, 344 aa, Rhodospirillum rubrum ATCC 11170
MRITIVTDAWHPQPNGVVRVVDTVRQRLEHRDHEVQLIEPGLFRCMPCPTYPEIPLALLPARPLRKMIDEFRPEAVHIATEGPLGQAARSLCLKRGWPFTTAYHTKFPEYIHARTHLPLDWLYTFMRRFHGPSSAVLCPSPSVRRELAGRGFANAIEWSHGVDTALFRPQPKDFIDLPRPLFLYVGRVTVDKNLPAFLDLDLPGSKLVIGSGPQREGLMRRYPKAHFHIAFGDQELSRYFAAADCFVFPSRTDTFGLVMLEALASGVPVAAFPVTGPRDVIGAAPVGVLDEDLARAAMGALTLDPLACRAYAEGFSWERVVDELLHALRPLPTAAAPLAQARIA

SEQ ID NO: 3178 - protein, 304 aa, Leuconostoc mesenteroides subsp. mesenteroides ATCC 8293
MLIKNIHQLIGQTPLIELQIPVPNQSRIFAKLEMFNPGGSIKDRLGQFLISDAWQRNLINQNSTIIEPTAGNTGIGLALAAQQYKLPTILVVPEKFSAEKQQLMKALGATIINTPSNEGIKGAISKAKSIAAEIENSYLPMQFANPANPETYYKTLAPEIVTDLKNEKIDAFVAGAGSGGTFAGIAKYLSEYDATIKNIVVEPEGSILNGGPAHAHRTEGIGVEFVPPFFESIHIDKTLTISDDNAFQQVRYAAENLGLFIGSSSGAALAASLQMAETLPPQSNIVTIFPDSSERYMSTNIYGN

SEQ ID NO: 3179 - protein, 167 aa, Cupriavidus taiwanensis
MAIPIRLTVNGKPVDAQVEPNTLLVQFLREQLRLTGTHVGCDTAQCGACTVHLDGRAVKSCNILALQADGATVTTIEGLAGDRAGNALHPMQEAFRECHGLQCGFCTPGMVMSATALVQQHPDADAATIRAHLEGNLCRCTGYHNIVRAVQQGQAAMQGTASAASAE

SEQ ID NO: 3180 - protein, 274 aa, Myxococcus xanthus DK 1622
MPMPQAGDQAPAFQLADQDGNAVSLAQFAGRSVVLYFYPKDDTPGCTVEACGFRDEHSALEAAGAVVLGVSADSTASHRKFATKFNLPFPLLADVDHTLSEAYGVWGEKSLYGRKFLGITRATFLIGPDGVLKQVWPKVKVNGHVAEVLAVLKGEAPAAGGAVKKSAAKKAPAGKKVAAAKKAPAGKTVSGKSAATRKATAKKAAPAAKAPRAAKKAATAKKAPVAKKPAAAKKASAGKKPAAAKKASAGKKPAPAKKSAVAKKSAAAKKASRK

SEQ ID NO: 3181 - protein, 235 aa, Chlamydomonas incerta
MAALQSASRSSAVAFSRQARVAPRVASSVARRNLVVRASHAEKPLVGSVAPDFKAQAVFDQEFQEITLSKYRGKYVVLFFYPLDFTFVCPTEITAFSDRYKEFKDINTEVLGVSVDSQFTHLAWIQTDRKEGGLGDLNYPLVADLKKEISKAYGVLTEDGISLRGLFIIDKEGVVQHATINNLAFGRSVDETKRVLQAIQYVQSNPDEVCPAGWKPGDKTMKPDPKGSKEYFAAV

SEQ ID NO: 3182 - protein, 195 aa, Mycobacterium marinum M
MSLLTIGQQFPAYSLTALIGGDLSKVDAKQPGDYFKTVTSDDHAGKWRVVFFWPKDFTFVCPTEIAAFGKLNDEFEDRDAQVLGVSIDSEFVHFQWRAQHDDLKNLPFPMLADIKRELVAATGVLNADGVADRVTFIVDPNNEIQFVSATAGSVGRNVDEVLRVLDALQSDELCACNWRKGDPTLDAGELLKASA

SEQ ID NO: 3183 - protein, 339 aa, Pichia pastoris
GCVKDRIALRMVEQAEKEGRIKPGYTLIEPTSGNTGIGLALVGAVKGYRTIITLPEKMSNEKVAVLKALGAEIIRTPTEAAWDSPESHIGVARRLEKEIPNAVILDQYGNVNNPDAHFYTTGAEIWDQTNGKVTHGVAGAGTGGTITGIAKFLKSKNPNIQIIGADPHGSILALPESLNTSNEQYKVEGIGYDFIPEVLDREIVDTWYKTDDKDFFKLARQLISEEGILVGGSSGSALSAAVKIINDAKLDESAVVVVVCPDSIRSYLTKFADDDWMKLNGFTEDEPAPLKRKSSFSKDTLSSYTIKDLALKPVVSVTIDDSIESTINILQTKGFDQPP

SEQ ID NO: 3184 - protein, 294 aa, Cytophaga hutchinsonii ATCC 33406
MATLLDFIGNTPLVEITRIFNKPNVKIFAKLEGHNPGGSVKDRAALGMIKGALERGEIKPGMKLIEATSGNTGIALAMIARLYNLDIELVMPDNSTRERVLTMEAFGAKVTLTPAAVSIEGSRDYAEAQVAKGGFFMLNQFANPDNYMAHYHSTGPEIWRDTNGTVTHFVSSMGTTGTIMGTSKFLKEKNSAVQIVGVQPTEGSKIPGIRRWPVEYLPKIYDDSRVDVKMDVSEEESVAMTRRLAREEGIFGGMSSGGAMAAAIKLGNEIESGIIVSIVCDRGDRYLSSDLFGA

SEQ ID NO: 3185 - protein, 332 aa, Rhodopseudomonas palustris CGA009
MSSAATASIKAVAEAPAHRPGRGRVYESIADAYGDTPLVRLNRLPQQHGVKATIYAKLEYFNPASSVKDRIGAAMIAALEQEGIIKPDTVLIEPTSGNTGIALAFVAAAKGYRLKLVMPESMSIERRKMLAFLGAELVLTEAAKGMKGAVAKAEELVAATPNAVMPQQFKNLANPAVHRRTTAEEIWNDTDGAVDIFVAGVGTGGTVSGVGQVLKPRKASLKVVAVEPEESPVLSGGAPGPHKIQGIGAGFVPDILDRSVIDEVVKIPSATAIETSRALARHEGIPGGISSGAAIAAAIELGKRPENAGKTIVAIVPSFSERYLSTVLFEGV

SEQ ID NO: 3186 - protein, 216 aa, Arabidopsis thaliana
MPGITLGDTVPNLEVETTHDKFKLHDYFANSWTVLFSHPGDFTPVCTTELGAMAKYAHEFDKRGVKLLGLSCDDVQSHKDWIKDIEAFNHGSKVNYPIIADPNKEIIPQLNMIDPIENGPSRALHIVGPDSKIKLSFLYPSTTGRNMDEVLRALDSLLMASKHNNKIATPVNWKPDQPVVISPAVSDEEAKKMFPQGFKTADLPSKKGYLRRTEVS

SEQ ID NO: 3187 - protein, 211 aa, Synechococcus sp. PCC 7335
MTLQLGDIVPNFTQQTTEGEINFYDWAGNSWVVLFSHPADYTPVCTTELGNVAKLKPEFAKRGAKVITLSVDGVKSHQGWVGDINETQRTTVNYPIIADEDKSVSNLYGMIHPNANAKVTVRTVFIIDPSRKLRLTMTYPPTTGRNFTEILRVLDSLQLTDNYSVATPVDWQDGEDVVIVPTIPTDVARQKFPKGVNEIKPYLRLTPQPNR

SEQ ID NO: 3188 - protein, 381 aa, Prochlorococcus marinus str. MIT 9303
MKIAFFTETFLPKVDGIVTRLTKTVQHLVEAGDEVMVFCPEGCPSEYMGAELIGVPAMPLPLYPELKLALPRPAVAEALETFEPDLVHVVNPAVLGLGGIWLAKTNGIPLIASYHTHLPKYLEHYGMGMLEPLLWELLKAAHNQAILNLCTSTAMVSELSEKGIQNTALWQRGVDTELFRPELRNETMRLRLLNTNDDQGALLLYVGRLSAEKQIERIKPVLDRIPEARLALVGDGPHRQQLEKAFEGTATTFVGYLEGEELASAYASGDAFLFPSSTETLGLVLLEAMAAGCPVVGANRGGIPDIITDGVNGCLYEPDGVDGGSTSLINATRRLLGNDLERQGLRKAARQEAERWGWASATQQLRSYYRTILGQPLNLAA

SEQ ID NO: 3189 - protein, 415 aa, Oryza sativa Indica Group
MAAWNTSILLSPPPPLLSRAAVATPALNPYPLRLHRRHPQKPLCLPSESYPADTDADASSASLDSRPRRIALFVEPSPFAYVSGYKNRFQNFIKYLREMGDESADSSIFADMSYLIDSSFPCPWYQKVPLSLALSPRIIGEVARFKPDIIHASSPGIMVAQNFYYINTLSFNMPLTAFVSPKQLYTEIYIQLAGEAYVVDYNNGEPEKPLILYVGRLGVEKSLDFLKRVMDRLPGSRIAFVGDGPFRAELQLMFTGMPAVFTGTLQGEELSQAYASGDVFVMPSESETLGFVVLEAMSSGVPVVAARAGGIPDIIPEDQEGKTSFLYTPGDVDDCVSKIERLLTCEELRETMRKAARKEMEKFDWRAATRKIRNEQYSAAIWFWRKKRAQLLRPIQWVSRRLFRPTPAPSTMNQS

SEQ ID NO: 3190 - protein, 161 aa, Bradyrhizobium japonicum USDA 110
MAKISLIVNGNPVTANVDPRTLLVQFLRENLRLTGTHVGCDTSQCGACVVHLDGKAVKSCTTLAVMADGHEVKTIEGLAADGAPLHPMQEAFREHHGLQCGFCTPGMIMTAIDIVHRKGHEVDDHTIREELEGNLCRCTGYQNIVASISAGAKAMAKSDLA

SEQ ID NO: 3191 - protein, 394 aa, Silicibacter sp. TM1040
MVLRASQTQWNHGRAEIVPDRRNASLRALWTLVIAPVPSYIRGERAKGNFMRIARDLADAVGHTPLIRLNKVSEETGCEILGKAEFLNPGQSVKDRAALYIIKDAIARGELKPGGTIVEGTAGNTGIGLALVGASMGFKTVIVIPETQSEEKKDMLRLAGAQLVQVPAAPYKNPNNYVRYSERLANELAKTEPNGAIWANQFDNVANRQAHVETTGPEIWEQTGGKVDGFICAVGSGGTLAGIAEALQPKGVKIGLADPNGAALYSYYTTGELKSEGSSITEGIGQGRITKNLEGLTPDFNYQIPDAEALPYVFDLLHEEGLVLGGSSGVNIAGAVRLAKELGPGHTIVTILCDYGTRYQSKLFNPEFLKDKGLPVPDWMTHTPASIPGVFEDI

SEQ ID NO: 3192 - protein, 409 aa, Geobacter metallireducens GS-15
MTSFSPVPGPRSPVPRTLRVLMVAPTPFFADRGCHVRIYEEARALMACGHEVRIATYHLGRDMPGIATDRTVRIPWYRKLSAGPSWHKPYLDILLFVTALRAARRMRPDLIHAHLHEGAFLGVFLKRLVGVPLLFDCQGSLTGELADHGFARQGSLLCRFFARLEGWINRNADAIITSSGAGRDDLVGKWGVPARKVTAFMDGVDTAVFRPYPRDEVRRKLGIASHAPLVVFLGVLNRYQGIDLLLSAMVILKAKGSPVRFLVMGFPEGGYREKARELGVDDMVTFPGRIDYAKAPLYLSAGDLAVSPKVSLTEANGKLFNYMACGLPTVVFDTPINREILGDAGVYARFGDAVDLAARIDSLAGDVEERARLSQLGREHAENNHSWHARGMELSEVYRHLVILLAARR

SEQ ID NO: 3193 - protein, 700 aa, Streptomyces albus
MPDTTSALGAPTERREGPAKVTGAAPYAAEHTPEGCAYAWPVPATVARGEITSVDDTAALAVPGVVGVLTHLNAPRLAEADDAILAVLQDARVPHRGWYVALVVADTLEAAREGAAAVTVTYSEEPHDVTLDAGSPAAYVPEDPDGNPDEHTRGDPDAALAAAPTQVDVTYEVPPLHNHPMEPHAATAHWQDGRLTAYDSSQGATAVRQTLASLFKLPEEQVTVVSEHVGGGFGAKGTPRPHVVLAAMAARETGRPVKLALPRRHLATVVGHRSPTVQRLRLGAEADGTLTSVIHEVTSYTSRIKEFVETGAAVSRVMYPSPHARTGHRVLPLDVPSPSWMRAPGEAPGMYALESAMDELAVALGMDPVELRLRNDTDKEPDSGKPFSSRHLAECLREGARRFGWAERDPRPRSRTEGPLLIGTGVAAATYPVLVSPSRASARAYPDGGYVVRVNATDIGTGARTVLAQVAADALGVPVDRVRTEVGSTDLPAAPLAGGSSGTASWGWAVHEACTRLAERLAGQREQRLPPEGVGASADTEGTSDTNYAESDYARHAFGAHFAEVGVDSVSGEVRVRRLLGVYAAGHILNARTARSQFIGGMTMGLGMALTEHSTMDEPFGDFAESDLASYHVPVHADVPAIEAHWIDEDDPHLNPMGSKGIGEIGIVGTAAAIGNAVHHATGVRVRELPVTPDKILTGS

SEQ ID NO: 3194 - protein, 261 aa, Oryza sativa Japonica Group
MAACCSSLATAVSSSSAKPLAGIPPAAPHSLSLPRAPAARPLRLSASSSRSARASSFVARAGGVDDAPLVGNKAPDFDAEAVFDQEFINVKLSDYIGKKYVILFFYPLDFTFVCPTEITAFSDRYDEFEKLNTEILGVSIDSVFSHLAWVQTDRKSGGLGDLKYPLISDVTKSISKSFGVLIPDQGIALRGLFIIDKEGVIQHSTINNLAIGRSVDETMRTLQALQYVQDNPDEVCPAGWKPGDKSMKPDPKGSKEYFAAI

SEQ ID NO: 3195 - protein, 324 aa, Nostoc punctiforme PCC 73102
MDIKNGFVGAVGNTPLIRLNSFSEETGCEILAKAEFLNPGGSVKDRAALYIIEDAEKKGLLKPGGTVVEGTAGNTGIGLAHICNAKGYKCLIIIPDTQSQEKIDALIALGAEVRRVPAVPYKDPNNYVKLSGRVAAELENAIWANQFDNLANRHAHYETTGPEIWKQTDGKIDAWTASTGTGGTYAGVALYLKEQNPGIKCVVADPLGSALYSYVKTGEINIKGNSITEGIGNGRVTANMEGAPADDAIQIDDKEALRVVYQLLRKDGLLMGGSTGINVGAAVALAKQLGPGHTIVTILCDSGSRYQSRIFNPEWLASKGLSID

SEQ ID NO: 3196 - protein, 177 aa, Streptomyces albus
MGADVFHSEVPLRVNGEARRPTVDHRSTLLDVLREQLGLTGAKKGCDHGQCGACTVLVDGRRVNSCLLLAVALEGCEVTTVEGLAPGEGDDLHPLQRAFVDRDAFQCGYCTPGQICSAVGAIEEAGAGRASHVTDPAANRGAPVELTRDEIRERLSGNICRCGAYPHIVEAVEDVTR

SEQ ID NO: 3197 - protein, 151 aa, Cyanothece sp. PCC 7424
MSVKVGDRAPDFTLSSQSGEKVSLKDFLGKKAVVVYFYPKDDTPGCTAESCAFRDSYEVFKEMGAEVIGISGDSPDSHKSFASKYNLPFILLSDTNNQVRKLFGVPATLFVLPGRVTYIIDKEGIIRQIFDSAFDFKAHVNEALKTLQGVK

SEQ ID NO: 3198 - protein, 226 aa, Vitis vinifera
MSQSLSNLCNISLPFPCERTTAAVTFSRFPQANRVCYKCSGIKAMATEGRDNLDHLRRAGKHNPQKKRAPQVAPIGLWDRFPTARTVQQMMETMERMMEDPLAYSGGWPSESGGYSRGRTPWEIKEDEGEYKIRFDMPGMTKDDVKLWVEEKMLVIKAEKMSGTEGNGEEDEGAWSAKSYGRYNSRVALPENVQFEKIKAEVKDGVLYITIPKASDNPKILDINVE

SEQ ID NO: 3199 - protein, 423 aa, Frankia sp. EAN1pec
MPRVLVVADKFPPTIGGIQTFACRLTAGLPPDRAVVLAPAQPGDAEFDRTLGFPVIRTEHGMITSPRGRRELRAAVRAHGCEVAWFPTAAPLGVLAPVLREAGVERVVASSHGHEVAWSRLPFGRLLVSTVGARVDVLTYLTEFTRRRLAAVTPPGTELARLTGGVDTERFQPGTGGDEIRRGLGWSDEPVVICVARLVTRKGQDTLIRGWHDVRRRHPHARLLLVGGGPAEDRLRRLAARAGVSDGVHFAGPVPDELLPAYLDAADVFAMPSRTRLCGLDLEGLGLSALEGAASGLPVITGAQGGAPDVVIPGRTGVAVNGHDRTAVAAAVIDLLDDPRQAERMGAAGRAWMRAAWSWETLSLRLAGILSGQAPTAIGAGADAAWTAADAEDGADAVAGARAAVAVGGARVGMTVPERGDGR

SEQ ID NO: 3200 - protein, 319 aa, Microcoleus chthonoplastes PCC 7420
MKLSSHLPSMKIYSNITDVIGSTSLVQLQRLPQRHGCVATIVLKLEGMNPAKSIKDRIAISMVAEAEEVGLIQPGVSTIIEATSGNTGIGLAMVCAAKGYRLILTMPENMSRERQQLVKAYGAEVVLTPAKADMAGAIARANELLATLPNAFSPQQFSNPANPKIHYQTTGPEIWQGTDGQIDILVLGVGTGGTLTGAGRYLKQQKPQLKIVAIEPTKSAVLSGKPAGIHNLQGIGAGFVPDVLRVNLIDEIMQVNEAQAYDIGRQLAQEEGILSGISTGAAVYAALQVGCRPENRDRLIVVIQPSGGERYLSTPMFAH

SEQ ID NO: 3201 - protein, 1469 aa, Candida albicans SC5314
MNSILHTCTHSNDNTITRLSDDQMYAAIFNYIEHLFQIIKPQKTFYMAIDGVAPRAKMNQQRARRFRTAYEAEINLKKAIENGEEIPKEDPFDSNSITPGTEFMANLTNNLKYFIHKKITEDSSWANIEIILSGHEVPGEGEHKIMEYIRSIRSQDDYNPNLRHCIYGLDADLIMLGLVTHDPHFALLREEVTFGPQRKVGPKDLHDQKFYLLHLSLLREYLSLEFQEIENQLNFEYDFDRILDDFILIMYVIGNDFLPNLPDLFINKGAFPLLIAAFKQTLLESDGYINENGKINLVRLNIYIKILSKFEFENFEKHEVDVEWFNKKLDDISISGEKKRQRIGKLLILKEQKKLVGFIKPWLMEWASQPINEILNLDQQGKLPTLHLNKDDVEKNLEFIKEFAIEAGFLIIHSQSNDTYEAKLDIDGISPTESEEEHEERITELRKTIKQYQSANLIESEEVLNETKEVYSEKFQSWKNDYYQPKLHFSIDTEEGKGDLIEMTKHYIEGLQWVLYYYYRGCPSWNWYYRYHYAPRISDISLGLEELINEKTDLKFELSHPFKPFEQLMAVLPARSKKLMPVVYRPLMSDEKSPIINFYPHEVDIDMNGKTASWEAVVLLDFVDEKKLIEALKPIESKLTPEEKQRNSYGHAIKFIHNPQIDHVFSSPLPGFFHDIEHDQCYEEEFKLPKIENLKIGFIKGAKTGKDLLAGFPTLSTIPFTSELALNEVKIFNFPSRSESMILNVEDVWSDLTVAQFAQSFVNKLVYSKWPFLRECRVVKVVSEENKFESIKTNTGLKKVVTNELSVEDKKSFRSEVSNLKVTWDKFKGVKLGEINALVYVKPVNGLIRNHKGAYVKTYSKDVEVYPLQLIVKEVTNKDQRYLTRPPLPIDQEFPIDSQVVFLGDMAYGSPAKIVGYNEDKTKLGVKIFKIQSTAEPNIGKKRLTIEKNEIKYYPSFEVAKTLRLNPLLLSKITSQFMVQDSSKGKVNIGLELKFESKRQKVLGYTRKSSNGKFWEFSPLAINLINTYKTKFPGLFKKLVNNVSGSNFPTVDEISSLEELKEIRSWLKEVKSELIPVSLESESFTKFSYQAIEQYMDNYLSMNQIPTINKDIKGVPREAILNANESYQLLSDQRFELGDRIIYVQDFGKVSILSKGTVASILTVGSKTSLGVIFDQPLLSGNNMNGKLNSNRGLIIDSSLVLNLTNKQFVYHSHASKNRKKLTDEEKIAKLKAIEAKKNQKQQQQQKEQQTKQKQVEQQKQKGANELLSLLKKKSDMNSTTTTSTTDGDCKKTEEKDYDKNNGNEDERVDPNAIKQIYGHIYSNVMNQGNVRPPPPPPTGPGHPQQFPYGMPIPPPGAPMHPGYIPVVPGNPLPPSFYQQYPPNGQQFVNSQPPPPPPPPPSQQQQPQVAESTSDEKSKNDNKHNVNGRGRGGSRGRGGYRGRGGVRGGRGGNKSSHQNQPKDKVKQES

SEQ ID NO: 3202 - protein, 153 aa, Burkholderia vietnamiensis G4
MSVEVDRQVPDFTAPATGGDISLSGLKGRKLVLYFYPKDNTPGCTTEGLQFRDLYPKFTKAGAEVIGVSRDSLRSHDNFKAKLELPFPLISDADEALCTLFDVIKMKKMYGKEVRGIERSTFLIDADGVLRQAWRGIKVPGHVDDVLSAVQAL

SEQ ID NO: 3203 - protein, 152 aa, Synechococcus sp. WH 7805
MALQTGDVAPSFALEDQDGQMRRLDDVKDRILVLFFYPKDDTPGCTAEACTFRDHHANLTALGAEVWGVSGDDAVSHRRFAERYQLPYPLLSDKTGSLKRSFGVPKTFGLLPARVTYVIDQKGVIKLVFNNLLDGPAHVKEAESVVRTLAAG

SEQ ID NO: 3204 - protein, 154 aa, Robiginitalea biformata HTCC2501
MAVYNLKINGTSMEVDADPSTPLLWVLRDHLNMVGTKYGCGIAQCGACTVHLGDTATRSCSLPVSSVGDQEVTTIEGLSENGDHPVQKAWLEVDVPQCGYCQAGQIMSAAALLKGNPNPSDADIESAMNGNICRCGTYVRIKKAIRMAADQSAT

SEQ ID NO: 3205 - protein, 765 aa, Escherichia coli CFT073
MEAREATATGESCMRVDAIAKVTGRARYTDDYIMAGMCYAKYVRSPIAHGYAVNINDEQARSLPGVLAIFTWEDVPEIPFATAGHAWTLDENKRDTADRALLTRHVRHHGDAVAIVVARDELTAEKAAQLVSIEWQELPVITSPEAALAEDAAPIHNGGNLLKQSTMSTGNVQQTIDAADYQVQGHYQTPVIQHCHMESVTSLAWMEDNSRITIVSSTQIPHIVRRVVGQALDIPWSCVRVIKPFIGGGFGNKQDVLEEPMAAFLTSKLGGIPVKVSLSREECFLATRTRHAFTIDGQMGVNRDGTLKGYSLDVLSNTGAYASHGHSIASAGGNKVAYLYPRCAYAYSSKTCYTNLPSAGAMRGYGAPQVVFAVESMLDDAATALGIDPVEIRLRNAAREGDANPLTGKRIYSAGLPECLEKGRKIFEWEKRRAECQNQQGNLRRGVGVACFSYTSNTWPVGVEIAGARLLMNQDGTINVQSGATEIGQGADTVFSQMVAETVGVPVSDVHVISTQDTDVTPFDPGAFASRQSYVAAPALRSAALLLKEKIIAHAAVMLHQSAMNLTLIKGHIVLIERPEEPLMSLKDLAMDAFYHPERGGQLSAESSIKTTTNPPAFGCTFVDLTVDIALCKVTINRILNVHDSGHILNPLLAEGQVHGGMGMGIGWALFEEMIIDAKSGVVRNPNLLDYKMPTMPDLPQLESAFVEINEPQSAYGHKSLGEPPIIPVAAAIRNAVKMATGVAINTLPLTPKRLYEEFHLAGLI

SEQ ID NO: 3206 - protein, 322 aa, Microcystis aeruginosa PCC 7806
MDIKHGFVDAVGNTPLIRLNSFSEETGCEILGKAEFLNPGGSVKDRAALYIIQEAEKAGTLQPGGTVVEGTAGNTGIGLAHICNAKGYKCLIIIPDTQSQEKIDLLRTLGAEVRTVPAVPYRDANNYVKLSGRLASEMENAIWANQFDNLANRRAHYETTGREIWEQTDGKIDAWVAATGTGGTYAGVAMFLKDQNPQVRCVVADPMGSGLYSYVKTGTITLEGSSITEGIGNSRITANMEGAPIDDAIQIDDPTAIKVVYQLLQKDGLFMGGSVGINVGAAVALAKQMGPGHTIVTVLCDGGSRYQSRLYNPQWLAEKGLA

SEQ ID NO: 3207 - protein, 348 aa, Fulvimarina pelagi HTCC2506
MSRPVVFAIPGDLQTRTGGYGYDRRMIEELTALDCRVQHIPLPSGFPDPSKSEIAATTRLFAAIEGGSTVLVDGLAFGALPDLAEAEAVRLDLIALVHHPLSLETGLTADRVAKLKEDETHALRFARCVVVTSSETGRILTRDFDVPRDRIAVVPPGTDRRPVRSRQEHIPLILAVGSLIPRKGYDILIEALGTLQDLVWTCRIVGSADMDPSHAAELEALVTQVGLAERVLFAGSVDGLAAEYDAADIFALATRYEGYGMVFGEALAHGLPIVGTTGGAVSDVVPDSAGILVEPADACMFADALRRMISDSDLRSRYAEGARQAAQRLPSWRDSAIALKDVLRRSKQ

SEQ ID NO: 3208 - protein, 169 aa, Glycine max
  misc_feature (161)..(161): Xaa can be any naturally occurring amino acid
ARGDARIFCLGVRIVKRRSMQQILNSIPKESDGEKFEDALARVCRCVGGGNAVDDADSDSDLEVVSDTFTVNLRCPMSGSRMKIAGRFKPCIHMGCFDLEVFVEMNQRSRKWQCPICLKNYALENIIIDPYFNRITSMMMNCGEEIAEIEVKPDGSCRVRXKSESERLE

SEQ ID NO: 3209 - protein, 195 aa, Candida glabrata CBS 138
MVAQVQKPAPTFKKTAVIDGVFDEVSLDKYKGKYVVLAFVPLAFTFVCPTEIVAFSEAAKRFEALDAQVLFASTDSEYSLLAWTNVPRQDGGLGPVDIPLLADTNHTLSRDYGVLIEEEGIALRGLFIIDPKGIVRHITINDLPVGRNVEEALRLVEGFQWTDKNGTVLPCNWTPGAATIKPTVEDSKEYFKNVK

SEQ ID NO: 3210 - protein, 195 aa, Mycobacterium tuberculosis
  misc_feature (1)..(1): Xaa can be any naturally occurring amino acid
  misc_feature (110)..(110): Xaa can be any naturally occurring amino acid
XPLLTIGDQFPAYQLTALIGGDLSKVDAKQPGDYFTTITSDEHPGKWRVVFFWPKDFTFVCPTEIAAFSKLNDEFEDRDAQILGVSIDSEFAHFQWRAQHNDLKTLPFPXLSDIKRELSQAAGVLNADGVADRVTFIVDPNNEIQFVSATAGSVGRNVDEVLRVLDALQSDELCASNWRKGDPTLDAGELLKASA

SEQ ID NO: 3211 - protein, 177 aa, Prochlorococcus marinus str. AS9601
MRNLVISIFISFIFLFNCTSVIAFDFAPEVGDIAPNFQLEGFNKNIKSKNIWELNDFQGKWLVMYFYPKDFTAGCTLEAKGFSELKKDFSKYNAEIVGISADNQDSHESFCSEKSINYTLLSDPDGIISKKYGSWIPPFSDRNTFLISPKGEISYRWISVLPINHAKEVLNVLKKKI

SEQ ID NO: 3212 - protein, 364 aa, Thermus thermophilus HB27
MRLLYLITRAEPGGAQVHLLELLRGFRDRAELHLGVGEDQDGFLVEEARALGVRVHLLRHLVQPVRPVKDFRGLFEVMALLRKVRPHLLHAHSSKAGFLGRLAGRALGVKSVFTAHGWAFTDGVPEGMKRLALSMERLAGRLGDLVLAVSEYDRALALRHKVAPPERIRVVHNGVPDTPFRADPRKEPPRLAMVARFAPPKDHALLLKALSGLKELPWSLDLVGEGPLLPQAKALAEALGLGERVRFLGRRLDVDRVLAEAQVFVLATNWEGLPLSVLEAMRAGLPVVATGVGGVGEAVVEGKTGFLVGRGDEEALRARLRTLLLSPDLRARLGEAGRRRYEEGFTLDGMLARVWAAYEEVLRL

SEQ ID NO: 3213 - protein, 328 aa, Prochlorococcus marinus str. MIT 9303
MTMTSPMPIAADITALVGCTPLVRLNRLPQVSGCHAEVLAKLESFNPTASVKDRIAGAMIHAAEEAGTIAPGRTVLVEPTSGNTGIALAMVAAARGYRLILTMPDTMSTERRAMLRAYGAELQLTPGSDGMTGSIELAKELVATIPEAYLLQQFDNPANPQVHERTTAEEIWNDCEGRLDGLITGVGTGGTLTGCARLLKQRNPSLRVFAVEPALSPVLAGGSPAPHRIQGIGAGFIPSVLDLSLIDEILPVSDDDAMEMGRRLAREEGLLSGVSSGAAVAAALQVGSRAEMVGKRLVVVLASFGERYLSTPMFSAASAVPAQRDGYL

SEQ ID NO: 3214 - protein, 160 aa, Zea mays
  misc_feature (51)..(51): Xaa can be any naturally occurring amino acid
  misc_feature (72)..(72): Xaa can be any naturally occurring amino acid
  misc_feature (82)..(82): Xaa can be any naturally occurring amino acid
MASVTSPTTLISSSTRAFPAKSYSLPSPSVSFLRTLSSPSSSASLRSAFAXRSSLSSSSRRSFAVKAQTDDXLPLVGNKAPXDFEAEAVFDQEFIKVKLSEYIGKKYVILFFYPLDFTFVCPKKKITLAACQGLIGSQGPGRAPTSKSGASHLAPRPAQT

SEQ ID NO: 3215 - protein, 151 aa, Coprothermobacter proteolyticus DSM 5265
MLTVGSSAPDFELTDHNLKRVRLSSLKGKVVLAFYPGAFTGVCTKEMCTFRDMMARFNELEATVLGISVDTPFANKAFAEHNGIEFSLLSDFGGEVAKQYGGVHTDFAGVPNYTAAKRAVFIVEDGKVTYAWVSEDPGKEPPYEEIVKALE

SEQ ID NO: 3216 - protein, 393 aa, Bacillus licheniformis ATCC 14580
MKQLKIGITCYPSVGGSGIIATELGKLLAEKGHEIHFITSSVPYRLNKVYSNIYFHEVEVNQYAVFKYPPYDLALASKMAEVAKREQLDVLHAHYAVPHAISAFLAKQMLNGNIKTVTTLHGTDITVLGYDPSLKDLIKFAIESSDRVTAVSSALAAQTYDLIKPNKKIETIYNFVDERVYLKKQEHHSLKEQYGIAPDEKVIIHVSNFRQVKRVQDVIHVFSRIVKQMKSKLILVGDGPEMTVICQLVRQLGLKDDVLFLGKQDSVEELYAISDLKLLLSEKESFGLVLLEAMACGVPCIGTNIGGIPEVIKNGVSGYLVDVGDIEGAASKALHLLTDESLQRQFAEAALQSIKERFSSNKIIAQYEEIYQQLTDWECDNGGSLFEGSSSPS

SEQ ID NO: 3217 - protein, 319 aa, Solibacter usitatus Ellin6076
MRVYDDNSLSIGRTPLVRLNRVIDGGKAIVLAKIEGRNPAYSVKCRIGAAMVWDAEKRGVLHAGKELVEPTSGNTGIALAFVAAARGYPIHLTMPETMSVERRKVLKALGANLILTPGSDGMAGSIAKAEEMVAGDPRRYILLQQFKNPANPEIHFRTTGPEIWEDTEGTIDVLVSGIGTGGTISGVSRYIKKDRGRKILSVGVEPFSSQVLTQHMAGKPLKPGPHKIQGIGAGFIPDTLDLTMVDRVELISNEESIEMARRLAKEEGILSGISCGAAAAVAVRLGKLPEFAGKVIVTVLPDAAERYLSTTLFEGMFDE

SEQ ID NO: 3218 - protein, 385 aa, Streptococcus suis 89/1591
MKKILYLHAGAELYGADKVLLELIKGLDKNEFEAHVILPNDGVLVPALREVGAQVEVINYPILRRKYFNPKGIFDYFISYHHYSKQIAQYAIENKVDIIHNNTTAVLEGIYLKRKLKLPLLWHVHEIIVKPKFISDSINFLMGRFADKIVTVSQAVANHIKQSPHIKDDQISVIYNGVDNKVYYQSDARSVRERFDIDEEALVIGMVGRVNAWKGQGDFLEAVAPILEQNPKAIAFIAGSAFEGEEWRVVELEKKISQLKVSSQVRRIDYYANTTELYNMFDIFVLPSTNPDPLPTVVLEAMACGKPVVGYRHGGVCEMVKEGVNGFLVTPNSPLNLSKVILQLSENINLRKKIGNNSIERQKEHFSLKSYVKNFSKVYTSLKVY

SEQ ID NO: 3219 - protein, 199 aa, Wolbachia pipientis
MNLVTKSAIDFTASAVLASGKIVDDFCLSKHIKDKYAVLFFYPLDFTFVCPTELISFSNKIEDFSKRDVEVIGISIDSKFSHYKWRNTPVNDGGIGEVSYNLVSDIKKSISRDYGVLYDDSIALRATFVIDDKFVVRHQSINDFPLGRNIDEFIRIIDAIKHNEEHGEVCPAGWKKGKPAMQASDEGVADYLNSHSAEL

SEQ ID NO: 3220 - protein, 153 aa, Methanosarcina acetivorans C2A
MKWPAKRSVSGPARWDPFEEIRRTQERLNQLFEDFMPMEEWGGGKVYTPAIDIMEEDDKLVVTTDLPGINKEDVEINLKEDMLEISAKTGEEKETEEEGYLRKERAYTQFYRAVRLPVGVKEEGSTAKMENGVLTISLPKAQIEEPKKKIEIE

SEQ ID NO: 3221 - protein, 853 aa, Moorella thermoacetica ATCC 39073
MHLQLLVNGQQREVDVNEEATLLEVLREHLRLTGAKNGCGEGTCGACTVIMGGKAVRACRTPVARAAGQEIITVEGLTPREKEIYAWAFTAAGAVQCGFCTPGMVMEAKALLDRQPDPGEAEIRQALKAHLCRCTGYQKIITAVRLAGQALRGEIEPYRGEPAGLGKAFFRPDAPPKVLGEAVFVDDMQVPGMLYGAVFRLPVARARIKGIDTTVARKQPGVVAVLTADDIPGKRYQGHIFKDWPALVAVGEETRYAGDALALVAAKSTREARAALDFIKVDYEELPPLTSPEEALAPGAPALHPRGNLLSETQVKKGDAEAALRSCAHVVTNTYQTPFTEHAFLEPESALAVPENGGLTVYTSTQGVYEIHAQLVSLLNLPPDKIRVINRFVGGGFGGKEDLSVQHHAALLAWATQRPVKLTWTRRESILCHPKRHAMTITMTTGCDAAGNLVALVADLVADTGAYASLGAQVLERACTHATGPYRIPNVTIRGRAVYTNNPPAGAFRGFGVPQSNFAMETQMNLLAAATGLSPWQIRWQNALEPGDTLATGQVVSEDIGIKETLLAVKEAYESSPCAGIACAFKNVGLGVGTPDTGRANLAVEGGRVRIYSSAACMGQGLESVLIQIVAETTGLPAEVIDCVLSDTALTPDAGCTTASRQSLFTGEATRRAAAALAEALRGRTLAELEGRVFRGEFHGVTDPLNSTREHPLTHVGYSYATQVVLLDDAGKVSKVVAAYDIGRAINPLNLEGQIEGGIVMGLGYALTEDFPLREGIPERQTLGRLGLLRSHQVPAMEVHLIEKGGTPYAYGAKGVGELATIPTAAAVAGAYYRFDGKVRLSLPLEGTPYTRG

SEQ ID NO: 3222 - protein, 199 aa, Cyanothece sp. ATCC 51142
MTIEGCLRVGQVAPDFTATVVIDQEFQTKKLSSYRGKYVVLFFYPLDFTFVCPTEVIAFSDRYEEFAKINTEILAVSVDSEFSHLAWIQTPRTEGGVGDIAYPLVSDLKKEISTAYNILDPESGVALRGLFIIDKEGVIQHATINNLSFGRSVTETLRTLKAIQHVQTNPEEVCPADWQEGDKTMIPDPIKSKIYFSAV

SEQ ID NO: 3223 - protein, 195 aa, Mycobacterium smegmatis str. MC2 155
MALLTIGDQFPEYDLTAVVGGDLSKVDAKQPDDYFTRVTSKDYEGKWRIIFFWPKDFTFVCPTEIAAFGKLNEDFEDRDAKVLGVSVDNEFVHFQWRAQHEDLKTLPFPMVSDLKRELTAACGVLNADGVADRATFIVDPNNEVQFVSVTAGSVGRNVDEVLRVLDALQSDELCACNWKKGDPTINAGELLAGAV

SEQ ID NO: 3224 - protein, 108 aa, Chlamydomonas incerta
DRYKEFKDINTEVLGVSVDSQFTHLAWIQTDRKEGGLGDLNYPLVADLKKEISKAYGVLTEDGISLRGLFIIDKEGVVQHATINNLAFGRSVDETKRVLQAIQYVQSN

SEQ ID NO: 3225 - protein, 193 aa, Leptospira interrogans serovar Lai str. 56601
MPQVTSLAPDFKAEAVLGKEIKEIKLSDYKGKWVVLFFYPLDFTFVCPTEIIEYDNKLAEFKKLGTEVLGVSVDSAFTHLAWKNTPKKEGGIGEIKYPLIADLTKSISRDYNVLTEGGVALRGTFIIDPAGVIRQATINDLPVGRNIDEAIRLIKAFQFVEKHGEVCPANWDEGKKTMKADPEKSKDYFAAVN

SEQ ID NO: 3226 - protein, 344 aa, Burkholderia thailandensis E264
MKIMIVTDAWEPQVNGVVRTLKSTARELTALGHRVELVTPLEFRTVPCPTYPEIRLSILPYRRLRERLNAFEPDALHIATEGPLGLAARRYARARKLPFTTAYHTRFPEYVQARFGVPLAATYRFLRWFHGASLAVMAPTPVVKDDLEQFGFDNVVLWTRGVDLDIFRPMESKVLNTARPIFLYVGRVAIEKNVEAFLKLDLPGSKWVAGEGPALAELKSRYPEANYLGVLTQAELAKVYAAADVFVFPSRTDTFGLVLLEALACGTPVAAYPVTGPVDVLGNGGAGAMNEDLREACLEALKIDRRHAREWAERFSWRAASEQFASHLKPLPKSASPHTEGAAV

SEQ ID NO: 3227 - protein, 380 aa, Nocardia farcinica IFM 10152
MRVAIVSESFLPNMNGVVNSVLRVLDHLSRHGHQALVIAPDNPRGLPPAPGEHGGVPVYRVPAVMVPKISSLPVGLPQPGITDVIADFDADVVHLASPFLLGAGGLAAALRLDLPTVAVYQTDVAGFAQSYGLGLAGRAAWGWTRRIHLRATRTLAPSRAAAADLAAHGIPRVYRWGRGVDIARFTPSARSAALRERWRGGSDRLLVGFVGRLAPEKHVERLAVLADDPGLRLVIVGDGPERARLARSMPDAVFTGELGGQELATAYASLDVMVHAGEHETFCQGVQEALASGVPVIGPDAGGPRDLIAHCRNGYLLPVDRFEELLPSAVAALRDPGARARCGAAARKSVLHRTWPAICTELMDHYAAVTGIDNWLWRTA

SEQ ID NO: 3228 - protein, 151 aa, Bacillus thuringiensis serovar konkukian str. 97-27
MVIVGEMAPEFTLEGSNGEQVRLADFRGKNVVLYFYPKDMTPGCTTEACDFRDSYGLFQEKDTVILGVSPDSANRHLKFIEKHELPFTLLVDEDHKVAELYDVWKLKKNFGKEYMGIERSTFLINKAGELVKEWRKVKVKGHIEDVLSYIK

SEQ ID NO: 3229 - protein, 157 aa, Eubacterium barkeri
MNKITINLNLNGEARSIVTEPNKRLLDLLREDFGLTSVKEGCSEGECGACTVIFNGDPVTTCCMLAGQADESTIITLEGVAEDGKPSLLQQCFLEAGAVQCGYCTPGMILTAKALLDKNPDPTDEEITVAMSGNLCRCTGYIKIHAAVRYAVERCAN

SEQ ID NO: 3230 - protein, 154 aa, Sulfolobus tokodaii str. 7
MKVGDKAPLFEGITDTGEKFSLADYIGKYNIVLYFYPKDDTPGCTREACAFRDNWNLLQGYDVVVIGISSDDVESHKKFKQKYNLPFILVSDPDKKIRELYGAKGFILPARITFVIDKKGIIRHIYNSQLNPENHVKEALKTLEMLKKEEESVS

SEQ ID NO: 3231 - protein, 161 aa, Bradyrhizobium sp. BTAi1
MAKISMIVNGNPVTANVDPRTLLVQFLRENLRLTGTHVGCDTSQCGACVVHLDGKAVKSCTTLAVMADGHEVRTIEGLAADGAPLHPMQEAFREHHGLQCGFCTPGMIMTAVDLVHRKGHDLSEEVIREELEGNLCRCTGYQNIVQSIAAGAKAMAKSDLA

SEQ ID NO: 3232 - protein, 425 aa, Eubacterium barkeri
MGKDYQVLGKNKVKVDSLEKVMGTAKFAADYSFPDMLYAGVFRSTVPHARIVSLDLSKARAIDGVEAVLDYHAIPGKNRFGIIIKDEPCLVDDKVRRYGDAIAVVAAQTPDLVQEALDAITIEYEELEGIFTMERALEEDSPAIHGDTNIHQVKHLEYGDVDAAFKQCDIVVEDTYSTHRLTHMFIEPDAGVSYYDNEGMLTVVVSTQNPHYDRGEVAGMLALPNSKVRIIQATTGGGFGGKLDLSVQCHCALLTYHTKKPVKMVRSREESTTVSSKRHPMTMHCKTGATKDGRLQAVQVEMFGDTGAYASYGPAVITRATVHCMGPYVVPNVRVDAKFVYTNNPMSGAFRGFGVPQASVCHEGQMNALAKALGMDPIDIRILNAHQVGAKLATGQVLENSVGLIETLEKAREKAVEVMGYEKTR

SEQ ID NO: 3233 - protein, 758 aa, Arabidopsis thaliana
MVGGRRLGKRGSPLLRWSVKQESFSHGFSKSDLQALSSICDAIMPPVPLESLNLEMKLKVLRNDALLSFFKSSSSESHVRPDEVAELLATKAIPLTVLVVRIVLRILTFRLGTLLLCGLVCLDKKHWPFLLKFSEMSLEKREKVLQRWNTQWYNPLARIGFMMIKAIFLFYYFTWTNENSENPVWDAINYSVEIGENEDMEQKERPLDEGIIETAKEDEMTIKQRMINKGLKVTEDRERDTYKIECDAVVVGSGCGGGVAAAILAKSGLRVVVIEKGNYFAPRDYSALEGPSMFELFESNSLMMTHDGRFRFMAGSTVGGGSVVNWAASLKTPDAIIEEWSVHRGISIYSSEKYKAAMGIVCKRLGVTEKIIREGFQNQILRKGCEKLGLDVTIVPRNSTEKHYCGSCSYGCPTGEKRGTDSTWLVDAVNNNAVILTQCKAEKLILADNDANKREESGRRKRCLGVAASLSHQTRKKLQINAKVTIVACGSLKTPGLLASSGLKNSNISRGLHIHPIMMAWGYFPEKNSELEGAAHEGEIVTSLHYVHPMDSTTPNITLETPAIGPGTFAALTPWVSGSDMKERMAKYARTAHIFAMVRDEGVGEVKGDIVKYRLTKADEENLTIGLKQALRILVAAGAAEVGTYRSDGQRMKCDGIKQKDLEAFLDTVNAPPGVVSMSKHWTQSFTAHQIGCCRMGATEKEGAIDGKGESWEAEDLYVCDASVLPTALGVNPMITVQSTAYCISNRIAELMKKRKKD

SEQ ID NO: 3234 - protein, 330 aa, Eubacterium barkeri
MKKRGKGVGSMWYGIGNTGLPNPAAAFVEIHGDGSANVMFGAADIGQGSGTAMAQIAAEELGLDYEKIHVTWGDTMVTPDGGATSASRQTLITGNAVILACRQAKETLAKTAAEKLDCAPEELSFRDNTVFITADPERSMTYGELMAAMKAAGRMAVGAGSYNPNTTGLAPENMSGIPFEVYSYATTIAEVEVDTETGEVDVLKVVSAHDVGTPINRSMVEGQIEGGVTMGQGFVLMEEIEVNTKNGAIKNPSMSKYIIPSNRDVPEIHSILVESEGGPGPFGAKGVGEPALIPMIPAVVAAIEDALGTRFTHTPIMPKDIVAAVKAQEK

SEQ ID NO: 3235 - protein, 200 aa, Rickettsia akari str. Hartford
MSVFVGKTAPDFTAKAIMPNNNIDEKFKLSDYAAGDNIVLFFYPLDFTFVCPSEIIAFHNKLGEFTERRTKVVAVSVDSHFSHLAWKNTPHNKGGLGQVQFPMVSDIKKDISSKYNVLNEDCFALRGTFLIDKDFIVRHMLVNDLPIGRDINYTLKVIDALTHHQKHGEVCPAGWHKGEEAITPSHEGIAHYLSSHAEKL

SEQ ID NO: 3236 - protein, 388 aa, Streptomyces kanamyceticus
MGGMHLLVRALVEEMAGRGVPHRVLTMSPPKVPKDIRIGQRIKVHARRLPVLPIPSDLEGYFGLVGAWAKGSLLWVLRNRKRLRREIGAVHAHCDGSGAAAFYPYLMSRILGVPLVVQIHSSRYLSQHPTTLFERVTDPIAKWAERHAVRKAAAVLMLTDRARDEMRRKAQLPAERVHRLAYLASDQFKDADTEARRAELRERYGLDDRPIVLYVGRIAAEKGVEYYIEAAAELTRRGRDCQFVIAGDGPARPDLEKLIGARGLRDRVTITGFMSHEFIPSMISLGELVVLPSRYEELGIVILECMTMRRPLVAHDVNGVNKLIEDGTTGIVVPPFRTPEMADAVERLLDDPELRERMAENAAPLPAAKYSLSAAGDQLAGIYREIGL

SEQ ID NO: 3237 - protein, 320 aa, Cyanothece sp. ATCC 51142
MKIAHNVSELIGRTPLVQLNRIPQAEGCKAQIVVKLEGMNPAASVKDRIGVNMINSAEREGLIIPGKTLLVEPTSGNTGIALAMVAAAKGYKLILTMPETMSQERRAMLKAYGAQLELTPGSEGMSGCIRRAQELVETLPNAYMLQQFNNPANPEIHRLTTAEEIWEDTDGQVDILIAGVGTGGTITGVAEVLKQRKASFQAIAVEPTSSPVLSGGKPGGHKIQGIGAGFIPEVLKVELIDEVVTVTDEEAMTYGRRLAKEEGLLSGISTGAALCAAIKVGQRPENIGKLIVMVQPSFGERYLSTPLFQNVEPPQLAMMN

SEQ ID NO: 3238 - protein, 169 aa, Bordetella bronchiseptica RB50
MSDITESTAQHVSLTVNGRACGGCAEPRMHLADFLRGELGLTGTHIGCEHGVCGACTVLVDGYSTRSCLMLAVQAQDSRVDTIEGLAGEDDALHPIQQAFHELHALQCGYCTPGILMSVAELLAANPDPDEAQVRDVLSGHLCRCTGYQNIVAAVLRAAQLMRAEAGHD

SEQ ID NO: 3239 - protein, 159 aa, Escherichia coli CFT073
MNHSETITIECTINGMPFQLHAAPGMPLSELLREQGLLSVKQGCCVGECGACTVLVDGTAIDSCLFLATWAEGKEIRTLEGEAKGGKLSHVQLAYAKSGAVQCGFCTPGLIMATTAMLAKPREKPLTITEIRRGLAGNLCRCTGYQMIVNTVLDCEKTK

SEQ ID NO: 3240 - protein, 157 aa, Sulfolobus tokodaii
GHMVEIGELAPDFELPDTELKKVKLSALKGKVVVLAFYPAAFTQVCTKEMCTFRDSMAKFNQVNAVVLGISVDPPFSNKAFKEHNKLNFTILSDYNREVVKKYNVAWEFPALPGYVLAKRAVFVIDKEGKVRYKWVSDDPTKEPPYDEIEKVVKSLS

SEQ ID NO: 3241 - protein, 88 aa, Zea mays
  misc_feature (82)..(82): Xaa can be any naturally occurring amino acid
MTRNHVAMLVGLKALYFPYRVHDMCFPCPMYGKVPLSLALSPRIISEVAKFKPDIIHASSPEIMVFGALAIAKLLGVPLVMXYHTHVQ

SEQ ID NO: 3242 - protein, 793 aa, Bordetella bronchiseptica RB50
MTDATSPGLGCSEPRIEDDALLRGQARFLDDIEVEGVLHACFVRSPHAHARLVSIDLSAARAMPGVAAVYGARDLFGQLTSWRMPLGFPLAALPDDTTPFVLAEREVAFVGEAIAVVVADSRHIAEDAAARVAIEYEVLGAVVDCRDALRPDAPLVRGELASNILQQYTLAYGDCETAFAQAHRVLEDDFWVHRGCAHPMEGRGVLARMDRATDTLTVWSSTQMAHELHYTLAMMLGQPEDRLRVVTPDVGGGFGAKFMIYPEEMAIPAAARKLGRPVKWVEDRREHFTTSIQERDQYWKVAMAIDDQGHVLGIRGNFVHDNGAYTPQGTNVPYNAASSMTGPYVVPAFSLDVSVAYTNKVPVATVRGAGYPQAAFVMERMMDRVAAELGIDPGECRRRNLIGPAKIPYTKPLKSRAGMPLTIDSGDFPALQACALQASDYDGFAVRRDAALARGRWRGIAVANSVKPTGRGPFEVARVRVQPSGQVSIYTGALAMGQGIKTTLAQICAGHLGVPVAAVEVQAGDTAYVGYGMGGFASRQAIMAGSAVDQAAAQVRRQALETAAAVLKAEAETLELADGEVRAPDGQSVSLARLAMLRKGVPGYALVSPGDPGLDATAYFHCDAQTYAGASHVCEVEVDPATGAIEIVRYVAAQDSGRIINPQLAEGQVHGGVVHGIGNALFEWMGYDAAGQPLSTTFAEYLLPTAPEVPPIEVVFQPSPTPLNPLGVKGVGECATIPVAAAVVGAVEHAVAHCGVRVTEFPLTPVRLLELLTQAEARAAAPTDSGEFVDGVH

SEQ ID NO: 3243 - protein, 931 aa, Streptomyces cinnamonensis
MRRSTDMDLPIRLNGRLVSEPPAPGQCLRTYLRERGCFGVKKGCDSGDCGACTVHVDGMAVHSCLYPAVRASGRVVTTVEGLTEGGPLHPVQQAFAATQAFQCGYCAPGFVMTTAARDDNQTTGLSETLKGNLCRCTGYRRIEEAIQSTQQGQPADESATTAAGDASAAGLTDTEGVVTGRARFTLDHPDPVGLLHVKLVRSPHQHALITAIDSADALAVPGVHTVLTHHDAPTIRFSTALHEYADEDPADTRVLDDVVRHVGQRVAAVVAGSEAAADEGCRRVRVTYRILPAVTDTDHALSPDAPHVHPGGNIVDELHTATGDFDAALAEADHSYEGTFRTHRVQHCALETHATRAWEDSTGRLHVHTTTQAPHLTRRLLGAVFGLPLERVQVTAARLGGAFGGKQEMLTEDIAVLATLRTGRPVQLEYTRAEEFTATTRHPFKIRVRIAAHRDGTLTALGLHVLCDTGAYGNHGPAVLRRACTETLSLYHCANIVVDGWALYTHSVPAGAFRGYGIGQVAFAVESALDELARTAGLDPLALRRKAYLRSGQSAPAVAADGTPPVADHGITGCLDIIEAARARHKAASPALPDPSWLVGEGMAVTVTHTLPSDGHVAQATATLRADGTYDLCTGAPEFGSQATTVHRRIAAAALATTVDRIHVRQGDTDLLSHDTGGFVSTGSTLAARAVHEACHRLHTAVLEAAAAHTATAPGNCRLRQDAVDCDGRLLPLPVLYRTLCEAGHELTATASHCADSGAPGLASNAQWIRLAVAPDTGLVTLLHSVHASDAGTVLDARQLRGQIEGAIAQGIGTTLMEELRTDRHGRVITQELRTYPIPHAADVPHTDVHFVPASSPGELQAAKPASEAAFNPVAPALANALRDATGIRCTNLPLRADTIWAQLNAHAPHLRGERTAPDHPSPASETPAGG

SEQ ID NO: 3244 - protein, 513 aa, Streptomyces avermitilis MA-4680
MHVHHGARRPGATRVTLLTEGTYPHSHGGVSVWCDQLVGGMPDIDFDVIAVTGTGREPIVWDIPGHVSRVAAVPMWGPAPEGRAPRGRRRNRLASAYEQFLTALLDPCAEDRFGTALYVMARAAADGMLSPFLRGDRAISILTAVWNRPGLAVREARPTLHDAITATALLEHALRPLATPLPRDGVAHAVSGGVAALPGLAALERHGVPLLVTEHGVYLRERYLGYRTAPYRWPVKAVVLGFFRLLAEETYLRAALITPGNRYNRLWEEQGGADPESIRTVYNGVDPAAFPPAGPEPDAPTLSWAGRVDPIKDLETLIRAFALVRSQLPEARLRLFGGTPRGGEAYRERCEALAAELGHAEAVTFEGRVDDIKDAYAAGNVVMLSSISEGFPFTLIEAMSCGRATVSTDVGGVREAVGDTGLVVPPRDPAAMAAAALKLLGDPERRRSMGEAARLRVIEQFTLRQTVDTFRSIYLELSAPGRTTRRDPWTPDADAGLSTTAGPAAARMGSLAG

SEQ ID NO: 3245 - protein, 433 aa, Frankia sp. CcI3
MTTRTTGPRQAAAGPDGGSPPHVLRLTPYYFLADRELTHRELQYEPIGGMQVQIMQTTEQMSALGVRQSVLLPRRPGMPRSLMLDPRTRLELLTLPVAPIPTRSKGYIGLLVSWGLAVVVACVGKRLRGTRRQYSLIHVHCSELPWTFLFAVLARLLLGRPLVLTVHCSAIATFHPETPLGWVLIGPARFFERHAVRRADAVVVLTDRVRRAYLERGLTGPDRVHVVTDGVHLADFQRPGAEAPSEPPSEPPVVLYCGRFAPEKGWADFVDAAALIVAKGVPARFVMCGDGNELERCRARARRLGIADRIELPGHLDRSRLPDVVREAAVVVIPSRHEEMGGTVIEAMAAGRPVVVTDVGGLPTVVGHGMAGIIVPPCDPPALAEAVAELLDSPQRCARLGAAGAHRARQFDQESVTRRLLDVYRLVLAHSRG

SEQ ID NO: 3246 - protein, 721 aa, Mycobacterium smegmatis str. MC2 155
MTAPQATPALAGRAVPRVDGRLKVTGQARYAADAEVPDALFAVLVGATVARGAVDAVHTDAARRAPEVVDVITDFDGLTLKYDPQQVCAFGQAVAVVVATTLEAATHAASLVAVRYSTQPQLTDMDAPDASDQNPTPTRDYSRGDADAALRGSAVVTDLRCSMERNNHNPMEINAVVARWEGDRLTVWDKVQSVSGARQQYADALGVPAENVRVISPFVGGAFGNAGQVWPHQAIAAHVARRVGRPVKLMLTRRHLYAVTGYRPRNRQRLAIGADRSGRITAIVHEGAVEVSRYSPYVDNVTGAASYMYQAPNMRSALRTVELDVHPGNQMRGPGHLSGNFALESAMDDLAHRLAMDPIELRVRNEPTRDQTDNLPFSSRRLTECLRSGATAFGWSRRNPVPRSVREGRQLIGLGVSAASFVTLVSPCAASARVRNDGTVEILCGASDIGPGTYTAMSQVGADALGVALHRVRFQLGDSALPVAPAQTGSRLMASAGSSIHNVGMMLRDRFVRMAVTDPGSPLHGLAPADVEVADGRMAARGEPARGERYEELLRRRRLDELSAELEWTPDGPHDRFSMHSFGAVFAEVAVDEALGTVRVRRMFASYDAGRIVNPMLAHSQAIGGMVMGIGAALLEATHLDHRDGRIVNANMSDYLVPVNADVPDLDAEFLPGEDLIADPIGVKGIGELVVVGIPAAVANAVFNATGRRVTDLPITLDKLM

SEQ ID NO: 3247 - protein, 215 aa, Triticum aestivum
HEARSSRATRLVARAGGVDDLPLVGNKAPDFEAEAVFDQEFINVKLSDYIGKKYVILFFYPLDFTFVCPTEITAFSDRYEEFEKLNTEVLGVSIDSVFSHLAWVQTDRKSGGLGDLKYPLISDVTKSISKAFGVLIPSQGIALRGLFIIDKEGVIQHSTINNLAIGRSVDETMRTLQALQYVQENPDEVCPAGWKPGEKSMKPDPKGSKEYFAAI

SEQ ID NO: 3248 - protein, 220 aa, Oryza sativa
MPGLTIGDTVPNLELDSTHGKIRIHDFVGDTYVILFSHPGDFTPVCTTELAAMAGYAKEFDKRGVKLLGISCDDVQSHKDWIKDIEAYKPGNRVTYPIMADPSREAIKQLNMVDPDEKDSNGGHLPSRALHIVGPDKKVKLSFLYPACVGRNMDEVVRAVDALQTAAKHAVATPVNWKPGERVVIPPGVSDDEAKEKFPQGFDTADLPSGKGYLRFTKVG

SEQ ID NO: 3249 - protein, 324 aa, Pseudomonas syringae pv. syringae B728a
MSRIYADNAHSIGNTPLVQINRIAPRGVTILAKIEGRNPGYSVKCRIGANMIWDAESSGRLKPGMTIVEPTSGNTGIGLAFVAAARGYKLMLTMPASMSIERRKVLKALGAELVLTEAAKGMKGAIAKAEELLAGNPGKYFMPAQFENPANPAIHEKTTGPEIWADTDGAIDVLVAGVGTGGTITGISRYIKHTEGKPILSVAVEPDGSPIITQAMAGETITPSPHKIQGIGAGFIPKNLDLSIVDRVERVTDEESKAMARRLMQEEGILCGISCGAAMAAAVRLAEKPEMQGKTIVVVLPDSGERYLSSMLFSDLFTDQELSQ

SEQ ID NO: 3250 - protein, 156 aa, Cupriavidus taiwanensis
MTRFQVNGQPKDVDVPGEMPLLWALRDELGMTGTKFGCGMALCGACTVHVDGTAIRACVTPVSAVAGRSVATIEGMESDRVGQAVQQAWIQHNVAQCGYCQAGQIMTAVSLLKTTPAPTDRQIDEAMSGNICRCGTYPRIRAAIRQAAGRLAQGGQ

SEQ ID NO: 3251 - protein, 415 aa, Corynebacterium efficiens YS-314
MEIIRRMRVAIVAESFLPNVNGVTNSVLRVLEYLAANGHEALVIAPGAREFEEEIGEYLGFEIVRVPTVRVPLIDSLPIGVPLPSVTTVLREYNPDIIHLASPFVLGGAAAFAARQLRIPAIAIYQTDVAGFSQRYHLAPLAAASWEWIRTVHNTCQRTLAPSSMSIDELRDHGVNDIFHWARGVDSTRFHPSKRCGELRRSWDPTGSKKVVGFVGRLASEKGVERLVSLSGRKDIQLVIVGDGPEAKYLREMMPDAIFTGALGGEDLARTYASLDLFVHPGEFETFCQAIQEAQASGVPTIGPRAGGPIDLIDDGVNGLLLDVVDFKEKLPAAAEWILDDSRHRTMRLAAREGVRHKSWDALCEQLFQHYTDVIALSRRVPLTFFGPNAEVTRMPQWVARMLGVRAEIPVRVDV

SEQ ID NO: 3252 - protein, 91 aa, Triticum aestivum
QCFTGTLQGEELSQAYASGDVFVMPSESETLGFVVLEAMSSGVPVVAARAGGIPDIIPEDQEGKTSFLYTPGDVDDCVGKVELLLLLLPPP

SEQ ID NO: 3253 - protein, 310 aa, Staphylococcus aureus subsp. aureus Mu50
MAQKPVDNITQIIGGTPVVKLRNVVDDNAADVYVKLEYQNPGGSVKDRIALAMIEKAEREGKIKPGDTIVEPTSGNTGIGLAFVCAAKGYKAVFTMPETMSQERRNLLKAYGAELVLTPGSEAMKGAIKKAKELKEEHGYFEPQQFENPANPEVHELTTGPELLQQFEGKTIDAFLAGVGTGGTLSGVGKVLKKEYPNIEIVAIEPEASPVLSGGEPGPHKLQGLGAGFIPGTLNTEIYDSIIKVGNDTAMEMSRRVAKEEGILAGISSGAAIYAAIQKAKELGKGKTVVTVLPSNGERYLSTPLYSFDD

SEQ ID NO: 3254 - protein, 377 aa, Trichodesmium erythraeum IMS101
MKIALFTETFLPKIDGIVTRLCHTVENLQRFGDRVLIFSPAGGLKEYQGSPICGIEGFPLPLYPELKLAIPTPTIGEKLEQFQPDIIHVANPAVLGLGGLFYAKKLNIPLVASYHTHLPQYLHHYGLGMLEGLLWELLKSGHNQADLNLCTSTVMVEELRNHGIERVDLWQRGVDTELFQPHYANLEMRNYLSQGKPNNKIILYVGRLGVEKEIDRIKPIVEAIPNTCIAIVGDGPNRQNLEQYFANTPTHFVGYLRGQKLASAYASADAFIFPSRTETLGLVLLEAMAAGTPVVAANSGGIPDIVTNGINGYLFDPDDEKGAITATQKLFAHSEERETLRKNARAEAERWGWSAATQQLRNYYQKIISAHSIALAA

SEQ ID NO: 3255 - protein, 386 aa, Bacillus sp. SG-1
MKLKIGITCYPTVGGSGVVATELGKLLAERGHEIHFITSSVPFRLNKMYPNIYYHQVEVNQYSVFQHAPYDIALANKMAVVARREKLDILHVHYAVPHAVCAILAKQMADTDLKIVTTLHGTDITVLGYDPSLTEAIRFGIEQSDHVTAVSHALVDQTYSLIKPDKDIETVYNFIDERVYRKVDSEHLKRDYGILPHEKVIIHVSNFRAVKRVEDVVQTFSRIVEHIPSKLLLVGDGPEMTVICQLVKELGLKDKVLFLGKQDSLEELYSLSDLMLLLSQKESFGLVALEAMACGVPCIGTDVGGIPEVIEDGVNGYVCPLGDVETISKKAVSLLNSHDLYKQYSENALETARTKFHWSKIVGQYEQIYRKLAAERIGDEDASNSL

SEQ ID NO: 3256 - protein, 70 aa, Capsicum annuum
CQNGQGGNNKSTAVEQRPRRMALDVSPFGLLDPMSPMRTMRQMMDTMDRLFEDTMTFPGRNRASGSGEIR

SEQ ID NO: 3257 - protein, 316 aa, Haemophilus somnus 129PT
MTIYADNSYSIGNTPLVRLKNFGNNGNIIAKIEGRNPSFSVKCRIGANMVWQAEKDGILTKDKEIIDATSGNTGIALAYVAAARGYKITLTMPETMSSERKRLLRGLGVNLVLTEGVNGMKGAIAKAEEIVASNPNHYVMLKQFENPANPAIHQQTTGPEIWSGTEGKIDVLVAGVGTGGTISGISRYIKQDQGKKIITVAVEPEESPVITQTLAGEETKPGPHKIQGIGAGFIPKNLDLSLVDQVEKVSSETAIITARRLMAEEGILGGISSGAALAVADRIAQRPEFSDKLIVVILPSASERYLSTALFDGFEG

SEQ ID NO: 3258 - protein, 187 aa, Acinetobacter sp. ADP1
MSLINTEVKPFKATAYHNGQFVEVTEADLKGKWSVVFFYPADFTFVCPTELEDLADNYAEFQKLGVEIYGVSTDTHFTHKAWHDTSEAIKKIQYPLVGDPTWTLSKNFEVLIEAAGLADRGTFVIDPEGKIQIVEINAGGIGRDAQELLRKVKAAQYVHSHPGEVCPAKWKEGEATLAPSIDLVGKI

SEQ ID NO: 3259 - protein, 376 aa, Nostoc punctiforme PCC 73102
MRIALFTETFLPKVDGIVTRLRHTVDHLQRSGNQVLVIAPDGGITEHKGAKVYGITGFPLPLYPELKMALPRPAIGYALEEFKPEVIHVVNPAVLGLAGIFYSKILKIPLVASYHTHLPQYLQHYGLGMLEGFLWELLKGAHNQAALNLCTSTAMVEELTGHGIERVDLWQRGVDTELFHPDLANVEMRSRLSQNHPESPLLLYVGRLSAEKEIERIKPILEAIPEARLALVGDGPHRQALEKHFAGTNTYFVGYLMGQELGSAFASADAFIFPSRTETLGLVLLEAMAAGCPVVAARSGGIPDIVTDGVNGYLFEPTEDVKGAIAATVRLLEQKEQRDIIRQNARQEAESWGWAAATNQLQDYYQKIIFSEQLAK

SEQ ID NO: 3260 - protein, 189 aa, Thiobacillus denitrificans ATCC 25259
MLTLTLGLLAGLLLLASAVMWMRRPRGQAVEGGAAPDFALRDQNGLTRSLGDYAGRWLVLYFYPRDDTPHCTREACAFRDARATLEERGASVLGISVDTSARHADFARKHDLTFPLLADTEGGIARAYGSALDLGFTRLARRKTFIIAPDGRIAARFDAVDVATHADEVTRTLDALRRAWSYPTAPPAR

SEQ ID NO: 3261 - protein, 148 aa, Zea mays
MSQTGEVQVPLLQTEEADGEWSSKPRRIALFVEPSPFAYISGYKNRFQNFIKHLREMGDEVLVVTTHKGAPEEFHGAKVIGSWSFPCPLYQNVPLSLALSPRIFSEVNKFKPDIIHATSPGIMVLGALAIAKMISVPMVMSYHTHLPA

SEQ ID NO: 3262 - protein, 168 aa, Nocardioides sp. JS614
MSTTPEERLDVSMTINGSRYRATVEARRTLADFIREDAQLPGTKLGCEHGVCGACTVLLDDLPARSCLTLAVQAEGRQIRTVESLADGQELNHLQRAFREQHGLQCGFCTAGFLMTATALLEENATPTREEIVETMSGSLCRCTGYQTIISAIEQAAAEGQSDTEDDQ

SEQ ID NO: 3263 - protein, 162 aa, Methylobacillus sp. KY4400
MSERISLTMQVNGQPYPMEIDPRVTLLDALPEHLNLTGTKKGCDQGQCGACTVLVNGQRVLSCLTLAAQADGAEVTSIEGLQSASGELHPVQRCFVENDAFQCGYCTPGQIMSAVACIKEGHAGSDDEIREYMSGNLCRCGAYPHIIDAIKQAAAEMAKESA

SEQ ID NO: 3264 - protein, 801 aa, Nocardioides sp. JS614
MKKLDSHQHMKTPVVAARSVGTRVLRSEDPRLLTGRGEFIADIDLPRQLHVAFIRSPVAHARITNLDLSAIRDADGVALAWSGKDVAPFCEGLVGEMAVEGCFPTTMPLLAGDEVVYVGEPVAVVVADSRYAAEDACELIDWDFDELPAVTNVDAAAGGGPVANPQLPDNIGLNGGASFGDVSGAFEQAHQVVEGRFYTCRVSAAPMETRGVIADYEWASKALRLWSNTQMPHYLKYMLTAYLGFPEQSVEVITPDTGGGFGLKAHVYPEEMLLPLIAREVGRPVKWIEDRRENLIAGAHAHEQYVDIAYALDADGKITGVRTHALGDGGAYHLPPWSMAVEPWCAAVMTPTGIYDVPAVEYTYKAAATNKTPVGAYRGVGYMAGTFARECLADDAARALRMSPFDFRRHNVVREFPWTNPQGIVYQEGSWLQTIDALEEMVDYPAFLRRQTELRKEGRYIGLGLSCFVESSGESTATSLEHGLGDVYHDTATVRLNPNGTANVTIGLSAQGQGLATTMAQMAADTLGIKVEDVSVQTARSTSHAYGSGTLGSRGAVVAGGAVSRAADVVREKVRQVAAHMLEASTDDIELVDGLASIKGISDASLSIADVATAIYFDLDSWPEDFEPTLEATQAYDPSQAMFSNGGHAIMVELDAETGFVRFEKIFSVEDCGTVINPNIVEGQIRGGVIQGIGASVFEELAYDESGQILTTTFLDYGLPTMDVAPPFEINHLETPSSHSASGVKGMGESGLIAAPAAVLNAVNDALSPFGVVLRDLPLTPEKVLGAMSGAKVATGLAERS

SEQ ID NO: 3265 - protein, 400 aa, Verrucomicrobium spinosum DSM 4136
MKALFLTNEYPPHIYGGAGIHVQYLTRELSRLCDVEVRCFGDQNDNLNPRLHARGFGLDSSKWTCPKPLASVFGALQRGLDFNTSDIDANLVHLHTWYSHFGGIVAKLNYGIPMVLTTHSLEPLRPWKREQLAGGYDFSVWVEKTAIEMADAVIAVSQETKVDVLRFFDADAKKIHVIHNGIDPEEYQKVHAPDTLRKHGVDPDKPILLFVGRITRQKGIIHLVRAIEKMDPGFQVVLCAGAPDTPEIAAEMKHAVADAQAKRDGVIWIQAMLPVEEKIALYSHADLFCCPSIYEPFGIINLEAMACETAVVASAVGGIKEVVLPGETGILVPLLQQCESPYEAEHPAQYAKDLAEAVNRLMADQSLRDRMAKAGRQRAVEHFSWRAIAEKTLDLYQSLL

SEQ ID NO: 3266 - protein, 775 aa, Methylobacillus sp. KY4400
MSEVNHDARQAKHIPEATAGDTATAEAGSPIEGLGAARSRGDGRVKVIGEARYAIEHQPENPLYGVVLQSTVASGRISRLSAEKALQADGVLAVYTHLNPLKINKPTAIADGGAAQSTYTPIQDDVIIHNGQNIGIVIAETFEQATWAASLVEIEYETTPARVFATDEGVEAKPMSAQDIDLGDAATAMHSAEVRINQRYTTPREYNMPMEPHACIAHWHEGQITVWEPSQWVAGAQVEIAEWLGIETEKVRIISPYVGGGFGSKPVPYTHVALASVASRALNRPVKVSLTRPQTFTGLGGRPATSQQLELGASRDGKIEAIIQRSFSETSLIDVFAENCSKVTARMYAVSNVSAQHQVRLINTVTPGWMRAPGENPSAFGLEVAMDELAYALDIDPLELRLRNWADKDYQLDLPWSTRRLKEAYQKGAEAFGWDKRIMTPRSMREGRELIGWGMASGTYPVNRLPAEAKIILTPQGRFVVQCAGADIGTGTYTILAQTAADHLGVGSETIEVELGDTALPRAGVAGGSQLAGNLTAAVNDTAKKMRERLLALASELPASPLSGLPVSQFTLQDGAIQHSGGSGLSLAQLATLAPPDSLSVKGGTFPDDMPQSERDKIVRNLNDMSRPEAFSAHSWSAQFVEVRVDEDFGTIRVKRMVAALDSGRLYNPKLARSQWIGGMIMGVGQALMEEGIVDPRNGRVINNNLADYLVPVNGDIPSITTINVGEPDFEATTMGGKAVGELGIVGVAAAISNAVFHATGKRVRGLPITLDKII

SEQ ID NO: 3267 - protein, 418 aa, Chromobacterium violaceum ATCC 12472
MNVQSNPFLFESAALSHLPGFGAVRSTQLAGYLSVGDSAGGWLYFCFSEAGDHPEQAPLLVWINGAPEWSALDALLDEHGPYLLDPSGRIYSNPFGWHHHVNLLIIEQPLGHGLSFTTHPRYLPESHDEASLQLYHALQEFLLRWPRYRERDCYLFGNAAATHTIARLAHRVLDGNSGGQPQISLKGLGLGNAQLAPDIQLPSHIDYAYQHRLINLDERNHAQAGLDEFNRAHASPIALQQQSAGRIAVGIERYIQQCCGRDLHDIRHPPQKPSKALSEYLKKPSVQQALHIDPRSNNELQPHSSLMTEAIWQESSSHLLPMLLDQLKVLFFHGECCMTGNYLGLDAWFNTQSWSQADAFRRQKRQAWRPYGLAAGLIRSHGNLSQIIIQNAGLRVARDQPAAAQAMLRDFLAGDAPQ

SEQ ID NO: 3268 - protein, 290 aa, Lentisphaera araneosa HTCC2155
MDFTDLIGKTPLLELKNLSPNKKVKVFAKLEGNNPGGSVKDRAAFYMISDAEMQGTLKPGMKIIEATSGNTGIALSMIASVKGYEIELAMPENSTQERVDAMKAFGAKVTLTESMETAIDYAKSKVEEGGYVMLNQFGNKANPEAHYRGTAPEIWAATQGQVTHFVSSMGTTGTIMGTSRYLKERNPNIQIVGCQPADGAKIPGIRRWPKEYLPTIYEEDRVDKIYDIRQEDAEEMMRQLGRQEGVFCGISSGGSVWAAIELAKTLEEGLIVAIVCDRGDRYLSTGLFGQ

SEQ ID NO: 3269 - protein, 769 aa, Thauera aromatica
MSPKLPQHGTVGVRTPLVDGVEKVTGKAKYTADIAAPDALVGRILRSPHAHARILAIDTSAAEALEGVIAVCTGAETPVPFGVLPIAENEYPLARDKVRYRGDPVAAVAAIDEVTAEKALALIKVDYEVLPAYMTPKAAMKAGAIALHDDKPNNILREVHAEFGDVAAAFAEADLIREKTYTFAEVNHVHMELNATLAEYDPVRDMLTLNTTTQVPYYVHLKVAACLQMDSARIRVIKPFLGGGFGARTEALHFEIIAGLLARKAKGTVRLLQTREETFIAHRGRPWTEVKMKIGLKKDGKIAALALEATQAGGAYAGYGIITILYTGALMHGLYHIPAIKHDAWRVYTNTPPCGAMRGHGTVDTRAAFEALLTEMGEELGIDSLKIRQINMLPQIPYVTMYAQRVMSYGVPECLEKVKAASGWEERKGKLPKGRGLGIALSHFVSGTSTPKHWTGEPHATVNLKLDFDGGITLLTGAADIGQGSNTMASQVAAEVLGVRLSRIRVISADSALTPKDNGSYSSRVTFMVGNASISAAEELKGVLVKAAAKKLDAREEDIEVIDEMFMVSGSQDPGLSFQEVVKAAMVDSGTITVKGTYTCPTEFQGDKKIRGSAIGATMGFCYAAQVVEASVDEITGKVTAHKVWVAVDVGKALNPLAVEGQTQGGVWMGMGQALSEETVYDNGRMVHGNILDYRVPTIVESPDIEVIIVESMDPNGPFGAKEASEGMLAGFLPAIHEAVYEAVGVRATDFPLSPDRITELLDAKEAAA

SEQ ID NO: 3270 - protein, 682 aa, Sulfolobus tokodaii str. 7
MKLREHYSIITGKSVYTDDINFPDMLYLGVVRSTYARAIVKSYTEPSGVELFLDWNKVKTYMPVRPDPRAKNIVKMPVVSDGRVNFVGQPIVAFVVKDRYEIEDKIDEVAVDYDPLSPVLTIDESLKNEEKIHTNGNIAIDLDLSGGEVEKRLTAEVTVEREILQDRIVVNPMEPKGVIANFDGDKLYIIGSFQSSFRIRSDLQEALGLPPEKIIVKSAPNVGGGFGNKVPAHPEYVLAAIASMILRKPVKWIETRREHLTNPTQGRGVKSKVKLYGKRDGTILGLEGEVIVDLGAYAYTINTTTPAFIAGLLNGPYKMRFMKIRALGVYTNKPPTGPYRGAGRPEAALITETLVEDFAEAIGMDSVEVRKKNFLDGEFITPLGIKIDKADYTGLIERGEKIYRSLKEKYKDKGIALIAFTEVVRASPGEGAKIRVGKGKVELFVGTGPHGQAHQSTFALLASEVLGLPPEKINVTLNDTENVKEGIGSFGSRSAAAGGSAVIEVCKGLLEVLKKKGKTLEEAINSDEYTEVETFYKTSDIYTPGVHIAVVDIDETYKPRVVEYYAIDDVGRAIIKDEVEGQIVGGILQGISQVYLEWAPYDENGNPIYASIAEAGVPTSLESDYKLTLEFVETPANLPSGARGVGEAGTTGALPATFIALEKLLKRKFNKTPILPSELITP

SEQ ID NO: 3271 - protein, 303 aa, Escherichia coli
  misc_feature (41)..(41): Xaa can be any naturally occurring amino acid
MSTLEQTIGNTPLVKLQRMGPDNGSEVWLKLEGNNPAGSVXDRAALSMIVEAEKRGRIKPGDVLIEATSGNTGIALAMIAALKGYRMKLLMPDNMSQERRAAMRAYGAELILVTKEQGMEGARDLALEMANRGEGKLLDQFNNPDNPKAHYTTTGPEIWQQTGGRITHFVSSMGTTGTITGVSEFMREQSKPVTIVGLQPEEGSSIPGIRRWPTEYLPGIFNASLVDEVLDIHQRDAENTMRELAVREGIFCGVSSGGAVAGALRVAKANPDAVVVAIICDRGDRYLSTGVFGEEHFSQGAGI

SEQ ID NO: 3272 - protein, 150 aa, Alkaliphilus metalliredigens QYMF
MMKINVTVNDEQLEMEVGYDEFLVEALRRYGFNSVKRGCDTGCCGLCTIWINDQPTLSCSSLAVRANNQKITTIEGLQEEATDFAKVLVKEGAEQCGFCSPGFIMTILAMKRELKNPTEEEIIHYLTGNLCRCTGYLGQLRAVKKYMGVV

SEQ ID NO: 3273 - protein, 956 aa, Escherichia coli CFT073
MIIHFTLNGAPQELTVNPGENVQKLLFNMGMHSVRNSDDGFGFAGSDAIIFNGNIVNASLLIAAQLEKADIRTAESLGKWNELSLVQQAMVDVGVVQSGYNDPAAALIITDLLDRIDAPTREEIDDALSGLFSRDAGWQQYYQVIELAVARKNNPQATIDIAPTFRDDLEVIGKHYPKTDAAKMVQAKPCYVEDRVTADACVIKMLRSPHAHALITHLDVSKAEALPGVVHVITHLNCPDIYYTPGGQSAPEPSPLDRRMFGKKMRHVGDRVAAVVAESEDIALEALKLIDVEYEVLKPVMSIDEAMAEDAPVVHDEPVVYVAGAPDTLEDDNSHAAQRGEHMIINFPIGSRPRKNIAASIHGHIGDMDKGFADADVIIERTYNSTQAQQCPTETHICFTRMDGDRLVIHASTQVPWHLRRQVARLVGMKQHKVHVIKERVGGGFGSKQDILLEEVCAWATCVTGRPVLFRYTREEEFIANTSRHVAKVTVKLGAKKDGRLTAVKMDFRANTGPYGNHSLTVPCNGPALSLPLYPCDNVDFQVTTYYSNICPNGAYQGYGAPKGNFAITMALAELAEQLQIDQLEIIERNRVHEGQELKILGAIGEGKAPTSVPSAASCALEEILRQGREMIQWSSPKPQNGDWHIGRGVAIIMQKSGIPDIDQANCMIKLESDGTFIVHSGGADIGTGLDTVVTKLAAEVLHCPPQDVHVISGDTDHALFDKGAYASSGTCFSGNAARLAAENLREKILFHGAQMLGEPVADVQLATPGVVRGKKGEVSFGEIAHKGETGTGFGSLVGTGSYITPDFAFPYGANFAEVAVNTRTGEIRLDKFYALLDCGTPVNPELALGQIYGATLRAIGHSMSEEIIYDAEGHPLTRDLRSYGAPKIGDIPRDFRAVLVPSDDKVGPFGAKSISEIGVNGAAPAIATAIHDACGIWLREWHFTPEKILTALEKI

SEQ ID NO: 3274 - protein, 161 aa, Thauera aromatica
MKNILRLTLNGRAREDLVPDNMLLLDYLRETVGLTGTKQGCDGGECGACTVLVDDRPRLACSTLAHQVAGKKVETVESLATQGTLSKLQAAFHEKLGTQCGFCTPGMIMASEALLRKNPSPSRDEIKAALAGNLCRCTGYVKIIKSVETAAAARLCEEGAR

SEQ ID NO: 3275 - protein, 769 aa, Alkaliphilus metalliredigens QYMF
MKIVNQSITKIDGMDIATGKPVYTDDLVNVKALVVKILRSPHAFAKIKSIDVEKAKKRSGVACVLTHQDVPNQRFTMAGQSYPEPSPYDRLVLDEYVRYVGDEVAIIAAVDERTAIEAMKMIKVEYEILEPVLNFEEAIGHPSVIHPEENLEVNFDIGMKREKNIAATVLIENGDMEEALKNSPVIVEETYYTQAQAHGMMETQRAFTYLDVSGRLTIVTSTQIPFHVRRIVANALEIPKSKVRVIKPKIGGGFGGKQNASVEVFPAIVTLKTGKPAKIIYDRKENLGCTSSRHAMKIKVKLGADHEGNIKAVDMEALSDTGAYGEHASTVLGVAGYKTLPLYNTAKAVRYSGEAVYTNKMPAGALRGYGVTQGIFALESAINQLADQLNMDPAEVREKNLIKQGETNPILSGSKAGEPGKLDSCTLDRCIEKGKELIGWKEKYPSQRVSDTKVRAVGMAITMQGSGIAGIDTAAVTIKLNDDGLYSLLIGATEMGMGSDTILTQMAAETLEIGMDKFIVHGIDTDLSPYDTGSYASSTTYVTGNAVIKAAEDLKGKMMRQASGMLGVPLKGLRFKGDTIGVINHPDKQVSLNEIAADVGAGEGKQEQLMGSGTFGGDKSPPPFIAGFAEVEVDLETGKIVLIDYVAVIDCGTVINPNLARIQAEGGLVQGIGMAMYEDVLYDKAGRMMTNSFMQYKIPCRKDINKITVAFEPSYEPTGPFGAKSIGEVVINTPPPAIAHAVFNATGVYVRNLPITPEKVVKGMMESSK

SEQ ID NO: 3276 - protein, 564 aa, Oryza sativa Indica Group
MAVVETKQLDDNALLMSLAEKGLALKTGASSPSAHHHTVLCDAVVVGSGCGGGVAAAVLASAGYKVVVVEKGDYFAARDYSSLEGPTMERLYENGGVFSTANVTTTMFAGATVGGGSAVNWSACIRTPANVLQEWSNDHGLPLFGGQGYVQAMDAVCARLGVTGRCREEGFQNKAVRRGCEALGLRVEAVSRNSSEGHFCGSCNLGCPTGEKRGTDTTWLVDAVGRGAVILTGCKAERFILETNTGGGGGRRKKCVGVVAKCLGNGITKKLRIEAKVSVSACGALMTPPLLRNSGLKNRHIGRNLHLHPVSMAWGYFPDSTAELPGKSYEGGIITSMHRVTDRTIIETPALGPGAFAAVVPWESGRDMKERMRRYARTAHAVVLVRDRAAGTVGGEGRVRFTPSRGDAGELRAGLRRALRILVAAGAAEVGTNRSDGLRLRCKGARDEDVEAFLDEVSVEKGPMHPGSDKWALLASAHQMGSCRMGRSAKHGGVDGGGESWEAEGLYVCDGSLLPTAVGVNPMITIESVAYCVAKGIAESLASRAARSVENRDVSTNPPLACES

SEQ ID NO: 3277 - protein, 159 aa, Oceanicola granulosus HTCC2516
MSDVTINVNGTDRSATVEDRTLLVDFLREALGLTGTHVGCDTSQCGACTVILDGKAVKSCTVLAVMAEGSEVRTIEGLAEGDELHPVQAAFCKHHALQCGFCTPGMIMAAVNILERHGPDIDEALVRHQLEGNLCRCTGYHNIVKAVLDAAQQTRIAAE

SEQ ID NO: 3278 - protein, 322 aa, Prochlorococcus marinus subsp. pastoris str. CCMP1986
MEIAGDITSLVGKTPLVKLDRIKKYCNCHPEIIAKLESFNPSASVKDRIAYSMLNSAEKDGLILPGKTTLIEATSGNTGIALAMVAAAKGYRLILTMPDTMSIERRAMLRAYGAELQLTPGKEGMNGALDLASELSSSIPNSFQFNQFENLANPEIHERTTAKEIWDQSNQTIDGLVSGVGTGGTITGCSRFLKKVNPNCKIYAVEPAKSAVISGEKAGSHSIQGIGAGFVPKVLDTHLIDEIFKIDDEEAFYYGRLLARLEGLLSGISSGAALAATIKIGQRKELINQRLIVILPSFGERYLSTAMFESNTAIKARKDGYL

SEQ ID NO: 3279 - protein, 219 aa, Solibacter usitatus Ellin6076
MSLRINSEAPNFTAETTQGPINFHEWIGDGWAILFSHPKDFTPVCTTELGYMAGLAPEFAKRNVKIIGLSVDPVTNHGKWAADIEETQGHAVTYPMIGDPELKVAKLYDMLPEDAGTTSEGRTAANNATVRTVFVIGPDKKIKLMLIYPMTTGRNFDEVLRVIDSMQLTAKHQVATPVNWKPGDDVIIVPAVSDDDAKKKYPEGFKTIKPYLRTVAQPK

SEQ ID NO: 3280 - protein, 456 aa, Xylella fastidiosa Ann-1
MVIHSSVLELIGNTPIIKAQRLDTGLCDLFLKLESANPGGSIKDRVGLSMIEAAECRGHIKPGATLVDGAASTTSMGLAFVARQKGYRLILVVPDNMAWEKISNLKAMGAEVILTRSDVSKGHPEHYQDLAEKLAAETPGAYFINQFGNADNPAAHEFGTGPEILKQMGGHVDAVVLGCDSAGTITGLSRAFDSVASDVELILADPVGSILTQYINEGTRSDRSGTWLVEGIGSDCLPPISDFRRIKKTYAISDAESFHTARELLSKEGILGGSSTGTLLAAALKYCREQIERKRVLVFVCDTGNKYLLNMYNDDWMLDNGFLKRPHYGDLRDLILHPYNQRHTVVVDPNDLLTVAYQRMKRYGVSQLPVIEGRQLVGILDESDVLLHVYGDETRFCDPVSTAMVSKLHRLDVKSPIEALLPVFERGQVAIVMEDDQFLGLITRIDLLNYLRRRMQ

SEQ ID NO: 3281 - protein, 316 aa, Haemophilus ducreyi 35000HP
MTIFADNSYTIGNTPIVRLKHFGQNGNLLVKIEARNPSFSVKCRIGANMVWQAEKDGILTKDKEIVDATSGNTGIALAYVAAARGYKITLTMPETMSDERKRLLRGLGANLVLTESTLGMKGAIAKAEEIFASDPNRYIMLKQFENPANPAIHQQTTGPEIWQATEGKIDVIVAGVGTGGTITGVSRYIKQDKGKQIISVAVEPKESPVITQTLNGEEVQPGPHKIQGIGAGFIPKNLDLTLIDRVEQVSSEEALKIAHQLMAKEGILVGISSGAAVAAADRLAKLPEFADKQIVAVLPSASERYLSTLLFEGIEI

SEQ ID NO: 3282 - protein, 300 aa, Vibrio vulnificus CMCP6
MSNGKVLAKIEARNPSFSVKCRIGANMIWEAEKEGKLKPGVELVEPTSGNTGIALAFVAAARGYKLTLTMLESMSLERRKLLKALGANLELTEAAKGMKGAIAKAEEIVASNPEKYLLLQQFNNPANPEIHEKTTGPEIWEATDGAIDVFVAGVGTGGTITGTSRYIKGEKGKQILSVAVEPTESPVISQALAGEEIKPAPHKIQGIGAGFIPGNLDLSLIDRVEKVTSEEAIEMARRLMEEEGILAGISSGAAVVAANRLAELPEFEGKTIVTVLPSSGERYLSTALFAGIFTEKENQQ

SEQ ID NO: 3283 - protein, 227 aa, Arabidopsis thaliana
MASTLSFAASALCSPLAPSPSVSSKSATPFSVSFPRKIPSRIRAQDQRENSIDVVQQGQQKGNQGSSVEKRPQQRLTMDVSPFGLLDPLSPMRTMRQMLDTMDRMFEDTMPVSGRNRGGSGVSEIRAPWDIKEEEHEIKMRFDMPGLSKEDVKISVEDNVLVIKGEQKKEDSDDSWSGRSVSSYGTRLQLPDNCEKDKIKAELKNGVLFITIPKTKVERKVIDVQIQ

SEQ ID NO: 3284 - protein, 437 aa, Sulfolobus solfataricus P2
MISVAINTQTPPIRFSLTYRDLLEKYGYLEPPIDLNLLSNDDYHISVGGVAKMMLSLIKTRAFSKSRWVSLGPGYPPSVKMEEAEVYFVDLDAKSLANYTRFKEGLYNESHGLSKYNLVGEEYIAYANYNWLSAQKLLEFYNDTDIYFINDFQQLLVGGIIGPSAPAVLWYHIPFVPENLSRKLKEFLIKAFESFDLVILSTKRDLEGLVRTGAKVKVKQIYPFIDPSSYKTVGRKEIQYIEDKYQLKSDDKVILVVARMDPMKSQDLAISAIKNVDAKLVLAGDGSFTSKTLGHDKGSMWVSRLKELARSLGVENKVVFTGYVPDEELFALYQRANVVLLPSRIEGFGLAVCEGWVYGKPAVVSSGAGISELIIEGGNGFVFKSGNIDELAEKLKLALKDEKVGSLGKETVKKCSVSNALNELKEGFEIASEEYKK

SEQ ID NO: 3285 - protein, 581 aa, Oryza sativa Indica Group
MVGSASMVNENSENPYWKAIGYRVEEPRRDRAESMPSPSPSPASRRPLDNGVVETRALTDTTLLRSLAAKGLSVRPGASDEHHTVRCDAVIVGSGCGGGVAAAVLASAGYKVVVVEKGDYFTKEDYSSIEGPSMERLFERGGVFCTSNVTTMIFTGATVGGGSAVNWSASIRTPAGVMQEWSREHGLAVFASPGYARAMDAVCERLGVTDACREEGFQNKVVRRGCDGLGLRADAVPRNSSEGHFCGSCNFGCPTGDKKGTDTTWLVDAVERGAVILTGCKAEHFIVESNGGGGGRSKRCVGLVATCMSNGITKKLRVEAKVSISASGALMTPPLLRNSGLKNRHIGRNLHLHPVSMAWGYFPDNTPEPHIPGKCYEGGIITSMHRVTERTIIETPALGPGAFAALVPWESGRDMKERMRRYARTAHAFALVRDRGAGSVDGEGRVRYAPSRDDAEELRAGLRRALRILVAAGAAEGARDADVEAFLDEVTVEKGPMHSTTDKWSVLCSAHQMGSCRMGASPRDGAVDVAGESWEAEGLYVCDGSLLPTAVGVNPMITIQSIAYCVAKGIADSMAHGKEQR

SEQ ID NO: 3286 - protein, 173 aa, marine gamma proteobacterium HTCC2080
MQININGKAHDLSGADPDMPLLWALRDLLGLVGAKYGCGVAQCGACTVWLDDIPVRSCQLPLGAITGREVTTIEGLAGDALHPVQEAWIAHDVAQCGYCQAGQIMSAAALLKRNPNPSLEAIEGAMAGNICRCGTYTRIVDAIQTASTRLQGLSFYEVGQEVAERQTDGGVSV

SEQ ID NO: 3287 - protein, 331 aa, Gossypium hirsutum
MATASTWILSLKVFLISTGILGIVLGLKISVPLVLEFSVSQAPLWWSGFRSWLKPPYLYVVINGIIITIAASSRFNQNNGEKDQMEQMQPRPKISADQQPMVEYETKSGWDSDAVESSDFVYEENQRGEEVETRVSEEESNVAVKDDRDGNEFVISKSEWIPPSRTDSSEIPLDALLIQEKPAPSSRFGHRKPVKANPEGGRALKAAKPKRHETLENTWKMITEGKSMPLSRHLKKSDTWENHGRDINMEALTSSPLMKKSETFRDRTNYQLPPEQVSSFPASGKLRKEPSLSQDELNRRVEAFIKKFNDEMRLQRQESLNQYMEMVDRGS

SEQ ID NO: 3288 - protein, 322 aa, Photobacterium profundum SS9
MSKIYEDNSLTIGNTPLVRLNRVSNGNVLAKIEARNPSFSVKCRIGSNMIWDAEKKGTLKEGIELVEPTSGNTGIALAFVAAARGYKLTLTMPESMSLERRKLLKALGANLVLTEAPKGMKGAIEKAEEIVASDPSKYLLLQQFNNPANPEIHEKTTGPEIWDATDGEIDVFVSGVGTGGTLTGVSRFIKHQKGKAITTVAVEPTESPVITQTLNGDDVKPAPHKIQGIGAGFIPGNLDLTLIDEVELVSSEDAIAMTRRLMEEEGILAGISSGAAVVAANKIAARPEFAGKKIVVVLPSSGERYLSTALFAGIFTEKENQQ

SEQ ID NO: 3289 - protein, 312 aa, Bacillus halodurans C-125
MKIVNNIAELIGDTPLVRLNRLPNPKGAAVYLKMEMFNPSGSVKDRAAYQMIVQAEKDGYLKPGSTIIEPTSGNTGIGLAMNAAARGYRAILTMPDTMSEERINLLKAYGAEVVLTEGEKKMPGAIEKAHELVREIPNSFMPMQFENSANPDAHRFTTAVEIKKALDSIGKKLSAFVAASGTGGTITGTGEELKKFYPNVEIHVVEPFGSPVLSGGKPGPHKLVGTSPGFVPPILNQDVYDVIDKIKDEDAYEAARNLARLEGILVGPSSGAACYAAMKVAERLAPDEVVVCIACDTGERYLSTDLFDFESQ

SEQ ID NO: 3290 - protein, 310 aa, Neisseria meningitidis MC58
MKIANSITELIGNTPLVKLNRLTEGLKAEVAVKLEFFNPGSSVKDRIAEAMIEGAEKAGKINKNTVIVEATSGNTGVGLAMVCAARGYKLAITMPESMSKERKMLLRAFGAELILTPAAEGMAGAIAKAKSLVDAHPDTYFMPRQFDNEANPEVHRKTTAEEIWRDTDGKVDVFVAGVGTGGTITGVGEVLKKYKPEVKVVAVEPEASPVLSGGEKGPHPIQGIGAGFIPTVLNTKIYDSITKVSNEAAFETARAIAEKEGILVGISSGAAVWSALQLAKQPENEGKLIVVLLPSYGERYLSTPLFADLA

SEQ ID NO: 3291 - protein, 748 aa, Arabidopsis thaliana
MEDVRRRNRGHPLLRSKKRGEGYNHGFSPSQIQSLAVICQTFLPPETTSEQQAVNSFHVASSTQPPFTDEVAEMIVKNGRSEAVKVLRIILMILSFRFGTLLLCGSLCLDKSWPFVLKFSQLPLDKREAILRNWSRQSGFLLPFRITFFLAKFYTLFYFFSQTDENLKNPALEAIGYCIDGTERSSNKKSEADEKRRPLEKGIIETMHESDVTITQSLTEKGVHVARDDGDNVYRIRCDAVVVGSGSGGGVAAANLAKAGLKVLVLEKGNYFTAHDYSGLEVPSMLELYEKGGLLTTVDGKFMLLAGSAVGGGTAVNWSASIRTPDHVLQEWSEGSKIKFFGSQEYQSAMDEVTIRIGVTERCVKHGFQNQVLRKGCERLGLQVESVPRNSPEDHYCGLCGYGCRAGAKNGTDQTWLVDAVENGAVILTGIKAERFVLVDNTSSSNERKKRCVGVFASSVGGKIGKKFIIEARVTVSSAGSLLTPPLMLSSGLKNPNIGRNLKLHPVLMTWGYFPEKDSEFSGKMYEGGIITSVHHMNDTESGCKAILENPLIGPASYAGLSPWVSGPDLKERMIKYGRTAHLFALVRDLGSGEVMMENEVTYRTTKKDRENLRAGLRQALRVSVAAGAVEVGTYRSDGQKMKCEAITKEAMEEFLDEVDAVGGVGTKGEYWTTYFSAHQMGSCRMGVTAEEGALDENGESWEAEGLFVCDGSILPSAVGVNPMITIQSTAYCISSKIVDSLQNKTKV

SEQ ID NO: 3292 - protein, 160 aa, Methanosarcina mazei Go1
MPKTSLESGQVSPDFCLPNQEGNQICLENFKGQWAVLFFYPRDNTPGCSLEARSFSDLKKDFEAENAIILGVSRDGKESHRKFIEKKELKITLLSDEKAEIHEKYDVMHPKNFRGNEVISTVRTTFLINPEGKIEKVWNNVKAAGHAEKVLSELKTLKGK

SEQ ID NO: 3293 - protein, 338 aa, Pectobacterium atrosepticum SCRI1043
MILNKVTDLIGNTPVIQIPVPYGDTRLFLKVEKNNPGGSMKDRMARNMIVAGLKSGKIRPGGTIVESSSGNTGIGLALASIEYGLRFIAVVDHHAAQDKIAIMRALGAEIRYVSGDYGEDEVAVVERQRMAAQLAEEIPGAVFMNQSDNAANAGGYADFVRELFSQIGKIDAFVGCVGTGGSMTGISHGLKVHNPDIATIAVEPVGSIVFGHPGKPYYQSGTGTPAGDTVGLVLDYSCIDCGEQVSDAQAFETARYVARNYGLLVGGSTGGVIYKALELIYQDRIGGNVVLAIADGGEKYLHTVFNEEWLAERNLTDSSVWHDLDRWLGNAISLEQAS

SEQ ID NO: 3294 - protein, 762 aa, Sulfolobus solfataricus P2
MTVYIGSSVKRVEDLRFLTGKGRYIDDIYLPNMQYMAVLRSNYAWAKFKLDPKRAEERGFNVITFEDTKEFSPLPNFFIPDPKRAPKEYILAKEEAKYFGEPIALVLGRDRYEVYDALELVDVDYEPIEPITDPFKAIEPNSLILHKELGSNIVYSDIFEYGEEPKDYHYVEKTFRYNRILPAPLETNGVIADFDKVSGNLTIYANTQVPQVFKTALSIIFNIPRSKVRIIVPDSGGGFGGKIFLKPLAMTALASILTGRPVKYIETRYEHVISAIHGPDRHYTAKILFKGDEILGAIVDLVEDFGAYLHTYQPLPILRQIYQLVGPYKMKYLKFRVSGVVTNKPPTGAYRGLGIPPAVLVLENLVKSISKVNGIDEIELRTKNFIDKLPYEHITGAIYDSGNYREALKKLISQLEVKDKDKYTGVGIAFALEPGSSLAFQTLVVNKPRTPYYEGVYMRIDSGGDVTVFLSTNTMGTGHETAISQVVADVLGIPIEDVKVILGDTAGPPGTGFYGSRFSVVGISAVYIASLKLKEKMREYLAKMFNVEKDDVKIDNGTVKIGNRSINVKEAVNMIYNRSYLIGDEIGLDVSVTINSYNVNIADEKRRVNFSTTYGVNAHGIVIRVDKDTGFIKILKYVILSDCGTMINPMIVDGQLMGGTTMGIGASLLEKVEYDENGIPKQTSFADYWIPSAEEVPNFEIQHMINPSPFTPLGTKGVAEGGATVPPAAIINALEDIVKKPINRVEIPITPEYVLQLINDMS

SEQ ID NO: 3295 - protein, 198 aa, Helicobacter pylori
MLVTKLAPDFKAPAVLGNNEVDEHFELSKNLGKNGAILFFWPKDFTFVCPTEIIAFDKRVKDFHEKGFNVIGVSIDSEQVHFAWKNTPVEKGGIGQVSFPMVADITKSISRDYDVLFEEAIALRGSFLIDKNMKVRHAVVNDLPLGRNADEMLRMVDALLHFEEHGEVCPAGWRKGDKGMKATHQGVAEYLKENSIKL

SEQ ID NO: 3296 - protein, 200 aa, Pseudomonas fluorescens Pf-5
MSVLVGKQAPDFTVPAVLGNGEIVDSFTLSSAIKGKYGLVFFYPLDFTFVCPSELIALDHRMADFKARNVEVIAVSIDSHFTHNAWRNTPINAGGIGQVQYIMAADMKHEIAKAYDVESEGGVAFRGAFLIDDKGVVRSQIVNDLPLGRNMEELIRLVDALQFHEEHGEVCPANWKKGDKGMTASPEGVAAYLSENAGKL

SEQ ID NO: 3297 - protein, 155 aa, Wolbachia pipientis
MELTVGNNAPDFSLPTDSGEILSLSEFFDKKNVVLYFYPKDDTPGCTMEAKGFRDNIENFSSFDTVIIGVSKDSVKCHANFKAKYSLPFSLVSDENAEMLEKYGVWVEKSMFGKKYMGIERTTFLIDKKGKVVKIWKNVKVSGHVDEVLEEVRRI

SEQ ID NO: 3298 - protein, 117 aa, Brassica napus
MPGLTIGDTVPNLELDSTHGKIRIHDYVGNGYVILFSHPGDFTPVCTTELAAMANYAKEFEKRGVKLLGISCDDVQSHKEWTKDIEAYKPGSRVTYPIMADPDRSAIKQLNMVDPDE

SEQ ID NO: 3299 - protein, 1423 aa, Arabidopsis thaliana
MNVDQCQWRKKMMGRGVDGGCGAEEKPYRPFRRVALDKENGYEDMGSLEIDFLAQASKNLSERSPFDVPEDGSTSVLSVPTLPIALANLLKNHSDNKKRHKKSHSGADKKKKKSSRQGDKLRSGSIWLEHEDYFRRLDFPDLETLSDLASLRSLSSRNCFSIPSVEYDSIDIQQRETDASAKNEDVVCGDGVVLEQIKNLLTKDISEGTVRKEEDVVKPMGVDNVGNGISSGSDYSGSLEWVLGNRNRILLTSERPSKKRKLLGSDAGLGKLMVAAPCEGNALLCDFCCTGHHQLIVCTSCKATVHKKCYGLLEDSGKPWLCSWCELENGRADSERPCLLCPKKGGILKPVLSKTENGGPAEFAHLFCSLWMPEVYIEDLKKMEPILNFPGIKETRRKLLCNLCKVKSGACIRCCNGTCRTSFHPICAREAGNRLEVWGKHGCDTHSDIQESGKSVEGGESNAAESRSPICHLPSESVGEGHLSNDEMGVDVGTPGTGSDISRNSDLQELESPHSKFNLSATDNVESGMTGRSNEDERTLSKSLSFGLILKKLIDLGKVDVKDVAAEIGINPDALRAKLTDGDLLPDLLGKVVKWLSQHAHMGSSDKGKNLKRKTTTKSERRAAICTEGIVMLDSDILDPAVAKAFSIERTHEINICNNTTNNTRCTLTENCTGNGIVVVEAKANGSVLKKEGSVSLAPDHSPEEKNSIVLDQKVHHGKSSVIPSVDDHGEQSNSSSSGVMMENAFSLRPNSSQNRGNLNCPNPIILDLFNQEAYPGFNPHRYIHKELSELGKEQTLKSSTDSDVARMTTNFDGSEEGNKHLQGAETFLQLSKARKLGILDLSPEDELEGELLYYQLQLLGTAVSRKQLSDNLVYEVAKKLPLEIDEQHGRRWDDVLVNKYFHDVREARKQGRKEQRNKQAQAVLAAATAAAATSSRNTSLRKDMSEEPAQQEMSTSRRKVVGSSHLVPQTKESLLKMAVSGPPSEKRSDHHTPDFLVENPRTCDICRRSETIWNLIVVCSSCKVAVHIDCYKCAKESTGPWYCELCAESSSEPSFNFGEKPNSSTECTLCGGTTGAFRKTTNGQWVHAFCAEWSLESTFRRGQINPVQGMESLAKKTDNCCVCQRIYGACTKCSYGNCQTTFHPSCARSAGFHMTGGGKHPHKAYCEKHSMEQKAKAESQKHGAEELKSLKHYRVGVLSEVELERLRLLCERIVKREKLKRELAISSHEILAAKRDHAARPLHVRNPFSPPEVSSDSATTSIKGHPDSNISGSEAIQRSDDITIDSTVTDKRRGKGPLLMDTDQKTDDSATSKSRFSRKLTERQILSGKTVPRKHCIVSPSVSEDGDNGSKPKKQHVETFAKELVMTSDEASFKNRRLPKGYFYVPVDCLQEDKPGNQKLASSDKPANQKTSSGDQSGKDDG

SEQ ID NO: 3300 - protein, 164 aa, Nocardioides sp. JS614
MKTRVTVNGEGYERDVEPRMLLSDFLRHELGLTGTNVGCEHGVCGSCTVLLDGEPVRSCTMLAVQCDSRRLTTVEGLACDEKLHGLQDAFSACHGLQCGFCTPGMLMTLLPIYNEARRLNDDEIREAISGNLCRCTGYQQIVEAARKALGEAADMADPCVESRA

SEQ ID NO: 3301 - protein, 405 aa, Dehalococcoides sp. BAV1
MAKKKLNIALVSLHSCPLGQPGGRDTGGMNVYICELARSLGNSGHQVDIYTRAHDPRDDVWEFLAPNVRLIHIQAGPVEDMGKLAQYEHLESFVCGLEAFRKAEGIKYDLIHSHYWLSARAGLALSKLWEVPHLVMFHTLGKVKNRLMQAQVDPQLRLDAEQNIVHETDLIIAATQNEKNDLISLYQAEPDKIRVIPCGVNTRLFSITDRAEAEAELGLSAAPKALFVGRLEKLKGLDNLLKAVSLIEADMELLVVGGDEYSQGERNRLEKVAEELAISDKVKFYGSVKQDVLAKYYNAAKACIIPSYYESFGMVILEAMACGTPVISGRVGVAPDIIRPGINGCLIPGNQPEQLALCLKEWLYQKIANHKAIRKIAEEYTWQSVSAQIESVYYGILDPETAGVL

SEQ ID NO: 3302 - protein, 385 aa, Carboxydothermus hydrogenoformans Z-2901
MKKKIKLLHLITLSEAGGAQKVLYHIVSGLNPEEYDITVMAAPGGELFSWLKDYPYIKLWPLPEMEREIVLTKDFKLLLKLIEIFKKEKFDIVHCHSTKAGILGRIAAFFGRVPVRIFTVHGWVFDLNQPLLKFLFYVWAERLAGLFGSMMVTVSREDYRKGLEYKITRKEKLTYIPNGLPEIITKKGKLRKALGISDEIKIVGTVLRLAPPKDLELLLKTAELVIKNWDRVVFVVVGDGPQKEWLRAEILKRGLSEKIHLLGHREDVYDLLGDFDVFTLFSRHEGLPVSILEAMAAGLPVVASKVGGIPELVYEGENGFLVDEGDGKKAFHAIISLLQDAELRFKMGKRSFFLYSENYTVEKMVSSYDCLYKKLLKDTEAVFDG

SEQ ID NO: 3303 - protein, 154 aa, Bordetella parapertussis 12822
MATLTINGKSQDVDAPDDMPLLWVIRDRLGMTGTKFGCGMALCGACTVHLDGQPVRSCITPVAAAAGKRIVTIEAVGEDEVGRAVQQAWTEIGVPQCGYCQSGQIMSATALIKSNPKPSDEDIDAAMSGNICRCGTYPRIRAAIKQVAVKGVAK

SEQ ID NO: 3304 - protein, 790 aa, Nocardioides sp. JS614
MSRPGASGGLGPSAKRYVGQPVRRREDARLLRGDARFVDDVDIHGQLYMSVVRSSEAHARIVSVEPSAARRAPGVRLVITADDIDAEVPLEQIGYHEVYPQIDDYLHPVFAGDRVRYVGQPVAAVIADTPYLAEDAAGLVEVTYDLLPPVLDPQYALTDEAEPLFEGQSNEAVRIVKAYGDVADAFKKAAHVVKGRYVVGRHSGVPMETRGCIAEPDRGRKQLFMWGPVHTHDCQRLIAQVLELPLADLRMKHVDIGGNFGVKGGVFPEYIMVGWAAMRLGRPVKWTEDRLEHMVANAHAREQVHEMAAAFDADGVLLALKDEIWHNHGAFIRQAEPLVSDITVGMVPGPYRVPAYDGLLHVVVSNKTPLSAYRAPGRYEGTFARERLLDLAAEQIGISQVEIRRRNLLTEADLPFAPGMDICFEPYHFDSGDVVDHLDKALESAGFDDWEREAAELRAQGRLVGNGIGMLMDKAGLGLYETSAIDVDASGRIRVRTGASSVGQGIETVLAQIVADELQVDPELIDVVHGDTELVPEGVGSWSSRSTVLAGGAARQAALDTLAKAKRLASEMLEANVDDLILVDGRIVVSGLEQQGLSLAEIAGRWDGWSARLANDEPGLGAQAVYLDEHMNYPYGVTLVQIEIDPATGGHTLRRFLTSTEAGRAINPMTTRGQVIGAAAQGIGGALYEEFLYDESGQPLATSFMDYLLPTSLDVPDVDFFMTEDAPTPNNPFGAKGLGEVGLIAVGAAIAGAIDDAFGEGVRTIKVPVPPETLWRRSHSIAFSDEPESM

SEQ ID NO: 3305 - protein, 762 aa, Oceanicola granulosus HTCC2516
MWKIGRSQVRVEDDRFLKGEGAYAADRPGAELQMVVVRSPVAAARLTEVDAGDAREMPGVVAVLTAREQAEDGLGAVVPRLSHPGPDGGDMAVPDVRPLATDLLQYVGHPVAVVLAETRAAAEDAAEAVLLEYEDRAAVVDPLAALAEDAPRVWPDLPDNRCFHVEKGDGAAVARAFAEAAHVTRARMRINRVTAVALEPRALVAEHDATTGYRLEVGSQTPHRVASDLAPILGVTPGDIRVVARDTGGSFGMKNAGYVEYALALWAARRTGRSVAWQATRTESFMSDAHARDQWADVALALDADFRILALDVHVTAGLGACMGPATTHPPVANLAGLAGVYGTPAIRAVVDGVFTNCQHVAPYRGAGRPEATYMIERILDIAAAETGQGRVALRRRNLIPADDLPHATPLGWVYDSGDFEGVLDEALAAADWDGFAARRAEAEVAGQLRGIGLSLPIEIAGGPVKAPHKEYAELSVGAQGSARLVVGTCSSGQGHETAFRQVVCDRLGIEAAAIEVVAGDTGAVAKGTGTFGSRSLTAAGTALWQAMDDAIARTRPVAAEMLGVGEAALVFEGAAFHAPDGRSASFLEAMAHGKVRVETQAHVGADGATFPNGCHVCEVAVDPETGRVRVERYTVVDDVGTVVNPLLVKGQIAGGVAQGIGQAVMEDVSFDAETGQLLSASFMDYALPRFDDIPGIAVLSHPVPTAANPLGAKGAGEAGTVGALAACINAVVDALSGRGIAHMDMPATPARVWARLREAEQ

SEQ ID NO: 3306 - protein, 195 aa, Heterosigma akashiwo
MTIKVGSIAPLFTATSVFEQEFSTTKLIDYREKKYVLLFFYPLDFTFVCPTEITAFSDRFEEFQALNTEILGVSIDSEYAHLAWTQTPRKAGGVGDLAYPLVSDVKREICLSYGVLNKDLVALRALFIIDKDGIIQHSTVNNLSFGRSVDEALRTLQAIQYIQSNPDEVCPVNWKPGEKTMKPDPTESKVFFDSV

SEQ ID NO: 3307 - protein, 196 aa, Chlamydophila abortus S26/3
MGSLFIGKTAPDFSVQAVVDGEVKNISLQDYRGKYVILFFYPKDFTYVCPTELHAFQDSLEEFENRGAQVIGCSVDDLDTHQRWLKTDKKAGGVKGITYPLISDTTHELSKLYNVLDSQSGLSFRGSFLIDKDGIIRHMVVNDLPLGRSIDEELRVLDALIFFENHGLVCPANWQQGQRAMAPNEEGLKEYFGTID

SEQ ID NO: 3308 - protein, 393 aa, Rhodococcus sp. RHA1
MTKALFITHTAAPSGAELATLRLAIALRDNGSGDTGRRVDVSVACAQGGPVVDRMREAGLETIILPNTFDSRAVTVRSRSLRRLILGFFGLAKIGWSAGATARATGATVLVAESTKALVIGAVAARRAGIPLVWQVHDRISAEYFGGLLASVVRGLGWVFSRGYIANSRSTMSTLFAWHRATLVAYPGVEPSRLPDHVSQRRPSETVVVAVGRLTPWKGQDVFLRALADTTVRPQCVYLVGGTFFGEEAFRESLERLGHELDLPVIFTGHVDHPDAYMRHADILVHCSVIPEPFGQVVVEGMNAGCAVIASGPGGPTEIVESGINGLLVDGGDQEQLTAALNTLIGDRELRRRLSAAGRRRATYFDIAESARDIASFLDTVSATPERKRAAHG

SEQ ID NO: 3309 - protein, 350 aa, Thiobacillus denitrificans ATCC 25259
MKIMIVTDAWSPQVNGVVRTLTTTRREMEAMGHEVDLLSPLEFRTLPCPTYPDIRLSLLPGRKVARRIREFAPDALHIATEGPLGWAARRFALRHRLPFTTAYHTRFPEYVKARTGIPLAWTYRFLRGFHAPARAVMTPTPAVKADLEAFGFDRVVLWSRGVDLDVFRLQTSHRLDTARPIFLYVGRVAVEKNVEAFLELDLPGSKWVVGDGPALPALRERYPDAYYLGVMKQPELAEVYAAADVFVFPSKTDTFGLVLLEAMACGLPVAAYPVSGPIDVLGDSGAGVMHEDLREACMAALNIERSTARAHAEKFSWRAATEQFVGHLHPARGEDRQPSARPVGATGTMD

SEQ ID NO: 3310 - protein, 154 aa, Silicibacter pomeroyi DSS-3
MATSLTVNGETHRVDLPDDVPLLWVLRDEIGLTGTKFGCGVAACGACTVHIDGEAVRSCQVALGDVWGQVTTIEGTGTPEALSVLQQAWVDHQVAQCGYCQSGQIMQAAALLAENPAPSDTEIDEAMQGNLCRCGTYPRIRAAIHGAAAKLKEV

SEQ ID NO: 3311 - protein, 161 aa, Pseudotsuga menziesii
MSIIPSFFGRRSSSAFDPFSLDVWDPFRAFTDLSGGGPSGQFVNEASAVANTQIDWKETPEAHIFKADLPGLKKEEVKIELEEGQRILQISGERSKEEEQKNDKWHRIERSRGKFLRRFRLPDNAKVEEIKAAMENGVLTVTVPKQPEPQPPQPKSIEISG

SEQ ID NO: 3312 - protein, 371 aa, Azotobacter vinelandii
MHIADMTMFYAPASGGVRTYLEAKHRRLRLYSGVRHSVLVPGAGYREQAGIYEVPAPLLPFAKGYRFPLRRAPWRQQLQHLQPDLIEVGDPYVTAWAALDAGRRLNIPVVGFYHSDLPRLAAKRVGAWCGERVNDYVAYLYGQFDRVLAPSRIMAEKLLRLGVREVFVQPLGVDLEVFQPMRRDPGLKRELGLSEETRLMIFAGRGAREKNLHILLEVARRLGAPYHLLLVGADMPRRVPDNVTVINDFQPAAAVARLMASSDVLLHAGDQETFGLVVLEAMACGIPVVAARAGALAEIVPFSAGRLCRPNDARAMASTVRELFEGDVARLGRQARQHVEAHHAWDAVVAGLLAHYHAVLGTAELPVAVNV

SEQ ID NO: 3313 - protein, 377 aa, Porphyra purpurea
MAFVSTASPAVVGRSPSPALCGARSTFATGAPVVAPSAPRAVAAGMSAAMMSAAAMNKKAPVADATGLIGNTPLVQLHKIPDAAGCVANIFAKLESMEPCSSVKDRIGRGMIMDAEAAGKITPGKTVLVEPTSGNTGIALAFIAASKGYKLILTMPDSMSIERRMVLRAFGAEVVLTPAAGGMKTAVSKAEAIAAETPDSYILQQFANPSNPKAHYETTGPEIANAIDCDVFVSGVGTGGTITGAGRYLKEKNPETRVVAVEPVESPVLSGGKPGPHKIQGIGAGFVPAILDTTVYDEVVTVTSAESITMARRIALEEGLLSGISTGAALAAALEVGKRPEMQGKNIVFIAPSFGERYLTSALFDEQREEAYAMKAE

SEQ ID NO: 3314 - protein, 165 aa, Zea mays
KGKYVVFFFYPLDFTFVCPTEIIAFSDRAEEFKKLNCQVIGASVDSHFCHLAWVNTPKKQGGLGPMNIPLVSDPKRTIAQDYGVLKADEGISFRGLFIIDDKGILRQITVNDLPVGRSVDETSRLVQAFQFTDKHGEVCPAGLIPGSDTIKPDVHKSKEYFSKQK

SEQ ID NO: 3315 - protein, 220 aa, Oryza sativa Japonica Group
MPGLTIGDTVPNLELDSTHGKIRIHDFVGDTYVILFSHPGDFTPVCTTELAAMAAYAKEFDKRGVKLLGISCDDVQSHKDWFKDIEAYKPGNRVTYPIMADPSREAIKQLNMVDPDEKDSNGGHLPSRALHIVGPDKKVKLSFLYPACVGRNMDEVVRAVDALQTAAKTRLATPVNWKPGEPFVIPPGVSDDEAKEKFPQGFDTADLPSGKGYLRFTKVG

SEQ ID NO: 3316 - protein, 273 aa, Arabidopsis thaliana
MSMASIASSSSTTLLSSSRVLLPSKSSLLSPTVSFPRIIPSSSASSSSLCSGFSSLGSLTTNRSASRRNFAVKAQADDLPLVGNKAPDFEAEAVFDQEFIKVKLSEYIGKKYVILFFYPLDFTFVCPTEITAFSDRYEEFEKLNTEVLGVSVDSVFSHLAWVQTDRKSGGLGDLNYPLVSDITKSISKSFGVLIPDQGIALRGLFIIDKEGVIQHSTINNLGIGRSVDETMRTLQALQYVQENPDEVCPAGWKPGEKSMKPDPKLSKEYFSAI

SEQ ID NO: 3317 - protein, 493 aa, Kluyveromyces lactis NRRL Y-1140
MGYDTRHDVIDLVGNTPLIRLQKLPKAIGIKPKVYAKLELYNPGGSIKDRIAKSMIEAAEEEGIIHPSRSTLIEPTSGNTGIGLALIGAIKGYRTIITLPEKMSNEKVSVLKALGAEIIRTPTAAAWDSPESHIGVALRLEKEIPGGIILDQYNNMKNPEAHYFGTGKEIHHQLEDLSLFSKLKAVVAGAGTGGTISGISKYIKEQNDKIAIVGADPVGSILAVPEKLNETDVTEYKVEGIGYDFVPKVLNRDSVDHWVKTDDKSSFKYARQLISNEGVLVGGSSGSAFTALVDYCNEHPELTEDDVIVVIFPDSVRSYLTKFVDDEWLKTNGLWDDAIATPIVQKETDVFEDATVKDLNLKPVVSVEEDASVATVIKILRDNSFDQLPVLTKDGKLCGLVTLSQLLKKLSTSKDVSSIKSLFFDFRKLNNFDDISSYNADKSHKKIFVRFDVNTTLSELNSFFEKNSAAIITEGLNPVHIVTKVDLLSYLAK

SEQ ID NO: 3318 - protein, 264 aa, Debaryomyces hansenii CBS767
MFSRQLLRSAALRHSIPTARGAVGQYARSGVQLGRTQLYSTFDAAEQPRIRIGSEAPNFVADTTEGKIDFHEYIGNQWIVLFSHPADFTPVCTTELGAFARLAPEFSERGAKLIGLSTEGVESHKAWIKDIEDVTSGGAKFTYPIIADADRKVAFLYDMCSASDFENIGKGMVPTVRSVFIIDPAKKVRLIMTYPASTGRNSSEVLRVLDALQLADKDGIATPIDWSVGEDVIIPPSVSDEDAKTKFGDFTMLKSYLRTTKSSS

SEQ ID NO: 3319 - protein, 792 aa, Silicibacter sp. TM1040
MPKDIEAKESGIGAATKRREDVRFLTGTGNYADDINVNGQAYVHFLRSDVAHGRITSLETAAAAAMPGVLRVFTGADFEGVGGLPCGWQVTDRFGEVMQEPAHPVLAQGKVRHVGDPIAAVVAESAELARDAAEAIELEIEELPAVIDMKAALAEEAPKVHDDLTSNLCYDWGFVEENKDAVAKAFDEAAHVTTLELVNNRLVANPMEPRVAVGDFNRATGESTLYTTSQNPHVIRLLMGAFVLGIPEHKLRVVAPDVGGGFGSKIFHYAEEAFCTFAAKALNRAVKWTSSRSEAFMSDAHGRDHVTKIELALDADNNFTALRTETYANMGAYLSTFAPSVPTWLHGTLMAGNYKTPLIYVNVKAVFTNTVPVDAYRGAGRPEATFQLERVIDKAARELDVDPVALRRQNFVTEFPYATPVAVEYDTGDYVATMDKLEEIADIAGFAARRAESEKSGKLRGLGVNCYIEACGIAPSNLVGQLGARAGLYESATVRVNATGGIVVMTGSHSHGQGHETSFPQVIAEMIGIPEDMVEIEHGDTNNAPMGMGTYGSRSLAVGGSAMVRATEKIISKAKKIAAHLMEASDADIELKDGRFSVAGTDKSVAWGDVTLAAYVPHNYPLEEIEPGLEETAFYDPANFTYPAGAYACEVEVDPETGKVTIERFAAADDFGNIVNPMIVDGQVHGGIGQGIGQALLEGCVYDEDGQLLSASFMDYAMPRADDVPFYQVDHSCQTPCTHNPLGVKGCGEAGAIGSPPAVVNAVVDALRSAGKDVTHIDMPLTPARVWAAMQG

SEQ ID NO: 3320 - protein, 161 aa, Silicibacter sp. TM1040
MTKVSMTVNGNPVSGNVEGRTLLVSFLRDQQGLTGTHVGCDTSQCGACVVHVDGKAVKSCTMLALEAEGAEVATIEGQAAPDGTLNAIQAAFQEHHGLQCGFCTPGMVMSAAALLKENPKPSEAEIRHYLEGNLCRCTGYHNIVKAIMAASGQDVSAIAAE

SEQ ID NO: 3321 - protein, 732 aa, Pseudomonas fluorescens PfO-1
MKFDTPATTNPIDQLNVIGKPTDRIEGPLKTSGQAPYAYEQHEAVKNQAYGVMVGSAIAKGRITRIDLDAARAAPGVLTIVTAANAGKLGKGQYNAAHLLAGPQVQHYHQAVALVVAETFEQARAAAQLVNVEYAADKGQFDLASVRDQGVEPKDDLPDVKHGDFASAFAAAPVQFDQTYTTPDQSHAMMEPHATLAAWKGDQVTLWTSNQMIAWSVGDIAATLGLPKENVRLISPYIGGGFGGKLFIRADAILAALGARLANRPVKVALARPQIANNTTHRPATIQRIRMGATADGKLTAIAHEGWSGNLADGKVEVAAQPSQLLYAAENRLVTMRLAPLDLPEGNAMRAPGETPGLMALEIAMDEMAEQLKLDPIQFRILNDTQVDPVKTERPFSQRRLIECLQTGAERFGWDKRNATPGSRREGRWLIGMGVAAAIRNNLLVKSGARVRLERDGKITVETDMTDIGTGSYTIIGQTAAEMMGVSLDDVVVRLGDSNFPVSAGSGGQFGANCSTAGVYAACMKLREAVAAKLGMNAGEAQFVDGLVRLGNQNVPLRDAAQHAAIEVEDSIEFADLAKQYQQSTFGAHFVEVAVDAATGEVRVRRMLAVCAAGRILNPKSARSQVIGAMTMGVGAALMEELAVDKRQGFFVNHDLAGYEVPVHADIPHQEVIFLDETDPISSPMKAKGVGELGICGVSAAVANAIYNATGARVREYPITLDKILDALPPMI

SEQ ID NO: 3322 - protein, 485 aa, Rhodobacter sphaeroides 2.4.1
MTEIAFILNGTPLSVAAEPTRTLLDFLREDRGLTGTKEGCNEGDCGACTVMVTDETGPRALNACLLFLPQLQGKEVRTVEGLAAPDGRLHPVQQALIDHHGSQCGFCTPGFVMSMAAAHATGCRDHDDTLAGNLCRCTGYAPIVRAARAAEEAPPPDWLPSFTLPQISSGGTVSGESPSPGGAAANARPAGGPGGADSPPAAGCRPTSLEELARLYEAHPEATLIAGATDVGLWVTKDLRDLSMPLFLGAIPELRRIEEAAGSLRVGAMVTISDLRAALAPRLPGLADLLRRFASVQIRNAATLGGNIANGSPIGDTPPALIALGATLHLRRGETRRDLPLEEFFLDYRKQDRRPGEFVEAVTIPTEAPGLRCYKLSKRFDQDISAVCGCFNISVEAGRVAAARLAFGGMAGIPKRAAAVEAALLGRPWTLATIEAARPAFAEDFTPLSDMRASAGYRLEAAAALLVRAFHDLQGHPVSVLEVEA

SEQ ID NO: 3323 - protein, 213 aa, Pseudomonas fluorescens PfO-1
MNDHPPLAISRRRFLILGAVTATAFAMPPFINLKAYAASLEQPAMAKVTIEVNGKPQTLEIDTRTTLLDALREHLQLTGSKKGCDHGQCGACTVIVDGRRINSCLTLAVMQDGAKVTTIEGLGMPDHLHPMQAAFIKHDGYQCGYCTPGQICSAVAVLQEIRDGIPSHASASLTEAPQLIASELQERMSGNICRCGAYSNIIEAISEVAEVPA

SEQ ID NO: 3324 - protein, 825 aa, Rhodobacter sphaeroides 2.4.1
MSLGRALPHDAAPLHVTGAARYVDDLPTPRGTLHLAFGLSPVAHGEILTLDLDPVRRMPGVVRVIGPGDLDPMPDCSPSAHDEPLLAVGRVQYVGQPLFLVVAESHRAARRAARAARPEIRPLPAILTVEEALAANARFEAGPVVWEKGRAAEAIATAPHRIEGTMEVGGQEHFYLEGQVALALPQEAGDMHVHSSTQHPTEIQHKVAHALGLPMSAVRVEVRRMGGGFGGKESQGNALAIACALAARATGRPCKMRYDRDDDMAITGKRHDLRIDYRAGFDDEGRLAGVEFRHLFRCGWSQDLSLPVADRAMLHADNAYHLPAVRIESHRLRTHTQSATAFRGFGGPQGMIGIERVMDHVAHAVGRDPLAVRQANFYAPMGQVGGGRAADPAGRPGALPPDPRDISARMKEEETEARARLGAEEVDLTSRGAEAMEHDLPPPAPEGVQTTPYHMPVEDFIGDALVAELAERADYARRRAEIGDWNRQSPILKRGIALTPVKFGISFTLSWLNQAGALVHIYQDGSVHLNHGGTEMGQGLFQKVAQVAAAELGLPVEAVKITPTDTGKVPNTSATAASSGSDLNGMAVRAACVTLRDRLAELVAERHQARAEEVRFEEGRVRVGGADLSFAEVAAMAYQARVPLSATGYYRTPKIVWDRLKGRGRPFFYFAYGAAVSEVAIDSLTGENRILRADILHDTGTSLNPALDLGQIEGGYVQGAGWLTTEELVWDAEGRLRTHAPSTYKIPACSDRPRIFNVALWNRPNPEETVGRSKAVGEPPFMLGISVLMALSEAVAACGDGSIYPALDAPATPERILAAVRRQRG

SEQ ID NO: 3325 - protein, 349 aa, Sulfolobus solfataricus P2
MDLLITNHRDLRHRKAGGAEQVIYEISRRLVKKGVSVTWLSEEIKGLPKEEEIENIRIIRRGNSITLHLYAPIEARRHEIVIDSVAHAVPFYSYLVNKNAIALVHHVHQDVVKYELNPIMARAVAFSERSVSNYKSIIAVSNTTKRDLVERLKAKEDRIEVIHNGIDHNIYRPGKKASEPTILWIGRLKKYKNPLDAIDVAKRVKAKLVMAGGGDLENEVVQKIKTINGEYLGRVSEEDKIRLYQSAWIVIVTSFIEGWSMVTVEANACGTPVIAYNKGSLPEIIKNGVNGYIVNYKDIEAMSKIINELIEDEKRIKELWKSSYEESLNYDWDKSSEKYYNYLIRKALD

SEQ ID NO: 3326 - protein, 201 aa, Colwellia psychrerythraea 34H
MSVLVGRQAPDFTAAAVLGSGEIVDSFTLSEAINGKKAVVFFYPLDFTFVCPSELLAFDHRMEEFKSRGVEVIGVSIDSQFSHNAWRNTPVNDGGIGPVQYTLVADTKHEICKAYDVEHPEAGVAFRGSFLIDEEGNVRHQVINDLPLGRDVDEMIRMVDALQFHQDHGEVCPAGWNKGDKGMTASPEGVASYLTDNADKL

SEQ ID NO: 3327 - protein, 320 aa, Vitis vinifera
MAILSTDSTNWGLSLKVLLISTGVVSMAVALKISVPVVVEFAVSEVPSIWSFVLSWLRPPYLYLVINFIIIIIVASSKLQHKVEEPPETAEITISSAVAMDYAVPYNGVVSKNVVELRPEFGYVYDANAVVEARAPDAKTEMKGLEMNDSDEFTISRSSWTPERKDSMENMIPAEKPLVSMRFGHRRAVKSSPEAGKVLGVSKPKRHDTLESTWKTITDGRPMPLTRHLKKADSLESQRCSIDLTPQKVKKSETFTDRSSTNSSVASSPGSGKMKREPSLSQDELNRRVEAFIKKFNEEMRLQRQESLNQYNEMIRRGAR

SEQ ID NO: 3328 - protein, 296 aa, Chromobacterium violaceum ATCC 12472
MYKHLEDFVGGTPLVRLKRLPGDNGNVVLLKLEGNNPAGSVKDRPALSMIRRAEARGDIRPGDTLIEPTSGNTGIALAMAAAMMGYRMVLIMPENSSAERVQAMRAYGAEVILTPAAGSMPAAIDLARSMEAAGEGRILDQFSNPDNPQAHYEGTGPEIWAETEGRITHFVSSMGTTGTIMGTGRFLKEKNPAIRIVGVHPEPGSQIAGIRKWEDPYVPKICDFSRIDEILHVGQKEAEDTARLLARREGILAGPSSGGALAVALRLDAQLRDAVIVSVVCDRGDRYLSTGLFDPA

SEQ ID NO: 3329 - protein, 638 aa, Bradyrhizobium sp. BTAi1
MDAAPASSRRFSVLHVFKVFYPDLFGGTLTVIRDICAGLAHAVASSVLVCSDAPRPRHEIVNGIPVERVRSLGNLFSLPIAPTYPFRLWRRIAAYDLVALHAPFPLADLVFACGLGRARPLVVHWHADIVSHGRLRWLVEPLMRRTLQRAEAIIVSDAALATRTALLRDVANKCHVVPFGVDLRKFAALENSERPGSAGRRVVACGRLVPYKGFDVLIRAAADHDFEVRIIGEGRERAHLQQLIDGFGIADRVRLLGSLCDDEMVAEIGAADVFVMPSVTNAETFGLVQLEAMAAGRPIVNTALDTGVPRVARDGREAVTVPPSDAVALAGAINALLADPARRRRMGDAARQRAATHFATAAFDQGIERIYRRAVAAHAAAHRASEQGVGLLDSVRIAAALAWSDLRHRYVRSLLGPFWMSIQMAIMVAVLGSVISHFGPAGGLSRLPMLALSLTAWTFLNGVVLDATTALQASASLIKDRALPPVVFLLQCCFRQGLFALHNACVPLALWLAIDPMDVGGVFAALPGVLLFIAFTFAASLVLGALATRFRDLKPIIESCLTLAFLASPVIWSPEMIDRGSFIMRVNPLTHLFAIWREPLATGQVPMSSVLYVVMSLSVLVVASLVTLSRLRKAAFWI

SEQ ID NO: 3330 - protein, 440 aa, Triticum aestivum
MAIGADGLEEAPPLLLLDGDEAAYPRPRRVALFIEPSPFAYISGYKNRFQNFIKHLREMGDEVIVVTNHEGVPQEFHGAKVIGSWSFPCPLYGKVPLSLALSPRIISEVAKFKPDIIHASSPGIMVFGALAIAKLLSVPLVMSYHTHVPVYIPRYTFSWLVEPMWQIIRFLHRAADLTLVPSAAISKDFETAHVISANRIRLWNKGVDSASFHPRFRSHEMRVRLSDGEPEKPLIIHVGRFGREKNLDFLKMVMDRLPGVRIAFIGDGPYRTELEKMFEGMPAVFTGMMQGEELSQAYASGDVFVMPSESETLGQVVLESMSSGVPVVAVRAGGIPDIIPEDVEGRTSFLFAPGDLDDCVGKIRLLLTDDEFRGEMGRTARAEMEKCDWRAASKTIRNEFYSSAIDYWRKKQAEMVQPLQWLAQMFMPAPNRVIGGGIKQ

SEQ ID NO: 3331 - protein, 164 aa, Bradyrhizobium sp. ORS278
MNWTVRLTVNGEPRTLALDDPRVTLLDLLRERLHLSGTKKGCDRGQCGACTVLVDGRRINSCLTLALSLDGAAITTIEGLANGDQLHPVQEAFIAHDALQCGFCTPGQIMSAVGLITEGHAGDDPERVREGMSGNLCRCSAYVGIVEAVLDAQKTLTENKERAA

SEQ ID NO: 3332 - protein, 154 aa, Bacillus cereus ATCC 14579
MITMITVGEMAPEFTLEGSNGEEVRLADFRGKNVVLYFYPKDMTPGCTTEACDFRDAYGVFQEKDTVILGVSPDSANRHLKFIEKHELPFTLLVDEDHKVAELYDVWKLKKNFGKEYMGIERSTFLINKDGELVKEWRKVKVKGHIEDVLSYIK

SEQ ID NO: 3333 - protein, 378 aa, Moorella thermoacetica ATCC 39073
MTNTKGRVLYLATVYTHLAAFHLPFMQLLHGKGYEVHAAASSDQGRKKEVEAIGVRCWEIPFSRSPYSLKNWRAFRELGRLLEYYRFDLIHVHTPVASFLGRYLARATGQRPVLYTAHGFHFYQGASLRNWLLYYPAERLAARWTDGLIVMNREDYDSAIKMGFRPGENLFYVHGVGVDVDKFNSIVSSRSLRDKLGLKADDIVITCIAELIPRKNHLFLLKAWSRLTKKICSAHLLLVGDGVLRQALECWVNGKSVSRVHFLGFRRDIPQLVQEANIVVLVSRHEGLPRSLMEAMAAGKPVVASNVRGNRDLVDHGRTGFLVELGDVEGLAGYLELLARDENLRLALGRAGREKIGDYSLDKVLAEMDAVYSRYLPS

SEQ ID NO: 3334 - protein, 361 aa, Symbiobacterium thermophilum IAM 14863
MRILYVITLAEKGGAQVHLLDLLRNFSRTAEVHLAVGERGFLTDEAARLGIPIHLIEGLVRPVNPAKDFLAARALVRLLRRIRPDLLHAHSSKAGQVGRLAARLAGVPAVYTVHGWAFADGVPLWRRCVALPAERLAAHWSRYMITVSDADRLLASRYRFPTDRMFVVHNGVPDVVQRAQVGRADLPPHIVMVARFAPQKDQALLLKALSRVNVPFTLSFVGEGETQREHRQLAHQLGMMDRVRFLGSRHDIADILADAQIFVLTSNWEGFPITILEAMRAGLPVIASDVGGVREAVLHGRTGYLVARGDVDALQRYLTTLLTDPQLREKLGNEARKTYEQRFTLDRMLDQTRRIYELIIS

SEQ ID NO: 3335 - protein, 754 aa, Bradyrhizobium sp. ORS278
MTPELNLSRDPAHLRHGSNIGQPLSRVDGLAKVTGRATYAADNNPPGLLYAVLAVSSIARGRVTALDVEAAKAHPGIVEVMTSANRPPLHADPDGKPNPFAFRFEALQTDRVRYANQPIAVVIAESLEAATEGAALLAPRYEVEPARIGLDADAVYVPPAVGMGSPAEERHGDVEAALAGSDKQLTAIYETPPHYHNAMEPHAIVAEWQGDKLVIDTPTQGLVMMRARLAELFGIAPENILIRSPFLGGGFGGKGLMAGPQVLGILAAKMVGRPVKLVARREQLYGPFGHRSPTRQTLRLGASAAGQLSGIHHHARIATSSFEDFYESAAHVTHTLYAVPAIATTYDAVRMDTGTPLFVRAPGIAPGSIALESAVDEMAEACGLDPLAFRVKNYAEVEPSTGKPFSSKALRECYTQGAERFGWWDRPLKPRMMRDKDGFLVGWGMGTATFHALMFAGQARAVIRRDGSGVVESGAHDMGQGAWTAFAQIAADSLALARDQVTFKAGTSDLPDAGIAGGSAHTATVGTAIHNAGAAVIAELAELATSDQRSPLFGAGNAGVIARNGRLVRRDDEGRGESYADILARAGLDEVEGSGSGVPDPAANEQYAMHSHGAVFAEVKVDPDLGQVRVTRMVGAFAAGRIINPKLVKSQLVGGMIWGISLALHEEAITDRRSGRIMNANLGEYHVPVNADVPAIDAFTVEEHDPFVNPLGIKGVGEIGITGSAGAVANAVAHATGIRVRRFPVRISDLVRRS

SEQ ID NO: 3336 - protein, 187 aa, Geobacillus kaustophilus HTA426
MSLVGKKVQPFRAQAYHNGEFIEVTEQDFMGKWSIVCFYPADFTFVCPTELEDLQDHYATFKELGVEVYSVSTDTHFTHKAWHDTSPAISKIEYVMIGDPSHQLSRMFDVLDEEQGLAQRGTFIIDPDGVIQAVEINADGIGRNASTLIDKIKAAQYVRNHPGEVCPAKWKEGAETLKPSLDLVGKI

SEQ ID NO: 3337 - protein, 696 aa, Mycobacterium sp. JLS
MTLLDPQAIGAPMARLDGRAKVTGAAPYAFEQRVDDPAYLHPIQSTIARGRVTAVDTDAARAVDGVLDVLTVFDAPELADTSDGELSILQDDRVHFRGQIIGGVVAETAEIARHAAALVQVSYAEEPHHVELTADHPGLYTPEQVNPSYPSDTDEGDVEAALASAEVTVDKTYSTPIEHNNPMEPHACIAIWTADGVTMYDSTQGVHAARKALAPLFGLEPDQMRVIAPHVGGGFGSKGAPHAHDVLALLAAQRSGGRPVKLALTRQQMFALVGYRTPTIQRIRLGANQDGTLTALAHEVVEQTSAVKEYAEQTAVTSRKMYAAPNRRTAHQLASLDVPVPFWFRAPGECPGTYAAEVAMDELAVACGVDPIELRVRNDPEVDPETGNPWSGRHLVECLRLGAERFGWSSRDPVPAQRVSGDWYVGLGVASATYPAMQMPGNSARITYADEGRYLVQIGAADIGTGTWTTLTQIAADALGCDVAAVDLEIGDSALPEASVAGGSSGINSWGRAIVTAARQFRRDHGDPPAIGATTVAEAPENPESEKFTMQSFGAHFVEARVNRDTGEIRVPRMLGVFSIGRAINARTLRSQLIGGMTMGLSMALHEESVRDPRFGHVVTQDFATYHISAHADVADIDAVWLDEADEHANPMGSRGAGEIGIVGSAAAVVNAVYNATGVRVRDLPVTLDKVLPGLP

SEQ ID NO: 3338 - protein, 145 aa, Zea mays
AETNDVHGSLVDNPLALAGDDPSLQIFLPSQPSTVPLQEELSERANTPNGVHPDDWRISLTLAAGGGGNEEPTSVDGLKSQPKVPSKEAGVEPLLDAASALPSMNNDRCNGSNLNPRRIENIFSHPRQPRSVRPRLCLSLDSDSE

SEQ ID NO: 3339 - protein, 153 aa, Thermoplasma acidophilum DSM 1728
MELLNVGDIAPDFETVDQYGKTVKLSSYRGKPVVLYFYPKDNTPGCTTEACNFRDNFNSFKDSGVEVIGVSVDSPESHKKFAEKYNLNFTLASDKSKDIVKKYGVLGLATAKRVTYIIDPDGKIAYVYPKVTPKDHALEVMNKLKDLGLVKNN

SEQ ID NO: 3340 - protein, 365 aa, Dianthus caryophyllus
MVAEKPKTLTSLEGDDKLNSNFVRDEDERPKVAYNEFSNDIPVISLAGIDGEKRGEICRKIVEACEDWGIFQVVDHGVGDDLIADMTRLAREFFALPAEEKLRFDMSGGKKGGFIVSSHLQGEVVQDWREIVTYFSYPTNSRDYTRWPDKPEGWIKVTEEYSNKLMTLACTLLGVLSEAMGLELEALTKACVDMDQKIVVNYYPKCPQPDLTLGLKRHTDPGTITLLLQDQVGGLQATRDGGKTWITVQPVPGAFVVNLGDHGHFLSNGRFKNADHQAVVNSECSRLSIATFQNPSPDATVYPLAIREGENSIMEEPITFADLYRRKMAKDLEIARHKRLAKEEMPFKELDEAKFESKSIDQILA

SEQ ID NO: 3341 - protein, 775 aa, Physcomitrella patens subsp. patens
MDAPENDLCRAGQSPPGHPLLKSWNPPTQHSFTKAQLRTLISICDAFSPSLSPPAECEEKQEIASFYTCSASDMGVPEDIAGLLHVLLKPQLLMAIRVFLWLLSTRIGTLILGGRASLTTQFPFFQSFAYLSTDKQEDILRGWSLSTLGAFRAVYKLFKMITMWAVYTKIENGGFNRNWKAIGYCGADPQVIRSRKCSSNDGVRSNPLQDMVIATQAAGDKLEKVLSRAGVKVLNDDIPLKKLASGNRNRNNSAAGGDLGISCDVVVVGSGCGGGVIASVLAKAGYQVVILEKGKYFRTEDLTTLEGPSQMAMFEKLGSLATDDGGVNLVAGATVGGGTAINWSACFETPSHVLQEWKQISGLELFTSTRYKLAMKKIWHRLNVQPNIARENLQNSVLRAGCEKLSAEVGTLARNAPVDHDCGWCTYGCPSGQKGSTTSTWLKDAAESKNAVLLSECEAQRILFSKNHSGRKHYKARGVMAVVGSSKKRIFIEAQSVVVASGSLMTPPLLLNSGLRNPNIGKGLHLHPVVFMWGYFPEESGFPGTCYEGAIMTSYSPIYKKNGSFPVALLEVPSTHPGSFASFQPWTSAADFKERMRRFSRTVTLCAVTRDTSNGQVSVEADGKPKIDYTLNAVDEETILEGIEKGLRVLIAAGATEIGTHQQDGERFCVKGANSRDIEAYIKRVRSRGVKKNKIIIGSGHHMGSCKMGSDPRRSAVDGEGETWEVEGLYVSDGSVLPSAIGVNPMVTIQSVAYCIAHSVLQSLDSQYKSSTAKL

SEQ ID NO: 3342 - protein, 173 aa, Mycobacterium sp. JLS
MTQPTGHREVTLEVDGRPHTLHLDNRVTLLDALREHLGVTAPKKGCDHGQCGSCTVLRDGRRVTTCLTFAVAADGAHITTAAGLGDGDDLHPVAQAFYDEDGFQCGYCTPGQICSAVGMLDEVKSGAPSFVSDDLEAVPELTDDEIRERMSGNLCRCAAYPNIVAAIERAAVQ

(The sequence listing continues in the following parts.)
